United States Patent Application Publication US 2023/0330270 A1 - sequence listing, part 3

SEQ ID NO: 19072 - DNA, 20 bp, synthetic construct
  misc_feature 1..20: note = Description of Artificial Sequence: Synthetic oligonucleotide
  misc_feature 1..20: note = Target: FXN; (+) strand; PAM type: NRG; PAM sequence: TAG
  source 1..20: mol_type = other DNA
acaaaaccttctgctcccag

SEQ ID NO: 19073 - DNA, 20 bp, synthetic construct
  misc_feature 1..20: note = Description of Artificial Sequence: Synthetic oligonucleotide
  misc_feature 1..20: note = Target: FXN; (+) strand; PAM type: NRG; PAM sequence: TGG
  source 1..20: mol_type = other DNA
aaaccttctgctcccagtag

SEQ ID NO: 19074 - DNA, 20 bp, synthetic construct
  misc_feature 1..20: note = Description of Artificial Sequence: Synthetic oligonucleotide
  misc_feature 1..20: note = Target: FXN; (+) strand; PAM type: NRG; PAM sequence: GGG
  source 1..20: mol_type = other DNA
aaccttctgctcccagtagt

SEQ ID NO: 19075 - DNA, 20 bp, synthetic construct
  misc_feature 1..20: note = Description of Artificial Sequence: Synthetic oligonucleotide
  misc_feature 1..20: note = Target: FXN; (+) strand; PAM type: NRG; PAM sequence: CAG
  source 1..20: mol_type = other DNA
ttctgctcccagtagtgggt

SEQ ID NO: 19076 - DNA, 20 bp, synthetic construct
  misc_feature 1..20: note = Description of Artificial Sequence: Synthetic oligonucleotide
  misc_feature 1..20: note = Target: FXN; (+) strand; PAM type: NRG; PAM sequence: GAG
  source 1..20: mol_type = other DNA
ctgctcccagtagtgggtca

SEQ ID NO: 19077 - DNA, 20 bp, synthetic construct
  misc_feature 1..20: note = Description of Artificial Sequence: Synthetic oligonucleotide
  misc_feature 1..20: note = Target: FXN; (+) strand; PAM type: NRG; PAM sequence: GAG
  source 1..20: mol_type = other DNA
accttcctgattcctgccct

SEQ ID NO: 19078 - DNA, 20 bp, synthetic construct
  misc_feature 1..20: note = Description of Artificial Sequence: Synthetic oligonucleotide
  misc_feature 1..20: note = Target: FXN; (+) strand; PAM type: NRG; PAM sequence: AAG
  source 1..20: mol_type = other DNA
gccctgagattgtctctctg

SEQ ID NO: 19079 - DNA, 20 bp, synthetic construct
  misc_feature 1..20: note = Description of Artificial Sequence: Synthetic oligonucleotide
  misc_feature 1..20: note = Target: FXN; (+) strand; PAM type: NRG; PAM sequence: TAG
  source 1..20: mol_type = other DNA
tgtctctctgaagacaacat

SEQ ID NO: 19080 - DNA, 20 bp, synthetic construct
  misc_feature 1..20: note = Description of Artificial Sequence: Synthetic oligonucleotide
  misc_feature 1..20: note = Target: FXN; (+) strand; PAM type: NRG; PAM sequence: AGG
  source 1..20: mol_type = other DNA
gtctctctgaagacaacatt

SEQ ID NO: 19081 - DNA, 20 bp, synthetic construct
  misc_feature 1..20: note = Description of Artificial Sequence: Synthetic oligonucleotide
  misc_feature 1..20: note = Target: FXN; (+) strand; PAM type: NRG; PAM sequence: TAG
  source 1..20: mol_type = other DNA
ctctgaagacaacattaggc

SEQ ID NO: 19082 - DNA, 20 bp, synthetic construct
  misc_feature 1..20: note = Description of Artificial Sequence: Synthetic oligonucleotide
  misc_feature 1..20: note = Target: FXN; (+) strand; PAM type: NRG; PAM sequence: TAG
  source 1..20: mol_type = other DNA
tgaagacaacattaggctag

SEQ ID NO: 19083 - DNA, 20 bp, synthetic construct
  misc_feature 1..20: note = Description of Artificial Sequence: Synthetic oligonucleotide
  misc_feature 1..20: note = Target: FXN; (+) strand; PAM type: NRG; PAM sequence: AGG
  source 1..20: mol_type = other DNA
gaagacaacattaggctagt

SEQ ID NO: 19084 - DNA, 20 bp, synthetic construct
  misc_feature 1..20: note = Description of Artificial Sequence: Synthetic oligonucleotide
  misc_feature 1..20: note = Target: FXN; (+) strand; PAM type: NRG; PAM sequence: CAG
  source 1..20: mol_type = other DNA
cattaggctagtaggctttc

SEQ ID NO: 19085 - DNA, 20 bp, synthetic construct
  misc_feature 1..20: note = Description of Artificial Sequence: Synthetic oligonucleotide
  misc_feature 1..20: note = Target: FXN; (+) strand; PAM type: NRG; PAM sequence: AAG
  source 1..20: mol_type = other DNA
ttctgtaacccattctttca

SEQ ID NO: 19086 - DNA, 20 bp, synthetic construct
  misc_feature 1..20: note = Description of Artificial Sequence: Synthetic oligonucleotide
  misc_feature 1..20: note = Target: FXN; (+) strand; PAM type: NRG; PAM sequence: AGG
  source 1..20: mol_type = other DNA
tctgtaacccattctttcaa

SEQ ID NO: 19087 - DNA, 20 bp, synthetic construct
  misc_feature 1..20: note = Description of Artificial Sequence: Synthetic oligonucleotide
  misc_feature 1..20: note = Target: FXN; (+) strand; PAM type: NRG; PAM sequence: AAG
  source 1..20: mol_type = other DNA
gtaacccattctttcaaagg

SEQ ID NO: 19088 - DNA, 20 bp, synthetic construct
  misc_feature 1..20: note = Description of Artificial Sequence: Synthetic oligonucleotide
  misc_feature 1..20: note = Target: FXN; (+) strand; PAM type: NRG; PAM sequence: GAG
  source 1..20: mol_type = other DNA
aacccattctttcaaaggaa

SEQ ID NO: 19089 - DNA, 20 bp, synthetic construct
  misc_feature 1..20: note = Description of Artificial Sequence: Synthetic oligonucleotide
  misc_feature 1..20: note = Target: FXN; (+) strand; PAM type: NRG; PAM sequence: TAG
  source 1..20: mol_type = other DNA
aagagatgcctatatttttc

SEQ ID NO: 19090 - DNA, 20 bp, synthetic construct
  misc_feature 1..20: note = Description of Artificial Sequence: Synthetic oligonucleotide
  misc_feature 1..20: note = Target: FXN; (+) strand; PAM type: NRG; PAM sequence: GAG
  source 1..20: mol_type = other DNA
ctagccaattcatatacctt

SEQ ID NO: 19091 - DNA, 20 bp, synthetic construct
  misc_feature 1..20: note = Description of Artificial Sequence: Synthetic oligonucleotide
  misc_feature 1..20: note = Target: FXN; (+) strand; PAM type: NRG; PAM sequence: AAG
  source 1..20: mol_type = other DNA
atataccttgagtatcactc

SEQ ID NO: 19092 - DNA, 20 bp, synthetic construct
  misc_feature 1..20: note = Description of Artificial Sequence: Synthetic oligonucleotide
  misc_feature 1..20: note = Target: FXN; (+) strand; PAM type: NRG; PAM sequence: AGG
  source 1..20: mol_type = other DNA
tataccttgagtatcactca

SEQ ID NO: 19093 - DNA, 20 bp, synthetic construct
  misc_feature 1..20: note = Description of Artificial Sequence: Synthetic oligonucleotide
  misc_feature 1..20: note = Target: FXN; (+) strand; PAM type: NRG; PAM sequence: GGG
  source 1..20: mol_type = other DNA
ataccttgagtatcactcaa

SEQ ID NO: 19094 - DNA, 20 bp, synthetic construct
  misc_feature 1..20: note = Description of Artificial Sequence: Synthetic oligonucleotide
  misc_feature 1..20: note = Target: FXN; (+) strand; PAM type: NRG; PAM sequence: TAG
  source 1..20: mol_type = other DNA
ctaacaaatcatttactaat

SEQ ID NO: 19095 - DNA, 20 bp, synthetic construct
  misc_feature 1..20: note = Description of Artificial Sequence: Synthetic oligonucleotide
  misc_feature 1..20: note = Target: FXN; (+) strand; PAM type: NRG; PAM sequence: AAG
  source 1..20: mol_type = other DNA
ttactaattagcaaatgctt

SEQ ID NO: 19096 - DNA, 20 bp, synthetic construct
  misc_feature 1..20: note = Description of Artificial Sequence: Synthetic oligonucleotide
  misc_feature 1..20: note = Target: FXN; (+) strand; PAM type: NRG; PAM sequence: TAG
  source 1..20: mol_type = other DNA
aattagcaaatgcttaagtg

SEQ ID NO: 19097 - DNA, 20 bp, synthetic construct
  misc_feature 1..20: note = Description of Artificial Sequence: Synthetic oligonucleotide
  misc_feature 1..20: note = Target: FXN; (+) strand; PAM type: NRG; PAM sequence: TAG
  source 1..20: mol_type = other DNA
caaatgcttaagtgtagatt

SEQ ID NO: 19098 - DNA, 20 bp, synthetic construct
  misc_feature 1..20: note = Description of Artificial Sequence: Synthetic oligonucleotide
  misc_feature 1..20: note = Target: FXN; (+) strand; PAM type: NRG; PAM sequence: AAG
  source 1..20: mol_type = other DNA
tgcttaagtgtagatttaga

SEQ ID NO: 19099 - DNA, 20 bp, synthetic construct
  misc_feature 1..20: note = Description of Artificial Sequence: Synthetic oligonucleotide
  misc_feature 1..20: note = Target: FXN; (+) strand; PAM type: NRG; PAM sequence: AAG
  source 1..20: mol_type = other DNA
agtgtagatttagaaagcta

SEQ ID NO: 19100 - DNA, 20 bp, synthetic construct
  misc_feature 1..20: note = Description of Artificial Sequence: Synthetic oligonucleotide
  misc_feature 1..20: note = Target: FXN; (+) strand; PAM type: NRG; PAM sequence: CAG
  source 1..20: mol_type = other DNA
tttagaaagctaaagctata

SEQ ID NO: 19101 - DNA, 20 bp, synthetic construct
  misc_feature 1..20: note = Description of Artificial Sequence: Synthetic oligonucleotide
  misc_feature 1..20: note = Target: FXN; (+) strand; PAM type: NRG; PAM sequence: TGG
  source 1..20: mol_type = other DNA
agaaagctaaagctatacag

SEQ ID NO: 19102 - DNA, 20 bp, synthetic construct
  misc_feature 1..20: note = Description of Artificial Sequence: Synthetic oligonucleotide
  misc_feature 1..20: note = Target: FXN; (+) strand; PAM type: NRG; PAM sequence: TAG
  source 1..20: mol_type = other DNA
tatacagtggctgccatcta

SEQ ID NO: 19103 - DNA, 20 bp, synthetic construct
  misc_feature 1..20: note = Description of Artificial Sequence: Synthetic oligonucleotide
  misc_feature 1..20: note = Target: FXN; (+) strand; PAM type: NRG; PAM sequence: TGG
  source 1..20: mol_type = other DNA
agtggctgccatctatagtt

SEQ ID NO: 19104 - DNA, 20 bp, synthetic construct
  misc_feature 1..20: note = Description of Artificial Sequence: Synthetic oligonucleotide
  misc_feature 1..20: note = Target: FXN; (+) strand; PAM type: NRG; PAM sequence: TAG
  source 1..20: mol_type = other DNA
gaaatgctaactctgtaccc

SEQ ID NO: 19105 - DNA, 20 bp, synthetic construct
  misc_feature 1..20: note = Description of Artificial Sequence: Synthetic oligonucleotide
  misc_feature 1..20: note = Target: FXN; (+) strand; PAM type: NRG; PAM sequence: GAG
  source 1..20: mol_type = other DNA
aatgctaactctgtacccta

SEQ ID NO: 19106 - DNA, 20 bp, synthetic construct
  misc_feature 1..20: note = Description of Artificial Sequence: Synthetic oligonucleotide
  misc_feature 1..20: note = Target: FXN; (+) strand; PAM type: NRG; PAM sequence: TAG
  source 1..20: mol_type = other DNA
ctagagtatgaattcctgat

SEQ ID NO: 19107 - DNA, 20 bp, synthetic construct
  misc_feature 1..20: note = Description of Artificial Sequence: Synthetic oligonucleotide
  misc_feature 1..20: note = Target: FXN; (+) strand; PAM type: NRG; PAM sequence: GAG
  source 1..20: mol_type = other DNA
agagtatgaattcctgatta

SEQ ID NO: 19108 - DNA, 20 bp, synthetic construct
  misc_feature 1..20: note = Description of Artificial Sequence: Synthetic oligonucleotide
  misc_feature 1..20: note = Target: FXN; (+) strand; PAM type: NRG; PAM sequence: CAG
  source 1..20: mol_type = other DNA
aattcctgattagagtcctt

SEQ ID NO: 19109 - DNA, 20 bp, synthetic construct
  misc_feature 1..20: note = Description of Artificial Sequence: Synthetic oligonucleotide
  misc_feature 1..20: note = Target: FXN; (+) strand; PAM type: NRG; PAM sequence: AGG
  source 1..20: mol_type = other DNA
attcctgattagagtccttc

SEQ ID NO: 19110 - DNA, 20 bp, synthetic construct
  misc_feature 1..20: note = Description of Artificial Sequence: Synthetic oligonucleotide
  misc_feature 1..20: note = Target: FXN; (+) strand; PAM type: NRG; PAM sequence: GAG
  source 1..20: mol_type = other DNA
gtttgataatattattactt

SEQ ID NO: 19111 - DNA, 20 bp, synthetic construct
  misc_feature 1..20: note = Description of Artificial Sequence: Synthetic oligonucleotide
  misc_feature 1..20: note = Target: FXN; (+) strand; PAM type: NRG; PAM sequence: TGG
  source 1..20: mol_type = other DNA
atattattacttgagctttg

SEQ ID NO: 19112 - DNA, 20 bp, synthetic construct
  misc_feature 1..20: note = Description of Artificial Sequence: Synthetic oligonucleotide
  misc_feature 1..20: note = Target: FXN; (+) strand; PAM type: NRG; PAM sequence: GGG
  source 1..20: mol_type = other DNA
tattattacttgagctttgt

SEQ ID NO: 19113 - DNA, 20 bp, synthetic construct
  misc_feature 1..20: note = Description of Artificial Sequence: Synthetic oligonucleotide
  misc_feature 1..20: note = Target: FXN; (+) strand; PAM type: NRG; PAM sequence: GAG
  source 1..20: mol_type = other DNA
ttattacttgagctttgtgg

SEQ ID NO: 19114 - DNA, 20 bp, synthetic construct
  misc_feature 1..20: note = Description of Artificial Sequence: Synthetic oligonucleotide
  misc_feature 1..20: note = Target: FXN; (+) strand; PAM type: NRG; PAM sequence: GAG
  source 1..20: mol_type = other DNA
attacttgagctttgtggga

SEQ ID NO: 19115 - DNA, 20 bp, synthetic construct
  misc_feature 1..20: note = Description of Artificial Sequence: Synthetic oligonucleotide
  misc_feature 1..20: note = Target: FXN; (+) strand; PAM type: NRG; PAM sequence: CAG
  source 1..20: mol_type = other DNA
acttgagctttgtgggagag

SEQ ID NO: 19116 - DNA, 20 bp, synthetic construct
  misc_feature 1..20: note = Description of Artificial Sequence: Synthetic oligonucleotide
  misc_feature 1..20: note = Target: FXN; (+) strand; PAM type: NRG; PAM sequence: GAG
  source 1..20: mol_type = other DNA
gagcagtcttttcctcccct

SEQ ID NO: 19117 - DNA, 20 bp, synthetic construct
  misc_feature 1..20: note = Description of Artificial Sequence: Synthetic oligonucleotide
  misc_feature 1..20: note = Target: FXN; (+) strand; PAM type: NRG; PAM sequence: TAG
  source 1..20: mol_type = other DNA
tcttttcctcccctgagata

SEQ ID NO: 19118 - DNA, 20 bp, synthetic construct
  misc_feature 1..20: note = Description of Artificial Sequence: Synthetic oligonucleotide
  misc_feature 1..20: note = Target: FXN; (+) strand; PAM type: NRG; PAM sequence: TAG
  source 1..20: mol_type = other DNA
ttcctcccctgagatatagc

SEQ ID NO: 19119 - DNA, 20 bp, synthetic construct
  misc_feature 1..20: note = Description of Artificial Sequence: Synthetic oligonucleotide
  misc_feature 1..20: note = Target: FXN; (+) strand; PAM type: NRG; PAM sequence: AAG
  source 1..20: mol_type = other DNA
ctcccctgagatatagctag

SEQ ID NO: 19120 - DNA, 20 bp, synthetic construct
  misc_feature 1..20: note = Description of Artificial Sequence: Synthetic oligonucleotide
  misc_feature 1..20: note = Target: FXN; (+) strand; PAM type: NRG; PAM sequence: AAG
  source 1..20: mol_type = other DNA
tagaagttacctcctttgtg

SEQ ID NO: 19121 - DNA, 20 bp, synthetic construct
  misc_feature 1..20: note = Description of Artificial Sequence: Synthetic oligonucleotide
  misc_feature 1..20: note = Target: FXN; (+) strand; PAM type: NRG; PAM sequence: TAG
  source 1..20: mol_type = other DNA
cctcctttgtgaagccttcc

SEQ ID NO: 19122 - DNA, 20 bp, synthetic construct
  misc_feature 1..20: note = Description of Artificial Sequence: Synthetic oligonucleotide
  misc_feature 1..20: note = Target: FXN; (+) strand; PAM type: NRG; PAM sequence: AAG
  source 1..20: mol_type = other DNA
gaagccttcctagatactcc

SEQ ID NO: 19123 - DNA, 20 bp, synthetic construct
  misc_feature 1..20: note = Description of Artificial Sequence: Synthetic oligonucleotide
  misc_feature 1..20: note = Target: FXN; (+) strand; PAM type: NRG; PAM sequence: CAG
  source 1..20: mol_type = other DNA
gccttcctagatactccaag

SEQ ID NO: 19124 - DNA, 20 bp, synthetic construct
  misc_feature 1..20: note = Description of Artificial Sequence: Synthetic oligonucleotide
  misc_feature 1..20: note = Target: FXN; (+) strand; PAM type: NRG; PAM sequence: CGG
  source 1..20: mol_type = other DNA
ctagatactccaagcagaca

SEQ ID NO: 19125 - DNA, 20 bp, synthetic construct
  misc_feature 1..20: note = Description of Artificial Sequence: Synthetic oligonucleotide
  misc_feature 1..20: note = Target: FXN; (+) strand; PAM type: NRG; PAM sequence: CAG
  source 1..20: mol_type = other DNA
tccttcctttctcccttgcc

SEQ ID NO: 19126 - DNA, 20 bp, synthetic construct
  misc_feature 1..20: note = Description of Artificial Sequence: Synthetic oligonucleotide
  misc_feature 1..20: note = Target: FXN; (+) strand; PAM type: NRG; PAM sequence: GAG
  source 1..20: mol_type = other DNA
tctcccttgcccagcactct

SEQ ID NO: 19127 - DNA, 20 bp, synthetic construct
  misc_feature 1..20: note = Description of Artificial Sequence: Synthetic oligonucleotide
  misc_feature 1..20: note = Target: FXN; (+) strand; PAM type: NRG; PAM sequence: AGG
  source 1..20: mol_type = other DNA
ctcccttgcccagcactctg

SEQ ID NO: 19128 - DNA, 20 bp, synthetic construct
  misc_feature 1..20: note = Description of Artificial Sequence: Synthetic oligonucleotide
  misc_feature 1..20: note = Target: FXN; (+) strand; PAM type: NRG; PAM sequence: TGG
  source 1..20: mol_type = other DNA
gcactctgaggttgactctg

SEQ ID NO: 19129 - DNA, 20 bp, synthetic construct
  misc_feature 1..20: note = Description of Artificial Sequence: Synthetic oligonucleotide
  misc_feature 1..20: note = Target: FXN; (+) strand; PAM type: NRG; PAM sequence: GAG
  source 1..20: mol_type = other DNA
actctgaggttgactctgtg

SEQ ID NO: 19130 - DNA, 20 bp, synthetic construct
  misc_feature 1..20: note = Description of Artificial Sequence: Synthetic oligonucleotide
  misc_feature 1..20: note = Target: FXN; (+) strand; PAM type: NRG; PAM sequence: CAG
  source 1..20: mol_type = other DNA
ataattgtctatttacacgt

SEQ ID NO: 19131 - DNA, 20 bp, synthetic construct
  misc_feature 1..20: note = Description of Artificial Sequence: Synthetic oligonucleotide
  misc_feature 1..20: note = Target: FXN; (+) strand; PAM type: NRG; PAM sequence: GAG
  source 1..20: mol_type = other DNA
gctaccacctataacacact

SEQ ID NO: 19132 - DNA, 20 bp, synthetic construct
  misc_feature 1..20: note = Description of Artificial Sequence: Synthetic oligonucleotide
  misc_feature 1..20: note = Target: FXN; (+) strand; PAM type: NRG; PAM sequence: CAG
  source 1..20: mol_type = other DNA
taacacactgagttcctcaa

SEQ ID NO: 19133 - DNA, 20 bp, synthetic construct
  misc_feature 1..20: note = Description of Artificial Sequence: Synthetic oligonucleotide
  misc_feature 1..20: note = Target: FXN; (+) strand; PAM type: NRG; PAM sequence: CAG
  source 1..20: mol_type = other DNA
cacactgagttcctcaacag

SEQ ID NO: 19134 - DNA, 20 bp, synthetic construct
  misc_feature 1..20: note = Description of Artificial Sequence: Synthetic oligonucleotide
  misc_feature 1..20: note = Target: FXN; (+) strand; PAM type: NRG; PAM sequence: AGG
  source 1..20: mol_type = other DNA
acactgagttcctcaacagc

SEQ ID NO: 19135 - DNA, 20 bp, synthetic construct
  misc_feature 1..20: note = Description of Artificial Sequence: Synthetic oligonucleotide
  misc_feature 1..20: note = Target: FXN; (+) strand; PAM type: NRG; PAM sequence: GGG
  source 1..20: mol_type = other DNA
cactgagttcctcaacagca

SEQ ID NO: 19136 - DNA, 20 bp, synthetic construct
  misc_feature 1..20: note = Description of Artificial Sequence: Synthetic oligonucleotide
  misc_feature 1..20: note = Target: FXN; (+) strand; PAM type: NRG; PAM sequence: CAG
  source 1..20: mol_type = other DNA
cactgtccattctttgatcc

SEQ ID NO: 19137 - DNA, 20 bp, synthetic construct
  misc_feature 1..20: note = Description of Artificial Sequence: Synthetic oligonucleotide
  misc_feature 1..20: note = Target: FXN; (+) strand; PAM type: NRG; PAM sequence: TGG
  source 1..20: mol_type = other DNA
cattctttgatcccagtgtc

SEQ ID NO: 19138 - DNA, 20 bp, synthetic construct
  misc_feature 1..20: note = Description of Artificial Sequence: Synthetic oligonucleotide
  misc_feature 1..20: note = Target: FXN; (+) strand; PAM type: NRG; PAM sequence: CAG
  source 1..20: mol_type = other DNA
tttgatcccagtgtctggaa

SEQ ID NO: 19139 - DNA, 20 bp, synthetic construct
  misc_feature 1..20: note = Description of Artificial Sequence: Synthetic oligonucleotide
  misc_feature 1..20: note = Target: FXN; (+) strand; PAM type: NRG; PAM sequence: AAG
  source 1..20: mol_type = other DNA
ccagtgtctggaacagtgcc

SEQ ID NO: 19140 - DNA, 20 bp, synthetic construct
  misc_feature 1..20: note = Description of Artificial Sequence: Synthetic oligonucleotide
  misc_feature 1..20: note = Target: FXN; (+) strand; PAM type: NRG; PAM sequence: TAG
  source 1..20: mol_type = other DNA
ctggaacagtgccaagtaca

SEQ ID NO: 19141 - DNA, 20 bp, synthetic construct
  misc_feature 1..20: note = Description of Artificial Sequence: Synthetic oligonucleotide
  misc_feature 1..20: note = Target: FXN; (+) strand; PAM type: NRG; PAM sequence: TAG
  source 1..20: mol_type = other DNA
gaacagtgccaagtacatag

SEQ ID NO: 19142 - DNA, 20 bp, synthetic construct
  misc_feature 1..20: note = Description of Artificial Sequence: Synthetic oligonucleotide
  misc_feature 1..20: note = Target: FXN; (+) strand; PAM type: NRG; PAM sequence: AGG
  source 1..20: mol_type = other DNA
aacagtgccaagtacatagt

SEQ ID NO: 19143 - DNA, 20 bp, synthetic construct
  misc_feature 1..20: note = Description of Artificial Sequence: Synthetic oligonucleotide
  misc_feature 1..20: note = Target: FXN; (+) strand; PAM type: NRG; PAM sequence: GGG
  source 1..20: mol_type = other DNA
acagtgccaagtacatagta

SEQ ID NO: 19144 - DNA, 20 bp, synthetic construct
  misc_feature 1..20: note = Description of Artificial Sequence: Synthetic oligonucleotide
  misc_feature 1..20: note = Target: FXN; (+) strand; PAM type: NRG; PAM sequence: GAG
  source 1..20: mol_type = other DNA
atattgattcatatgtaaat

SEQ ID NO: 19145 - DNA, 20 bp, synthetic construct
  misc_feature 1..20: note = Description of Artificial Sequence: Synthetic oligonucleotide
  misc_feature 1..20: note = Target: FXN; (+) strand; PAM type: NRG; PAM sequence: CAG
  source 1..20: mol_type = other DNA
atgctttcgttgatgcctct

SEQ ID NO: 19146 - DNA, 20 bp, synthetic construct
  misc_feature 1..20: note = Description of Artificial Sequence: Synthetic oligonucleotide
  misc_feature 1..20: note = Target: FXN; (+) strand; PAM type: NRG; PAM sequence: TGG
  source 1..20: mol_type = other DNA
accttttaccaactcgctac

SEQ ID NO: 19147 - DNA, 20 bp, synthetic construct
  misc_feature 1..20: note = Description of Artificial Sequence: Synthetic oligonucleotide
  misc_feature 1..20: note = Target: FXN; (+) strand; PAM type: NRG; PAM sequence: TAG
  source 1..20: mol_type = other DNA
ccaactcgctactggccaca

SEQ ID NO: 19148 - DNA, 20 bp, synthetic construct
  misc_feature 1..20: note = Description of Artificial Sequence: Synthetic oligonucleotide
  misc_feature 1..20: note = Target: FXN; (+) strand; PAM type: NRG; PAM sequence: AAG
  source 1..20: mol_type = other DNA
ctggccacatagacaaatga

SEQ ID NO: 19149 - DNA, 20 bp, synthetic construct
  misc_feature 1..20: note = Description of Artificial Sequence: Synthetic oligonucleotide
  misc_feature 1..20: note = Target: FXN; (+) strand; PAM type: NRG; PAM sequence: CAG
  source 1..20: mol_type = other DNA
gccacatagacaaatgaaag

SEQ ID NO: 19150 - DNA, 20 bp, synthetic construct
  misc_feature 1..20: note = Description of Artificial Sequence: Synthetic oligonucleotide
  misc_feature 1..20: note = Target: FXN; (+) strand; PAM type: NRG; PAM sequence: CAG
  source 1..20: mol_type = other DNA
gacaaatgaaagcagtaatc

SEQ ID NO: 19151 - DNA, 20 bp, synthetic construct
  misc_feature 1..20: note = Description of Artificial Sequence: Synthetic oligonucleotide
  misc_feature 1..20: note = Target: FXN; (+) strand; PAM type: NRG; PAM sequence: AAG
  source 1..20: mol_type = other DNA
gcagtaatccagatacaccc

SEQ ID NO: 19152 - DNA, 20 bp, synthetic construct
  misc_feature 1..20: note = Description of Artificial Sequence: Synthetic oligonucleotide
  misc_feature 1..20: note = Target: FXN; (+) strand; PAM type: NRG; PAM sequence: GAG
  source 1..20: mol_type = other DNA
agtaatccagatacacccaa

SEQ ID NO: 19153 - DNA, 20 bp, synthetic construct
  misc_feature 1..20: note = Description of Artificial Sequence: Synthetic oligonucleotide
  misc_feature 1..20: note = Target: FXN; (+) strand; PAM type: NRG; PAM sequence: AGG
  source 1..20: mol_type = other DNA
gtaatccagatacacccaag

SEQ ID NO: 19154 - DNA, 20 bp, synthetic construct
  misc_feature 1..20: note = Description of Artificial Sequence: Synthetic oligonucleotide
  misc_feature 1..20: note = Target: FXN; (+) strand; PAM type: NRG; PAM sequence: TGG
  source 1..20: mol_type = other DNA
tctgttcttttttctctctg

SEQ ID NO: 19155 - DNA, 20 bp, synthetic construct
  misc_feature 1..20: note = Description of Artificial Sequence: Synthetic oligonucleotide
  misc_feature 1..20: note = Target: FXN; (+) strand; PAM type: NRG; PAM sequence: GAG
  source 1..20: mol_type = other DNA
tgttcttttttctctctgtg

SEQ ID NO: 19156 - DNA, 20 bp, synthetic construct
  misc_feature 1..20: note = Description of Artificial Sequence: Synthetic oligonucleotide
  misc_feature 1..20: note = Target: FXN; (+) strand; PAM type: NRG; PAM sequence: TGG
  source 1..20: mol_type = other DNA
tcttttttctctctgtggag

SEQ ID NO: 19157 - DNA, 20 bp, synthetic construct
  misc_feature 1..20: note = Description of Artificial Sequence: Synthetic oligonucleotide
  misc_feature 1..20: note = Target: FXN; (+) strand; PAM type: NRG; PAM sequence: GGG
  source 1..20: mol_type = other DNA
cttttttctctctgtggagt

SEQ ID NO: 19158 - DNA, 20 bp, synthetic construct
  misc_feature 1..20: note = Description of Artificial Sequence: Synthetic oligonucleotide
  misc_feature 1..20: note = Target: FXN; (+) strand; PAM type: NRG; PAM sequence: GAG
  source 1..20: mol_type = other DNA
tttttctctctgtggagtgg

SEQ ID NO: 19159 - DNA, 20 bp, synthetic construct
  misc_feature 1..20: note = Description of Artificial Sequence: Synthetic oligonucleotide
  misc_feature 1..20: note = Target: FXN; (+) strand; PAM type: NRG; PAM sequence: AAG
  source 1..20: mol_type = other DNA
ctctgtggagtgggagactt

SEQ ID NO: 19160 - DNA, 20 bp, synthetic construct
  misc_feature 1..20: note = Description of Artificial Sequence: Synthetic oligonucleotide
  misc_feature 1..20: note = Target: FXN; (+) strand; PAM type: NRG; PAM sequence: TGG
  source 1..20: mol_type = other DNA
tgtggagtgggagacttaag

SEQ ID NO: 19161 - DNA, 20 bp, synthetic construct
  misc_feature 1..20: note = Description of Artificial Sequence: Synthetic oligonucleotide
  misc_feature 1..20: note = Target: FXN; (+) strand; PAM type: NRG; PAM sequence: TGG
  source 1..20: mol_type = other DNA
gacttaagtggcttcttaac

SEQ ID NO: 19162 - DNA, 20 bp, synthetic construct
  misc_feature 1..20: note = Description of Artificial Sequence: Synthetic oligonucleotide
  misc_feature 1..20: note = Target: FXN; (+) strand; PAM type: NRG; PAM sequence: AAG
  source 1..20: mol_type = other DNA
aactggtgtgtcgtctgatc

SEQ ID NO: 19163 - DNA, 20 bp, synthetic construct
  misc_feature 1..20: note = Description of Artificial Sequence: Synthetic oligonucleotide
  misc_feature 1..20: note = Target: FXN; (+) strand; PAM type: NRG; PAM sequence: TGG
  source 1..20: mol_type = other DNA
tggtgtgtcgtctgatcaag

SEQ ID NO: 19164 - DNA, 20 bp, synthetic construct
  misc_feature 1..20: note = Description of Artificial Sequence: Synthetic oligonucleotide
  misc_feature 1..20: note = Target: FXN; (+) strand; PAM type: NRG; PAM sequence: CAG
  source 1..20: mol_type = other DNA
tgtcgtctgatcaagtggtc

SEQ ID NO: 19165 - DNA, 20 bp, synthetic construct
  misc_feature 1..20: note = Description of Artificial Sequence: Synthetic oligonucleotide
  misc_feature 1..20: note = Target: FXN; (+) strand; PAM type: NRG; PAM sequence: AGG
  source 1..20: mol_type = other DNA
gtcgtctgatcaagtggtcc

SEQ ID NO: 19166 - DNA, 20 bp, synthetic construct
  misc_feature 1..20: note = Description of Artificial Sequence: Synthetic oligonucleotide
  misc_feature 1..20: note = Target: FXN; (+) strand; PAM type: NRG; PAM sequence: CAG
  source 1..20: mol_type = other DNA
tgatcaagtggtccaggtaa

SEQ ID NO: 19167 - DNA, 20 bp, synthetic construct
  misc_feature 1..20: note = Description of Artificial Sequence: Synthetic oligonucleotide
  misc_feature 1..20: note = Target: FXN; (+) strand; PAM type: NRG; PAM sequence: AGG
  source 1..20: mol_type = other DNA
gatcaagtggtccaggtaac

SEQ ID NO: 19168 - DNA, 20 bp, synthetic construct
  misc_feature 1..20: note = Description of Artificial Sequence: Synthetic oligonucleotide
  misc_feature 1..20: note = Target: FXN; (+) strand; PAM type: NRG; PAM sequence: TGG
  source 1..20: mol_type = other DNA
caagtggtccaggtaacagg

SEQ ID NO: 19169 - DNA, 20 bp, synthetic construct
  misc_feature 1..20: note = Description of Artificial Sequence: Synthetic oligonucleotide
  misc_feature 1..20: note = Target: FXN; (+) strand; PAM type: NRG; PAM sequence: TGG
  source 1..20: mol_type = other DNA
aacaggtggatgccaatgtc

SEQ ID NO: 19170 - DNA, 20 bp, synthetic construct
  misc_feature 1..20: note = Description of Artificial Sequence: Synthetic oligonucleotide
  misc_feature 1..20: note = Target: FXN; (+) strand; PAM type: NRG; PAM sequence: CAG
  source 1..20: mol_type = other DNA
gtggatgccaatgtctggcc

SEQ ID NO: 19171 - DNA, 20 bp, synthetic construct
  misc_feature 1..20: note = Description of Artificial Sequence: Synthetic oligonucleotide
  misc_feature 1..20: note = Target: FXN; (+) strand; PAM type: NRG; PAM sequence: AGG
  source 1..20: mol_type = other DNA
tggatgccaatgtctggccc

SEQ ID NO: 19172 - DNA, 20 bp, synthetic construct
  misc_feature 1..20: note = Description of Artificial Sequence: Synthetic oligonucleotide
  misc_feature 1..20: note = Target: FXN; (+) strand; PAM type: NRG; PAM sequence: TGG
  source 1..20: mol_type = other DNA
gcccaggcatcaccccttac

SEQ ID NO: 19173 - DNA, 20 bp, synthetic construct
  misc_feature 1..20: note = Description of Artificial Sequence: Synthetic oligonucleotide
  misc_feature 1..20: note = Target: FXN; (+) strand; PAM type: NRG; PAM sequence: TGG
  source 1..20: mol_type = other DNA
gcatcaccccttactggcac

SEQ ID NO: 19174 - DNA, 20 bp, synthetic construct
  misc_feature 1..20: note = Description of Artificial Sequence: Synthetic oligonucleotide
  misc_feature 1..20: note = Target: FXN; (+) strand; PAM type: NRG; PAM sequence: CAG
  source 1..20: mol_type = other DNA
cttactggcactggtcatta

SEQ ID NO: 19175 - DNA, 20 bp, synthetic construct
  misc_feature 1..20: note = Description of Artificial Sequence: Synthetic oligonucleotide
  misc_feature 1..20: note = Target: FXN; (+) strand; PAM type: NRG; PAM sequence: AAG
  source 1..20: mol_type = other DNA
actggcactggtcattacag

SEQ ID NO: 19176 - DNA, 20 bp, synthetic construct
  misc_feature 1..20: note = Description of Artificial Sequence: Synthetic oligonucleotide
  misc_feature 1..20: note = Target: FXN; (+) strand; PAM type: NRG; PAM sequence: CAG
  source 1..20: mol_type = other DNA
cattacagaagacactctac

SEQ ID NO: 19177 - DNA, 20 bp, synthetic construct
  misc_feature 1..20: note = Description of Artificial Sequence: Synthetic oligonucleotide
  misc_feature 1..20: note = Target: FXN; (+) strand; PAM type: NRG; PAM sequence: GAG
  source 1..20: mol_type = other DNA
ttacagaagacactctacca

SEQ ID NO: 19178 - DNA, 20 bp, synthetic construct
  misc_feature 1..20: note = Description of Artificial Sequence: Synthetic oligonucleotide
  misc_feature 1..20: note = Target: FXN; (+) strand; PAM type: NRG; PAM sequence: AAG
  source 1..20: mol_type = other DNA
agacactctaccagagctga

SEQ ID NO: 19179 - DNA, 20 bp, synthetic construct
  misc_feature 1..20: note = Description of Artificial Sequence: Synthetic oligonucleotide
  misc_feature 1..20: note = Target: FXN; (+) strand; PAM type: NRG; PAM sequence: AGG
  source 1..20: mol_type = other DNA
gacactctaccagagctgaa

SEQ ID NO: 19180 - DNA, 20 bp, synthetic construct
  misc_feature 1..20: note = Description of Artificial Sequence: Synthetic oligonucleotide
  misc_feature 1..20: note = Target: FXN; (+) strand; PAM type: NRG; PAM sequence: TAG
  source 1..20: mol_type = other DNA
ctgaaaggacctcttgtcac

SEQ ID NO: 19181 - DNA, 20 bp, synthetic construct
  misc_feature 1..20: note = Description of Artificial Sequence: Synthetic oligonucleotide
  misc_feature 1..20: note = Target: FXN; (+) strand; PAM type: NRG; PAM sequence: AGG
  source 1..20: mol_type = other DNA
tgaaaggacctcttgtcact

SEQ ID NO: 19182 - DNA, 20 bp, synthetic construct
  misc_feature 1..20: note = Description of Artificial Sequence: Synthetic oligonucleotide
  misc_feature 1..20: note = Target: FXN; (+) strand; PAM type: NRG; PAM sequence: CAG
  source 1..20: mol_type = other DNA
aaggacctcttgtcactagg

SEQ ID NO: 19183 - DNA, 20 bp, synthetic construct
  misc_feature 1..20: note = Description of Artificial Sequence: Synthetic oligonucleotide
  misc_feature 1..20: note = Target: FXN; (+) strand; PAM type: NRG; PAM sequence: TGG
  source 1..20: mol_type = other DNA
ctcttgtcactaggcagctg

SEQ ID NO: 19184 - DNA, 20 bp, synthetic construct
  misc_feature 1..20: note = Description of Artificial Sequence: Synthetic oligonucleotide
  misc_feature 1..20: note = Target: FXN; (+) strand; PAM type: NRG; PAM sequence: GAG
  source 1..20: mol_type = other DNA
cttgtcactaggcagctgtg

SEQ ID NO: 19185 - DNA, 20 bp, synthetic construct
  misc_feature 1..20: note = Description of Artificial Sequence: Synthetic oligonucleotide
  misc_feature 1..20: note = Target: FXN; (+) strand; PAM type: NRG; PAM sequence: TAG
  source 1..20: mol_type = other DNA
ggagtccgctctacttgacc

SEQ ID NO: 19186 - DNA, 20 bp, synthetic construct
  misc_feature 1..20: note = Description of Artificial Sequence: Synthetic oligonucleotide
  misc_feature 1..20: note = Target: FXN; (+) strand; PAM type: NRG; PAM sequence: TGG
  source 1..20: mol_type = other DNA
ttgacctagtaaaatctgcc

SEQ ID NO: 19187 - DNA, 20 bp, synthetic construct
  misc_feature 1..20: note = Description of Artificial Sequence: Synthetic oligonucleotide
  misc_feature 1..20: note = Target: FXN; (+) strand; PAM type: NRG; PAM sequence: GAG
  source 1..20: mol_type = other DNA
gacctagtaaaatctgcctg

SEQ ID NO: 19188 - DNA, 20 bp, synthetic construct
  misc_feature 1..20: note = Description of Artificial Sequence: Synthetic oligonucleotide
  misc_feature 1..20: note = Target: FXN; (+) strand; PAM type: NRG; PAM sequence: TAG
  source 1..20: mol_type = other DNA
aaaatctgcctggagactgt

SEQ ID NO: 19189 - DNA, 20 bp, synthetic construct
  misc_feature 1..20: note = Description of Artificial Sequence: Synthetic oligonucleotide
  misc_feature 1..20: note = Target: FXN; (+) strand; PAM type: NRG; PAM sequence: GAG
  source 1..20: mol_type = other DNA
aatctgcctggagactgtta

SEQ ID NO: 19190 - DNA, 20 bp, synthetic construct
  misc_feature 1..20: note = Description of Artificial Sequence: Synthetic oligonucleotide
  misc_feature 1..20: note = Target: FXN; (+) strand; PAM type: NRG; PAM sequence: AAG
  source 1..20: mol_type = other DNA
tagagtcaccccactacctg

SEQ ID NO: 19191 - DNA, 20 bp, synthetic construct
  misc_feature 1..20: note = Description of Artificial Sequence: Synthetic oligonucleotide
  misc_feature 1..20: note = Target: FXN; (+) strand; PAM type: NRG; PAM sequence: CAG
  source 1..20: mol_type = other DNA
ccactacctgaagttacctc

SEQ ID NO: 19192 - DNA, 20 bp, synthetic construct
  misc_feature 1..20: note = Description of Artificial Sequence: Synthetic oligonucleotide
  misc_feature 1..20: note = Target: FXN; (+) strand; PAM type: NRG; PAM sequence: AGG
  source 1..20: mol_type = other DNA
cactacctgaagttacctcc

SEQ ID NO: 19193 - DNA, 20 bp, synthetic construct
  misc_feature 1..20: note = Description of Artificial Sequence: Synthetic oligonucleotide
  misc_feature 1..20: note = Target: FXN; (+) strand; PAM type: NRG; PAM sequence: CAG
  source 1..20: mol_type = other DNA
ggctgacctcttttttttcc

SEQ ID NO: 19194 - DNA, 20 bp, synthetic construct
  misc_feature 1..20: note = Description of Artificial Sequence: Synthetic oligonucleotide
  misc_feature 1..20: note = Target: FXN; (+) strand; PAM type: NRG; PAM sequence: AGG
  source 1..20: mol_type = other DNA
gctgacctcttttttttccc

SEQ ID NO: 19195 - DNA, 20 bp, synthetic construct
  misc_feature 1..20: note = Description of Artificial Sequence: Synthetic oligonucleotide
  misc_feature 1..20: note = Target: FXN; (+) strand; PAM type: NRG; PAM sequence: TGG
  source 1..20: mol_type = other DNA
gacctcttttttttcccagg

SEQ ID NO: 19196 - DNA, 20 bp, synthetic construct
  misc_feature 1..20: note = Description of Artificial Sequence: Synthetic oligonucleotide
  misc_feature 1..20: note = Target: FXN; (+) strand; PAM type: NRG; PAM sequence: GAG
  source 1..20: mol_type = other DNA
cctcttttttttcccaggtg

SEQ ID NO: 19197 - DNA, 20 bp, synthetic construct
  misc_feature 1..20: note = Description of Artificial Sequence: Synthetic oligonucleotide
  misc_feature 1..20: note = Target: FXN; (+) strand; PAM type: NRG; PAM sequence: TGG
  source 1..20: mol_type = other DNA
ttttttcccaggtggagtcc

SEQ ID NO: 19198 - DNA, 20 bp, synthetic construct
  misc_feature 1..20: note = Description of Artificial Sequence: Synthetic oligonucleotide
  misc_feature 1..20: note = Target: FXN; (+) strand; PAM type: NRG; PAM sequence: TAG
  source 1..20: mol_type = other DNA
caggtggagtcctggcatct

SEQ ID NO: 19199 - DNA, 20 bp, synthetic construct
  misc_feature 1..20: note = Description of Artificial Sequence: Synthetic oligonucleotide
  misc_feature 1..20: note = Target: FXN; (+) strand; PAM type: NRG; PAM sequence: AAG
  source 1..20: mol_type = other DNA
ggcatcttagatattttaat

SEQ ID NO: 19200 - DNA, 20 bp, synthetic construct
  misc_feature 1..20: note = Description of Artificial Sequence: Synthetic oligonucleotide
  misc_feature 1..20: note = Target: FXN; (+) strand; PAM type: NRG; PAM sequence: AGG
  source 1..20: mol_type = other DNA
gcatcttagatattttaata

SEQ ID NO: 19201 - DNA, 20 bp, synthetic construct
  misc_feature 1..20: note = Description of Artificial Sequence: Synthetic oligonucleotide
  misc_feature 1..20: note = Target: FXN; (+) strand; PAM type: NRG; PAM sequence: AAG
  source 1..20: mol_type = other DNA
tgacatgttctttattcact

SEQ ID NO: 19202 - DNA, 20 bp, synthetic construct
  misc_feature 1..20: note = Description of Artificial Sequence: Synthetic oligonucleotide
  misc_feature 1..20: note = Target: FXN; (+) strand; PAM type: NRG; PAM sequence: AGG
  source 1..20: mol_type = other DNA
gacatgttctttattcacta

SEQ ID NO: 19203 - DNA, 20 bp, synthetic construct
  misc_feature 1..20: note = Description of Artificial Sequence: Synthetic oligonucleotide
  misc_feature 1..20: note = Target: FXN; (+) strand; PAM type: NRG; PAM sequence: CAG
  source 1..20: mol_type = other DNA
ttctttattcactaaggtgt

SEQ ID NO: 19204 - DNA, 20 bp, synthetic construct
  misc_feature 1..20: note = Description of Artificial Sequence: Synthetic oligonucleotide
  misc_feature 1..20: note = Target: FXN; (+) strand; PAM type: NRG; PAM sequence: TAG
  source 1..20: mol_type = other DNA
gtgtcagcatattactgtct

SEQ ID NO: 19205 - DNA, 20 bp, synthetic construct
  misc_feature 1..20: note = Description of Artificial Sequence: Synthetic oligonucleotide
  misc_feature 1..20: note = Target: FXN; (+) strand; PAM type: NRG; PAM sequence: GAG
  source 1..20: mol_type = other DNA
catattactgtcttagaact

SEQ ID NO: 19206 - DNA, 20 bp, synthetic construct
  misc_feature 1..20: note = Description of Artificial Sequence: Synthetic oligonucleotide
  misc_feature 1..20: note = Target: FXN; (+) strand; PAM type: NRG; PAM sequence: AGG
  source 1..20: mol_type = other DNA
atattactgtcttagaactg

SEQ ID NO: 19207 - DNA, 20 bp, synthetic construct
  misc_feature 1..20: note = Description of Artificial Sequence: Synthetic oligonucleotide
  misc_feature 1..20: note = Target: FXN; (+) strand; PAM type: NRG; PAM sequence: GGG
  source 1..20: mol_type = other DNA
tattactgtcttagaactga

SEQ ID NO: 19208 - DNA, 20 bp, synthetic construct
  misc_feature 1..20: note = Description of Artificial Sequence: Synthetic oligonucleotide
  misc_feature 1..20: note = Target: FXN; (+) strand; PAM type: NRG; PAM sequence: TGG
  source 1..20: mol_type = other DNA
tgagggttcttcatcttttt

SEQ ID NO: 19209 - DNA, 20 bp, synthetic construct
  misc_feature 1..20: note = Description of Artificial Sequence: Synthetic oligonucleotide
  misc_feature 1..20: note = Target: FXN; (+) strand; PAM type: NRG; PAM sequence: CAG
  source 1..20: mol_type = other DNA
gttcttcatcttttttggat

SEQ ID NO: 19210 - DNA, 20 bp, synthetic construct
  misc_feature 1..20: note = Description of Artificial Sequence: Synthetic oligonucleotide
  misc_feature 1..20: note = Target: FXN; (+) strand; PAM type: NRG; PAM sequence: AGG
  source 1..20: mol_type = other DNA
ttcttcatcttttttggatc

SEQ ID NO: 19211 - DNA, 20 bp, synthetic construct
  misc_feature 1..20: note = Description of Artificial Sequence: Synthetic oligonucleotide
  misc_feature 1..20: note = Target: FXN; (+) strand; PAM type: NRG; PAM sequence: AAG
  source 1..20: mol_type = other DNA
ttggatcaggacctccctct

SEQ ID NO: 19212 - DNA, 20 bp, synthetic construct
  misc_feature 1..20: note = Description of Artificial Sequence: Synthetic oligonucleotide
  misc_feature 1..20: note = Target: FXN; (+) strand; PAM type: NRG; PAM sequence: TGG
  source 1..20: mol_type = other DNA
taagaatctgatgactgctc

SEQ ID NO: 19213 - DNA, 20 bp, synthetic construct
  misc_feature 1..20: note = Description of Artificial Sequence: Synthetic oligonucleotide
  misc_feature 1..20: note = Target: FXN; (+) strand; PAM type: NRG; PAM sequence: CAG
  source 1..20: mol_type = other DNA
aaaaactttaaacaaattaa

SEQ ID NO: 19214 - DNA, 20 bp, synthetic construct
  misc_feature 1..20: note = Description of Artificial Sequence: Synthetic oligonucleotide
  misc_feature 1..20: note = Target: FXN; (+) strand; PAM type: NRG; PAM sequence: GAG
  source 1..20: mol_type = other DNA
aaactttaaacaaattaaca

SEQ ID NO: 19215 - DNA, 20 bp, synthetic construct
  misc_feature 1..20: note = Description of Artificial Sequence: Synthetic oligonucleotide
  misc_feature 1..20: note = Target: FXN; (+) strand; PAM type: NRG; PAM sequence: CAG
  source 1..20: mol_type = other DNA
caaattaacagagttttatt

SEQ ID NO: 19216 - DNA, 20 bp, synthetic construct
  misc_feature 1..20: note = Description of Artificial Sequence: Synthetic oligonucleotide
  misc_feature 1..20: note = Target: FXN; (+) strand; PAM type: NRG; PAM sequence: AAG
  source 1..20: mol_type = other DNA
taacagagttttattcagca

SEQ ID NO: 19217 - DNA, 20 bp, synthetic construct
  misc_feature 1..20: note = Description of Artificial Sequence: Synthetic oligonucleotide
  misc_feature 1..20: note = Target: FXN; (+) strand; PAM type: NRG; PAM sequence: CGG
  source 1..20: mol_type = other DNA
gcaaagaatgattcataaat

SEQ ID NO: 19218 - DNA, 20 bp, synthetic construct
  misc_feature 1..20: note = Description of Artificial Sequence: Synthetic oligonucleotide
  misc_feature 1..20: note = Target: FXN; (+) strand; PAM type: NRG; PAM sequence: GGG
  source 1..20: mol_type = other DNA
caaagaatgattcataaatc

SEQ ID NO: 19219 - DNA, 20 bp, synthetic construct
  misc_feature 1..20: note = Description of Artificial Sequence: Synthetic oligonucleotide
  misc_feature 1..20: note = Target: FXN; (+) strand; PAM type: NRG; PAM sequence: AAG
  source 1..20: mol_type = other DNA
agaatgattcataaatcggg

SEQ ID NO: 19220 - DNA, 20 bp, synthetic construct
  misc_feature 1..20: note = Description of Artificial Sequence: Synthetic oligonucleotide
  misc_feature 1..20: note = Target: FXN; (+) strand; PAM type: NRG; PAM sequence: AGG
  source 1..20: mol_type = other DNA
gaatgattcataaatcggga

SEQ ID NO: 19221 - DNA, 20 bp, synthetic construct
  misc_feature 1..20: note = Description of Artificial Sequence: Synthetic oligonucleotide
  misc_feature 1..20: note = Target: FXN; (+) strand; PAM type: NRG; PAM sequence: CAG
  source 1..20: mol_type = other DNA
taaatcgggaaggctgcaac

SEQ ID NO: 19222 - DNA, 20 bp, synthetic construct
  misc_feature 1..20: note = Description of Artificial Sequence: Synthetic oligonucleotide
  misc_feature 1..20: note = Target: FXN; (+) strand; PAM type: NRG; PAM sequence: TAG
  source 1..20: mol_type = other DNA
cgggaaggctgcaaccagaa

SEQ ID NO: 19223 - DNA, 20 bp, synthetic construct
  misc_feature 1..20: note = Description of Artificial Sequence: Synthetic oligonucleotide
  misc_feature 1..20: note = Target: FXN; (+) strand; PAM type: NRG; PAM sequence: AGG
  source 1..20: mol_type = other DNA
gggaaggctgcaaccagaat

SEQ ID NO: 19224 - DNA, 20 bp, synthetic construct
  misc_feature 1..20: note = Description of Artificial Sequence: Synthetic oligonucleotide
  misc_feature 1..20: note = Target: FXN; (+) strand; PAM type: NRG; PAM sequence: CAG
  source 1..20: mol_type = other DNA
ggctgcaaccagaataggtt

SEQ ID NO: 19225 - DNA, 20 bp, synthetic construct
  misc_feature 1..20: note = Description of Artificial Sequence: Synthetic oligonucleotide
  misc_feature 1..20: note = Target: FXN; (+) strand; PAM type: NRG; PAM sequence: GAG
  source 1..20: mol_type = other DNA
ctgcaaccagaataggttca

SEQ ID NO: 19226 - DNA, 20 bp, synthetic construct
  misc_feature 1..20: note = Description of Artificial Sequence: Synthetic oligonucleotide
  misc_feature 1..20: note = Target: FXN; (+) strand; PAM type: NRG; PAM sequence: GAG
  source 1..20: mol_type = other DNA
gcaaccagaataggttcaga

SEQ ID NO: 19227 - DNA, 20 bp, synthetic construct
  misc_feature 1..20: note = Description of Artificial Sequence: Synthetic oligonucleotide
  misc_feature 1..20: note = Target: FXN; (+) strand; PAM type: NRG; PAM sequence: CGG
  source 1..20: mol_type = other DNA
ataggttcagagagactcca

SEQ ID NO: 19228 - DNA, 20 bp, synthetic construct
  misc_feature 1..20: note = Description of Artificial Sequence: Synthetic oligonucleotide
  misc_feature 1..20: note = Target: FXN; (+) strand; PAM type: NRG; PAM sequence: TGG
  source 1..20: mol_type = other DNA
agactccacggtgtgccacg

SEQ ID NO: 19229 - DNA, 20 bp, synthetic construct
  misc_feature 1..20: note = Description of Artificial Sequence: Synthetic oligonucleotide
  misc_feature 1..20: note = Target: FXN; (+) strand; PAM type: NRG; PAM sequence: TGG
  source 1..20: mol_type = other DNA
tccacggtgtgccacgtggt

SEQ ID NO: 19230 - DNA, 20 bp, synthetic construct
  misc_feature 1..20: note = Description of Artificial Sequence: Synthetic oligonucleotide
  misc_feature 1..20: note = Target: FXN; (+) strand; PAM type: NRG; PAM sequence: GAG
  source 1..20: mol_type = other DNA
cacggtgtgccacgtggttg

SEQ ID NO: 19231 - DNA, 20 bp, synthetic construct
  misc_feature 1..20: note = Description of Artificial Sequence: Synthetic oligonucleotide
  misc_feature 1..20: note = Target: FXN; (+) strand; PAM type: NRG; PAM sequence: GAG
  source 1..20: mol_type = other DNA
cggtgtgccacgtggttgga

SEQ ID NO: 19232 - DNA, 20 bp, synthetic construct
  misc_feature 1..20: note = Description of Artificial Sequence: Synthetic oligonucleotide
  misc_feature 1..20: note = Target: FXN; (+) strand; PAM type: NRG; PAM sequence: AGG
  source 1..20: mol_type = other DNA
ggtgtgccacgtggttggag

SEQ ID NO: 19233 - DNA, 20 bp, synthetic construct
  misc_feature 1..20: note = Description of Artificial Sequence: Synthetic oligonucleotide
  misc_feature 1..20: note = Target: FXN; (+) strand; PAM type: NRG; PAM sequence: TAG
  source 1..20: mol_type = other DNA
ccacgtggttggagaggatt

SEQ ID NO: 19234 - DNA, 20 bp, synthetic construct
  misc_feature 1..20: note = Description of Artificial Sequence: Synthetic oligonucleotide
  misc_feature 1..20: note = Target: FXN; (+) strand; PAM type: NRG; PAM sequence: AGG
  source 1..20: mol_type = other DNA
cacgtggttggagaggattt

SEQ ID NO: 19235 - DNA, 20 bp, synthetic construct
  misc_feature 1..20: note = Description of Artificial Sequence: Synthetic oligonucleotide
  misc_feature 1..20: note = Target: FXN; (+) strand; PAM type: NRG; PAM sequence: CAG
  source 1..20: mol_type = other DNA
gaggatttaggatttatgca

SEQ ID NO: 19236 - DNA, 20 bp, synthetic construct
  misc_feature 1..20: note = Description of Artificial Sequence: Synthetic oligonucleotide
  misc_feature 1..20: note = Target: FXN; (+) strand; PAM type: NRG; PAM sequence: AAG
  source 1..20: mol_type = other DNA
ttaggatttatgcacagaaa

SEQ ID NO: 19237 - DNA, 20 bp, synthetic construct
  misc_feature 1..20: note = Description of Artificial Sequence: Synthetic oligonucleotide
  misc_feature 1..20: note = Target: FXN; (+) strand; PAM type: NRG; PAM sequence: AGG
  source 1..20: mol_type = other DNA
taggatttatgcacagaaaa

SEQ ID NO: 19238 - DNA, 20 bp, synthetic construct
  misc_feature 1..20: note = Description of Artificial Sequence: Synthetic oligonucleotide
  misc_feature 1..20: note = Target: FXN; (+) strand; PAM type: NRG; PAM sequence: AAG
  source 1..20: mol_type = other DNA
atttatgcacagaaaaagga

SEQ ID NO: 19239 - DNA, 20 bp, synthetic construct
  misc_feature 1..20: note = Description of Artificial Sequence: Synthetic oligonucleotide
  misc_feature 1..20: note = Target: FXN; (+) strand; PAM type: NRG; PAM sequence: CAG
  source 1..20: mol_type = other DNA
agaaaaaggaaagtgacatg

SEQ ID NO: 19240 - DNA, 20 bp, synthetic construct
  misc_feature 1..20: note = Description of Artificial Sequence: Synthetic oligonucleotide
  misc_feature 1..20: note = Target: FXN; (+) strand; PAM type: NRG; PAM sequence: AAG
  source 1..20: mol_type = other DNA
aagtgacatgcagaaaatga

SEQ ID NO: 19241 - DNA, 20 bp, synthetic construct
  misc_feature 1..20: note = Description of Artificial Sequence: Synthetic oligonucleotide
  misc_feature 1..20: note = Target: FXN; (+) strand; PAM type: NRG; PAM sequence: GAG
  source 1..20: mol_type = other DNA
gacatgcagaaaatgaaagt

SEQ ID NO: 19242 - DNA, 20 bp, synthetic construct
  misc_feature 1..20: note = Description of Artificial Sequence: Synthetic oligonucleotide
  misc_feature 1..20: note = Target: FXN; (+) strand; PAM type: NRG; PAM sequence: AGG
  source 1..20: mol_type = other DNA
acatgcagaaaatgaaagtg

SEQ ID NO: 19243 - DNA, 20 bp, synthetic construct
  misc_feature 1..20: note = Description of Artificial Sequence: Synthetic oligonucleotide
  misc_feature 1..20: note = Target: FXN; (+) strand; PAM type: NRG; PAM sequence: GGG
  source 1..20: mol_type = other DNA
catgcagaaaatgaaagtga

SEQ ID NO: 19244 - DNA, 20 bp, synthetic construct
  misc_feature 1..20: note = Description of Artificial Sequence: Synthetic oligonucleotide
  misc_feature 1..20: note = Target: FXN; (+) strand; PAM type: NRG; PAM sequence: TGG
  source 1..20: mol_type = other DNA
agaaaatgaaagtgagggcc

SEQ ID NO: 19245 - DNA, 20 bp, synthetic construct
  misc_feature 1..20: note = Description of Artificial Sequence: Synthetic oligonucleotide
  misc_feature 1..20: note = Target: FXN; (+) strand; PAM type: NRG; PAM sequence: TGG
  source 1..20: mol_type = other DNA
tgaaagtgagggcctggtgc

SEQ ID NO: 19246 - DNA, 20 bp, synthetic construct
  misc_feature 1..20: note = Description of Artificial Sequence: Synthetic oligonucleotide
  misc_feature 1..20: note = Target: FXN; (+) strand; PAM type: NRG; PAM sequence: CGG
  source 1..20: mol_type = other DNA
gtgagggcctggtgctggtg

SEQ ID NO: 19247 - DNA, 20 bp, synthetic construct
  misc_feature 1..20: note = Description of Artificial Sequence: Synthetic oligonucleotide
  misc_feature 1..20: note = Target: FXN; (+) strand; PAM type: NRG; PAM sequence: CAG
  source 1..20: mol_type = other DNA
gtgcctcacgcctgtaatcc

SEQ ID NO: 19248 - DNA, 20 bp, synthetic construct
  misc_feature 1..20: note = Description of Artificial Sequence: Synthetic oligonucleotide
  misc_feature 1..20: note = Target: FXN; (+) strand; PAM type: NRG; PAM sequence: TGG
  source 1..20: mol_type = other DNA
cgcctgtaatcccagcactt

SEQ ID NO: 19249 - DNA, 20 bp, synthetic construct
  misc_feature 1..20: note = Description of Artificial Sequence: Synthetic oligonucleotide
  misc_feature 1..20: note = Target: FXN; (+) strand; PAM type: NRG; PAM sequence: GGG
  source 1..20: mol_type = other DNA
gcctgtaatcccagcacttt

SEQ ID NO: 19250 - DNA, 20 bp, synthetic construct
  misc_feature 1..20: note = Description of Artificial Sequence: Synthetic oligonucleotide
  misc_feature 1..20: note = Target: FXN; (+) strand; PAM type: NRG; PAM sequence: GAG
  source 1..20: mol_type = other DNA
ctgtaatcccagcactttgg

SEQ ID NO: 19251 - DNA, 20 bp, synthetic construct
  misc_feature 1..20: note = Description of Artificial Sequence: Synthetic oligonucleotide
  misc_feature 1..20: note = Target: FXN; (+) strand; PAM type: NRG; PAM sequence: AGG
  source 1..20: mol_type = other DNA
tgtaatcccagcactttggg

SEQ ID NO: 19252 - DNA, 20 bp, synthetic construct
  misc_feature 1..20: note = Description of Artificial Sequence: Synthetic oligonucleotide
  misc_feature 1..20: note = Target: FXN; (+) strand; PAM type: NRG; PAM sequence: GAG
  source 1..20: mol_type = other DNA
tcccagcactttgggaggcc

SEQ ID NO: 19253 - DNA, 20 bp, synthetic construct
  misc_feature 1..20: note = Description of Artificial Sequence: Synthetic oligonucleotide
  misc_feature 1..20: note = Target: FXN; (+) strand; PAM type: NRG; PAM sequence: AGG
  source 1..20: mol_type = other DNA
cccagcactttgggaggccg

SEQ ID NO: 19254 - DNA, 20 bp, synthetic construct
  misc_feature 1..20: note = Description of Artificial Sequence: Synthetic oligonucleotide
  misc_feature 1..20: note = Target: FXN; (+) strand; PAM type: NRG; PAM sequence: CGG
  source 1..20: mol_type = other DNA
agcactttgggaggccgagg

SEQ ID NO: 19255 - DNA, 20 bp, synthetic construct
  misc_feature 1..20: note = Description of Artificial Sequence: Synthetic oligonucleotide
  misc_feature 1..20: note = Target: FXN; (+) strand; PAM type: NRG; PAM sequence: GGG
  source 1..20: mol_type = other DNA
gcactttgggaggccgaggc

SEQ ID NO: 19256 - DNA, 20 bp, synthetic construct
  misc_feature 1..20: note = Description of Artificial Sequence: Synthetic oligonucleotide
  misc_feature 1..20: note = Target: FXN; (+) strand; PAM type: NRG; PAM sequence: CAG
  source 1..20: mol_type = other DNA
ctttgggaggccgaggcggg

SEQ ID NO: 19257 - DNA, 20 bp, synthetic construct
  misc_feature 1..20: note = Description of Artificial Sequence: Synthetic oligonucleotide
  misc_feature 1..20: note = Target: FXN; (+) strand; PAM type: NRG; PAM sequence: GAG
  source 1..20: mol_type = other DNA
ggccgaggcgggcagatcat

SEQ ID NO: 19258 - DNA, 20 bp, synthetic construct
  misc_feature 1..20: note = Description of Artificial Sequence: Synthetic oligonucleotide
  misc_feature 1..20: note = Target: FXN; (+) strand; PAM type: NRG; PAM sequence: AGG
  source 1..20: mol_type = other DNA
gccgaggcgggcagatcatg

SEQ ID NO: 19259 - DNA, 20 bp, synthetic construct
  misc_feature 1..20: note = Description of Artificial Sequence: Synthetic oligonucleotide
  misc_feature 1..20: note = Target: FXN; (+) strand; PAM type: NRG; PAM sequence: CAG
  source 1..20: mol_type = other DNA
aggcgggcagatcatgaggt

SEQ ID NO: 19260 - DNA, 20 bp, synthetic construct
  misc_feature 1..20: note = Description of Artificial Sequence: Synthetic oligonucleotide
  misc_feature 1..20: note = Target: FXN; (+) strand; PAM type: NRG; PAM sequence: AGG
  source 1..20: mol_type = other DNA
ggcgggcagatcatgaggtc

SEQ ID NO: 19261 - DNA, 20 bp, synthetic construct
  misc_feature 1..20: note = Description of Artificial Sequence: Synthetic oligonucleotide
  misc_feature 1..20: note = Target: FXN; (+) strand; PAM type: NRG; PAM sequence: GAG
  source 1..20: mol_type = other DNA
cgggcagatcatgaggtcag

SEQ ID NO: 19262 - DNA, 20 bp, synthetic construct
  misc_feature 1..20: note = Description of Artificial Sequence: Synthetic oligonucleotide
  misc_feature 1..20: note = Target: FXN; (+) strand; PAM type: NRG; PAM sequence: GAG
  source 1..20: mol_type = other DNA
gatcatgaggtcaggagatc

SEQ ID NO: 19263 - DNA, 20 bp, synthetic construct
  misc_feature 1..20: note = Description of Artificial Sequence: Synthetic oligonucleotide
  misc_feature 1..20: note = Target: FXN; (+) strand; PAM type: NRG; PAM sequence: TGG
  source 1..20: mol_type = other DNA
tcaggagatcgagaccatcc

SEQ ID NO: 19264 - DNA, 20 bp, synthetic construct
  misc_feature 1..20: note = Description of Artificial Sequence: Synthetic oligonucleotide
  misc_feature 1..20: note = Target: FXN; (+) strand; PAM type: NRG; PAM sequence: CGG
  source 1..20: mol_type = other DNA
cgagaccatcctggctaaca

SEQ ID NO: 19265 - DNA, 20 bp, synthetic construct
  misc_feature 1..20: note = Description of Artificial Sequence: Synthetic oligonucleotide
  misc_feature 1..20: note = Target: FXN; (+) strand; PAM type: NRG; PAM sequence: TAG
  source 1..20: mol_type = other DNA
ctactaaaaatgcaaaaact

SEQ ID NO: 19266 - DNA, 20 bp, synthetic construct
  misc_feature 1..20: note = Description of Artificial Sequence: Synthetic oligonucleotide
  misc_feature 1..20: note = Target: FXN; (+) strand; PAM type: NRG; PAM sequence: CGG
  source 1..20: mol_type = other DNA
taaaaatgcaaaaacttagc

SEQ ID NO: 19267 - DNA, 20 bp, synthetic construct
  misc_feature 1..20: note = Description of Artificial Sequence: Synthetic oligonucleotide
  misc_feature 1..20: note = Target: FXN; (+) strand; PAM type: NRG; PAM sequence: GGG
  source 1..20: mol_type = other DNA
aaaaatgcaaaaacttagcc

SEQ ID NO: 19268 - DNA, 20 bp, synthetic construct
  misc_feature 1..20: note = Description of Artificial Sequence: Synthetic oligonucleotide
  misc_feature 1..20: note = Target: FXN; (+) strand; PAM type: NRG; PAM sequence: TGG
  source 1..20: mol_type = other DNA
tgcaaaaacttagccgggcg

SEQ ID NO: 19269 - DNA, 20 bp, synthetic construct
  misc_feature 1..20: note = Description of Artificial Sequence: Synthetic oligonucleotide
  misc_feature 1..20: note = Target: FXN; (+) strand; PAM type: NRG; PAM sequence: TGG
  source 1..20: mol_type = other DNA
aaaaacttagccgggcgtgg

SEQ ID NO: 19270 - DNA, 20 bp, synthetic construct
  misc_feature 1..20: note = Description of Artificial Sequence: Synthetic oligonucleotide
  misc_feature 1..20: note = Target: FXN; (+) strand; PAM type: NRG; PAM sequence: CAG
  source 1..20: mol_type = other DNA
aacttagccgggcgtggtgg

SEQ ID NO: 19271 - DNA, 20 bp, synthetic construct
  misc_feature 1..20: note = Description of Artificial Sequence: Synthetic oligonucleotide
  misc_feature 1..20: note = Target: FXN; (+) strand; PAM type: NRG; PAM sequence: AGG
  source 1..20: mol_type = other DNA
acttagccgggcgtggtggc

SEQ ID NO: 19272 - DNA, 20 bp, synthetic construct
  misc_feature 1..20: note = Description of Artificial Sequence: Synthetic oligonucleotide
  misc_feature 1..20: note = Target: FXN; (+) strand; PAM type: NRG; PAM sequence: TAG
  source 1..20: mol_type = other DNA
ggcgtggtggcaggcacctg

SEQ ID NO: 19273 - DNA, 20 bp, synthetic construct
  misc_feature 1..20: note = Description of Artificial Sequence: Synthetic oligonucleotide
  misc_feature 1..20: note = Target: FXN; (+) strand; PAM type: NRG; PAM sequence: CAG
  source 1..20: mol_type = other DNA
gtggcaggcacctgtagtcc

SEQ ID NO: 19274 - DNA, 20 bp, synthetic construct
  misc_feature 1..20: note = Description of Artificial Sequence: Synthetic oligonucleotide
  misc_feature 1..20: note = Target: FXN; (+) strand; PAM type: NRG; PAM sequence: TGG
  source 1..20: mol_type = other DNA
cacctgtagtcccagctact

SEQ ID NO: 19275 - DNA, 20 bp, synthetic construct
  misc_feature 1..20: note = Description of Artificial Sequence: Synthetic oligonucleotide
  misc_feature 1..20: note = Target: FXN; (+) strand; PAM type: NRG; PAM sequence: GGG
  source 1..20: mol_type = other DNA
acctgtagtcccagctactt

SEQ ID NO: 19276 - DNA, 20 bp, synthetic construct
  misc_feature 1..20: note = Description of Artificial Sequence: Synthetic oligonucleotide
  misc_feature 1..20: note = Target: FXN; (+) strand; PAM type: NRG; PAM sequence: GAG
  source 1..20: mol_type = other DNA
ctgtagtcccagctacttgg

SEQ ID NO: 19277 - DNA, 20 bp, synthetic construct
  misc_feature 1..20: note = Description of Artificial Sequence: Synthetic oligonucleotide
  misc_feature 1..20: note = Target: FXN; (+) strand; PAM type: NRG; PAM sequence: AGG
  source 1..20: mol_type = other DNA
tgtagtcccagctacttggg

SEQ ID NO: 19278 - DNA, 20 bp, synthetic construct
  misc_feature 1..20: note = Description of Artificial Sequence: Synthetic oligonucleotide
  misc_feature 1..20: note = Target: FXN; (+) strand; PAM type: NRG; PAM sequence: GAG
  source 1..20: mol_type = other DNA
tcccagctacttgggaggct

SEQ ID NO: 19279 - DNA, 20 bp, synthetic construct
  misc_feature 1..20: note = Description of Artificial Sequence: Synthetic oligonucleotide
  misc_feature 1..20: note = Target: FXN; (+) strand; PAM type: NRG; PAM sequence: AGG
  source 1..20: mol_type = other DNA
cccagctacttgggaggctg

SEQ ID NO: 19280 - DNA, 20 bp, synthetic construct
  misc_feature 1..20: note = Description of Artificial Sequence: Synthetic oligonucleotide
  misc_feature 1..20: note = Target: FXN; (+) strand; PAM type: NRG; PAM sequence: CAG
  source 1..20: mol_type = other DNA
agctacttgggaggctgagg

SEQ ID NO: 19281 - DNA, 20 bp, synthetic construct
  misc_feature 1..20: note = Description of Artificial Sequence: Synthetic oligonucleotide
  misc_feature 1..20: note = Target: FXN; (+) strand; PAM type: NRG; PAM sequence: AGG
  source 1..20: mol_type = other DNA
gctacttgggaggctgaggc

SEQ ID NO: 19282 - DNA, 20 bp, synthetic construct
  misc_feature 1..20: note = Description of Artificial Sequence: Synthetic oligonucleotide
  misc_feature 1..20: note = Target: FXN; (+) strand; PAM type: NRG; PAM sequence: GAG
  source 1..20: mol_type = other DNA
tacttgggaggctgaggcag

SEQ ID NO: 19283 - DNA, 20 bp, synthetic construct
  misc_feature 1..20: note = Description of Artificial Sequence: Synthetic oligonucleotide
  misc_feature 1..20: note = Target: FXN; (+) strand; PAM type: NRG; PAM sequence: TGG
  source 1..20: mol_type = other DNA
gggaggctgaggcaggagaa

SEQ ID NO: 19284 - DNA, 20 bp, synthetic construct
  misc_feature 1..20: note = Description of Artificial Sequence: Synthetic oligonucleotide
  misc_feature 1..20: note = Target: FXN; (+) strand; PAM type: NRG; PAM sequence: TGG
  source 1..20: mol_type = other DNA
gcaggagaatggtgtgaacc

SEQ ID NO: 19285 - DNA, 20 bp, synthetic construct
  misc_feature 1..20: note = Description of Artificial Sequence: Synthetic oligonucleotide
  misc_feature 1..20: note = Target: FXN; (+) strand; PAM type: NRG; PAM sequence: GGG
  source 1..20: mol_type = other DNA
caggagaatggtgtgaacct

SEQ ID NO: 19286 - DNA, 20 bp, synthetic construct
  misc_feature 1..20: note = Description of Artificial Sequence: Synthetic oligonucleotide
  misc_feature 1..20: note = Target: FXN; (+) strand; PAM type: NRG; PAM sequence: GAG
  source 1..20: mol_type = other DNA
ggagaatggtgtgaacctgg

SEQ ID NO: 19287 - DNA, 20 bp, synthetic construct
  misc_feature 1..20: note = Description of Artificial Sequence: Synthetic oligonucleotide
  misc_feature 1..20: note = Target: FXN; (+) strand; PAM type: NRG; PAM sequence: AGG
  source 1..20: mol_type = other DNA
gagaatggtgtgaacctggg

SEQ ID NO: 19288 - DNA, 20 bp, synthetic construct
  misc_feature 1..20: note = Description of Artificial Sequence: Synthetic oligonucleotide
  misc_feature 1..20: note = Target: FXN; (+) strand; PAM type: NRG; PAM sequence: CGG
  source 1..20: mol_type = other DNA
aatggtgtgaacctgggagg

SEQ ID NO: 19289 - DNA, 20 bp, synthetic construct
  misc_feature 1..20: note = Description of Artificial Sequence: Synthetic oligonucleotide
  misc_feature 1..20: note = Target: FXN; (+) strand; PAM type: NRG; PAM sequence: GAG
  source 1..20: mol_type = other DNA
tggtgtgaacctgggaggcg

SEQ ID NO: 19290 - DNA, 20 bp, synthetic construct
  misc_feature 1..20: note = Description of Artificial Sequence: Synthetic oligonucleotide
  misc_feature 1..20: note = Target: FXN; (+) strand; PAM type: NRG; PAM sequence: CAG
  source 1..20: mol_type = other DNA
aacctgggaggcggagcttg

SEQ ID NO: 19291 - DNA, 20 bp, synthetic construct
  misc_feature 1..20: note = Description of Artificial Sequence: Synthetic oligonucleotide
  misc_feature 1..20: note = Target: FXN; (+) strand; PAM type: NRG; PAM sequence: GAG
  source 1..20: mol_type = other DNA
tgggaggcggagcttgcagt

SEQ ID NO: 19292 - DNA, 20 bp, synthetic construct
  misc_feature 1..20: note = Description of Artificial Sequence: Synthetic oligonucleotide
  misc_feature 1..20: note = Target: FXN; (+) strand; PAM type: NRG; PAM sequence: CAG
  source 1..20: mol_type = other DNA
aggcggagcttgcagtgagc

SEQ ID NO: 19293 - DNA, 20 bp, synthetic construct
  misc_feature 1..20: note = Description of Artificial Sequence: Synthetic oligonucleotide
  misc_feature 1..20: note = Target: FXN; (+) strand; PAM type: NRG; PAM sequence: AGG
  source 1..20: mol_type = other DNA
ggcggagcttgcagtgagcc

SEQ ID NO: 19294 - DNA, 20 bp, synthetic construct
  misc_feature 1..20: note = Description of Artificial Sequence: Synthetic oligonucleotide
  misc_feature 1..20: note = Target: FXN; (+) strand; PAM type: NRG; PAM sequence: CAG
  source 1..20: mol_type = other DNA
aggatcccgccactgcactc

SEQ ID NO: 19295 - DNA, 20 bp, synthetic construct
  misc_feature 1..20: note = Description of Artificial Sequence: Synthetic oligonucleotide
  misc_feature 1..20: note = Target: FXN; (+) strand; PAM type: NRG; PAM sequence: TGG
  source 1..20: mol_type = other DNA
cccgccactgcactccagcc

SEQ ID NO: 19296 - DNA, 20 bp, synthetic construct
  misc_feature 1..20: note = Description of Artificial Sequence: Synthetic oligonucleotide
  misc_feature 1..20: note = Target: FXN; (+) strand; PAM type: NRG; PAM sequence: GGG
  source 1..20: mol_type = other DNA
ccgccactgcactccagcct

SEQ ID NO: 19297 - DNA, 20 bp, synthetic construct
  misc_feature 1..20: note = Description of Artificial Sequence: Synthetic oligonucleotide
  misc_feature 1..20: note = Target: FXN; (+) strand; PAM type: NRG; PAM sequence: CAG
  source 1..20: mol_type = other DNA
ctgcactccagcctgggcga

SEQ ID NO: 19298 - DNA, 20 bp, synthetic construct
  misc_feature 1..20: note = Description of Artificial Sequence: Synthetic oligonucleotide
  misc_feature 1..20: note = Target: FXN; (+) strand; PAM type: NRG; PAM sequence: GAG
  source 1..20: mol_type = other DNA
gcactccagcctgggcgaca

SEQ ID NO: 19299 - DNA, 20 bp, synthetic construct
  misc_feature 1..20: note = Description of Artificial Sequence: Synthetic oligonucleotide
  misc_feature 1..20: note = Target: FXN; (+) strand; PAM type: NRG; PAM sequence: GAG
  source 1..20: mol_type = other DNA
tccagcctgggcgacagagc

SEQ ID NO: 19300 - DNA, 20 bp, synthetic construct
  misc_feature 1..20: note = Description of Artificial Sequence: Synthetic oligonucleotide
  misc_feature 1..20: note = Target: FXN; (+) strand; PAM type: NRG; PAM sequence: AAG
  source 1..20: mol_type = other DNA
gagacttcatcttaaaaaaa

SEQ ID NO: 19301 - DNA, 20 bp, synthetic construct
  misc_feature 1..20: note = Description of Artificial Sequence: Synthetic oligonucleotide
  misc_feature 1..20: note = Target: FXN; (+) strand; PAM type: NRG; PAM sequence: AAG
  source 1..20: mol_type = other DNA
ttcatcttaaaaaaaaagaa

SEQ ID NO: 19302 - DNA, 20 bp, synthetic construct
  misc_feature 1..20: note = Description of Artificial Sequence: Synthetic oligonucleotide
  misc_feature 1..20: note = Target: FXN; (+) strand; PAM type: NRG; PAM sequence: AAG
  source 1..20: mol_type = other DNA
ttaaaaaaaaagaaaagaaa

SEQ ID NO: 19303 - DNA, 20 bp, synthetic construct
  misc_feature 1..20: note = Description of Artificial Sequence: Synthetic oligonucleotide
  misc_feature 1..20: note = Target: FXN; (+) strand; PAM type: NRG; PAM sequence: AGG
  source 1..20: mol_type = other DNA
taaaaaaaaagaaaagaaaa

SEQ ID NO: 19304 - DNA, 20 bp, synthetic construct
  misc_feature 1..20: note = Description of Artificial Sequence: Synthetic oligonucleotide
  misc_feature 1..20: note = Target: FXN; (+) strand; PAM type: NRG; PAM sequence: AAG
  source 1..20: mol_type = other DNA
gaaaagaaaaaggaaaatga

SEQ ID NO: 19305 - DNA, 20 bp, synthetic construct
  misc_feature 1..20: note = Description of Artificial Sequence: Synthetic oligonucleotide
  misc_feature 1..20: note = Target: FXN; (+) strand; PAM type: NRG; PAM sequence: GAG
  source 1..20: mol_type = other DNA
agaaaaaggaaaatgaaagt

SEQ ID NO: 19306 - DNA, 20 bp, synthetic construct
  misc_feature 1..20: note = Description of Artificial Sequence: Synthetic oligonucleotide
  misc_feature 1..20: note = Target: FXN; (+) strand; PAM type: NRG; PAM sequence: AGG
  source 1..20: mol_type = other DNA
gaaaaaggaaaatgaaagtg

SEQ ID NO: 19307 - DNA, 20 bp, synthetic construct
  misc_feature 1..20: note = Description of Artificial Sequence: Synthetic oligonucleotide
  misc_feature 1..20: note = Target: FXN; (+) strand; PAM type: NRG; PAM sequence: CAG
  source 1..20: mol_type = other DNA
aggaaaatgaaagtgaggta

SEQ ID NO: 19308 - DNA, 20 bp, synthetic construct
  misc_feature 1..20: note = Description of Artificial Sequence: Synthetic oligonucleotide
  misc_feature 1..20: note = Target: FXN; (+) strand; PAM type: NRG; PAM sequence: CAG
  source 1..20: mol_type = other DNA
atgaaagtgaggtacagaaa

SEQ ID NO: 19309 - DNA, 20 bp, synthetic construct
  misc_feature 1..20: note = Description of Artificial Sequence: Synthetic oligonucleotide
  misc_feature 1..20: note = Target: FXN; (+) strand; PAM type: NRG; PAM sequence: CAG
  source 1..20: mol_type = other DNA
aagtgaggtacagaaacagc

SEQ ID NO: 19310 - DNA, 20 bp, synthetic construct
  misc_feature 1..20: note = Description of Artificial Sequence: Synthetic oligonucleotide
  misc_feature 1..20: note = Target: FXN; (+) strand; PAM type: NRG; PAM sequence: AGG
  source 1..20: mol_type = other DNA
agtgaggtacagaaacagcc

SEQ ID NO: 19311 - DNA, 20 bp, synthetic construct
  misc_feature 1..20: note = Description of Artificial Sequence: Synthetic oligonucleotide
  misc_feature 1..20: note = Target: FXN; (+) strand; PAM type: NRG; PAM sequence: TGG
  source 1..20: mol_type = other DNA
aggtacagaaacagccaggt

SEQ ID NO: 19312 - DNA, 20 bp, synthetic construct
  misc_feature 1..20: note = Description of Artificial Sequence: Synthetic oligonucleotide
  misc_feature 1..20: note = Target: FXN; (+) strand; PAM type: NRG; PAM sequence: CAG
  source 1..20: mol_type = other DNA
agaaacagccaggttggtta

SEQ ID NO: 19313 - DNA, 20 bp, synthetic construct
  misc_feature 1..20: note = Description of Artificial Sequence: Synthetic oligonucleotide
  misc_feature 1..20: note = Target: FXN; (+) strand; PAM type: NRG; PAM sequence: TGG
  source 1..20: mol_type = other DNA
cagccaggttggttacagct

SEQ ID NO: 19314 - DNA, 20 bp, synthetic construct
  misc_feature 1..20: note = Description of Artificial Sequence: Synthetic oligonucleotide
  misc_feature 1..20: note = Target: FXN; (+) strand; PAM type: NRG; PAM sequence: TGG
  source 1..20: mol_type = other DNA
cttggtgtttgccttaaact

SEQ ID NO: 19315 - DNA, 20 bp, synthetic construct
  misc_feature 1..20: note = Description of Artificial Sequence: Synthetic oligonucleotide
  misc_feature 1..20: note = Target: FXN; (+) strand; PAM type: NRG; PAM sequence: CAG
  source 1..20: mol_type = other DNA
tgccttaaacttggtttgaa

SEQ ID NO: 19316 - DNA, 20 bp, synthetic construct
  misc_feature 1..20: note = Description of Artificial Sequence: Synthetic oligonucleotide
  misc_feature 1..20: note = Target: FXN; (+) strand; PAM type: NRG; PAM sequence: TGG
  source 1..20: mol_type = other DNA
ttaaacttggtttgaacagt

SEQ ID NO: 19317 - DNA, 20 bp, synthetic construct
  misc_feature 1..20: note = Description of Artificial Sequence: Synthetic oligonucleotide
  misc_feature 1..20: note = Target: FXN; (+) strand; PAM type: NRG; PAM sequence: TAG
  source 1..20: mol_type = other DNA
aacagttggccgcctttgat

SEQ ID NO: 19318 - DNA, 20 bp, synthetic construct
  misc_feature 1..20: note = Description of Artificial Sequence: Synthetic oligonucleotide
  misc_feature 1..20: note = Target: FXN; (+) strand; PAM type: NRG; PAM sequence: CGG
  source 1..20: mol_type = other DNA
gcctttgattagccaaaact

SEQ ID NO: 19319 - DNA, 20 bp, synthetic construct
  misc_feature 1..20: note = Description of Artificial Sequence: Synthetic oligonucleotide
  misc_feature 1..20: note = Target: FXN; (+) strand; PAM type: NRG; PAM sequence: TGG
  source 1..20: mol_type = other DNA
attagccaaaactcggtgat

SEQ ID NO: 19320 - DNA, 20 bp, synthetic construct
  misc_feature 1..20: note = Description of Artificial Sequence: Synthetic oligonucleotide
  misc_feature 1..20: note = Target: FXN; (+) strand; PAM type: NRG; PAM sequence: AAG
  source 1..20: mol_type = other DNA
caaaactcggtgattggtac

SEQ ID NO: 19321 - DNA, 20 bp, synthetic construct
  misc_feature 1..20: note = Description of Artificial Sequence: Synthetic oligonucleotide
  misc_feature 1..20: note = Target: FXN; (+) strand; PAM type: NRG; PAM sequence: GAG
  source 1..20: mol_type = other DNA
aaactcggtgattggtacaa

SEQ ID NO: 19322 - DNA, 20 bp, synthetic construct
  misc_feature 1..20: note = Description of Artificial Sequence: Synthetic oligonucleotide
  misc_feature 1..20: note = Target: FXN; (+) strand; PAM type: NRG; PAM sequence: TAG
  source 1..20: mol_type = other DNA
ctcggtgattggtacaagag

SEQ ID NO: 19323 - DNA, 20 bp, synthetic construct
  misc_feature 1..20: note = Description of Artificial Sequence: Synthetic oligonucleotide
  misc_feature 1..20: note = Target: FXN; (+) strand; PAM type: NRG; PAM sequence: CAG
  source 1..20: mol_type = other DNA
attggtacaagagtagattg

SEQ ID NO: 19324 - DNA, 20 bp, synthetic construct
  misc_feature 1..20: note = Description of Artificial Sequence: Synthetic oligonucleotide
  misc_feature 1..20: note = Target: FXN; (+) strand; PAM type: NRG; PAM sequence: CAG
  source 1..20: mol_type = other DNA
agattgcagttcactatgta

SEQ ID NO: 19325 - DNA, 20 bp, synthetic construct
  misc_feature 1..20: note = Description of Artificial Sequence: Synthetic oligonucleotide
  misc_feature 1..20: note = Target: FXN; (+) strand; PAM type: NRG; PAM sequence: GAG
  source 1..20: mol_type = other DNA
attgcagttcactatgtaca

SEQ ID NO: 19326 - DNA, 20 bp, synthetic construct
  misc_feature 1..20: note = Description of Artificial Sequence: Synthetic oligonucleotide
  misc_feature 1..20: note = Target: FXN; (+) strand; PAM type: NRG; PAM sequence: AAG
  source 1..20: mol_type = other DNA
gcagttcactatgtacagag

SEQ ID NO: 19327 - DNA, 20 bp, synthetic construct
  misc_feature 1..20: note = Description of Artificial Sequence: Synthetic oligonucleotide
  misc_feature 1..20: note = Target: FXN; (+) strand; PAM type: NRG; PAM sequence: TAG
  source 1..20: mol_type = other DNA
actatgtacagagaagccct

SEQ ID NO: 19328 - DNA, 20 bp, synthetic construct
  misc_feature 1..20: note = Description of Artificial Sequence: Synthetic oligonucleotide
  misc_feature 1..20: note = Target: FXN; (+) strand; PAM type: NRG; PAM sequence: TAG
  source 1..20: mol_type = other DNA
ccttagatccgaactcaaaa

SEQ ID NO: 19329 - DNA, 20 bp, synthetic construct
  misc_feature 1..20: note = Description of Artificial Sequence: Synthetic oligonucleotide
  misc_feature 1..20: note = Target: FXN; (+) strand; PAM type: NRG; PAM sequence: AGG
  source 1..20: mol_type = other DNA
cttagatccgaactcaaaat

SEQ ID NO: 19330 - DNA, 20 bp, synthetic construct
  misc_feature 1..20: note = Description of Artificial Sequence: Synthetic oligonucleotide
  misc_feature 1..20: note = Target: FXN; (+) strand; PAM type: NRG; PAM sequence: AAG
  source 1..20: mol_type = other DNA
gatccgaactcaaaataggt

SEQ ID NO: 19331 - DNA, 20 bp, synthetic construct
  misc_feature 1..20: note = Description of Artificial Sequence: Synthetic oligonucleotide
  misc_feature 1..20: note = Target: FXN; (+) strand; PAM type: NRG; PAM sequence: AGG
  source 1..20: mol_type = other DNA
atccgaactcaaaataggta

SEQ ID NO: 19332 - DNA, 20 bp, synthetic construct
  misc_feature 1..20: note = Description of Artificial Sequence: Synthetic oligonucleotide
  misc_feature 1..20: note = Target: FXN; (+) strand; PAM type: NRG; PAM sequence: GAG
  source 1..20: mol_type = other DNA
ccgaactcaaaataggtaag

SEQ ID NO: 19333 - DNA, 20 bp, synthetic construct
  misc_feature 1..20: note = Description of Artificial Sequence: Synthetic oligonucleotide
  misc_feature 1..20: note = Target: FXN; (+) strand; PAM type: NRG; PAM sequence: AGG
  source 1..20: mol_type = other DNA
cgaactcaaaataggtaagg

SEQ ID NO: 19334 - DNA, 20 bp, synthetic construct
  misc_feature 1..20: note = Description of Artificial Sequence: Synthetic oligonucleotide
  misc_feature 1..20: note = Target: FXN; (+) strand; PAM type: NRG; PAM sequence: CAG
  source 1..20: mol_type = other DNA
actcaaaataggtaaggagg

SEQ ID NO: 19335 - DNA, 20 bp, synthetic construct
  misc_feature 1..20: note = Description of Artificial Sequence: Synthetic oligonucleotide
  misc_feature 1..20: note = Target: FXN; (+) strand; PAM type: NRG; PAM sequence: TAG
  source 1..20: mol_type = other DNA
aataggtaaggaggcagttt

SEQ ID NO: 19336 - DNA, 20 bp, synthetic construct
  misc_feature 1..20: note = Description of Artificial Sequence: Synthetic oligonucleotide
  misc_feature 1..20: note = Target: FXN; (+) strand; PAM type: NRG; PAM sequence: AAG
  source 1..20: mol_type = other DNA
aggcagttttagctacactt

SEQ ID NO: 19337 - DNA, 20 bp, synthetic construct
  misc_feature 1..20: note = Description of Artificial Sequence: Synthetic oligonucleotide
  misc_feature 1..20: note = Target: FXN; (+) strand; PAM type: NRG; PAM sequence: CAG
  source 1..20: mol_type = other DNA
tacacttaagttaacatact

SEQ ID NO: 19338 - DNA, 20 bp, synthetic construct
  misc_feature 1..20: note = Description of Artificial Sequence: Synthetic oligonucleotide
  misc_feature 1..20: note = Target: FXN; (+) strand; PAM type: NRG; PAM sequence: AGG
  source 1..20: mol_type = other DNA
acacttaagttaacatactc

SEQ ID NO: 19339 - DNA, 20 bp, synthetic construct
  misc_feature 1..20: note = Description of Artificial Sequence: Synthetic oligonucleotide
  misc_feature 1..20: note = Target: FXN; (+) strand; PAM type: NRG; PAM sequence: GAG
  source 1..20: mol_type = other DNA
acttaagttaacatactcag

SEQ ID NO: 19340 - DNA, 20 bp, synthetic construct
  misc_feature 1..20: note = Description of Artificial Sequence: Synthetic oligonucleotide
  misc_feature 1..20: note = Target: FXN; (+) strand; PAM type: NRG; PAM sequence: CAG
  source 1..20: mol_type = other DNA
catactcaggagtaccattc

SEQ ID NO: 19341 - DNA, 20 bp, synthetic construct
  misc_feature 1..20: note = Description of Artificial Sequence: Synthetic oligonucleotide
  misc_feature 1..20: note = Target: FXN; (+) strand; PAM type: NRG; PAM sequence: AAG
  source 1..20: mol_type = other DNA
aggagtaccattccagcttc

SEQ ID NO: 19342 - DNA, 20 bp, synthetic construct
  misc_feature 1..20: note = Description of Artificial Sequence: Synthetic oligonucleotide
  misc_feature 1..20: note = Target: FXN; (+) strand; PAM type: NRG; PAM sequence: TGG
  source 1..20: mol_type = other DNA
gtaccattccagcttcaagc

SEQ ID NO: 19343 - DNA, 20 bp, synthetic construct
  misc_feature 1..20: note = Description of Artificial Sequence: Synthetic oligonucleotide
  misc_feature 1..20: note = Target: FXN; (+) strand; PAM type: NRG; PAM sequence: AAG
  source 1..20: mol_type = other DNA
ccattccagcttcaagctgg

SEQ ID NO: 19344 - DNA, 20 bp, synthetic construct
  misc_feature 1..20: note = Description of Artificial Sequence: Synthetic oligonucleotide
  misc_feature 1..20: note = Target: FXN; (+) strand; PAM type: NRG; PAM sequence: CAG
  source 1..20: mol_type = other DNA
cttcaagctggaagtgtctg

SEQ ID NO: 19345 - DNA, 20 bp, synthetic construct
  misc_feature 1..20: note = Description of Artificial Sequence: Synthetic oligonucleotide
  misc_feature 1..20: note = Target: FXN; (+) strand; PAM type: NRG; PAM sequence: GAG
  source 1..20: mol_type = other DNA
ggaagtgtctgcagccccct

SEQ ID NO: 19346 - DNA, 20 bp, synthetic construct
  misc_feature 1..20: note = Description of Artificial Sequence: Synthetic oligonucleotide
  misc_feature 1..20: note = Target: FXN; (+) strand; PAM type: NRG; PAM sequence: AAG
  source 1..20: mol_type = other DNA
ccctgagaccacttaatccc

SEQ ID NO: 19347 - DNA, 20 bp, synthetic construct
  misc_feature 1..20: note = Description of Artificial Sequence: Synthetic oligonucleotide
  misc_feature 1..20: note = Target: FXN; (+) strand; PAM type: NRG; PAM sequence: CAG
  source 1..20: mol_type = other DNA
ccaagttaaaaacccctgct

SEQ ID NO: 19348 - DNA, 20 bp, synthetic construct
  misc_feature 1..20: note = Description of Artificial Sequence: Synthetic oligonucleotide
  misc_feature 1..20: note = Target: FXN; (+) strand; PAM type: NRG; PAM sequence: GAG
  source 1..20: mol_type = other DNA
aagttaaaaacccctgctca

SEQ ID NO: 19349 - DNA, 20 bp, synthetic construct
  misc_feature 1..20: note = Description of Artificial Sequence: Synthetic oligonucleotide
  misc_feature 1..20: note = Target: FXN; (+) strand; PAM type: NRG; PAM sequence: AGG
  source 1..20: mol_type = other DNA
agttaaaaacccctgctcag

SEQ ID NO: 19350 - DNA, 20 bp, synthetic construct
  misc_feature 1..20: note = Description of Artificial Sequence: Synthetic oligonucleotide
  misc_feature 1..20: note = Target: FXN; (+) strand; PAM type: NRG; PAM sequence: CAG
  source 1..20: mol_type = other DNA
taaaaacccctgctcagagg

SEQ ID NO: 19351 - DNA, 20 bp, synthetic construct
  misc_feature 1..20: note = Description of Artificial Sequence: Synthetic oligonucleotide
  misc_feature 1..20: note = Target: FXN; (+) strand; PAM type: NRG; PAM sequence: GAG
  source 1..20: mol_type = other DNA
tttttttttttttttttttt

SEQ ID NO: 19352 - DNA, 20 bp, synthetic construct
  misc_feature 1..20: note = Description of Artificial Sequence: Synthetic oligonucleotide
  misc_feature 1..20: note = Target: FXN; (+) strand; PAM type: NRG; PAM sequence: GAG
  source 1..20: mol_type = other DNA
ttttttttttttttttttga

SEQ ID NO: 19353 - DNA, 20 bp, synthetic construct
  misc_feature 1..20: note = Description of Artificial Sequence: Synthetic oligonucleotide
  misc_feature 1..20: note = Target: FXN; (+) strand; PAM type: NRG; PAM sequence: GAG
  source 1..20: mol_type = other DNA
ttttttttttttttttgaga

SEQ ID NO: 19354 - DNA, 20 bp, synthetic construct
  misc_feature 1..20: note = Description of Artificial Sequence: Synthetic oligonucleotide
  misc_feature 1..20: note = Target: FXN; (+) strand; PAM type: NRG; PAM sequence: CAG
  source 1..20: mol_type = other DNA
agagatctcactctgtcacc

SEQ ID NO: 19355 - DNA, 20 bp, synthetic construct
  misc_feature 1..20: note = Description of Artificial Sequence: Synthetic oligonucleotide
  misc_feature 1..20: note = Target: FXN; (+) strand; PAM type: NRG; PAM sequence: AGG
  source 1..20: mol_type = other DNA
gagatctcactctgtcaccc

SEQ ID NO: 19356 - DNA, 20 bp, synthetic construct
  misc_feature 1..20: note = Description of Artificial Sequence: Synthetic oligonucleotide
  misc_feature 1..20: note = Target: FXN; (+) strand; PAM type: NRG; PAM sequence: TGG
  source 1..20: mol_type = other DNA
tctcactctgtcacccaggc

SEQ ID NO: 19357 - DNA, 20 bp, synthetic construct
  misc_feature 1..20: note = Description of Artificial Sequence: Synthetic oligonucleotide
  misc_feature 1..20: note = Target: FXN; (+) strand; PAM type: NRG; PAM sequence: GAG
  source 1..20: mol_type = other DNA
tcactctgtcacccaggctg

SEQ ID NO: 19358 - DNA, 20 bp, synthetic construct
  misc_feature 1..20: note = Description of Artificial Sequence: Synthetic oligonucleotide
  misc_feature 1..20: note = Target: FXN; (+) strand; PAM type: NRG; PAM sequence: CAG
  source 1..20: mol_type = other DNA
ctgtcacccaggctggagtg

SEQ ID NO: 19359 - DNA, 20 bp, synthetic construct
  misc_feature 1..20: note = Description of Artificial Sequence: Synthetic oligonucleotide
  misc_feature 1..20: note = Target: FXN; (+) strand; PAM type: NRG; PAM sequence: TGG
  source 1..20: mol_type = other DNA
tcacccaggctggagtgcag

SEQ ID NO: 19360 - DNA, 20 bp, synthetic construct
  misc_feature 1..20: note = Description of Artificial Sequence: Synthetic oligonucleotide
  misc_feature 1..20: note = Target: FXN; (+) strand; PAM type: NRG; PAM sequence: CAG
  source 1..20: mol_type = other DNA
ggagtgcagtggcacgatct

SEQ ID NO: 19361 - DNA, 20 bp, synthetic construct
  misc_feature 1..20: note = Description of Artificial Sequence: Synthetic oligonucleotide
  misc_feature 1..20: note = Target: FXN; (+) strand; PAM type: NRG; PAM sequence: TGG
  source 1..20: mol_type = other DNA
tcactgcaaccaccacctcc

SEQ ID NO: 19362 - DNA, 20 bp, synthetic construct
  misc_feature 1..20: note = Description of Artificial Sequence: Synthetic oligonucleotide
  misc_feature 1..20: note = Target: FXN; (+) strand; PAM type: NRG; PAM sequence: GGG
  source 1..20: mol_type = other DNA
cactgcaaccaccacctcct

SEQ ID NO: 19363 - DNA, 20 bp, synthetic construct
  misc_feature 1..20: note = Description of Artificial Sequence: Synthetic oligonucleotide
  misc_feature 1..20: note = Target: FXN; (+) strand; PAM type: NRG; PAM sequence: AAG
  source 1..20: mol_type = other DNA
aaccaccacctcctgggctc

SEQ ID NO: 19364 - DNA, 20 bp, synthetic construct
  misc_feature 1..20: note = Description of Artificial Sequence: Synthetic oligonucleotide
  misc_feature 1..20: note = Target: FXN; (+) strand; PAM type: NRG; PAM sequence: AGG
  source 1..20: mol_type = other DNA
accaccacctcctgggctca

SEQ ID NO: 19365 - DNA, 20 bp, synthetic construct
  misc_feature 1..20: note = Description of Artificial Sequence: Synthetic oligonucleotide
  misc_feature 1..20: note = Target: FXN; (+) strand; PAM type: NRG; PAM sequence: GGG
  source 1..20: mol_type = other DNA
ccaccacctcctgggctcaa

SEQ ID NO: 19366 - DNA, 20 bp, synthetic construct
  misc_feature 1..20: note = Description of Artificial Sequence: Synthetic oligonucleotide
  misc_feature 1..20: note = Target: FXN; (+) strand; PAM type: NRG; PAM sequence: CAG
  source 1..20: mol_type = other DNA
ctcaagggattctcttgcct

SEQ ID NO: 19367 - DNA, 20 bp, synthetic construct
  misc_feature 1..20: note = Description of Artificial Sequence: Synthetic oligonucleotide
  misc_feature 1..20: note = Target: FXN; (+) strand; PAM type: NRG; PAM sequence: GAG
  source 1..20: mol_type = other DNA
ttctcttgcctcagtctccc

SEQ ID NO: 19368 - DNA, 20 bp, synthetic construct
  misc_feature 1..20: note = Description of Artificial Sequence: Synthetic oligonucleotide
  misc_feature 1..20: note = Target: FXN; (+) strand; PAM type: NRG; PAM sequence: TGG
  source 1..20: mol_type = other DNA
gcctcagtctcccgagtaac

SEQ ID NO: 19369 - DNA, 20 bp, synthetic construct
  misc_feature 1..20: note = Description of Artificial Sequence: Synthetic oligonucleotide
  misc_feature 1..20: note = Target: FXN; (+) strand; PAM type: NRG; PAM sequence: GGG
  source 1..20: mol_type = other DNA
cctcagtctcccgagtaact

SEQ ID NO: 19370 - DNA, 20 bp, synthetic construct
  misc_feature 1..20: note = Description of Artificial Sequence: Synthetic oligonucleotide
  misc_feature 1..20: note = Target: FXN; (+) strand; PAM type: NRG; PAM sequence: CAG
  source 1..20: mol_type = other DNA
ctcccgagtaactgggatta

SEQ ID NO: 19371 - DNA, 20 bp, synthetic construct
  misc_feature 1..20: note = Description of Artificial Sequence: Synthetic oligonucleotide
  misc_feature 1..20: note = Target: FXN; (+) strand; PAM type: NRG; PAM sequence: AGG
  source 1..20: mol_type = other DNA
tcccgagtaactgggattac

SEQ ID NO: 19372 - DNA, 20 bp, synthetic construct
  misc_feature 1..20: note = Description of Artificial Sequence: Synthetic oligonucleotide
  misc_feature 1..20: note = Target: FXN; (+) strand; PAM type: NRG; PAM sequence: CAG
  source 1..20: mol_type = other DNA
caggcgcgtgccactatgtc

SEQ ID NO: 19373 - DNA, 20 bp, synthetic construct
  misc_feature 1..20: note = Description of Artificial Sequence: Synthetic oligonucleotide
  misc_feature 1..20: note = Target: FXN; (+) strand; PAM type: NRG; PAM sequence: TAG
  source 1..20: mol_type = other DNA
aatttttttttttgtatttt

SEQ ID NO: 19374 - DNA, 20 bp, synthetic construct
  misc_feature 1..20: note = Description of Artificial Sequence: Synthetic oligonucleotide
  misc_feature 1..20: note = Target: FXN; (+) strand; PAM type: NRG; PAM sequence: TAG
  source 1..20: mol_type = other DNA
ttttttttttgtatttttag

SEQ ID NO: 19375 - DNA, 20 bp, synthetic construct
  misc_feature 1..20: note = Description of Artificial Sequence: Synthetic oligonucleotide
  misc_feature 1..20: note = Target: FXN; (+) strand; PAM type: NRG; PAM sequence: GAG
  source 1..20: mol_type = other DNA
ttttttttgtatttttagta

SEQ ID NO: 19376 - DNA, 20 bp, synthetic construct
  misc_feature 1..20: note = Description of Artificial Sequence: Synthetic oligonucleotide
  misc_feature 1..20: note = Target: FXN; (+) strand; PAM type: NRG; PAM sequence: TGG
  source 1..20: mol_type = other DNA
ttttgtatttttagtagaga

SEQ ID NO: 19377 - DNA, 20 bp, synthetic construct
  misc_feature 1..20: note = Description of Artificial Sequence: Synthetic oligonucleotide
  misc_feature 1..20: note = Target: FXN; (+) strand; PAM type: NRG; PAM sequence: GGG
  source 1..20: mol_type = other DNA
tttgtatttttagtagagat

SEQ ID NO: 19378 - DNA, 20 bp, synthetic construct
  misc_feature 1..20: note = Description of Artificial Sequence: Synthetic oligonucleotide
  misc_feature 1..20: note = Target: FXN; (+) strand; PAM type: NRG; PAM sequence: GGG
  source 1..20: mol_type = other DNA
ttgtatttttagtagagatg

SEQ ID NO: 19379 - DNA, 20 bp, synthetic construct
  misc_feature 1..20: note = Description of Artificial Sequence: Synthetic oligonucleotide
  misc_feature 1..20: note = Target: FXN; (+) strand; PAM type: NRG; PAM sequence: TGG
  source 1..20: mol_type = other DNA
gagatggggtttcaccatgt

SEQ ID NO: 19380 - DNA, 20 bp, synthetic construct
  misc_feature 1..20: note = Description of Artificial Sequence: Synthetic oligonucleotide
  misc_feature 1..20: note = Target: FXN; (+) strand; PAM type: NRG; PAM sequence: TGG
  source 1..20: mol_type = other DNA
ggggtttcaccatgttggcc

SEQ ID NO: 19381 - DNA, 20 bp, synthetic construct
  misc_feature 1..20: note = Description of Artificial Sequence: Synthetic oligonucleotide
  misc_feature 1..20: note = Target: FXN; (+) strand; PAM type: NRG; PAM sequence: TGG
  source 1..20: mol_type = other DNA
tttcaccatgttggcctggc

SEQ ID NO: 19382 - DNA, 20 bp, synthetic construct
  misc_feature 1..20: note = Description of Artificial Sequence: Synthetic oligonucleotide
  misc_feature 1..20: note = Target: FXN; (+) strand; PAM type: NRG; PAM sequence: AAG
  source 1..20: mol_type = other DNA
ggtcttgaactcttgacctc

SEQ ID NO: 19383 - DNA, 20 bp, synthetic construct
  misc_feature 1..20: note = Description of Artificial Sequence: Synthetic oligonucleotide
  misc_feature 1..20: note = Target: FXN; (+) strand; PAM type: NRG; PAM sequence: TGG
  source 1..20: mol_type = other DNA
cttgacctcaagtgatccac

SEQ ID NO: 19384 - DNA, 20 bp, synthetic construct
  misc_feature 1..20: note = Description of Artificial Sequence: Synthetic oligonucleotide
  misc_feature 1..20: note = Target: FXN; (+) strand; PAM type: NRG; PAM sequence: CAG
  source 1..20: mol_type = other DNA
ctcaagtgatccactggcct

SEQ ID NO: 19385 - DNA, 20 bp, synthetic construct
  misc_feature 1..20: note = Description of Artificial Sequence: Synthetic oligonucleotide
  misc_feature 1..20: note = Target: FXN; (+) strand; PAM type: NRG; PAM sequence: AAG
  source 1..20: mol_type = other DNA
ccactggcctcagcctccca

SEQ ID NO: 19386 - DNA, 20 bp, synthetic construct
  misc_feature 1..20: note = Description of Artificial Sequence: Synthetic oligonucleotide
  misc_feature 1..20: note = Target: FXN; (+) strand; PAM type: NRG; PAM sequence: TGG
  source 1..20: mol_type = other DNA
gcctcagcctcccaaagtgc

SEQ ID NO: 19387 - DNA, 20 bp, synthetic construct
  misc_feature 1..20: note = Description of Artificial Sequence: Synthetic oligonucleotide
  misc_feature 1..20: note = Target: FXN; (+) strand; PAM type: NRG; PAM sequence: TAG
  source 1..20: mol_type = other DNA
gcctcccaaagtgctggcat

SEQ ID NO: 19388 - DNA, 20 bp, synthetic construct
  misc_feature 1..20: note = Description of Artificial Sequence: Synthetic oligonucleotide
  misc_feature 1..20: note = Target: FXN; (+) strand; PAM type: NRG; PAM sequence: GAG
  source 1..20: mol_type = other DNA
ctcccaaagtgctggcatta

SEQ ID NO: 19389 - DNA, 20 bp, synthetic construct
  misc_feature 1..20: note = Description of Artificial Sequence: Synthetic oligonucleotide
  misc_feature 1..20: note = Target: FXN; (+) strand; PAM type: NRG; PAM sequence: AGG
  source 1..20: mol_type = other DNA
tcccaaagtgctggcattag

SEQ ID NO: 19390 - DNA, 20 bp, synthetic construct
  misc_feature 1..20: note = Description of Artificial Sequence: Synthetic oligonucleotide
  misc_feature 1..20: note = Target: FXN; (+) strand; PAM type: NRG; PAM sequence: GAG
  source 1..20: mol_type = other DNA
agtgctggcattagaggtgt

SEQ ID NO: 19391 - DNA, 20 bp, synthetic construct
  misc_feature 1..20: note = Description of Artificial Sequence: Synthetic oligonucleotide
  misc_feature 1..20: note = Target: FXN; (+) strand; PAM type: NRG; PAM sequence: TGG
  source 1..20: mol_type = other DNA
gaggtgtgagtcactgttcc

SEQ ID NO: 19392 - DNA, 20 bp, synthetic construct
  misc_feature 1..20: note = Description of Artificial Sequence: Synthetic oligonucleotide
  misc_feature 1..20: note = Target: FXN; (+) strand; PAM type: NRG; PAM sequence: CAG
  source 1..20: mol_type = other DNA
gtgagtcactgttcctggcc

SEQ ID NO: 19393 - DNA, 20 bp, synthetic construct
  misc_feature 1..20: note = Description of Artificial Sequence: Synthetic oligonucleotide
  misc_feature 1..20: note = Target: FXN; (+) strand; PAM type: NRG; PAM sequence: GAG
  source 1..20: mol_type = other DNA
gtcactgttcctggcccagt

SEQ ID NO: 19394 - DNA, 20 bp, synthetic construct
  misc_feature 1..20: note = Description of Artificial Sequence: Synthetic oligonucleotide
  misc_feature 1..20: note = Target: FXN; (+) strand; PAM type: NRG; PAM sequence: AGG
  source 1..20: mol_type = other DNA
tcactgttcctggcccagtg

SEQ ID NO: 19395 - DNA, 20 bp, synthetic construct
  misc_feature 1..20: note = Description of Artificial Sequence: Synthetic oligonucleotide
  misc_feature 1..20: note = Target: FXN; (+) strand; PAM type: NRG; PAM sequence: TGG
  source 1..20: mol_type = other DNA
ccagtgaggcaccatctcat

SEQ ID NO: 19396 - DNA, 20 bp, synthetic construct
  misc_feature 1..20: note = Description of Artificial Sequence: Synthetic oligonucleotide
  misc_feature 1..20: note = Target: FXN; (+) strand; PAM type: NRG; PAM sequence: TGG
  source 1..20: mol_type = other DNA
aggcaccatctcattggata

SEQ ID NO: 19397 - DNA, 20 bp, synthetic construct
  misc_feature 1..20: note = Description of Artificial Sequence: Synthetic oligonucleotide
  misc_feature 1..20: note = Target: FXN; (+) strand; PAM type: NRG; PAM sequence: GAG
  source 1..20: mol_type = other DNA
gcaccatctcattggatatg

SEQ ID NO: 19398 - DNA, 20 bp, synthetic construct
  misc_feature 1..20: note = Description of Artificial Sequence: Synthetic oligonucleotide
  misc_feature 1..20: note = Target: FXN; (+) strand; PAM type: NRG; PAM sequence: AAG
  source 1..20: mol_type = other DNA
tctcattggatatggagaca

SEQ ID NO: 19399 - DNA, 20 bp, synthetic construct
  misc_feature 1..20: note = Description of Artificial Sequence: Synthetic oligonucleotide
  misc_feature 1..20: note = Target: FXN; (+) strand; PAM type: NRG; PAM sequence: AGG
  source 1..20: mol_type = other DNA
ctcattggatatggagacaa

SEQ ID NO: 19400 - DNA, 20 bp, synthetic construct
  misc_feature 1..20: note = Description of Artificial Sequence: Synthetic oligonucleotide
  misc_feature 1..20: note = Target: FXN; (+) strand; PAM type: NRG; PAM sequence: TGG
  source 1..20: mol_type = other DNA
ggatatggagacaaaggatc

SEQ ID NO: 19401 - DNA, 20 bp, synthetic construct
  misc_feature 1..20: note = Description of Artificial Sequence: Synthetic oligonucleotide
  misc_feature 1..20: note = Target: FXN; (+) strand; PAM type: NRG; PAM sequence: TAG
  source 1..20: mol_type = other DNA
tggagacaaaggatctggct

SEQ ID NO: 19402 - DNA, 20 bp, synthetic construct
  misc_feature 1..20: note = Description of Artificial Sequence: Synthetic oligonucleotide
  misc_feature 1..20: note = Target: FXN; (+) strand; PAM type: NRG; PAM sequence: TGG
  source 1..20: mol_type = other DNA
aaggatctggcttagcatcc

SEQ ID NO: 19403 - DNA, 20 bp, synthetic construct
  misc_feature 1..20: note = Description of Artificial Sequence: Synthetic oligonucleotide
  misc_feature 1..20: note = Target: FXN; (+) strand; PAM type: NRG; PAM sequence: AAG
  source 1..20: mol_type = other DNA
tggatttgtattttctttcc

SEQ ID NO: 19404 - DNA, 20 bp, synthetic construct
  misc_feature 1..20: note = Description of Artificial Sequence: Synthetic oligonucleotide
  misc_feature 1..20: note = Target: FXN; (+) strand; PAM type: NRG; PAM sequence: GAG
  source 1..20: mol_type = other DNA
gatttgtattttctttccaa

SEQ ID NO: 19405 - DNA, 20 bp, synthetic construct
  misc_feature 1..20: note = Description of Artificial Sequence: Synthetic oligonucleotide
  misc_feature 1..20: note = Target: FXN; (+) strand; PAM type: NRG; PAM sequence: AAG
  source 1..20: mol_type = other DNA
ttttctttccaagagtcctt

SEQ ID NO: 19406 - DNA, 20 bp, synthetic construct
  misc_feature 1..20: note = Description of Artificial Sequence: Synthetic oligonucleotide
  misc_feature 1..20: note = Target: FXN; (+) strand; PAM type: NRG; PAM sequence: GAG
  source 1..20: mol_type = other DNA
aagtgatatctaacttttgc

SEQ ID NO: 19407 - DNA, 20 bp, synthetic construct
  misc_feature 1..20: note = Description of Artificial Sequence: Synthetic oligonucleotide
  misc_feature 1..20: note = Target: FXN; (+) strand; PAM type: NRG; PAM sequence: CAG
  source 1..20: mol_type = other DNA
tatctaacttttgcgagctg

SEQ ID NO: 19408 - DNA, 20 bp, synthetic construct
  misc_feature 1..20: note = Description of Artificial Sequence: Synthetic oligonucleotide
  misc_feature 1..20: note = Target: FXN; (+) strand; PAM type: NRG; PAM sequence: CAG
  source 1..20: mol_type = other DNA
tttgcgagctgcagtttcct

SEQ ID NO: 19409 - DNA, 20 bp, synthetic construct
  misc_feature 1..20: note = Description of Artificial Sequence: Synthetic oligonucleotide
  misc_feature 1..20: note = Target: FXN; (+) strand; PAM type: NRG; PAM sequence: GAG
  source 1..20: mol_type = other DNA
gctgcagtttcctcagctat

SEQ ID NO: 19410 - DNA, 20 bp, synthetic construct
  misc_feature 1..20: note = Description of Artificial Sequence: Synthetic oligonucleotide
  misc_feature 1..20: note = Target: FXN; (+) strand; PAM type: NRG; PAM sequence: GAG
  source 1..20: mol_type = other DNA
agtttcctcagctatgagat

SEQ ID NO: 19411 - DNA, 20 bp, synthetic construct
  misc_feature 1..20: note = Description of Artificial Sequence: Synthetic oligonucleotide
  misc_feature 1..20: note = Target: FXN; (+) strand; PAM type: NRG; PAM sequence: CAG
  source 1..20: mol_type = other DNA
tgacattaacctcctctctt

SEQ ID NO: 19412 - DNA, 20 bp, synthetic construct
  misc_feature 1..20: note = Description of Artificial Sequence: Synthetic oligonucleotide
  misc_feature 1..20: note = Target: FXN; (+) strand; PAM type: NRG; PAM sequence: AAG
  source 1..20: mol_type = other DNA
cctcctctcttcagatttat

SEQ ID NO: 19413 - DNA, 20 bp, synthetic construct
  misc_feature 1..20: note = Description of Artificial Sequence: Synthetic oligonucleotide
  misc_feature 1..20: note = Target: FXN; (+) strand; PAM type: NRG; PAM sequence: GAG
  source 1..20: mol_type = other DNA
tcctctcttcagatttataa

SEQ ID NO: 19414 - DNA, 20 bp, synthetic construct
  misc_feature 1..20: note = Description of Artificial Sequence: Synthetic oligonucleotide
  misc_feature 1..20: note = Target: FXN; (+) strand; PAM type: NRG; PAM sequence: AGG
  source 1..20: mol_type = other DNA
cctctcttcagatttataag

SEQ ID NO: 19415 - DNA, 20 bp, synthetic construct
  misc_feature 1..20: note = Description of Artificial Sequence: Synthetic oligonucleotide
  misc_feature 1..20: note = Target: FXN; (+) strand; PAM type: NRG; PAM sequence: TGG
  source 1..20: mol_type = other DNA
tataagaggatcaattaaaa

SEQ ID NO: 19416 - DNA, 20 bp, synthetic construct
  misc_feature 1..20: note = Description of Artificial Sequence: Synthetic oligonucleotide
  misc_feature 1..20: note = Target: FXN; (+) strand; PAM type: NRG; PAM sequence: TAG
  source 1..20: mol_type = other DNA
gaggatcaattaaaatggca

SEQ ID NO: 19417 - DNA, 20 bp, synthetic construct
  misc_feature 1..20: note = Description of Artificial Sequence: Synthetic oligonucleotide
  misc_feature 1..20: note = Target: FXN; (+) strand; PAM type: NRG; PAM sequence: AGG
  source 1..20: mol_type = other DNA
aggatcaattaaaatggcat

SEQ ID NO: 19418 - DNA, 20 bp, synthetic construct
  misc_feature 1..20: note = Description of Artificial Sequence: Synthetic oligonucleotide
  misc_feature 1..20: note = Target: FXN; (+) strand; PAM type: NRG; PAM sequence: AAG
  source 1..20: mol_type = other DNA
aattaaaatggcataggtaa

SEQ ID NO: 19419 - DNA, 20 bp, synthetic construct
  misc_feature 1..20: note = Description of Artificial Sequence: Synthetic oligonucleotide
  misc_feature 1..20: note = Target: FXN; (+) strand; PAM type: NRG; PAM sequence: TAG
  source 1..20: mol_type = other DNA
gcataggtaaaagtgcatcc

SEQ ID NO: 19420 - DNA, 20 bp, synthetic construct
  misc_feature 1..20: note = Description of Artificial Sequence: Synthetic oligonucleotide
  misc_feature 1..20: note = Target: FXN; (+) strand; PAM type: NRG; PAM sequence: AAG
  source 1..20: mol_type = other DNA
aggtaaaagtgcatcctagc

SEQ ID NO: 19421 - DNA, 20 bp, synthetic construct
  misc_feature 1..20: note = Description of Artificial Sequence: Synthetic oligonucleotide
  misc_feature 1..20: note = Target: FXN; (+) strand; PAM type: NRG; PAM sequence: TGG
  source 1..20: mol_type = other DNA
aaaagtgcatcctagcaagt

SEQ ID NO: 19422 - DNA, 20 bp, synthetic construct
  misc_feature 1..20: note = Description of Artificial Sequence: Synthetic oligonucleotide
  misc_feature 1..20: note = Target: FXN; (+) strand; PAM type: NRG; PAM sequence: TAG
  source 1..20: mol_type = other DNA
tagcaagttggtatctactt

SEQ ID NO: 19423 - DNA, 20 bp, synthetic construct
  misc_feature 1..20: note = Description of Artificial Sequence: Synthetic oligonucleotide
  misc_feature 1..20: note = Target: FXN; (+) strand; PAM type: NRG; PAM sequence: AAG
  source 1..20: mol_type = other DNA
tggtatctactttagaaatg

SEQ ID NO: 19424 - DNA, 20 bp, synthetic construct
  misc_feature 1..20: note = Description of Artificial Sequence: Synthetic oligonucleotide
  misc_feature 1..20: note = Target: FXN; (+) strand; PAM type: NRG; PAM sequence: AGG
  source 1..20: mol_type = other DNA
ggtatctactttagaaatga

SEQ ID NO: 19425 - DNA, 20 bp, synthetic construct
  misc_feature 1..20: note = Description of Artificial Sequence: Synthetic oligonucleotide
  misc_feature 1..20: note = Target: FXN; (+) strand; PAM type: NRG; PAM sequence: GAG
  source 1..20: mol_type = other DNA
tatctactttagaaatgaag

SEQ ID NO: 19426 - DNA, 20 bp, synthetic construct
  misc_feature 1..20: note = Description of Artificial Sequence: Synthetic oligonucleotide
  misc_feature 1..20: note = Target: FXN; (+) strand; PAM type: NRG; PAM sequence: AGG
  source 1..20: mol_type = other DNA
atctactttagaaatgaagg

SEQ ID NO: 19427 - DNA, 20 bp, synthetic construct
  misc_feature 1..20: note = Description of Artificial Sequence: Synthetic oligonucleotide
  misc_feature 1..20: note = Target: FXN; (+) strand; PAM type: NRG; PAM sequence: AAG
  source 1..20: mol_type = other DNA
aaggaggtcatatgtatgtg

SEQ ID NO: 19428 - DNA, 20 bp, synthetic construct
  misc_feature 1..20: note = Description of Artificial Sequence: Synthetic oligonucleotide
  misc_feature 1..20: note = Target: FXN; (+) strand; PAM type: NRG; PAM sequence: CAG
  source 1..20: mol_type = other DNA
tcatatgtatgtgaagtctc

SEQ ID NO: 19429 - DNA, 20 bp, synthetic construct
  misc_feature 1..20: note = Description of Artificial Sequence: Synthetic oligonucleotide
  misc_feature 1..20: note = Target: FXN; (+) strand; PAM type: NRG; PAM sequence: AAG
  source 1..20: mol_type = other DNA
ttatatgtgtctatttctac

SEQ ID NO: 19430 - DNA, 20 bp, synthetic construct
  misc_feature 1..20: note = Description of Artificial Sequence: Synthetic oligonucleotide
  misc_feature 1..20: note = Target: FXN; (+) strand; PAM type: NRG; PAM sequence: GAG
  source 1..20: mol_type = other DNA
atgtgtctatttctacaagt

SEQ ID NO: 19431 - DNA, 20 bp, synthetic construct
  misc_feature 1..20: note = Description of Artificial Sequence: Synthetic oligonucleotide
  misc_feature 1..20: note = Target: FXN; (+) strand; PAM type: NRG; PAM sequence: TAG
  source 1..20: mol_type = other DNA
gtctatttctacaagtgagc

SEQ ID NO: 19432 - DNA, 20 bp, synthetic construct
  misc_feature 1..20: note = Description of Artificial Sequence: Synthetic oligonucleotide
  misc_feature 1..20: note = Target: FXN; (+) strand; PAM type: NRG; PAM sequence: CAG
  source 1..20: mol_type = other DNA
tacaagtgagctagtgacaa

SEQ ID NO: 19433 - DNA, 20 bp, synthetic construct
  misc_feature 1..20: note = Description of Artificial Sequence: Synthetic oligonucleotide
  misc_feature 1..20: note = Target: FXN; (+) strand; PAM type: NRG; PAM sequence: TGG
  source 1..20: mol_type = other DNA
ttgctatttttgctcctaca

SEQ ID NO: 19434 - DNA, 20 bp, synthetic construct
  misc_feature 1..20: note = Description of Artificial Sequence: Synthetic oligonucleotide
  misc_feature 1..20: note = Target: FXN; (+) strand; PAM type: NRG; PAM sequence: GGG
  source 1..20: mol_type = other DNA
tgctatttttgctcctacat

SEQ ID NO: 19435 - DNA, 20 bp, synthetic construct
  misc_feature 1..20: note = Description of Artificial Sequence: Synthetic oligonucleotide
  misc_feature 1..20: note = Target: FXN; (+) strand; PAM type: NRG; PAM sequence: TAG
  source 1..20: mol_type = other DNA
tatttttgctcctacatggg

SEQ ID NO: 19436 - DNA, 20 bp, synthetic construct
  misc_feature 1..20: note = Description of Artificial Sequence: Synthetic oligonucleotide
  misc_feature 1..20: note = Target: FXN; (+) strand; PAM type: NRG; PAM sequence: AGG
  source 1..20: mol_type = other DNA
atttttgctcctacatgggt

SEQ ID NO: 19437 - DNA, 20 bp, synthetic construct
  misc_feature 1..20: note = Description of Artificial Sequence: Synthetic oligonucleotide
  misc_feature 1..20: note = Target: FXN; (+) strand; PAM type: NRG; PAM sequence: GGG
  source 1..20: mol_type = other DNA
tttttgctcctacatgggta

SEQ ID NO: 19438 - DNA, 20 bp, synthetic construct
  misc_feature 1..20: note = Description of Artificial Sequence: Synthetic oligonucleotide
  misc_feature 1..20: note = Target: FXN; (+) strand; PAM type: NRG; PAM sequence: TAG
  source 1..20: mol_type = other DNA
tgggtagggctgatcttgac

SEQ ID NO: 19439 - DNA, 20 bp, synthetic construct
  misc_feature 1..20: note = Description of Artificial Sequence: Synthetic oligonucleotide
  misc_feature 1..20: note = Target: FXN; (+) strand; PAM type: NRG; PAM sequence: AGG
  source 1..20: mol_type = other DNA
gggtagggctgatcttgact

SEQ ID NO: 19440 - DNA, 20 bp, synthetic construct
  misc_feature 1..20: note = Description of Artificial Sequence: Synthetic oligonucleotide
  misc_feature 1..20: note = Target: FXN; (+) strand; PAM type: NRG; PAM sequence: GAG
  source 1..20: mol_type = other DNA
gtagggctgatcttgactag

SEQ ID NO: 19441 - DNA, 20 bp, synthetic construct
  misc_feature 1..20: note = Description of Artificial Sequence: Synthetic oligonucleotide
  misc_feature 1..20: note = Target: FXN; (+) strand; PAM type: NRG; PAM sequence: AGG
  source 1..20: mol_type = other DNA
tagggctgatcttgactagg

SEQ ID NO: 19442 - DNA, 20 bp, synthetic construct
  misc_feature 1..20: note = Description of Artificial Sequence: Synthetic oligonucleotide
  misc_feature 1..20: note = Target: FXN; (+) strand; PAM type: NRG; PAM sequence: GAG
  source 1..20: mol_type = other DNA
gggctgatcttgactaggag

SEQ ID NO: 19443 - DNA, 20 bp, synthetic construct
  misc_feature 1..20: note = Description of Artificial Sequence: Synthetic oligonucleotide
  misc_feature 1..20: note = Target: FXN; (+) strand; PAM type: NRG; PAM sequence: AAG
  source 1..20: mol_type = other DNA
cttgactaggaggagtcaat

SEQ ID NO: 19444 - DNA, 20 bp, synthetic construct
  misc_feature 1..20: note = Description of Artificial Sequence: Synthetic oligonucleotide
  misc_feature 1..20: note = Target: FXN; (+) strand; PAM type: NRG; PAM sequence: CAG
  source 1..20: mol_type = other DNA
gaggagtcaataagactcac

SEQ ID NO: 19445 - DNA, 20 bp, synthetic construct
  misc_feature 1..20: note = Description of Artificial Sequence: Synthetic oligonucleotide
  misc_feature 1..20: note = Target: FXN; (+) strand; PAM type: NRG; PAM sequence: CGG
  source 1..20: mol_type = other DNA
agtcaataagactcaccagc

SEQ ID NO: 19446 - DNA, 20 bp, synthetic construct
  misc_feature 1..20: note = Description of Artificial Sequence: Synthetic oligonucleotide
  misc_feature 1..20: note = Target: FXN; (+) strand; PAM type: NRG; PAM sequence: GGG
  source 1..20: mol_type = other DNA
gtcaataagactcaccagcc

SEQ ID NO: 19447 - DNA, 20 bp, synthetic construct
  misc_feature 1..20: note = Description of Artificial Sequence: Synthetic oligonucleotide
  misc_feature 1..20: note = Target: FXN; (+) strand; PAM type: NRG; PAM sequence: TGG
  source 1..20: mol_type = other DNA
taagactcaccagccgggcg

SEQ ID NO: 19448 - DNA, 20 bp, synthetic construct
  misc_feature 1..20: note = Description of Artificial Sequence: Synthetic oligonucleotide
  misc_feature 1..20: note = Target: FXN; (+) strand; PAM type: NRG; PAM sequence: TGG
  source 1..20: mol_type = other DNA
gactcaccagccgggcgtgg

SEQ ID NO: 19449 - DNA, 20 bp, synthetic construct
  misc_feature 1..20: note = Description of Artificial Sequence: Synthetic oligonucleotide
  misc_feature 1..20: note = Target: FXN; (+) strand; PAM type: NRG; PAM sequence: CAG
  source 1..20: mol_type = other DNA
gtggctcacgcctgtaatcc

SEQ ID NO: 19450 - DNA, 20 bp, synthetic construct
  misc_feature 1..20: note = Description of Artificial Sequence: Synthetic oligonucleotide
  misc_feature 1..20: note = Target: FXN; (+) strand; PAM type: NRG; PAM sequence: TGG
  source 1..20: mol_type = other DNA
cgcctgtaatcccagcactt

SEQ ID NO: 19451 - DNA, 20 bp, synthetic construct
  misc_feature 1..20: note = Description of Artificial Sequence: Synthetic oligonucleotide
  misc_feature 1..20: note = Target: FXN; (+) strand; PAM type: NRG; PAM sequence: GGG
  source 1..20: mol_type = other DNA
gcctgtaatcccagcacttt

SEQ ID NO: 19452 - DNA, 20 bp, synthetic construct
  misc_feature 1..20: note = Description of Artificial Sequence: Synthetic oligonucleotide
  misc_feature 1..20: note = Target: FXN; (+) strand; PAM type: NRG; PAM sequence: GAG
  source 1..20: mol_type = other DNA
ctgtaatcccagcactttgg

SEQ ID NO: 19453 - DNA, 20 bp, synthetic construct
  misc_feature 1..20: note = Description of Artificial Sequence: Synthetic oligonucleotide
  misc_feature 1..20: note = Target: FXN; (+) strand; PAM type: NRG; PAM sequence: AGG
  source 1..20: mol_type = other DNA
tgtaatcccagcactttggg

SEQ ID NO: 19454 - DNA, 20 bp, synthetic construct
  misc_feature 1..20: note = Description of Artificial Sequence: Synthetic oligonucleotide
  misc_feature 1..20: note = Target: FXN; (+) strand; PAM type: NRG; PAM sequence: AAG
  source 1..20: mol_type = other DNA
tcccagcactttgggaggcc

SEQ ID NO: 19455 - DNA, 20 bp, synthetic construct
  misc_feature 1..20: note = Description of Artificial Sequence: Synthetic oligonucleotide
  misc_feature 1..20: note = Target: FXN; (+) strand; PAM type: NRG; PAM sequence: AGG
  source 1..20: mol_type = other DNA
cccagcactttgggaggcca

SEQ ID NO: 19456 - DNA, 20 bp, synthetic construct
  misc_feature 1..20: note = Description of Artificial Sequence: Synthetic oligonucleotide
  misc_feature 1..20: note = Target: FXN; (+) strand; PAM type: NRG; PAM sequence: CGG
  source 1..20: mol_type = other DNA
agcactttgggaggccaagg

SEQ ID NO: 19457 - DNA, 20 bp, synthetic construct
  misc_feature 1..20: note = Description of Artificial Sequence: Synthetic oligonucleotide
  misc_feature 1..20: note = Target: FXN; (+) strand; PAM type: NRG; PAM sequence: GGG
  source 1..20: mol_type = other DNA
gcactttgggaggccaaggc

SEQ ID NO: 19458 - DNA, 20 bp, synthetic construct
  misc_feature 1..20: note = Description of Artificial Sequence: Synthetic oligonucleotide
  misc_feature 1..20: note = Target: FXN; (+) strand; PAM type: NRG; PAM sequence: CGG
  source 1..20: mol_type = other DNA
ctttgggaggccaaggcggg

SEQ ID NO: 19459 - DNA, 20 bp, synthetic construct
  misc_feature 1..20: note = Description of Artificial Sequence: Synthetic oligonucleotide
  misc_feature 1..20: note = Target: FXN; (+) strand; PAM type: NRG; PAM sequence: GAG
  source 1..20: mol_type = other DNA
ggccaaggcgggcggatcac

SEQ ID NO: 19460 - DNA, 20 bp, synthetic construct
  misc_feature 1..20: note = Description of Artificial Sequence: Synthetic oligonucleotide
  misc_feature 1..20: note = Target: FXN; (+) strand; PAM type: NRG; PAM sequence: AGG
  source 1..20: mol_type = other DNA
gccaaggcgggcggatcacg

SEQ ID NO: 19461 - DNA, 20 bp, synthetic construct
  misc_feature 1..20: note = Description of Artificial Sequence: Synthetic oligonucleotide
  misc_feature 1..20: note = Target: FXN; (+) strand; PAM type: NRG; PAM sequence: CAG
  source 1..20: mol_type = other DNA
aggcgggcggatcacgaggt

SEQ ID NO: 19462 - DNA, 20 bp, synthetic construct
  misc_feature 1..20: note = Description of Artificial Sequence: Synthetic oligonucleotide
  misc_feature 1..20: note = Target: FXN; (+) strand; PAM type: NRG; PAM sequence: AGG
  source 1..20: mol_type = other DNA
ggcgggcggatcacgaggtc

SEQ ID NO: 19463 - DNA, 20 bp, synthetic construct
  misc_feature 1..20: note = Description of Artificial Sequence: Synthetic oligonucleotide
  misc_feature 1..20: note = Target: FXN; (+) strand; PAM type: NRG; PAM sequence: GAG
  source 1..20: mol_type = other DNA
cgggcggatcacgaggtcag

SEQ ID NO: 19464 - DNA, 20 bp, synthetic construct
  misc_feature 1..20: note = Description of Artificial Sequence: Synthetic oligonucleotide
  misc_feature 1..20: note = Target: FXN; (+) strand; PAM type: NRG; PAM sequence: GAG
  source 1..20: mol_type = other DNA
gatcacgaggtcaggagatc

SEQ ID NO: 19465 - DNA, 20 bp, synthetic construct
  misc_feature 1..20: note = Description of Artificial Sequence: Synthetic oligonucleotide
  misc_feature 1..20: note = Target: FXN; (+) strand; PAM type: NRG; PAM sequence: TGG
  source 1..20: mol_type = other DNA
tcaggagatcgagaccattc

SEQ ID NO: 19466 - DNA, 20 bp, synthetic construct
  misc_feature 1..20: note = Description of Artificial Sequence: Synthetic oligonucleotide
  misc_feature 1..20: note = Target: FXN; (+) strand; PAM type: NRG; PAM sequence: CGG
  source 1..20: mol_type = other DNA
cgagaccattctggctaaca

SEQ ID NO: 19467 - DNA, 20 bp, synthetic construct
  misc_feature 1..20: note = Description of Artificial Sequence: Synthetic oligonucleotide
  misc_feature 1..20: note = Target: FXN; (+) strand; PAM type: NRG; PAM sequence: TAG
  source 1..20: mol_type = other DNA
ctaaaaaaatacaaaaaaat

SEQ ID NO: 19468 - DNA, 20 bp, synthetic construct
  misc_feature 1..20: note = Description of Artificial Sequence: Synthetic oligonucleotide
  misc_feature 1..20: note = Target: FXN; (+) strand; PAM type: NRG; PAM sequence: TGG
  source 1..20: mol_type = other DNA
aaaaatacaaaaaaattagc

SEQ ID NO: 19469 - DNA, 20 bp, synthetic construct
  misc_feature 1..20: note = Description of Artificial Sequence: Synthetic oligonucleotide
  misc_feature 1..20: note = Target: FXN; (+) strand; PAM type: NRG; PAM sequence: GGG
  source 1..20: mol_type = other DNA
aaaatacaaaaaaattagct

SEQ ID NO: 19470 - DNA, 20 bp, synthetic construct
  misc_feature 1..20: note = Description of Artificial Sequence: Synthetic oligonucleotide
  misc_feature 1..20: note = Target: FXN; (+) strand; PAM type: NRG; PAM sequence: TGG
  source 1..20: mol_type = other DNA
acaaaaaaattagctgggcg

SEQ ID NO: 19471 - DNA, 20 bp, synthetic construct
  misc_feature 1..20: note = Description of Artificial Sequence: Synthetic oligonucleotide
  misc_feature 1..20: note = Target: FXN; (+) strand; PAM type: NRG; PAM sequence: TGG
  source 1..20: mol_type = other DNA
aaaaaattagctgggcgtgg

SEQ ID NO: 19472 - DNA, 20 bp, synthetic construct
  misc_feature 1..20: note = Description of Artificial Sequence: Synthetic oligonucleotide
  misc_feature 1..20: note = Target: FXN; (+) strand; PAM type: NRG; PAM sequence: TGG
  source 1..20: mol_type = other DNA
aaattagctgggcgtggtgg

SEQ ID NO: 19473 - DNA, 20 bp, synthetic construct
  misc_feature 1..20: note = Description of Artificial Sequence: Synthetic oligonucleotide
  misc_feature 1..20: note = Target: FXN; (+) strand; PAM type: NRG; PAM sequence: GGG
  source 1..20: mol_type = other DNA
aattagctgggcgtggtggt

SEQ ID NO: 19474 - DNA, 20 bp, synthetic construct
  misc_feature 1..20: note = Description of Artificial Sequence: Synthetic oligonucleotide
  misc_feature 1..20: note = Target: FXN; (+) strand; PAM type: NRG; PAM sequence: TAG
  source 1..20: mol_type = other DNA
ggcgtggtggtgggcgcctg

SEQ ID NO: 19475 - DNA, 20 bp, synthetic construct
  misc_feature 1..20: note = Description of Artificial Sequence: Synthetic oligonucleotide
  misc_feature 1..20: note = Target: FXN; (+) strand; PAM type: NRG; PAM sequence: CAG
  source 1..20: mol_type = other DNA
gtggtgggcgcctgtagtcc

SEQ ID NO: 19476 - DNA, 20 bp, synthetic construct
  misc_feature 1..20: note = Description of Artificial Sequence: Synthetic oligonucleotide
  misc_feature 1..20: note = Target: FXN; (+) strand; PAM type: NRG; PAM sequence: CGG
  source 1..20: mol_type = other DNA
cgcctgtagtcccagctact

SEQ ID NO: 19477 - DNA, 20 bp, synthetic construct
  misc_feature 1..20: note = Description of Artificial Sequence: Synthetic oligonucleotide
  misc_feature 1..20: note = Target: FXN; (+) strand; PAM type: NRG; PAM sequence: GGG
  source 1..20: mol_type = other DNA
gcctgtagtcccagctactc

SEQ ID NO: 19478 - DNA, 20 bp, synthetic construct
  misc_feature 1..20: note = Description of Artificial Sequence: Synthetic oligonucleotide
  misc_feature 1..20: note = Target: FXN; (+) strand; PAM type: NRG; PAM sequence: AAG
  source 1..20: mol_type = other DNA
tgtagtcccagctactcggg

SEQ ID NO: 19479 - DNA, 20 bp, synthetic construct
  misc_feature 1..20: note = Description of Artificial Sequence: Synthetic oligonucleotide
  misc_feature 1..20: note = Target: FXN; (+) strand; PAM type: NRG; PAM sequence: GAG
  source 1..20: mol_type = other DNA
tcccagctactcgggaagct

SEQ ID NO: 19480 - DNA, 20 bp, synthetic construct
  misc_feature 1..20: note = Description of Artificial Sequence: Synthetic oligonucleotide
  misc_feature 1..20: note = Target: FXN; (+) strand; PAM type: NRG; PAM sequence: AGG
  source 1..20: mol_type = other DNA
cccagctactcgggaagctg

SEQ ID NO: 19481 - DNA, 20 bp, synthetic construct
  misc_feature 1..20: note = Description of Artificial Sequence: Synthetic oligonucleotide
  misc_feature 1..20: note = Target: FXN; (+) strand; PAM type: NRG; PAM sequence: CAG
  source 1..20: mol_type = other DNA
agctactcgggaagctgagg

SEQ ID NO: 19482 - DNA, 20 bp, synthetic construct
  misc_feature 1..20: note = Description of Artificial Sequence: Synthetic oligonucleotide
  misc_feature 1..20: note = Target: FXN; (+) strand; PAM type: NRG; PAM sequence: AGG
  source 1..20: mol_type = other DNA
gctactcgggaagctgaggc

SEQ ID NO: 19483 - DNA, 20 bp, synthetic construct
  misc_feature 1..20: note = Description of Artificial Sequence: Synthetic oligonucleotide
  misc_feature 1..20: note = Target: FXN; (+) strand; PAM type: NRG; PAM sequence: GAG
  source 1..20: mol_type = other DNA
tactcgggaagctgaggcag

SEQ ID NO: 19484 - DNA, 20 bp, synthetic construct
  misc_feature 1..20: note = Description of Artificial Sequence: Synthetic oligonucleotide
  misc_feature 1..20: note = Target: FXN; (+) strand; PAM type: NRG; PAM sequence: TGG
  source 1..20: mol_type = other DNA
gggaagctgaggcaggagaa

SEQ ID NO: 19485 - DNA, 20 bp, synthetic construct
  misc_feature 1..20: note = Description of Artificial Sequence: Synthetic oligonucleotide
  misc_feature 1..20: note = Target: FXN; (+) strand; PAM type: NRG; PAM sequence: CGG
  source 1..20: mol_type = other DNA
gcaggagaatggcgtgaacc

SEQ ID NO: 19486 - DNA, 20 bp, synthetic construct
  misc_feature 1..20: note = Description of Artificial Sequence: Synthetic oligonucleotide
  misc_feature 1..20: note = Target: FXN; (+) strand; PAM type: NRG; PAM sequence: GGG
  source 1..20: mol_type = other DNA
caggagaatggcgtgaaccc

SEQ ID NO: 19487 - DNA, 20 bp, synthetic construct
  misc_feature 1..20: note = Description of Artificial Sequence: Synthetic oligonucleotide
  misc_feature 1..20: note = Target: FXN; (+) strand; PAM type: NRG; PAM sequence: GAG
  source 1..20: mol_type = other DNA
ggagaatggcgtgaacccgg

SEQ ID NO: 19488 - DNA, 20 bp, synthetic construct
  misc_feature 1..20: note = Description of Artificial Sequence: Synthetic oligonucleotide
  misc_feature 1..20: note = Target: FXN; (+) strand; PAM type: NRG; PAM sequence: AGG
  source 1..20: mol_type = other DNA
gagaatggcgtgaacccggg

SEQ ID NO: 19489 - DNA, 20 bp, synthetic construct
  misc_feature 1..20: note = Description of Artificial Sequence: Synthetic oligonucleotide
  misc_feature 1..20: note = Target: FXN; (+) strand; PAM type: NRG; PAM sequence: CAG
  source 1..20: mol_type = other DNA
aatggcgtgaacccgggagg

SEQ ID NO: 19490 - DNA, 20 bp, synthetic construct
  misc_feature 1..20: note = Description of Artificial Sequence: Synthetic oligonucleotide
  misc_feature 1..20: note = Target: FXN; (+) strand; PAM type: NRG; PAM sequence: GAG
  source 1..20: mol_type = other DNA
tggcgtgaacccgggaggca

SEQ ID NO: 19491 - DNA, 20 bp, synthetic construct
  misc_feature 1..20: note = Description of Artificial Sequence: Synthetic oligonucleotide
  misc_feature 1..20: note = Target: FXN; (+) strand; PAM type: NRG; PAM sequence: CAG
  source 1..20: mol_type = other DNA
aacccgggaggcagagcttg

SEQ ID NO: 19492 - DNA, 20 bp, synthetic construct
  misc_feature 1..20: note = Description of Artificial Sequence: Synthetic oligonucleotide
  misc_feature 1..20: note = Target: FXN; (+) strand; PAM type: NRG; PAM sequence: AAG
  source 1..20: mol_type = other DNA
ggcagagcttgcagtgaacc

SEQ ID NO: 19493 - DNA, 20 bp, synthetic construct
  misc_feature 1..20: note = Description of Artificial Sequence: Synthetic oligonucleotide
  misc_feature 1..20: note = Target: FXN; (+) strand; PAM type: NRG; PAM sequence: GAG
  source 1..20: mol_type = other DNA
gcttgcagtgaaccaagatc

SEQ ID NO: 19494 - DNA, 20 bp, synthetic construct
  misc_feature 1..20: note = Description of Artificial Sequence: Synthetic oligonucleotide
  misc_feature 1..20: note = Target: FXN; (+) strand; PAM type: NRG; PAM sequence: TAG
  source 1..20: mol_type = other DNA
aagatcgagccactgcactc

SEQ ID NO: 19495 - DNA, 20 bp, synthetic construct
  misc_feature 1..20: note = Description of Artificial Sequence: Synthetic oligonucleotide
  misc_feature 1..20: note = Target: FXN; (+) strand; PAM type: NRG; PAM sequence: TGG
  source 1..20: mol_type = other DNA
cgagccactgcactctagcc

SEQ ID NO: 19496 - DNA, 20 bp, synthetic construct
  misc_feature 1..20: note = Description of Artificial Sequence: Synthetic oligonucleotide
  misc_feature 1..20: note = Target: FXN; (+) strand; PAM type: NRG; PAM sequence: GGG
  source 1..20: mol_type = other DNA
gagccactgcactctagcct

SEQ ID NO: 19497 - DNA, 20 bp, synthetic construct
  misc_feature 1..20: note = Description of Artificial Sequence: Synthetic oligonucleotide
  misc_feature 1..20: note = Target: FXN; (+) strand; PAM type: NRG; PAM sequence: CAG
  source 1..20: mol_type = other DNA
ctgcactctagcctgggtga

SEQ ID NO: 19498 - DNA, 20 bp, synthetic construct
  misc_feature 1..20: note = Description of Artificial Sequence: Synthetic oligonucleotide
  misc_feature 1..20: note = Target: FXN; (+) strand; PAM type: NRG; PAM sequence: GAG
  source 1..20: mol_type = other DNA
gcactctagcctgggtgaca

SEQ ID NO: 19499 - DNA, 20 bp, synthetic construct
  misc_feature 1..20: note = Description of Artificial Sequence: Synthetic oligonucleotide
  misc_feature 1..20: note = Target: FXN; (+) strand; PAM type: NRG; PAM sequence: GAG
  source 1..20: mol_type = other DNA
tctagcctgggtgacagagc

SEQ ID NO: 19500 - DNA, 20 bp, synthetic construct
  misc_feature 1..20: note = Description of Artificial Sequence: Synthetic oligonucleotide
  misc_feature 1..20: note = Target: FXN; (+) strand; PAM type: NRG; PAM sequence: AAG
  source 1..20: mol_type = other DNA
tccatctcaaaaaaaaaaaa

SEQ ID NO: 19501 - DNA, 20 bp, synthetic construct
  misc_feature 1..20: note = Description of Artificial Sequence: Synthetic oligonucleotide
  misc_feature 1..20: note = Target: FXN; (+) strand; PAM type: NRG; PAM sequence: CAG
  source 1..20: mol_type = other DNA
aaaaaaaaaaaaagactcac

SEQ ID NO: 19502 - DNA, 20 bp, synthetic construct
  misc_feature 1..20: note = Description of Artificial Sequence: Synthetic oligonucleotide
  misc_feature 1..20: note = Target: FXN; (+) strand; PAM type: NRG; PAM sequence: TGG
  source 1..20: mol_type = other DNA
aaaaaaagactcaccagctg

SEQ ID NO: 19503 - DNA, 20 bp, synthetic construct
  misc_feature 1..20: note = Description of Artificial Sequence: Synthetic oligonucleotide
  misc_feature 1..20: note = Target: FXN; (+) strand; PAM type: NRG; PAM sequence: TGG
  source 1..20: mol_type = other DNA
tggccactgtctgtgctaat

SEQ ID NO: 19504 - DNA, 20 bp, synthetic construct
  misc_feature 1..20: note = Description of Artificial Sequence: Synthetic oligonucleotide
  misc_feature 1..20: note = Target: FXN; (+) strand; PAM type: NRG; PAM sequence: TAG
  source 1..20: mol_type = other DNA
cactgtctgtgctaattggc

SEQ ID NO: 19505 - DNA, 20 bp, synthetic construct
  misc_feature 1..20: note = Description of Artificial Sequence: Synthetic oligonucleotide
  misc_feature 1..20: note = Target: FXN; (+) strand; PAM type: NRG; PAM sequence: CAG
  source 1..20: mol_type = other DNA
attggctagtgcctgcatct

SEQ ID NO: 19506 - DNA, 20 bp, synthetic construct
  misc_feature 1..20: note = Description of Artificial Sequence: Synthetic oligonucleotide
  misc_feature 1..20: note = Target: FXN; (+) strand; PAM type: NRG; PAM sequence: AAG
  source 1..20: mol_type = other DNA
tgactattccccctgcactt

SEQ ID NO: 19507 - DNA, 20 bp, synthetic construct
  misc_feature 1..20: note = Description of Artificial Sequence: Synthetic oligonucleotide
  misc_feature 1..20: note = Target: FXN; (+) strand; PAM type: NRG; PAM sequence: AGG
  source 1..20: mol_type = other DNA
gactattccccctgcactta

SEQ ID NO: 19508 - DNA, 20 bp, synthetic construct
  misc_feature 1..20: note = Description of Artificial Sequence: Synthetic oligonucleotide
  misc_feature 1..20: note = Target: FXN; (+) strand; PAM type: NRG; PAM sequence: GGG
  source 1..20: mol_type = other DNA
actattccccctgcacttaa

SEQ ID NO: 19509 - DNA, 20 bp, synthetic construct
  misc_feature 1..20: note = Description of Artificial Sequence: Synthetic oligonucleotide
  misc_feature 1..20: note = Target: FXN; (+) strand; PAM type: NRG; PAM sequence: TAG
  source 1..20: mol_type = other DNA
gggcatgcacactcccaaaa

SEQ ID NO: 19510 - DNA, 20 bp, synthetic construct
  misc_feature 1..20: note = Description of Artificial Sequence: Synthetic oligonucleotide
  misc_feature 1..20: note = Target: FXN; (+) strand; PAM type: NRG; PAM sequence: CAG
  source 1..20: mol_type = other DNA
gcacactcccaaaatagact

SEQ ID NO: 19511 - DNA, 20 bp, synthetic construct
  misc_feature 1..20: note = Description of Artificial Sequence: Synthetic oligonucleotide
  misc_feature 1..20: note = Target: FXN; (+) strand; PAM type: NRG; PAM sequence: AAG
  source 1..20: mol_type = other DNA
aaaatagactcagattgtct

SEQ ID NO: 19512 - DNA, 20 bp, synthetic construct
  misc_feature 1..20: note = Description of Artificial Sequence: Synthetic oligonucleotide
  misc_feature 1..20: note = Target: FXN; (+) strand; PAM type: NRG; PAM sequence: AGG
  source 1..20: mol_type = other DNA
aaatagactcagattgtcta

SEQ ID NO: 19513 - DNA, 20 bp, synthetic construct
  misc_feature 1..20: note = Description of Artificial Sequence: Synthetic oligonucleotide
  misc_feature 1..20: note = Target: FXN; (+) strand; PAM type: NRG; PAM sequence: AAG
  source 1..20: mol_type = other DNA
aaggaataatgatgatgatg

SEQ ID NO: 19514 - DNA, 20 bp, synthetic construct
  misc_feature 1..20: note = Description of Artificial Sequence: Synthetic oligonucleotide
  misc_feature 1..20: note = Target: FXN; (+) strand; PAM type: NRG; PAM sequence: GAG
  source 1..20: mol_type = other DNA
ggaataatgatgatgatgaa

SEQ ID NO: 19515 - DNA, 20 bp, synthetic construct
  misc_feature 1..20: note = Description of Artificial Sequence: Synthetic oligonucleotide
  misc_feature 1..20: note = Target: FXN; (+) strand; PAM type: NRG; PAM sequence: AAG
  source 1..20: mol_type = other DNA
taatgatgatgatgaagaga

SEQ ID NO: 19516 - DNA, 20 bp, synthetic construct
  misc_feature 1..20: note = Description of Artificial Sequence: Synthetic oligonucleotide
  misc_feature 1..20: note = Target: FXN; (+) strand; PAM type: NRG; PAM sequence: TGG
  source 1..20: mol_type = other DNA
aagagaaagccctctttatc

SEQ ID NO: 19517 - DNA, 20 bp, synthetic construct
  misc_feature 1..20: note = Description of Artificial Sequence: Synthetic oligonucleotide
  misc_feature 1..20: note = Target: FXN; (+) strand; PAM type: NRG; PAM sequence: TAG
  source 1..20: mol_type = other DNA
ctctttatctggtctatttg

SEQ ID NO: 19518 - DNA, 20 bp, synthetic construct
  misc_feature 1..20: note = Description of Artificial Sequence: Synthetic oligonucleotide
  misc_feature 1..20: note = Target: FXN; (+) strand; PAM type: NRG; PAM sequence: CAG
  source 1..20: mol_type = other DNA
ttatctggtctatttgtagt

SEQ ID NO: 19519 - DNA, 20 bp, synthetic construct
  misc_feature 1..20: note = Description of Artificial Sequence: Synthetic oligonucleotide
  misc_feature 1..20: note = Target: FXN; (+) strand; PAM type: NRG; PAM sequence: AAG
  source 1..20: mol_type = other DNA
ctatttgtagtcagttccaa

SEQ ID NO: 19520 - DNA, 20 bp, synthetic construct
  misc_feature 1..20: note = Description of Artificial Sequence: Synthetic oligonucleotide
  misc_feature 1..20: note = Target: FXN; (+) strand; PAM type: NRG; PAM sequence: AAG
  source 1..20: mol_type = other DNA
tagtcagttccaaaagcatt

SEQ ID NO: 19521 - DNA, 20 bp, synthetic construct
  misc_feature 1..20: note = Description of Artificial Sequence: Synthetic oligonucleotide
  misc_feature 1..20: note = Target: FXN; (+) strand; PAM type: NRG; PAM sequence: CAG
  source 1..20: mol_type = other DNA
gaatttctgctgaactaatg

SEQ ID NO: 19522 - DNA, 20 bp, synthetic construct
  misc_feature 1..20: note = Description of Artificial Sequence: Synthetic oligonucleotide
  misc_feature 1..20: note = Target: FXN; (+) strand; PAM type: NRG; PAM sequence: TAG
  source 1..20: mol_type = other DNA
ttctgctgaactaatgcagc

SEQ ID NO: 19523 - DNA, 20 bp, synthetic construct
  misc_feature 1..20: note = Description of Artificial Sequence: Synthetic oligonucleotide
  misc_feature 1..20: note = Target: FXN; (+) strand; PAM type: NRG; PAM sequence: TAG
  source 1..20: mol_type = other DNA
tcaccactttccttccaaaa

SEQ ID NO: 19524 - DNA, 20 bp, synthetic construct
  misc_feature 1..20: note = Description of Artificial Sequence: Synthetic oligonucleotide
  misc_feature 1..20: note = Target: FXN; (+) strand; PAM type: NRG; PAM sequence: AAG
  source 1..20: mol_type = other DNA
tttccttccaaaatagtttc

SEQ ID NO: 19525 - DNA, 20 bp, synthetic construct
  misc_feature 1..20: note = Description of Artificial Sequence: Synthetic oligonucleotide
  misc_feature 1..20: note = Target: FXN; (+) strand; PAM type: NRG; PAM sequence: TGG
  source 1..20: mol_type = other DNA
caaaatagtttcaagatctg

SEQ ID NO: 19526 - DNA, 20 bp, synthetic construct
  misc_feature 1..20: note = Description of Artificial Sequence: Synthetic oligonucleotide
  misc_feature 1..20: note = Target: FXN; (+) strand; PAM type: NRG; PAM sequence: GGG
  source 1..20: mol_type = other DNA
aaaatagtttcaagatctgt

SEQ ID NO: 19527 - DNA, 20 bp, synthetic construct
  misc_feature 1..20: note = Description of Artificial Sequence: Synthetic oligonucleotide
  misc_feature 1..20: note = Target: FXN; (+) strand; PAM type: NRG; PAM sequence: GGG
  source 1..20: mol_type = other DNA
aaatagtttcaagatctgtg

SEQ ID NO: 19528 - DNA, 20 bp, synthetic construct
  misc_feature 1..20: note = Description of Artificial Sequence: Synthetic oligonucleotide
  misc_feature 1..20: note = Target: FXN; (+) strand; PAM type: NRG; PAM sequence: GGG
  source 1..20: mol_type = other DNA
aatagtttcaagatctgtgg

SEQ ID NO: 19529 - DNA, 20 bp, synthetic construct
  misc_feature 1..20: note = Description of Artificial Sequence: Synthetic oligonucleotide
  misc_feature 1..20: note = Target: FXN; (+) strand; PAM type: NRG; PAM sequence: CAG
  source 1..20: mol_type = other DNA
tgggggaaaaaatctattta

SEQ ID NO: 19530 - DNA, 20 bp, synthetic construct
  misc_feature 1..20: note = Description of Artificial Sequence: Synthetic oligonucleotide
  misc_feature 1..20: note = Target: FXN; (+) strand; PAM type: NRG; PAM sequence: CAG
  source 1..20: mol_type = other DNA
aaaaatctatttacagtgaa

SEQ ID NO: 19531 - DNA, 20 bp, synthetic construct
  misc_feature 1..20: note = Description of Artificial Sequence: Synthetic oligonucleotide
  misc_feature 1..20: note = Target: FXN; (+) strand; PAM type: NRG; PAM sequence: TGG
  source 1..20: mol_type = other DNA
tctatttacagtgaacagac

SEQ ID NO: 19532 - DNA, 20 bp, synthetic construct
  misc_feature 1..20: note = Description of Artificial Sequence: Synthetic oligonucleotide
  misc_feature 1..20: note = Target: FXN; (+) strand; PAM type: NRG; PAM sequence: TGG
  source 1..20: mol_type = other DNA
atttacagtgaacagactgg

SEQ ID NO: 19533 - DNA, 20 bp, synthetic construct
  misc_feature 1..20: note = Description of Artificial Sequence: Synthetic oligonucleotide
  misc_feature 1..20: note = Target: FXN; (+) strand; PAM type: NRG; PAM sequence: GGG
  source 1..20: mol_type = other DNA
tttacagtgaacagactggt

SEQ ID NO: 19534 - DNA, 20 bp, synthetic construct
  misc_feature 1..20: note = Description of Artificial Sequence: Synthetic oligonucleotide
  misc_feature 1..20: note = Target: FXN; (+) strand; PAM type: NRG; PAM sequence: GAG
  source 1..20: mol_type = other DNA
tacagtgaacagactggtgg

SEQ ID NO: 19535 - DNA, 20 bp, synthetic construct
  misc_feature 1..20: note = Description of Artificial Sequence: Synthetic oligonucleotide
  misc_feature 1..20: note = Target: FXN; (+) strand; PAM type: NRG; PAM sequence: AGG
  source 1..20: mol_type = other DNA
acagtgaacagactggtggg

SEQ ID NO: 19536 - DNA, 20 bp, synthetic construct
  misc_feature 1..20: note = Description of Artificial Sequence: Synthetic oligonucleotide
  misc_feature 1..20: note = Target: FXN; (+) strand; PAM type: NRG; PAM sequence: AAG
  source 1..20: mol_type = other DNA
gtgaacagactggtgggagg

SEQ ID NO: 19537 - DNA, 20 bp, synthetic construct
  misc_feature 1..20: note = Description of Artificial Sequence: Synthetic oligonucleotide
  misc_feature 1..20: note = Target: FXN; (+) strand; PAM type: NRG; PAM sequence: GAG
  source 1..20: mol_type = other DNA
cagactggtgggaggaagtt

SEQ ID NO: 19538 - DNA, 20 bp, synthetic construct
  misc_feature 1..20: note = Description of Artificial Sequence: Synthetic oligonucleotide
  misc_feature 1..20: note = Target: FXN; (+) strand; PAM type: NRG; PAM sequence: TGG
  source 1..20: mol_type = other DNA
ggtgggaggaagttgagcat

SEQ ID NO: 19539 - DNA, 20 bp, synthetic construct
  misc_feature 1..20: note = Description of Artificial Sequence: Synthetic oligonucleotide
  misc_feature 1..20: note = Target: FXN; (+) strand; PAM type: NRG; PAM sequence: GGG
  source 1..20: mol_type = other DNA
gtgggaggaagttgagcatt

SEQ ID NO: 19540 - DNA, 20 bp, synthetic construct
  misc_feature 1..20: note = Description of Artificial Sequence: Synthetic oligonucleotide
  misc_feature 1..20: note = Target: FXN; (+) strand; PAM type: NRG; PAM sequence: GGG
  source 1..20: mol_type = other DNA
tgggaggaagttgagcattg

SEQ ID NO: 19541 - DNA, 20 bp, synthetic construct
  misc_feature 1..20: note = Description of Artificial Sequence: Synthetic oligonucleotide
  misc_feature 1..20: note = Target: FXN; (+) strand; PAM type: NRG; PAM sequence: AAG
  source 1..20: mol_type = other DNA
gccctgtgtaaccttgccct

SEQ ID NO: 19542 - DNA, 20 bp, synthetic construct
  misc_feature 1..20: note = Description of Artificial Sequence: Synthetic oligonucleotide
  misc_feature 1..20: note = Target: FXN; (+) strand; PAM type: NRG; PAM sequence: TGG
  source 1..20: mol_type = other DNA
tgtgtaaccttgccctaagt

SEQ ID NO: 19543 - DNA, 20 bp, synthetic construct
  misc_feature 1..20: note = Description of Artificial Sequence: Synthetic oligonucleotide
  misc_feature 1..20: note = Target: FXN; (+) strand; PAM type: NRG; PAM sequence: GGG
  source 1..20: mol_type = other DNA
gtgtaaccttgccctaagtt

SEQ ID NO: 19544 - DNA, 20 bp, synthetic construct
  misc_feature 1..20: note = Description of Artificial Sequence: Synthetic oligonucleotide
  misc_feature 1..20: note = Target: FXN; (+) strand; PAM type: NRG; PAM sequence: CAG
  source 1..20: mol_type = other DNA
taaccttgccctaagttggg

SEQ ID NO: 19545 - DNA, 20 bp, synthetic construct
  misc_feature 1..20: note = Description of Artificial Sequence: Synthetic oligonucleotide
  misc_feature 1..20: note = Target: FXN; (+) strand; PAM type: NRG; PAM sequence: TGG
  source 1..20: mol_type = other DNA
cttgccctaagttgggcaga

SEQ ID NO: 19546 - DNA, 20 bp, synthetic construct
  misc_feature 1..20: note = Description of Artificial Sequence: Synthetic oligonucleotide
  misc_feature 1..20: note = Target: FXN; (+) strand; PAM type: NRG; PAM sequence: TGG
  source 1..20: mol_type = other DNA
gcagatggtatcacactacc

SEQ ID NO: 19547 - DNA, 20 bp, synthetic construct
  misc_feature 1..20: note = Description of Artificial Sequence: Synthetic oligonucleotide
  misc_feature 1..20: note = Target: FXN; (+) strand; PAM type: NRG; PAM sequence: CAG
  source 1..20: mol_type = other DNA
ctgctcattcactatttgac

SEQ ID NO: 19548 - DNA, 20 bp, synthetic construct
  misc_feature 1..20: note = Description of Artificial Sequence: Synthetic oligonucleotide
  misc_feature 1..20: note = Target: FXN; (+) strand; PAM type: NRG; PAM sequence: TGG
  source 1..20: mol_type = other DNA
tcattcactatttgaccagt

SEQ ID NO: 19549 - DNA, 20 bp, synthetic construct
  misc_feature 1..20: note = Description of Artificial Sequence: Synthetic oligonucleotide
  misc_feature 1..20: note = Target: FXN; (+) strand; PAM type: NRG; PAM sequence: CAG
  source 1..20: mol_type = other DNA
attcacaaatgtcctttttg

SEQ ID NO: 19550 - DNA, 20 bp, synthetic construct
  misc_feature 1..20: note = Description of Artificial Sequence: Synthetic oligonucleotide
  misc_feature 1..20: note = Target: FXN; (+) strand; PAM type: NRG; PAM sequence: AGG
  source 1..20: mol_type = other DNA
ttcacaaatgtcctttttgc

SEQ ID NO: 19551 - DNA, 20 bp, synthetic construct
  misc_feature 1..20: note = Description of Artificial Sequence: Synthetic oligonucleotide
  misc_feature 1..20: note = Target: FXN; (+) strand; PAM type: NRG; PAM sequence: GAG
  source 1..20: mol_type = other DNA
cacaaatgtcctttttgcag

SEQ ID NO: 19552 - DNA, 20 bp, synthetic construct
  misc_feature 1..20: note = Description of Artificial Sequence: Synthetic oligonucleotide
  misc_feature 1..20: note = Target: FXN; (+) strand; PAM type: NRG; PAM sequence: AGG
  source 1..20: mol_type = other DNA
acaaatgtcctttttgcagg

SEQ ID NO: 19553 - DNA, 20 bp, synthetic construct
  misc_feature 1..20: note = Description of Artificial Sequence: Synthetic oligonucleotide
  misc_feature 1..20: note = Target: FXN; (+) strand; PAM type: NRG; PAM sequence: GGG
  source 1..20: mol_type = other DNA
caaatgtcctttttgcagga

SEQ ID NO: 19554 - DNA, 20 bp, synthetic construct
  misc_feature 1..20: note = Description of Artificial Sequence: Synthetic oligonucleotide
  misc_feature 1..20: note = Target: FXN; (+) strand; PAM type: NRG; PAM sequence: TGG
  source 1..20: mol_type = other DNA
tgtcctttttgcaggaggga

SEQ ID NO: 19555 - DNA, 20 bp, synthetic construct
  misc_feature 1..20: note = Description of Artificial Sequence: Synthetic oligonucleotide
  misc_feature 1..20: note = Target: FXN; (+) strand; PAM type: NRG; PAM sequence: GAG
  source 1..20: mol_type = other DNA
tcctttttgcaggagggatg

SEQ ID NO: 19556 - DNA, 20 bp, synthetic construct
  misc_feature 1..20: note = Description of Artificial Sequence: Synthetic oligonucleotide
  misc_feature 1..20: note = Target: FXN; (+) strand; PAM type: NRG; PAM sequence: AGG
  source 1..20: mol_type = other DNA
cctttttgcaggagggatgg

SEQ ID NO: 19557 - DNA, 20 bp, synthetic construct
  misc_feature 1..20: note = Description of Artificial Sequence: Synthetic oligonucleotide
  misc_feature 1..20: note = Target: FXN; (+) strand; PAM type: NRG; PAM sequence: TAG
  source 1..20: mol_type = other DNA
tgcaggagggatggaggtgc

SEQ ID NO: 19558 - DNA, 20 bp, synthetic construct
  misc_feature 1..20: note = Description of Artificial Sequence: Synthetic oligonucleotide
  misc_feature 1..20: note = Target: FXN; (+) strand; PAM type: NRG; PAM sequence: CAG
  source 1..20: mol_type = other DNA
ggatggaggtgctagacctg

SEQ ID NO: 19559 - DNA, 20 bp, synthetic construct
  misc_feature 1..20: note = Description of Artificial Sequence: Synthetic oligonucleotide
  misc_feature 1..20: note = Target: FXN; (+) strand; PAM type: NRG; PAM sequence: TAG
  source 1..20: mol_type = other DNA
ggtgctagacctgcagatgc

SEQ ID NO: 19560 - DNA, 20 bp, synthetic construct
  misc_feature 1..20: note = Description of Artificial Sequence: Synthetic oligonucleotide
  misc_feature 1..20: note = Target: FXN; (+) strand; PAM type: NRG; PAM sequence: AAG
  source 1..20: mol_type = other DNA
cctgcagatgctagcatgaa

SEQ ID NO: 19561 - DNA, 20 bp, synthetic construct
  misc_feature 1..20: note = Description of Artificial Sequence: Synthetic oligonucleotide
  misc_feature 1..20: note = Target: FXN; (+) strand; PAM type: NRG; PAM sequence: CAG
  source 1..20: mol_type = other DNA
cagatgctagcatgaaaaga

SEQ ID NO: 19562 - DNA, 20 bp, synthetic construct
  misc_feature 1..20: note = Description of Artificial Sequence: Synthetic oligonucleotide
  misc_feature 1..20: note = Target: FXN; (+) strand; PAM type: NRG; PAM sequence: AAG
  source 1..20: mol_type = other DNA
aagacagatctcctgctgct

SEQ ID NO: 19563 - DNA, 20 bp, synthetic construct
  misc_feature 1..20: note = Description of Artificial Sequence: Synthetic oligonucleotide
  misc_feature 1..20: note = Target: FXN; (+) strand; PAM type: NRG; PAM sequence: AGG
  source 1..20: mol_type = other DNA
agacagatctcctgctgcta

SEQ ID NO: 19564 - DNA, 20 bp, synthetic construct
  misc_feature 1..20: note = Description of Artificial Sequence: Synthetic oligonucleotide
  misc_feature 1..20: note = Target: FXN; (+) strand; PAM type: NRG; PAM sequence: AAG
  source 1..20: mol_type = other DNA
tcctgctgctaaggtgctta

SEQ ID NO: 19565 - DNA, 20 bp, synthetic construct
  misc_feature 1..20: note = Description of Artificial Sequence: Synthetic oligonucleotide
  misc_feature 1..20: note = Target: FXN; (+) strand; PAM type: NRG; PAM sequence: TAG
  source 1..20: mol_type = other DNA
tgctgctaaggtgcttaaag

SEQ ID NO: 19566 - DNA, 20 bp, synthetic construct
  misc_feature 1..20: note = Description of Artificial Sequence: Synthetic oligonucleotide
  misc_feature 1..20: note = Target: FXN; (+) strand; PAM type: NRG; PAM sequence: TGG
  source 1..20: mol_type = other DNA
tgctaaggtgcttaaagtag

SEQ ID NO: 19567 - DNA, 20 bp, synthetic construct
  misc_feature 1..20: note = Description of Artificial Sequence: Synthetic oligonucleotide
  misc_feature 1..20: note = Target: FXN; (+) strand; PAM type: NRG; PAM sequence: GAG
  source 1..20: mol_type = other DNA
ctaaggtgcttaaagtagtg

SEQ ID NO: 19568 - DNA, 20 bp, synthetic construct
  misc_feature 1..20: note = Description of Artificial Sequence: Synthetic oligonucleotide
  misc_feature 1..20: note = Target: FXN; (+) strand; PAM type: NRG; PAM sequence: AGG
  source 1..20: mol_type = other DNA
taaggtgcttaaagtagtgg

SEQ ID NO: 19569 - DNA, 20 bp, synthetic construct
  misc_feature 1..20: note = Description of Artificial Sequence: Synthetic oligonucleotide
  misc_feature 1..20: note = Target: FXN; (+) strand; PAM type: NRG; PAM sequence: CAG
  source 1..20: mol_type = other DNA
gtgcttaaagtagtggaggt

SEQ ID NO: 19570 - DNA, 20 bp, synthetic construct
  misc_feature 1..20: note = Description of Artificial Sequence: Synthetic oligonucleotide
  misc_feature 1..20: note = Target: FXN; (+) strand; PAM type: NRG; PAM sequence: AGG
  source 1..20: mol_type = other DNA
tgcttaaagtagtggaggtc

SEQ ID NO: 19571 - DNA, 20 bp, synthetic construct
  misc_feature 1..20: note = Description of Artificial Sequence: Synthetic oligonucleotide
  misc_feature 1..20: note = Target: FXN; (+) strand; PAM type: NRG; PAM sequence: GGG
  source 1..20: mol_type = other DNA
gcttaaagtagtggaggtca

SEQ ID NO: 19572 - DNA, 20 bp, synthetic construct
  misc_feature 1..20: note = Description of Artificial Sequence: Synthetic oligonucleotide
  misc_feature 1..20: note = Target: FXN; (+) strand; PAM type: NRG; PAM sequence: GGG
  source 1..20: mol_type = other DNA
cttaaagtagtggaggtcag

SEQ ID NO: 19573 - DNA, 20 bp, synthetic construct
  misc_feature 1..20: note = Description of Artificial Sequence: Synthetic oligonucleotide
  misc_feature 1..20: note = Target: FXN; (+) strand; PAM type: NRG; PAM sequence: AAG
  source 1..20: mol_type = other DNA
agtagtggaggtcaggggac

SEQ ID NO: 19574 - DNA, 20 bp, synthetic construct
  misc_feature 1..20: note = Description of Artificial Sequence: Synthetic oligonucleotide
  misc_feature 1..20: note = Target: FXN; (+) strand; PAM type: NRG; PAM sequence: AAG
  source 1..20: mol_type = other DNA
gtggaggtcaggggacaagc

SEQ ID NO: 19575 - DNA, 20 bp, synthetic construct
  misc_feature 1..20: note = Description of Artificial Sequence: Synthetic oligonucleotide
  misc_feature 1..20: note = Target: FXN; (+) strand; PAM type: NRG; PAM sequence: CAG
  source 1..20: mol_type = other DNA
gaggtcaggggacaagcaag

SEQ ID NO: 19576 - DNA, 20 bp, synthetic construct
  misc_feature 1..20: note = Description of Artificial Sequence: Synthetic oligonucleotide
  misc_feature 1..20: note = Target: FXN; (+) strand; PAM type: NRG; PAM sequence: CAG
  source 1..20: mol_type = other DNA
tcaggggacaagcaagcagt

SEQ ID NO: 19577 - DNA, 20 bp, synthetic construct
  misc_feature 1..20: note = Description of Artificial Sequence: Synthetic oligonucleotide
  misc_feature 1..20: note = Target: FXN; (+) strand; PAM type: NRG; PAM sequence: AGG
  source 1..20: mol_type = other DNA
caggggacaagcaagcagtc

SEQ ID NO: 19578 - DNA, 20 bp, synthetic construct
  misc_feature 1..20: note = Description of Artificial Sequence: Synthetic oligonucleotide
  misc_feature 1..20: note = Target: FXN; (+) strand; PAM type: NRG; PAM sequence: CAG
  source 1..20: mol_type = other DNA
gggacaagcaagcagtcagg

SEQ ID NO: 19579 - DNA, 20 bp, synthetic construct
  misc_feature 1..20: note = Description of Artificial Sequence: Synthetic oligonucleotide
  misc_feature 1..20: note = Target: FXN; (+) strand; PAM type: NRG; PAM sequence: CAG
  source 1..20: mol_type = other DNA
cagtcaggcagctctgaatg

SEQ ID NO: 19580 - DNA, 20 bp, synthetic construct
  misc_feature 1..20: note = Description of Artificial Sequence: Synthetic oligonucleotide
  misc_feature 1..20: note = Target: FXN; (+) strand; PAM type: NRG; PAM sequence: GAG
  source 1..20: mol_type = other DNA
gtcaggcagctctgaatgca

SEQ ID NO: 19581 - DNA, 20 bp, synthetic construct
  misc_feature 1..20: note = Description of Artificial Sequence: Synthetic oligonucleotide
  misc_feature 1..20: note = Target: FXN; (+) strand; PAM type: NRG; PAM sequence: AGG
  source 1..20: mol_type = other DNA
tcaggcagctctgaatgcag

SEQ ID NO: 19582 - DNA, 20 bp, synthetic construct
  misc_feature 1..20: note = Description of Artificial Sequence: Synthetic oligonucleotide
  misc_feature 1..20: note = Target: FXN; (+) strand; PAM type: NRG; PAM sequence: CAG
  source 1..20: mol_type = other DNA
ggcagctctgaatgcagagg

SEQ ID NO: 19583 - DNA, 20 bp, synthetic construct
  misc_feature 1..20: note = Description of Artificial Sequence: Synthetic oligonucleotide
  misc_feature 1..20: note = Target: FXN; (+) strand; PAM type: NRG; PAM sequence: AGG
  source 1..20: mol_type = other DNA
gcagctctgaatgcagaggc

SEQ ID NO: 19584 - DNA, 20 bp, synthetic construct
  misc_feature 1..20: note = Description of Artificial Sequence: Synthetic oligonucleotide
  misc_feature 1..20: note = Target: FXN; (+) strand; PAM type: NRG; PAM sequence: AAG
  source 1..20: mol_type = other DNA
gctctgaatgcagaggcagg

SEQ ID NO: 19585 - DNA, 20 bp, synthetic construct
  misc_feature 1..20: note = Description of Artificial Sequence: Synthetic oligonucleotide
  misc_feature 1..20: note = Target: FXN; (+) strand; PAM type: NRG; PAM sequence: GAG
  source 1..20: mol_type = other DNA
gcagaggcaggaagcaccac

SEQ ID NO: 19586 - DNA, 20 bp, synthetic construct
  misc_feature 1..20: note = Description of Artificial Sequence: Synthetic oligonucleotide
  misc_feature 1..20: note = Target: FXN; (+) strand; PAM type: NRG; PAM sequence: AGG
  source 1..20: mol_type = other DNA
cagaggcaggaagcaccacg

SEQ ID NO: 19587 - DNA, 20 bp, synthetic construct
  misc_feature 1..20: note = Description of Artificial Sequence: Synthetic oligonucleotide
  misc_feature 1..20: note = Target: FXN; (+) strand; PAM type: NRG; PAM sequence: TGG
  source 1..20: mol_type = other DNA
caggaagcaccacgaggcaa

SEQ ID NO: 19588 - DNA, 20 bp, synthetic construct
  misc_feature 1..20: note = Description of Artificial Sequence: Synthetic oligonucleotide
  misc_feature 1..20: note = Target: FXN; (+) strand; PAM type: NRG; PAM sequence: GGG
  source 1..20: mol_type = other DNA
aggaagcaccacgaggcaat

SEQ ID NO: 19589 - DNA, 20 bp, synthetic construct
  misc_feature 1..20: note = Description of Artificial Sequence: Synthetic oligonucleotide
  misc_feature 1..20: note = Target: FXN; (+) strand; PAM type: NRG; PAM sequence: CAG
  source 1..20: mol_type = other DNA
ccacgaggcaatgggaccca

SEQ ID NO: 19590 - DNA, 20 bp, synthetic construct
  misc_feature 1..20: note = Description of Artificial Sequence: Synthetic oligonucleotide
  misc_feature 1..20: note = Target: FXN; (+) strand; PAM type: NRG; PAM sequence: GAG
  source 1..20: mol_type = other DNA
acgaggcaatgggacccaca

SEQ ID NO: 19591 - DNA, 20 bp, synthetic construct
  misc_feature 1..20: note = Description of Artificial Sequence: Synthetic oligonucleotide
  misc_feature 1..20: note = Target: FXN; (+) strand; PAM type: NRG; PAM sequence: AGG
  source 1..20: mol_type = other DNA
cgaggcaatgggacccacag

SEQ ID NO: 19592 - DNA, 20 bp, synthetic construct
  misc_feature 1..20: note = Description of Artificial Sequence: Synthetic oligonucleotide
  misc_feature 1..20: note = Target: FXN; (+) strand; PAM type: NRG; PAM sequence: GGG
  source 1..20: mol_type = other DNA
gaggcaatgggacccacaga

SEQ ID NO: 19593 - DNA, 20 bp, synthetic construct
  misc_feature 1..20: note = Description of Artificial Sequence: Synthetic oligonucleotide
  misc_feature 1..20: note = Target: FXN; (+) strand; PAM type: NRG; PAM sequence: GGG
  source 1..20: mol_type = other DNA
aggcaatgggacccacagag

SEQ ID NO: 19594 - DNA, 20 bp, synthetic construct
  misc_feature 1..20: note = Description of Artificial Sequence: Synthetic oligonucleotide
  misc_feature 1..20: note = Target: FXN; (+) strand; PAM type: NRG; PAM sequence: TAG
  source 1..20: mol_type = other DNA
caatgggacccacagagggg

SEQ ID NO: 19595 - DNA, 20 bp, synthetic construct
  misc_feature 1..20: note = Description of Artificial Sequence: Synthetic oligonucleotide
  misc_feature 1..20: note = Target: FXN; (+) strand; PAM type: NRG; PAM sequence: CAG
  source 1..20: mol_type = other DNA
tgggacccacagaggggtag

SEQ ID NO: 19596 - DNA, 20 bp, synthetic construct
  misc_feature 1..20: note = Description of Artificial Sequence: Synthetic oligonucleotide
  misc_feature 1..20: note = Target: FXN; (+) strand; PAM type: NRG; PAM sequence: AGG
  source 1..20: mol_type = other DNA
gggacccacagaggggtagc

SEQ ID NO: 19597 - DNA, 20 bp, synthetic construct
  misc_feature 1..20: note = Description of Artificial Sequence: Synthetic oligonucleotide
  misc_feature 1..20: note = Target: FXN; (+) strand; PAM type: NRG; PAM sequence: GGG
  source 1..20: mol_type = other DNA
ggacccacagaggggtagca

SEQ ID NO: 19598 - DNA, 20 bp, synthetic construct
  misc_feature 1..20: note = Description of Artificial Sequence: Synthetic oligonucleotide
  misc_feature 1..20: note = Target: FXN; (+) strand; PAM type: NRG; PAM sequence: TAG
  source 1..20: mol_type = other DNA
cccacagaggggtagcaggg

SEQ ID NO: 19599 - DNA, 20 bp, synthetic construct
  misc_feature 1..20: note = Description of Artificial Sequence: Synthetic oligonucleotide
  misc_feature 1..20: note = Target: FXN; (+) strand; PAM type: NRG; PAM sequence: GAG
  source 1..20: mol_type = other DNA
cacagaggggtagcagggta

SEQ ID NO: 19600 - DNA, 20 bp, synthetic construct
  misc_feature 1..20: note = Description of Artificial Sequence: Synthetic oligonucleotide
  misc_feature 1..20: note = Target: FXN; (+) strand; PAM type: NRG; PAM sequence: AGG
  source 1..20: mol_type = other DNA
acagaggggtagcagggtag

SEQ ID NO: 19601 - DNA, 20 bp, synthetic construct
  misc_feature 1..20: note = Description of Artificial Sequence: Synthetic oligonucleotide
  misc_feature 1..20: note = Target: FXN; (+) strand; PAM type: NRG; PAM sequence: GAG
  source 1..20: mol_type = other DNA
aggggtagcagggtagaggt

SEQ ID NO: 19602 - DNA, 20 bp, synthetic construct
  misc_feature 1..20: note = Description of Artificial Sequence: Synthetic oligonucleotide
  misc_feature 1..20: note = Target: FXN; (+) strand; PAM type: NRG; PAM sequence: TGG
  source 1..20: mol_type = other DNA
ggtagcagggtagaggtgag

SEQ ID NO: 19603 - DNA, 20 bp, synthetic construct
  misc_feature 1..20: note = Description of Artificial Sequence: Synthetic oligonucleotide
  misc_feature 1..20: note = Target: FXN; (+) strand; PAM type: NRG; PAM sequence: GGG
  source 1..20: mol_type = other DNA
gtagcagggtagaggtgagt

SEQ ID NO: 19604 - DNA, 20 bp, synthetic construct
  misc_feature 1..20: note = Description of Artificial Sequence: Synthetic oligonucleotide
  misc_feature 1..20: note = Target: FXN; (+) strand; PAM type: NRG; PAM sequence: TGG
  source 1..20: mol_type = other DNA
agaggtgagtgggtctcatg

SEQ ID NO: 19605 - DNA, 20 bp, synthetic construct
  misc_feature 1..20: note = Description of Artificial Sequence: Synthetic oligonucleotide
  misc_feature 1..20: note = Target: FXN; (+) strand; PAM type: NRG; PAM sequence: GGG
  source 1..20: mol_type = other DNA
gaggtgagtgggtctcatgt

SEQ ID NO: 19606 - DNA, 20 bp, synthetic construct
  misc_feature 1..20: note = Description of Artificial Sequence: Synthetic oligonucleotide
  misc_feature 1..20: note = Target: FXN; (+) strand; PAM type: NRG; PAM sequence: GGG
  source 1..20: mol_type = other DNA
aggtgagtgggtctcatgtg

SEQ ID NO: 19607 - DNA, 20 bp, synthetic construct
  misc_feature 1..20: note = Description of Artificial Sequence: Synthetic oligonucleotide
  misc_feature 1..20: note = Target: FXN; (+) strand; PAM type: NRG; PAM sequence: GAG
  source 1..20: mol_type = other DNA
gtgagtgggtctcatgtggg

SEQ ID NO: 19608 - DNA, 20 bp, synthetic construct
  misc_feature 1..20: note = Description of Artificial Sequence: Synthetic oligonucleotide
  misc_feature 1..20: note = Target: FXN; (+) strand; PAM type: NRG; PAM sequence: AGG
  source 1..20: mol_type = other DNA
tgagtgggtctcatgtgggg

SEQ ID NO: 19609 - DNA, 20 bp, synthetic construct
  misc_feature 1..20: note = Description of Artificial Sequence: Synthetic oligonucleotide
  misc_feature 1..20: note = Target: FXN; (+) strand; PAM type: NRG; PAM sequence: GGG
  source 1..20: mol_type = other DNA
gagtgggtctcatgtgggga

SEQ ID NO: 19610 - DNA, 20 bp, synthetic construct
  misc_feature 1..20: note = Description of Artificial Sequence: Synthetic oligonucleotide
  misc_feature 1..20: note = Target: FXN; (+) strand; PAM type: NRG; PAM sequence: GAG
  source 1..20: mol_type = other DNA
gtgggtctcatgtggggagg

SEQ ID NO: 19611 - DNA, 20 bp, synthetic construct
  misc_feature 1..20: note = Description of Artificial Sequence: Synthetic oligonucleotide
  misc_feature 1..20: note = Target: FXN; (+) strand; PAM type: NRG; PAM sequence: AGG
  source 1..20: mol_type = other DNA
tgggtctcatgtggggaggg

SEQ ID NO: 19612 - DNA, 20 bp, synthetic construct
  misc_feature 1..20: note = Description of Artificial Sequence: Synthetic oligonucleotide
  misc_feature 1..20: note = Target: FXN; (+) strand; PAM type: NRG; PAM sequence: AAG
  source 1..20: mol_type = other DNA
gtctcatgtggggagggagg

SEQ ID NO: 19613 - DNA, 20 bp, synthetic construct
  misc_feature 1..20: note = Description of Artificial Sequence: Synthetic oligonucleotide
  misc_feature 1..20: note = Target: FXN; (+) strand; PAM type: NRG; PAM sequence: CAG
  source 1..20: mol_type = other DNA
gggagggaggaagttgactg

SEQ ID NO: 19614 - DNA, 20 bp, synthetic construct
  misc_feature 1..20: note = Description of Artificial Sequence: Synthetic oligonucleotide
  misc_feature 1..20: note = Target: FXN; (+) strand; PAM type: NRG; PAM sequence: GAG
  source 1..20: mol_type = other DNA
gagggaggaagttgactgca

SEQ ID NO: 19615 - DNA, 20 bp, synthetic construct
  misc_feature 1..20: note = Description of Artificial Sequence: Synthetic oligonucleotide
  misc_feature 1..20: note = Target: FXN; (+) strand; PAM type: NRG; PAM sequence: AAG
  source 1..20: mol_type = other DNA
ggaggaagttgactgcagag

SEQ ID NO: 19616 - DNA, 20 bp, synthetic construct
  misc_feature 1..20: note = Description of Artificial Sequence: Synthetic oligonucleotide
  misc_feature 1..20: note = Target: FXN; (+) strand; PAM type: NRG; PAM sequence: AGG
  source 1..20: mol_type = other DNA
gaggaagttgactgcagaga

SEQ ID NO: 19617 - DNA, 20 bp, synthetic construct
  misc_feature 1..20: note = Description of Artificial Sequence: Synthetic oligonucleotide
  misc_feature 1..20: note = Target: FXN; (+) strand; PAM type: NRG; PAM sequence: CAG
  source 1..20: mol_type = other DNA
gttgactgcagagaaggtgc

SEQ ID NO: 19618 - DNA, 20 bp, synthetic construct
  misc_feature 1..20: note = Description of Artificial Sequence: Synthetic oligonucleotide
  misc_feature 1..20: note = Target: FXN; (+) strand; PAM type: NRG; PAM sequence: AGG
  source 1..20: mol_type = other DNA
ttgactgcagagaaggtgcc

SEQ ID NO: 19619 - DNA, 20 bp, synthetic construct
  misc_feature 1..20: note = Description of Artificial Sequence: Synthetic oligonucleotide
  misc_feature 1..20: note = Target: FXN; (+) strand; PAM type: NRG; PAM sequence: GGG
  source 1..20: mol_type = other DNA
tgactgcagagaaggtgcca

SEQ ID NO: 19620 - DNA, 20 bp, synthetic construct
  misc_feature 1..20: note = Description of Artificial Sequence: Synthetic oligonucleotide
  misc_feature 1..20: note = Target: FXN; (+) strand; PAM type: NRG; PAM sequence: GGG
  source 1..20: mol_type = other DNA
gactgcagagaaggtgccag

SEQ ID NO: 19621 - DNA, 20 bp, synthetic construct
  misc_feature 1..20: note = Description of Artificial Sequence: Synthetic oligonucleotide
  misc_feature 1..20: note = Target: FXN; (+) strand; PAM type: NRG; PAM sequence: GGG
  source 1..20: mol_type = other DNA
actgcagagaaggtgccagg

SEQ ID NO: 19622 - DNA, 20 bp, synthetic construct
  misc_feature 1..20: note = Description of Artificial Sequence: Synthetic oligonucleotide
  misc_feature 1..20: note = Target: FXN; (+) strand; PAM type: NRG; PAM sequence: TAG
  source 1..20: mol_type = other DNA
aaggtgccagggggtgaaaa

SEQ ID NO: 19623 - DNA, 20 bp, synthetic construct
  misc_feature 1..20: note = Description of Artificial Sequence: Synthetic oligonucleotide
  misc_feature 1..20: note = Target: FXN; (+) strand; PAM type: NRG; PAM sequence: GAG
  source 1..20: mol_type = other DNA
ccagggggtgaaaatagctt

SEQ ID NO: 19624 - DNA, 20 bp, synthetic construct
  misc_feature 1..20: note = Description of Artificial Sequence: Synthetic oligonucleotide
  misc_feature 1..20: note = Target: FXN; (+) strand; PAM type: NRG; PAM sequence: GAG
  source 1..20: mol_type = other DNA
agggggtgaaaatagcttga

SEQ ID NO: 19625 - DNA, 20 bp, synthetic construct
  misc_feature 1..20: note = Description of Artificial Sequence: Synthetic oligonucleotide
  misc_feature 1..20: note = Target: FXN; (+) strand; PAM type: NRG; PAM sequence: TGG
  source 1..20: mol_type = other DNA
tgaaaatagcttgagagctg

SEQ ID NO: 19626 - DNA, 20 bp, synthetic construct
  misc_feature 1..20: note = Description of Artificial Sequence: Synthetic oligonucleotide
  misc_feature 1..20: note = Target: FXN; (+) strand; PAM type: NRG; PAM sequence: GAG
  source 1..20: mol_type = other DNA
aaaatagcttgagagctgtg

SEQ ID NO: 19627 - DNA, 20 bp, synthetic construct
  misc_feature 1..20: note = Description of Artificial Sequence: Synthetic oligonucleotide
  misc_feature 1..20: note = Target: FXN; (+) strand; PAM type: NRG; PAM sequence: TAG
  source 1..20: mol_type = other DNA
tagcttgagagctgtggagc

SEQ ID NO: 19628 - DNA, 20 bp, synthetic construct
  misc_feature 1..20: note = Description of Artificial Sequence: Synthetic oligonucleotide
  misc_feature 1..20: note = Target: FXN; (+) strand; PAM type: NRG; PAM sequence: AAG
  source 1..20: mol_type = other DNA
cttgagagctgtggagctag

SEQ ID NO: 19629 - DNA, 20 bp, synthetic construct
  misc_feature 1..20: note = Description of Artificial Sequence: Synthetic oligonucleotide
  misc_feature 1..20: note = Target: FXN; (+) strand; PAM type: NRG; PAM sequence: AGG
  source 1..20: mol_type = other DNA
ttgagagctgtggagctaga

SEQ ID NO: 19630 - DNA, 20 bp, synthetic construct
  misc_feature 1..20: note = Description of Artificial Sequence: Synthetic oligonucleotide
  misc_feature 1..20: note = Target: FXN; (+) strand; PAM type: NRG; PAM sequence: GGG
  source 1..20: mol_type = other DNA
tgagagctgtggagctagaa

SEQ ID NO: 19631 - DNA, 20 bp, synthetic construct
  misc_feature 1..20: note = Description of Artificial Sequence: Synthetic oligonucleotide
  misc_feature 1..20: note = Target: FXN; (+) strand; PAM type: NRG; PAM sequence: AAG
  source 1..20: mol_type = other DNA
tattaatatgccctttgaaa

SEQ ID NO: 19632 - DNA, 20 bp, synthetic construct
  misc_feature 1..20: note = Description of Artificial Sequence: Synthetic oligonucleotide
  misc_feature 1..20: note = Target: FXN; (+) strand; PAM type: NRG; PAM sequence: GAG
  source 1..20: mol_type = other DNA
ttaatatgccctttgaaaaa

SEQ ID NO: 19633 - DNA, 20 bp, synthetic construct
  misc_feature 1..20: note = Description of Artificial Sequence: Synthetic oligonucleotide
  misc_feature 1..20: note = Target: FXN; (+) strand; PAM type: NRG; PAM sequence: TGG
  source 1..20: mol_type = other DNA
atatgccctttgaaaaagag

SEQ ID NO: 19634 - DNA, 20 bp, synthetic construct
  misc_feature 1..20: note = Description of Artificial Sequence: Synthetic oligonucleotide
  misc_feature 1..20: note = Target: FXN; (+) strand; PAM type: NRG; PAM sequence: TGG
  source 1..20: mol_type = other DNA
aaaaagagtggcctgatacc

SEQ ID NO: 19635 - DNA, 20 bp, synthetic construct
  misc_feature 1..20: note = Description of Artificial Sequence: Synthetic oligonucleotide
  misc_feature 1..20: note = Target: FXN; (+) strand; PAM type: NRG; PAM sequence: GAG
  source 1..20: mol_type = other DNA
aaagagtggcctgatacctg

SEQ ID NO: 19636 - DNA, 20 bp, synthetic construct
  misc_feature 1..20: note = Description of Artificial Sequence: Synthetic oligonucleotide
  misc_feature 1..20: note = Target: FXN; (+) strand; PAM type: NRG; PAM sequence: AAG
  source 1..20: mol_type = other DNA
tgatacctggagtcactcaa

SEQ ID NO: 19637 - DNA, 20 bp, synthetic construct
  misc_feature 1..20: note = Description of Artificial Sequence: Synthetic oligonucleotide
  misc_feature 1..20: note = Target: FXN; (+) strand; PAM type: NRG; PAM sequence: TAG
  source 1..20: mol_type = other DNA
caaaagatttccaattccga

SEQ ID NO: 19638 - DNA, 20 bp, synthetic construct
  misc_feature 1..20: note = Description of Artificial Sequence: Synthetic oligonucleotide
  misc_feature 1..20: note = Target: FXN; (+) strand; PAM type: NRG; PAM sequence: AGG
  source 1..20: mol_type = other DNA
aaaagatttccaattccgat

SEQ ID NO: 19639 - DNA, 20 bp, synthetic construct
  misc_feature 1..20: note = Description of Artificial Sequence: Synthetic oligonucleotide
  misc_feature 1..20: note = Target: FXN; (+) strand; PAM type: NRG; PAM sequence: AAG
  source 1..20: mol_type = other DNA
tttccaattccgataggaaa

SEQ ID NO: 19640 - DNA, 20 bp, synthetic construct
  misc_feature 1..20: note = Description of Artificial Sequence: Synthetic oligonucleotide
  misc_feature 1..20: note = Target: FXN; (+) strand; PAM type: NRG; PAM sequence: TGG
  source 1..20: mol_type = other DNA
cgataggaaaaagtcaattt

SEQ ID NO: 19641 - DNA, 20 bp, synthetic construct
  misc_feature 1..20: note = Description of Artificial Sequence: Synthetic oligonucleotide
  misc_feature 1..20: note = Target: FXN; (+) strand; PAM type: NRG; PAM sequence: CAG
  source 1..20: mol_type = other DNA
gaaaaagtcaattttggctt

SEQ ID NO: 19642 - DNA, 20 bp, synthetic construct
  misc_feature 1..20: note = Description of Artificial Sequence: Synthetic oligonucleotide
  misc_feature 1..20: note = Target: FXN; (+) strand; PAM type: NRG; PAM sequence: TGG
  source 1..20: mol_type = other DNA
aaagtcaattttggcttcag

SEQ ID NO: 19643 - DNA, 20 bp, synthetic construct
  misc_feature 1..20: note = Description of Artificial Sequence: Synthetic oligonucleotide
  misc_feature 1..20: note = Target: FXN; (+) strand; PAM type: NRG; PAM sequence: GAG
  source 1..20: mol_type = other DNA
cccctgatttgctgtatgct

SEQ ID NO: 19644 - DNA, 20 bp, synthetic construct
  misc_feature 1..20: note = Description of Artificial Sequence: Synthetic oligonucleotide
  misc_feature 1..20: note = Target: FXN; (+) strand; PAM type: NRG; PAM sequence: AGG
  source 1..20: mol_type = other DNA
ccctgatttgctgtatgctg

SEQ ID NO: 19645 - DNA, 20 bp, synthetic construct
  misc_feature 1..20: note = Description of Artificial Sequence: Synthetic oligonucleotide
  misc_feature 1..20: note = Target: FXN; (+) strand; PAM type: NRG; PAM sequence: TGG
  source 1..20: mol_type = other DNA
tgctgtatgctgaggcattg

SEQ ID NO: 19646 - DNA, 20 bp, synthetic construct
  misc_feature 1..20: note = Description of Artificial Sequence: Synthetic oligonucleotide
  misc_feature 1..20: note = Target: FXN; (+) strand; PAM type: NRG; PAM sequence: TGG
  source 1..20: mol_type = other DNA
atgctgaggcattgtggtga

SEQ ID NO: 19647 - DNA, 20 bp, synthetic construct
  misc_feature 1..20: note = Description of Artificial Sequence: Synthetic oligonucleotide
  misc_feature 1..20: note = Target: FXN; (+) strand; PAM type: NRG; PAM sequence: AAG
  source 1..20: mol_type = other DNA
ggcattgtggtgatggacgc

SEQ ID NO: 19648 - DNA, 20 bp, synthetic construct
  misc_feature 1..20: note = Description of Artificial Sequence: Synthetic oligonucleotide
  misc_feature 1..20: note = Target: FXN; (+) strand; PAM type: NRG; PAM sequence: CGG
  source 1..20: mol_type = other DNA
tgtggtgatggacgcaagtg

SEQ ID NO: 19649 - DNA, 20 bp, synthetic construct
  misc_feature 1..20: note = Description of Artificial Sequence: Synthetic oligonucleotide
  misc_feature 1..20: note = Target: FXN; (+) strand; PAM type: NRG; PAM sequence: GAG
  source 1..20: mol_type = other DNA
tggtgatggacgcaagtgcg

SEQ ID NO: 19650 - DNA, 20 bp, synthetic construct
  misc_feature 1..20: note = Description of Artificial Sequence: Synthetic oligonucleotide
  misc_feature 1..20: note = Target: FXN; (+) strand; PAM type: NRG; PAM sequence: GAG
  source 1..20: mol_type = other DNA
gacgcaagtgcggagacctt

SEQ ID NO: 19651 - DNA, 20 bp, synthetic construct
  misc_feature 1..20: note = Description of Artificial Sequence: Synthetic oligonucleotide
  misc_feature 1..20: note = Target: FXN; (+) strand; PAM type: NRG; PAM sequence: TAG
  source 1..20: mol_type = other DNA
cttgagcacgcatctgcccc

SEQ ID NO: 19652 - DNA, 20 bp, synthetic construct
  misc_feature 1..20: note = Description of Artificial Sequence: Synthetic oligonucleotide
  misc_feature 1..20: note = Target: FXN; (+) strand; PAM type: NRG; PAM sequence: GAG
  source 1..20: mol_type = other DNA
ctgcccctagttcttgccct

SEQ ID NO: 19653 - DNA, 20 bp, synthetic construct
  misc_feature 1..20: note = Description of Artificial Sequence: Synthetic oligonucleotide
  misc_feature 1..20: note = Target: FXN; (+) strand; PAM type: NRG; PAM sequence: AAG
  source 1..20: mol_type = other DNA
gttcttgccctgagtcctcg

SEQ ID NO: 19654 - DNA, 20 bp, synthetic construct
  misc_feature 1..20: note = Description of Artificial Sequence: Synthetic oligonucleotide
  misc_feature 1..20: note = Target: FXN; (+) strand; PAM type: NRG; PAM sequence: AGG
  source 1..20: mol_type = other DNA
ttcttgccctgagtcctcga

SEQ ID NO: 19655 - DNA, 20 bp, synthetic construct
  misc_feature 1..20: note = Description of Artificial Sequence: Synthetic oligonucleotide
  misc_feature 1..20: note = Target: FXN; (+) strand; PAM type: NRG; PAM sequence: GAG
  source 1..20: mol_type = other DNA
cttgccctgagtcctcgaag

SEQ ID NO: 19656 - DNA, 20 bp, synthetic construct
  misc_feature 1..20: note = Description of Artificial Sequence: Synthetic oligonucleotide
  misc_feature 1..20: note = Target: FXN; (+) strand; PAM type: NRG; PAM sequence: AGG
  source 1..20: mol_type = other DNA
ttgccctgagtcctcgaagg

SEQ ID NO: 19657 - DNA, 20 bp, synthetic construct
  misc_feature 1..20: note = Description of Artificial Sequence: Synthetic oligonucleotide
  misc_feature 1..20: note = Target: FXN; (+) strand; PAM type: NRG; PAM sequence: CAG
  source 1..20: mol_type = other DNA
ccctgagtcctcgaaggagg

SEQ ID NO: 19658 - DNA, 20 bp, synthetic construct
  misc_feature 1..20: note = Description of Artificial Sequence: Synthetic oligonucleotide
  misc_feature 1..20: note = Target: FXN; (+) strand; PAM type: NRG; PAM sequence: AGG
  source 1..20: mol_type = other DNA
cctgagtcctcgaaggaggc

SEQ ID NO: 19659 - DNA, 20 bp, synthetic construct
  misc_feature 1..20: note = Description of Artificial Sequence: Synthetic oligonucleotide
  misc_feature 1..20: note = Target: FXN; (+) strand; PAM type: NRG; PAM sequence: GAG
  source 1..20: mol_type = other DNA
tgagtcctcgaaggaggcag

SEQ ID NO: 19660 - DNA, 20 bp, synthetic construct
  misc_feature 1..20: note = Description of Artificial Sequence: Synthetic oligonucleotide
  misc_feature 1..20: note = Target: FXN; (+) strand; PAM type: NRG; PAM sequence: GAG
  source 1..20: mol_type = other DNA
agtcctcgaaggaggcagga

SEQ ID NO: 19661 - DNA, 20 bp, synthetic construct
  misc_feature 1..20: note = Description of Artificial Sequence: Synthetic oligonucleotide
  misc_feature 1..20: note = Target: FXN; (+) strand; PAM type: NRG; PAM sequence: AAG
  source 1..20: mol_type = other DNA
aaggaggcaggagagacatc

SEQ ID NO: 19662 - DNA, 20 bp, synthetic construct
  misc_feature 1..20: note = Description of Artificial Sequence: Synthetic oligonucleotide
  misc_feature 1..20: note = Target: FXN; (+) strand; PAM type: NRG; PAM sequence: AGG
  source 1..20: mol_type = other DNA
aggaggcaggagagacatca

SEQ ID NO: 19663 - DNA, 20 bp, synthetic construct
  misc_feature 1..20: note = Description of Artificial Sequence: Synthetic oligonucleotide
  misc_feature 1..20: note = Target: FXN; (+) strand; PAM type: NRG; PAM sequence: CAG
  source 1..20: mol_type = other DNA
aggcaggagagacatcaagg

SEQ ID NO: 19664 - DNA, 20 bp, synthetic construct
  misc_feature 1..20: note = Description of Artificial Sequence: Synthetic oligonucleotide
  misc_feature 1..20: note = Target: FXN; (+) strand; PAM type: NRG; PAM sequence: CAG
  source 1..20: mol_type = other DNA
aggagagacatcaaggcaga

SEQ ID NO: 19665 - DNA, 20 bp, synthetic construct
  misc_feature 1..20: note = Description of Artificial Sequence: Synthetic oligonucleotide
  misc_feature 1..20: note = Target: FXN; (+) strand; PAM type: NRG; PAM sequence: AGG
  source 1..20: mol_type = other DNA
ggagagacatcaaggcagac

SEQ ID NO: 19666 - DNA, 20 bp, synthetic construct
  misc_feature 1..20: note = Description of Artificial Sequence: Synthetic oligonucleotide
  misc_feature 1..20: note = Target: FXN; (+) strand; PAM type: NRG; PAM sequence: CAG
  source 1..20: mol_type = other DNA
ggcagacaggcgccgctcat

SEQ ID NO: 19667 - DNA, 20 bp, synthetic construct
  misc_feature 1..20: note = Description of Artificial Sequence: Synthetic oligonucleotide
  misc_feature 1..20: note = Target: FXN; (+) strand; PAM type: NRG; PAM sequence: GAG
  source 1..20: mol_type = other DNA
aggcgccgctcatcagtgat

SEQ ID NO: 19668 - DNA, 20 bp, synthetic construct
  misc_feature 1..20: note = Description of Artificial Sequence: Synthetic oligonucleotide
  misc_feature 1..20: note = Target: FXN; (+) strand; PAM type: NRG; PAM sequence: CAG
  source 1..20: mol_type = other DNA
ccgctcatcagtgatgagac

SEQ ID NO: 19669 - DNA, 20 bp, synthetic construct
  misc_feature 1..20: note = Description of Artificial Sequence: Synthetic oligonucleotide
  misc_feature 1..20: note = Target: FXN; (+) strand; PAM type: NRG; PAM sequence: TGG
  source 1..20: mol_type = other DNA
atcagtgatgagaccagacc

SEQ ID NO: 19670 - DNA, 20 bp, synthetic construct
  misc_feature 1..20: note = Description of Artificial Sequence: Synthetic oligonucleotide
  misc_feature 1..20: note = Target: FXN; (+) strand; PAM type: NRG; PAM sequence: CAG
  source 1..20: mol_type = other DNA
tggaactcgcgtcttatact

SEQ ID NO: 19671 - DNA, 20 bp, synthetic construct
  misc_feature 1..20: note = Description of Artificial Sequence: Synthetic oligonucleotide
  misc_feature 1..20: note = Target: FXN; (+) strand; PAM type: NRG; PAM sequence: TGG
  source 1..20: mol_type = other DNA
cagtcctctgccctttctgc

SEQ ID NO: 19672 - DNA, 20 bp, synthetic construct
  misc_feature 1..20: note = Description of Artificial Sequence: Synthetic oligonucleotide
  misc_feature 1..20: note = Target: FXN; (+) strand; PAM type: NRG; PAM sequence: TGG
  source 1..20: mol_type = other DNA
ctgccctttctgctggattg

SEQ ID NO: 19673 - DNA, 20 bp, synthetic construct
  misc_feature 1..20: note = Description of Artificial Sequence: Synthetic oligonucleotide
  misc_feature 1..20: note = Target: FXN; (+) strand; PAM type: NRG; PAM sequence: CAG
  source 1..20: mol_type = other DNA
tctgctggattgtggccccc

SEQ ID NO: 19674 - DNA, 20 bp, synthetic construct
  misc_feature 1..20: note = Description of Artificial Sequence: Synthetic oligonucleotide
  misc_feature 1..20: note = Target: FXN; (+) strand; PAM type: NRG; PAM sequence: TAG
  source 1..20: mol_type = other DNA
tggattgtggccccccagta

SEQ ID NO: 19675 - DNA, 20 bp, synthetic construct
  misc_feature 1..20: note = Description of Artificial Sequence: Synthetic oligonucleotide
  misc_feature 1..20: note = Target: FXN; (+) strand; PAM type: NRG; PAM sequence: AGG
  source 1..20: mol_type = other DNA
ggattgtggccccccagtat

SEQ ID NO: 19676 - DNA, 20 bp, synthetic construct
  misc_feature 1..20: note = Description of Artificial Sequence: Synthetic oligonucleotide
  misc_feature 1..20: note = Target: FXN; (+) strand; PAM type: NRG; PAM sequence: GGG
  source 1..20: mol_type = other DNA
gattgtggccccccagtata

SEQ ID NO: 19677 - DNA, 20 bp, synthetic construct
  misc_feature 1..20: note = Description of Artificial Sequence: Synthetic oligonucleotide
  misc_feature 1..20: note = Target: FXN; (+) strand; PAM type: NRG; PAM sequence: TGG
  source 1..20: mol_type = other DNA
tatagggtgcaacacacaac

SEQ ID NO: 19678 - DNA, 20 bp, synthetic construct
  misc_feature 1..20: note = Description of Artificial Sequence: Synthetic oligonucleotide
  misc_feature 1..20: note = Target: FXN; (+) strand; PAM type: NRG; PAM sequence: GAG
  source 1..20: mol_type = other DNA
tagggtgcaacacacaactg

SEQ ID NO: 19679 - DNA, 20 bp, synthetic construct
  misc_feature 1..20: note = Description of Artificial Sequence: Synthetic oligonucleotide
  misc_feature 1..20: note = Target: FXN; (+) strand; PAM type: NRG; PAM sequence: AAG
  source 1..20: mol_type = other DNA
aacacacaactggagcattt

SEQ ID NO: 19680 - DNA, 20 bp, synthetic construct
  misc_feature 1..20: note = Description of Artificial Sequence: Synthetic oligonucleotide
  misc_feature 1..20: note = Target: FXN; (+) strand; PAM type: NRG; PAM sequence: AGG
  source 1..20: mol_type = other DNA
acacacaactggagcattta

SEQ ID NO: 19681 - DNA, 20 bp, synthetic construct
  misc_feature 1..20: note = Description of Artificial Sequence: Synthetic oligonucleotide
  misc_feature 1..20: note = Target: FXN; (+) strand; PAM type: NRG; PAM sequence: GGG
  source 1..20: mol_type = other DNA
cacacaactggagcatttaa

SEQ ID NO: 19682 - DNA, 20 bp, synthetic construct
  misc_feature 1..20: note = Description of Artificial Sequence: Synthetic oligonucleotide
  misc_feature 1..20: note = Target: FXN; (+) strand; PAM type: NRG; PAM sequence: AAG
  source 1..20: mol_type = other DNA
tggagcatttaagggccaca

SEQ ID NO: 19683 - DNA, 20 bp, synthetic construct
  misc_feature 1..20: note = Description of Artificial Sequence: Synthetic oligonucleotide
  misc_feature 1..20: note = Target: FXN; (+) strand; PAM type: NRG; PAM sequence: GAG
  source 1..20: mol_type = other DNA
gagcatttaagggccacaaa

SEQ ID NO: 19684 - DNA, 20 bp, synthetic construct
  misc_feature 1..20: note = Description of Artificial Sequence: Synthetic oligonucleotide
  misc_feature 1..20: note = Target: FXN; (+) strand; PAM type: NRG; PAM sequence: GAG
  source 1..20: mol_type = other DNA
tgattgtgtgttgattcttt

SEQ ID NO: 19685 - DNA, 20 bp, synthetic construct
  misc_feature 1..20: note = Description of Artificial Sequence: Synthetic oligonucleotide
  misc_feature 1..20: note = Target: FXN; (+) strand; PAM type: NRG; PAM sequence: AAG
  source 1..20: mol_type = other DNA
tttttttattattatacttt

SEQ ID NO: 19686 - DNA, 20 bp, synthetic construct
  misc_feature 1..20: note = Description of Artificial Sequence: Synthetic oligonucleotide
  misc_feature 1..20: note = Target: FXN; (+) strand; PAM type: NRG; PAM sequence: TAG
  source 1..20: mol_type = other DNA
tattattatactttaagtgt

SEQ ID NO: 19687 - DNA, 20 bp, synthetic construct
  misc_feature 1..20: note = Description of Artificial Sequence: Synthetic oligonucleotide
  misc_feature 1..20: note = Target: FXN; (+) strand; PAM type: NRG; PAM sequence: AGG
  source 1..20: mol_type = other DNA
attattatactttaagtgtt

SEQ ID NO: 19688 - DNA, 20 bp, synthetic construct
  misc_feature 1..20: note = Description of Artificial Sequence: Synthetic oligonucleotide
  misc_feature 1..20: note = Target: FXN; (+) strand; PAM type: NRG; PAM sequence: GGG
  source 1..20: mol_type = other DNA
ttattatactttaagtgtta

SEQ ID NO: 19689 - DNA, 20 bp, synthetic construct
  misc_feature 1..20: note = Description of Artificial Sequence: Synthetic oligonucleotide
  misc_feature 1..20: note = Target: FXN; (+) strand; PAM type: NRG; PAM sequence: CAG
  source 1..20: mol_type = other DNA
gggtacatgtgcacaatgtg

SEQ ID NO: 19690 - DNA, 20 bp, synthetic construct
  misc_feature 1..20: note = Description of Artificial Sequence: Synthetic oligonucleotide
  misc_feature 1..20: note = Target: FXN; (+) strand; PAM type: NRG; PAM sequence: AGG
  source 1..20: mol_type = other DNA
ggtacatgtgcacaatgtgc

SEQ ID NO: 19691 - DNA, 20 bp, synthetic construct
  misc_feature 1..20: note = Description of Artificial Sequence: Synthetic oligonucleotide
  misc_feature 1..20: note = Target: FXN; (+) strand; PAM type: NRG; PAM sequence: TAG
  source 1..20: mol_type = other DNA
catgtgcacaatgtgcaggt

SEQ ID NO: 19692 - DNA, 20 bp, synthetic construct
  misc_feature 1..20: note = Description of Artificial Sequence: Synthetic oligonucleotide
  misc_feature 1..20: note = Target: FXN; (+) strand; PAM type: NRG; PAM sequence: TGG
  source 1..20: mol_type = other DNA
tatgtatacatgtgccatgc

SEQ ID NO: 19693 - DNA, 20 bp, synthetic construct
  misc_feature 1..20: note = Description of Artificial Sequence: Synthetic oligonucleotide
  misc_feature 1..20: note = Target: FXN; (+) strand; PAM type: NRG; PAM sequence: TAG
  source 1..20: mol_type = other DNA
gcacccattaactcgtcatt

SEQ ID NO: 19694 - DNA, 20 bp, synthetic construct
  misc_feature 1..20: note = Description of Artificial Sequence: Synthetic oligonucleotide
  misc_feature 1..20: note = Target: FXN; (+) strand; PAM type: NRG; PAM sequence: TAG
  source 1..20: mol_type = other DNA
attaactcgtcatttagcat

SEQ ID NO: 19695 - DNA, 20 bp, synthetic construct
  misc_feature 1..20: note = Description of Artificial Sequence: Synthetic oligonucleotide
  misc_feature 1..20: note = Target: FXN; (+) strand; PAM type: NRG; PAM sequence: AGG
  source 1..20: mol_type = other DNA
ttaactcgtcatttagcatt

SEQ ID NO: 19696 - DNA, 20 bp, synthetic construct
  misc_feature 1..20: note = Description of Artificial Sequence: Synthetic oligonucleotide
  misc_feature 1..20: note = Target: FXN; (+) strand; PAM type: NRG; PAM sequence: TAG
  source 1..20: mol_type = other DNA
tcgtcatttagcattaggta

SEQ ID NO: 19697 - DNA, 20 bp, synthetic construct
  misc_feature 1..20: note = Description of Artificial Sequence: Synthetic oligonucleotide
  misc_feature 1..20: note = Target: FXN; (+) strand; PAM type: NRG; PAM sequence: AAG
  source 1..20: mol_type = other DNA
agcattaggtatagctccta

SEQ ID NO: 19698 - DNA, 20 bp, synthetic construct
  misc_feature 1..20: note = Description of Artificial Sequence: Synthetic oligonucleotide
  misc_feature 1..20: note = Target: FXN; (+) strand; PAM type: NRG; PAM sequence: CAG
  source 1..20: mol_type = other DNA
cccctccctccaccccacaa

SEQ ID NO: 19699 - DNA, 20 bp, synthetic construct
  misc_feature 1..20: note = Description of Artificial Sequence: Synthetic oligonucleotide
  misc_feature 1..20: note = Target: FXN; (+) strand; PAM type: NRG; PAM sequence: CAG
  source 1..20: mol_type = other DNA
ctccaccccacaacagtccc

SEQ ID NO: 19700 - DNA, 20 bp, synthetic construct
  misc_feature 1..20: note = Description of Artificial Sequence: Synthetic oligonucleotide
  misc_feature 1..20: note = Target: FXN; (+) strand; PAM type: NRG; PAM sequence: GAG
  source 1..20: mol_type = other DNA
ccaccccacaacagtcccca

SEQ ID NO: 19701 - DNA, 20 bp, synthetic construct
  misc_feature 1..20: note = Description of Artificial Sequence: Synthetic oligonucleotide
  misc_feature 1..20: note = Target: FXN; (+) strand; PAM type: NRG; PAM sequence: CAG
  source 1..20: mol_type = other DNA
gaccatgtgttctcattgtt

SEQ ID NO: 19702 - DNA, 20 bp, synthetic construct
  misc_feature 1..20: note = Description of Artificial Sequence: Synthetic oligonucleotide
  misc_feature 1..20: note = Target: FXN; (+) strand; PAM type: NRG; PAM sequence: GAG
  source 1..20: mol_type = other DNA
attgttcagttcccacctat

SEQ ID NO: 19703 - DNA, 20 bp, synthetic construct
  misc_feature 1..20: note = Description of Artificial Sequence: Synthetic oligonucleotide
  misc_feature 1..20: note = Target: FXN; (+) strand; PAM type: NRG; PAM sequence: GAG
  source 1..20: mol_type = other DNA
ttcagttcccacctatgagt

SEQ ID NO: 19704 - DNA, 20 bp, synthetic construct
  misc_feature 1..20: note = Description of Artificial Sequence: Synthetic oligonucleotide
  misc_feature 1..20: note = Target: FXN; (+) strand; PAM type: NRG; PAM sequence: CAG
  source 1..20: mol_type = other DNA
cacctatgagtgagaatatg

SEQ ID NO: 19705 - DNA, 20 bp, synthetic construct
  misc_feature 1..20: note = Description of Artificial Sequence: Synthetic oligonucleotide
  misc_feature 1..20: note = Target: FXN; (+) strand; PAM type: NRG; PAM sequence: TAG
  source 1..20: mol_type = other DNA
ttgattttttgttcttgcga

SEQ ID NO: 19706 - DNA, 20 bp, synthetic construct
  misc_feature 1..20: note = Description of Artificial Sequence: Synthetic oligonucleotide
  misc_feature 1..20: note = Target: FXN; (+) strand; PAM type: NRG; PAM sequence: GAG
  source 1..20: mol_type = other DNA
tgttcttgcgatagtttact

SEQ ID NO: 19707 - DNA, 20 bp, synthetic construct
  misc_feature 1..20: note = Description of Artificial Sequence: Synthetic oligonucleotide
  misc_feature 1..20: note = Target: FXN; (+) strand; PAM type: NRG; PAM sequence: CAG
  source 1..20: mol_type = other DNA
ttactgagaatgatgatttc

SEQ ID NO: 19708 - DNA, 20 bp, synthetic construct
  misc_feature 1..20: note = Description of Artificial Sequence: Synthetic oligonucleotide
  misc_feature 1..20: note = Target: FXN; (+) strand; PAM type: NRG; PAM sequence: AAG
  source 1..20: mol_type = other DNA
gtttcatccatgtccctaca

SEQ ID NO: 19709 - DNA, 20 bp, synthetic construct
  misc_feature 1..20: note = Description of Artificial Sequence: Synthetic oligonucleotide
  misc_feature 1..20: note = Target: FXN; (+) strand; PAM type: NRG; PAM sequence: AGG
  source 1..20: mol_type = other DNA
tttcatccatgtccctacaa

SEQ ID NO: 19710 - DNA, 20 bp, synthetic construct
  misc_feature 1..20: note = Description of Artificial Sequence: Synthetic oligonucleotide
  misc_feature 1..20: note = Target: FXN; (+) strand; PAM type: NRG; PAM sequence: TAG
  source 1..20: mol_type = other DNA
catcattttttattgctgca

SEQ ID NO: 19711 - DNA, 20 bp, synthetic construct
  misc_feature 1..20: note = Description of Artificial Sequence: Synthetic oligonucleotide
  misc_feature 1..20: note = Target: FXN; (+) strand; PAM type: NRG; PAM sequence: TGG
  source 1..20: mol_type = other DNA
tattgctgcatagtattcca

SEQ ID NO: 19712 - DNA, 20 bp, synthetic construct
  misc_feature 1..20: note = Description of Artificial Sequence: Synthetic oligonucleotide
  misc_feature 1..20: note = Target: FXN; (+) strand; PAM type: NRG; PAM sequence: CAG
  source 1..20: mol_type = other DNA
tgtgccacattttcttaatc

SEQ ID NO: 19713 - DNA, 20 bp, synthetic construct
  misc_feature 1..20: note = Description of Artificial Sequence: Synthetic oligonucleotide
  misc_feature 1..20: note = Target: FXN; (+) strand; PAM type: NRG; PAM sequence: TGG
  source 1..20: mol_type = other DNA
ttaatccagtctatcattgt

SEQ ID NO: 19714 - DNA, 20 bp, synthetic construct
  misc_feature 1..20: note = Description of Artificial Sequence: Synthetic oligonucleotide
  misc_feature 1..20: note = Target: FXN; (+) strand; PAM type: NRG; PAM sequence: GAG
  source 1..20: mol_type = other DNA
ccagtctatcattgttggat

SEQ ID NO: 19715 - DNA, 20 bp, synthetic construct
  misc_feature 1..20: note = Description of Artificial Sequence: Synthetic oligonucleotide
  misc_feature 1..20: note = Target: FXN; (+) strand; PAM type: NRG; PAM sequence: TGG
  source 1..20: mol_type = other DNA
tggatgagctctttatctca

SEQ ID NO: 19716 - DNA, 20 bp, synthetic construct
  misc_feature 1..20: note = Description of Artificial Sequence: Synthetic oligonucleotide
  misc_feature 1..20: note = Target: FXN; (+) strand; PAM type: NRG; PAM sequence: GAG
  source 1..20: mol_type = other DNA
taatttataaaactctgtat

SEQ ID NO: 19717 - DNA, 20 bp, synthetic construct
  misc_feature 1..20: note = Description of Artificial Sequence: Synthetic oligonucleotide
  misc_feature 1..20: note = Target: FXN; (+) strand; PAM type: NRG; PAM sequence: GAG
  source 1..20: mol_type = other DNA
atttataaaactctgtatga

SEQ ID NO: 19718 - DNA, 20 bp, synthetic construct
  misc_feature 1..20: note = Description of Artificial Sequence: Synthetic oligonucleotide
  misc_feature 1..20: note = Target: FXN; (+) strand; PAM type: NRG; PAM sequence: AGG
  source 1..20: mol_type = other DNA
tttataaaactctgtatgag

SEQ ID NO: 19719 - DNA, 20 bp, synthetic construct
  misc_feature 1..20: note = Description of Artificial Sequence: Synthetic oligonucleotide
  misc_feature 1..20: note = Target: FXN; (+) strand; PAM type: NRG; PAM sequence: GAG
  source 1..20: mol_type = other DNA
tataaaactctgtatgagag

SEQ ID NO: 19720 - DNA, 20 bp, synthetic construct
  misc_feature 1..20: note = Description of Artificial Sequence: Synthetic oligonucleotide
  misc_feature 1..20: note = Target: FXN; (+) strand; PAM type: NRG; PAM sequence: TGG
  source 1..20: mol_type = other DNA
aaaactctgtatgagaggag

SEQ ID NO: 19721 - DNA, 20 bp, synthetic construct
  misc_feature 1..20: note = Description of Artificial Sequence: Synthetic oligonucleotide
  misc_feature 1..20: note = Target: FXN; (+) strand; PAM type: NRG; PAM sequence: GGG
  source 1..20: mol_type = other DNA
aaactctgtatgagaggagt

SEQ ID NO: 19722 - DNA, 20 bp, synthetic construct
  misc_feature 1..20: note = Description of Artificial Sequence: Synthetic oligonucleotide
  misc_feature 1..20: note = Target: FXN; (+) strand; PAM type: NRG; PAM sequence: TAG
  source 1..20: mol_type = other DNA
tgtatgagaggagtgggaaa

SEQ ID NO: 19723 - DNA, 20 bp, synthetic construct
  misc_feature 1..20: note = Description of Artificial Sequence: Synthetic oligonucleotide
  misc_feature 1..20: note = Target: FXN; (+) strand; PAM type: NRG; PAM sequence: CGG
  source 1..20: mol_type = other DNA
ggagtgggaaatagtattaa

SEQ ID NO: 19724 - DNA, 20 bp, synthetic construct
  misc_feature 1..20: note = Description of Artificial Sequence: Synthetic oligonucleotide
  misc_feature 1..20: note = Target: FXN; (+) strand; PAM type: NRG; PAM sequence: GGG
  source 1..20: mol_type = other DNA
gagtgggaaatagtattaac

SEQ ID NO: 19725 - DNA, 20 bp, synthetic construct
  misc_feature 1..20: note = Description of Artificial Sequence: Synthetic oligonucleotide
  misc_feature 1..20: note = Target: FXN; (+) strand; PAM type: NRG; PAM sequence: CGG
  source 1..20: mol_type = other DNA
ggaaatagtattaacgggtg

SEQ ID NO: 19726 - DNA, 20 bp, synthetic construct
  misc_feature 1..20: note = Description of Artificial Sequence: Synthetic oligonucleotide
  misc_feature 1..20: note = Target: FXN; (+) strand; PAM type: NRG; PAM sequence: GGG
  source 1..20: mol_type = other DNA
gaaatagtattaacgggtgc

SEQ ID NO: 19727 - DNA, 20 bp, synthetic construct
  misc_feature 1..20: note = Description of Artificial Sequence: Synthetic oligonucleotide
  misc_feature 1..20: note = Target: FXN; (+) strand; PAM type: NRG; PAM sequence: GGG
  source 1..20: mol_type = other DNA
aaatagtattaacgggtgcg

SEQ ID NO: 19728 - DNA, 20 bp, synthetic construct
  misc_feature 1..20: note = Description of Artificial Sequence: Synthetic oligonucleotide
  misc_feature 1..20: note = Target: FXN; (+) strand; PAM type: NRG; PAM sequence: TGG
  source 1..20: mol_type = other DNA
acgggtgcggggtttctttt

SEQ ID NO: 19729 - DNA, 20 bp, synthetic construct
  misc_feature 1..20: note = Description of Artificial Sequence: Synthetic oligonucleotide
  misc_feature 1..20: note = Target: FXN; (+) strand; PAM type: NRG; PAM sequence: GGG
  source 1..20: mol_type = other DNA
cgggtgcggggtttcttttt

SEQ ID NO: 19730 - DNA, 20 bp, synthetic construct
  misc_feature 1..20: note = Description of Artificial Sequence: Synthetic oligonucleotide
  misc_feature 1..20: note = Target: FXN; (+) strand; PAM type: NRG; PAM sequence: TGG
  source 1..20: mol_type = other DNA
ggggtttctttttgggacaa

SEQ ID NO: 19731 - DNA, 20 bp, synthetic construct
  misc_feature 1..20: note = Description of Artificial Sequence: Synthetic oligonucleotide
  misc_feature 1..20: note = Target: FXN; (+) strand; PAM type: NRG; PAM sequence: TAG
  source 1..20: mol_type = other DNA
tctttttgggacaatggaaa

SEQ ID NO: 19732 - DNA, 20 bp, synthetic construct
  misc_feature 1..20: note = Description of Artificial Sequence: Synthetic oligonucleotide
  misc_feature 1..20: note = Target: FXN; (+) strand; PAM type: NRG; PAM sequence: TGG
  source 1..20: mol_type = other DNA
tttgggacaatggaaatagc

SEQ ID NO: 19733 - DNA, 20 bp, synthetic construct
  misc_feature 1..20: note = Description of Artificial Sequence: Synthetic oligonucleotide
  misc_feature 1..20: note = Target: FXN; (+) strand; PAM type: NRG; PAM sequence: TAG
  source 1..20: mol_type = other DNA
acaatggaaatagctggaat

SEQ ID NO: 19734 - DNA, 20 bp, synthetic construct
  misc_feature 1..20: note = Description of Artificial Sequence: Synthetic oligonucleotide
  misc_feature 1..20: note = Target: FXN; (+) strand; PAM type: NRG; PAM sequence: TAG
  source 1..20: mol_type = other DNA
tggaaatagctggaattaga

SEQ ID NO: 19735 - DNA, 20 bp, synthetic construct
  misc_feature 1..20: note = Description of Artificial Sequence: Synthetic oligonucleotide
  misc_feature 1..20: note = Target: FXN; (+) strand; PAM type: NRG; PAM sequence: TGG
  source 1..20: mol_type = other DNA
aaatagctggaattagatag

SEQ ID NO: 19736 - DNA, 20 bp, synthetic construct
  misc_feature 1..20: note = Description of Artificial Sequence: Synthetic oligonucleotide
  misc_feature 1..20: note = Target: FXN; (+) strand; PAM type: NRG; PAM sequence: CAG
  source 1..20: mol_type = other DNA
ctaaaaactcctgaattata

SEQ ID NO: 19737 - DNA, 20 bp, synthetic construct
  misc_feature 1..20: note = Description of Artificial Sequence: Synthetic oligonucleotide
  misc_feature 1..20: note = Target: FXN; (+) strand; PAM type: NRG; PAM sequence: AAG
  source 1..20: mol_type = other DNA
ctcctgaattatacagtttt

SEQ ID NO: 19738 - DNA, 20 bp, synthetic construct
  misc_feature 1..20: note = Description of Artificial Sequence: Synthetic oligonucleotide
  misc_feature 1..20: note = Target: FXN; (+) strand; PAM type: NRG; PAM sequence: GAG
  source 1..20: mol_type = other DNA
acttttatttatttgttttt

SEQ ID NO: 19739 - DNA, 20 bp, synthetic construct
  misc_feature 1..20: note = Description of Artificial Sequence: Synthetic oligonucleotide
  misc_feature 1..20: note = Target: FXN; (+) strand; PAM type: NRG; PAM sequence: GAG
  source 1..20: mol_type = other DNA
ttttatttatttgtttttga

SEQ ID NO: 19740 - DNA, 20 bp, synthetic construct
  misc_feature 1..20: note = Description of Artificial Sequence: Synthetic oligonucleotide
  misc_feature 1..20: note = Target: FXN; (+) strand; PAM type: NRG; PAM sequence: AAG
  source 1..20: mol_type = other DNA
tatttatttgtttttgagag

SEQ ID NO: 19741 - DNA, 20 bp, synthetic construct
  misc_feature 1..20: note = Description of Artificial Sequence: Synthetic oligonucleotide
  misc_feature 1..20: note = Target: FXN; (+) strand; PAM type: NRG; PAM sequence: CAG
  source 1..20: mol_type = other DNA
gagaagttctctgtgtcacc

SEQ ID NO: 19742 - DNA, 20 bp, synthetic construct
  misc_feature 1..20: note = Description of Artificial Sequence: Synthetic oligonucleotide
  misc_feature 1..20: note = Target: FXN; (+) strand; PAM type: NRG; PAM sequence: AGG
  source 1..20: mol_type = other DNA
agaagttctctgtgtcaccc

SEQ ID NO: 19743 - DNA, 20 bp, synthetic construct
  misc_feature 1..20: note = Description of Artificial Sequence: Synthetic oligonucleotide
  misc_feature 1..20: note = Target: FXN; (+) strand; PAM type: NRG; PAM sequence: AAG
  source 1..20: mol_type = other DNA
tctctgtgtcacccaggctg

SEQ ID NO: 19744 - DNA, 20 bp, synthetic construct
  misc_feature 1..20: note = Description of Artificial Sequence: Synthetic oligonucleotide
  misc_feature 1..20: note = Target: FXN; (+) strand; PAM type: NRG; PAM sequence: TGG
  source 1..20: mol_type = other DNA
gtgtcacccaggctgaagtg

SEQ ID NO: 19745 - DNA, 20 bp, synthetic construct
  misc_feature 1..20: note = Description of Artificial Sequence: Synthetic oligonucleotide
  misc_feature 1..20: note = Target: FXN; (+) strand; PAM type: NRG; PAM sequence: TGG
  source 1..20: mol_type = other DNA
tcacccaggctgaagtgtgg

SEQ ID NO: 19746 - DNA, 20 bp, synthetic construct
  misc_feature 1..20: note = Description of Artificial Sequence: Synthetic oligonucleotide
  misc_feature 1..20: note = Target: FXN; (+) strand; PAM type: NRG; PAM sequence: CGG
  source 1..20: mol_type = other DNA
aagtgtggtggcgtgatcac

SEQ ID NO: 19747 - DNA, 20 bp, synthetic construct
  misc_feature 1..20: note = Description of Artificial Sequence: Synthetic oligonucleotide
  misc_feature 1..20: note = Target: FXN; (+) strand; PAM type: NRG; PAM sequence: CAG
  source 1..20: mol_type = other DNA
ggcgtgatcaccggttattg

SEQ ID NO: 19748 - DNA, 20 bp, synthetic construct
  misc_feature 1..20: note = Description of Artificial Sequence: Synthetic oligonucleotide
  misc_feature 1..20: note = Target: FXN; (+) strand; PAM type: NRG; PAM sequence: GAG
  source 1..20: mol_type = other DNA
ttattgcagcctcaatctct

SEQ ID NO: 19749 - DNA, 20 bp, synthetic construct
  misc_feature 1..20: note = Description of Artificial Sequence: Synthetic oligonucleotide
  misc_feature 1..20: note = Target: FXN; (+) strand; PAM type: NRG; PAM sequence: AGG
  source 1..20: mol_type = other DNA
tattgcagcctcaatctctg

SEQ ID NO: 19750 - DNA, 20 bp, synthetic construct
  misc_feature 1..20: note = Description of Artificial Sequence: Synthetic oligonucleotide
  misc_feature 1..20: note = Target: FXN; (+) strand; PAM type: NRG; PAM sequence: AAG
  source 1..20: mol_type = other DNA
agcctcaatctctgaggctc

SEQ ID NO: 19751 - DNA, 20 bp, synthetic construct
  misc_feature 1..20: note = Description of Artificial Sequence: Synthetic oligonucleotide
  misc_feature 1..20: note = Target: FXN; (+) strand; PAM type: NRG; PAM sequence: CAG
  source 1..20: mol_type = other DNA
ctcaagcgattctcccacct

SEQ ID NO: 19752 - DNA, 20 bp, synthetic construct
  misc_feature 1..20: note = Description of Artificial Sequence: Synthetic oligonucleotide
  misc_feature 1..20: note = Target: FXN; (+) strand; PAM type: NRG; PAM sequence: AAG
  source 1..20: mol_type = other DNA
ttctcccacctcagcctacc

SEQ ID NO: 19753 - DNA, 20 bp, synthetic construct
  misc_feature 1..20: note = Description of Artificial Sequence: Synthetic oligonucleotide
  misc_feature 1..20: note = Target: FXN; (+) strand; PAM type: NRG; PAM sequence: TAG
  source 1..20: mol_type = other DNA
tcccacctcagcctaccaag

SEQ ID NO: 19754 - DNA, 20 bp, synthetic construct
  misc_feature 1..20: note = Description of Artificial Sequence: Synthetic oligonucleotide
  misc_feature 1..20: note = Target: FXN; (+) strand; PAM type: NRG; PAM sequence: TAG
  source 1..20: mol_type = other DNA
ctaccaagtagatgtgacta

SEQ ID NO: 19755 - DNA, 20 bp, synthetic construct
  misc_feature 1..20: note = Description of Artificial Sequence: Synthetic oligonucleotide
  misc_feature 1..20: note = Target: FXN; (+) strand; PAM type: NRG; PAM sequence: AGG
  source 1..20: mol_type = other DNA
taccaagtagatgtgactat

SEQ ID NO: 19756 - DNA, 20 bp, synthetic construct
  misc_feature 1..20: note = Description of Artificial Sequence: Synthetic oligonucleotide
  misc_feature 1..20: note = Target: FXN; (+) strand; PAM type: NRG; PAM sequence: CAG
  source 1..20: mol_type = other DNA
taggtgcgcaccaccacacc

SEQ ID NO: 19757 - DNA, 20 bp, synthetic construct
  misc_feature 1..20: note = Description of Artificial Sequence: Synthetic oligonucleotide
  misc_feature 1..20: note = Target: FXN; (+) strand; PAM type: NRG; PAM sequence: AAG
  source 1..20: mol_type = other DNA
ttgtaattttttgtaaaaac

SEQ ID NO: 19758 - DNA, 20 bp, synthetic construct
  misc_feature 1..20: note = Description of Artificial Sequence: Synthetic oligonucleotide
  misc_feature 1..20: note = Target: FXN; (+) strand; PAM type: NRG; PAM sequence: AGG
  source 1..20: mol_type = other DNA
tgtaattttttgtaaaaaca

SEQ ID NO: 19759 - DNA, 20 bp, synthetic construct
  misc_feature 1..20: note = Description of Artificial Sequence: Synthetic oligonucleotide
  misc_feature 1..20: note = Target: FXN; (+) strand; PAM type: NRG; PAM sequence: CAG
  source 1..20: mol_type = other DNA
caaggttttaccatgttgcc

SEQ ID NO: 19760 - DNA, 20 bp, synthetic construct
  misc_feature 1..20: note = Description of Artificial Sequence: Synthetic oligonucleotide
  misc_feature 1..20: note = Target: FXN; (+) strand; PAM type: NRG; PAM sequence: TGG
  source 1..20: mol_type = other DNA
ttttaccatgttgcccagtc

SEQ ID NO: 19761 - DNA, 20 bp, synthetic construct
  misc_feature 1..20: note = Description of Artificial Sequence: Synthetic oligonucleotide
  misc_feature 1..20: note = Target: FXN; (+) strand; PAM type: NRG; PAM sequence: TGG
  source 1..20: mol_type = other DNA
ccagtctggtcttgaactcc

SEQ ID NO: 19762 - DNA, 20 bp, synthetic construct
  misc_feature 1..20: note = Description of Artificial Sequence: Synthetic oligonucleotide
  misc_feature 1..20: note = Target: FXN; (+) strand; PAM type: NRG; PAM sequence: GGG
  source 1..20: mol_type = other DNA
cagtctggtcttgaactcct

SEQ ID NO: 19763 - DNA, 20 bp, synthetic construct
  misc_feature 1..20: note = Description of Artificial Sequence: Synthetic oligonucleotide
  misc_feature 1..20: note = Target: FXN; (+) strand; PAM type: NRG; PAM sequence: AAG
  source 1..20: mol_type = other DNA
ggtcttgaactcctgggccc

SEQ ID NO: 19764 - DNA, 20 bp, synthetic construct
  misc_feature 1..20: note = Description of Artificial Sequence: Synthetic oligonucleotide
  misc_feature 1..20: note = Target: FXN; (+) strand; PAM type: NRG; PAM sequence: TGG
  source 1..20: mol_type = other DNA
cccaagcgatcctccctcct

SEQ ID NO: 19765 - DNA, 20 bp, synthetic construct
  misc_feature 1..20: note = Description of Artificial Sequence: Synthetic oligonucleotide
  misc_feature 1..20: note = Target: FXN; (+) strand; PAM type: NRG; PAM sequence: GGG
  source 1..20: mol_type = other DNA
ccaagcgatcctccctcctt

SEQ ID NO: 19766 - DNA, 20 bp, synthetic construct
  misc_feature 1..20: note = Description of Artificial Sequence: Synthetic oligonucleotide
  misc_feature 1..20: note = Target: FXN; (+) strand; PAM type: NRG; PAM sequence: AAG
  source 1..20: mol_type = other DNA
cctccctccttgggctcccg

SEQ ID NO: 19767 - DNA, 20 bp, synthetic construct
  misc_feature 1..20: note = Description of Artificial Sequence: Synthetic oligonucleotide
  misc_feature 1..20: note = Target: FXN; (+) strand; PAM type: NRG; PAM sequence: CAG
  source 1..20: mol_type = other DNA
tccttgggctcccgaagtgc

SEQ ID NO: 19768 - DNA, 20 bp, synthetic construct
  misc_feature 1..20: note = Description of Artificial Sequence: Synthetic oligonucleotide
  misc_feature 1..20: note = Target: FXN; (+) strand; PAM type: NRG; PAM sequence: AGG
  source 1..20: mol_type = other DNA
ccttgggctcccgaagtgcc

SEQ ID NO: 19769 - DNA, 20 bp, synthetic construct
  misc_feature 1..20: note = Description of Artificial Sequence: Synthetic oligonucleotide
  misc_feature 1..20: note = Target: FXN; (+) strand; PAM type: NRG; PAM sequence: AAG
  source 1..20: mol_type = other DNA
ctcccgaagtgccaggatac

SEQ ID NO: 19770 - DNA, 20 bp, synthetic construct
  misc_feature 1..20: note = Description of Artificial Sequence: Synthetic oligonucleotide
  misc_feature 1..20: note = Target: FXN; (+) strand; PAM type: NRG; PAM sequence: GAG
  source 1..20: mol_type = other DNA
aagtgccaggatacaagcat

SEQ ID NO: 19771 - DNA, 20 bp, synthetic construct
  misc_feature 1..20: note = Description of Artificial Sequence: Synthetic oligonucleotide
  misc_feature 1..20: note = Target: FXN; (+) strand; PAM type: NRG; PAM sequence: CAG
  source 1..20: mol_type = other DNA
caagcatgagtcaccacatg

SEQ ID NO: 19772 - DNA, 20 bp, synthetic construct
  misc_feature 1..20: note = Description of Artificial Sequence: Synthetic oligonucleotide
  misc_feature 1..20: note = Target: FXN; (+) strand; PAM type: NRG; PAM sequence: CAG
  source 1..20: mol_type = other DNA
tgagtcaccacatgcagcct

SEQ ID NO: 19773 - DNA, 20 bp, synthetic construct
  misc_feature 1..20: note = Description of Artificial Sequence: Synthetic oligonucleotide
  misc_feature 1..20: note = Target: FXN; (+) strand; PAM type: NRG; PAM sequence: AAG
  source 1..20: mol_type = other DNA
ccacatgcagcctcagtttt

SEQ ID NO: 19774 - DNA, 20 bp, synthetic construct
  misc_feature 1..20: note = Description of Artificial Sequence: Synthetic oligonucleotide
  misc_feature 1..20: note = Target: FXN; (+) strand; PAM type: NRG; PAM sequence: TAG
  source 1..20: mol_type = other DNA
acttttaaataaatgaaata

SEQ ID NO: 19775 - DNA, 20 bp, synthetic construct
  misc_feature 1..20: note = Description of Artificial Sequence: Synthetic oligonucleotide
  misc_feature 1..20: note = Target: FXN; (+) strand; PAM type: NRG; PAM sequence: CAG
  source 1..20: mol_type = other DNA
gaaatatagtcataccaaaa

SEQ ID NO: 19776 - DNA, 20 bp, synthetic construct
  misc_feature 1..20: note = Description of Artificial Sequence: Synthetic oligonucleotide
  misc_feature 1..20: note = Target: FXN; (+) strand; PAM type: NRG; PAM sequence: TGG
  source 1..20: mol_type = other DNA
tcataccaaaacagtaaaaa

SEQ ID NO: 19777 - DNA, 20 bp, synthetic construct
  misc_feature 1..20: note = Description of Artificial Sequence: Synthetic oligonucleotide
  misc_feature 1..20: note = Target: FXN; (+) strand; PAM type: NRG; PAM sequence: GGG
  source 1..20: mol_type = other DNA
cataccaaaacagtaaaaat

SEQ ID NO: 19778 - DNA, 20 bp, synthetic construct
  misc_feature 1..20: note = Description of Artificial Sequence: Synthetic oligonucleotide
  misc_feature 1..20: note = Target: FXN; (+) strand; PAM type: NRG; PAM sequence: CAG
  source 1..20: mol_type = other DNA
aaaacagtaaaaatgggttt

SEQ ID NO: 19779 - DNA, 20 bp, synthetic construct
  misc_feature 1..20: note = Description of Artificial Sequence: Synthetic oligonucleotide
  misc_feature 1..20: note = Target: FXN; (+) strand; PAM type: NRG; PAM sequence: AGG
  source 1..20: mol_type = other DNA
aaacagtaaaaatgggtttc

SEQ ID NO: 19780 - DNA, 20 bp, synthetic construct
  misc_feature 1..20: note = Description of Artificial Sequence: Synthetic oligonucleotide
  misc_feature 1..20: note = Target: FXN; (+) strand; PAM type: NRG; PAM sequence: CAG
  source 1..20: mol_type = other DNA
acttacgtattgtataatcc

SEQ ID NO: 19781 - DNA, 20 bp, synthetic construct
  misc_feature 1..20: note = Description of Artificial Sequence: Synthetic oligonucleotide
  misc_feature 1..20: note = Target: FXN; (+) strand; PAM type: NRG; PAM sequence: TGG
  source 1..20: mol_type = other DNA
taaaaaatgctttcaaaaac

SEQ ID NO: 19782 - DNA, 20 bp, synthetic construct
  misc_feature 1..20: note = Description of Artificial Sequence: Synthetic oligonucleotide
  misc_feature 1..20: note = Target: FXN; (+) strand; PAM type: NRG; PAM sequence: CAG
  source 1..20: mol_type = other DNA
aaaatgctttcaaaaactgg

SEQ ID NO: 19783 - DNA, 20 bp, synthetic construct
  misc_feature 1..20: note = Description of Artificial Sequence: Synthetic oligonucleotide
  misc_feature 1..20: note = Target: FXN; (+) strand; PAM type: NRG; PAM sequence: AAG
  source 1..20: mol_type = other DNA
aactggcagtcaactcataa

SEQ ID NO: 19784 - DNA, 20 bp, synthetic construct
  misc_feature 1..20: note = Description of Artificial Sequence: Synthetic oligonucleotide
  misc_feature 1..20: note = Target: FXN; (+) strand; PAM type: NRG; PAM sequence: AGG
  source 1..20: mol_type = other DNA
actggcagtcaactcataaa

SEQ ID NO: 19785 - DNA, 20 bp, synthetic construct
  misc_feature 1..20: note = Description of Artificial Sequence: Synthetic oligonucleotide
  misc_feature 1..20: note = Target: FXN; (+) strand; PAM type: NRG; PAM sequence: AAG
  source 1..20: mol_type = other DNA
tacttatgattccactgatg

SEQ ID NO: 19786 - DNA, 20 bp, synthetic construct
  misc_feature 1..20: note = Description of Artificial Sequence: Synthetic oligonucleotide
  misc_feature 1..20: note = Target: FXN; (+) strand; PAM type: NRG; PAM sequence: TAG
  source 1..20: mol_type = other DNA
ttatgattccactgatgaag

SEQ ID NO: 19787 - DNA, 20 bp, synthetic construct
  misc_feature 1..20: note = Description of Artificial Sequence: Synthetic oligonucleotide
  misc_feature 1..20: note = Target: FXN; (+) strand; PAM type: NRG; PAM sequence: AAG
  source 1..20: mol_type = other DNA
tccactgatgaagtagtcaa

SEQ ID NO: 19788 - DNA, 20 bp, synthetic construct
  misc_feature 1..20: note = Description of Artificial Sequence: Synthetic oligonucleotide
  misc_feature 1..20: note = Target: FXN; (+) strand; PAM type: NRG; PAM sequence: TAG
  source 1..20: mol_type = other DNA
actgatgaagtagtcaaaag

SEQ ID NO: 19789 - DNA, 20 bp, synthetic construct
  misc_feature 1..20: note = Description of Artificial Sequence: Synthetic oligonucleotide
  misc_feature 1..20: note = Target: FXN; (+) strand; PAM type: NRG; PAM sequence: CAG
  source 1..20: mol_type = other DNA
tcaaaagtagtcaaaaatca

SEQ ID NO: 19790 - DNA, 20 bp, synthetic construct
  misc_feature 1..20: note = Description of Artificial Sequence: Synthetic oligonucleotide
  misc_feature 1..20: note = Target: FXN; (+) strand; PAM type: NRG; PAM sequence: TAG
  source 1..20: mol_type = other DNA
ttaaaaaaacatcttttttt

SEQ ID NO: 19791 - DNA, 20 bp, synthetic construct
  misc_feature 1..20: note = Description of Artificial Sequence: Synthetic oligonucleotide
  misc_feature 1..20: note = Target: FXN; (+) strand; PAM type: NRG; PAM sequence: TAG
  source 1..20: mol_type = other DNA
cttttttttagtcaaaatca

SEQ ID NO: 19792 - DNA, 20 bp, synthetic construct
  misc_feature 1..20: note = Description of Artificial Sequence: Synthetic oligonucleotide
  misc_feature 1..20: note = Target: FXN; (+) strand; PAM type: NRG; PAM sequence: TAG
  source 1..20: mol_type = other DNA
tttagtcaaaatcatagaaa

SEQ ID NO: 19793 - DNA, 20 bp, synthetic construct
  misc_feature 1..20: note = Description of Artificial Sequence: Synthetic oligonucleotide
  misc_feature 1..20: note = Target: FXN; (+) strand; PAM type: NRG; PAM sequence: AAG
  source 1..20: mol_type = other DNA
gtcaaaatcatagaaataga

SEQ ID NO: 19794 - DNA, 20 bp, synthetic construct
  misc_feature 1..20: note = Description of Artificial Sequence: Synthetic oligonucleotide
  misc_feature 1..20: note = Target: FXN; (+) strand; PAM type: NRG; PAM sequence: TAG
  source 1..20: mol_type = other DNA
aaaatcatagaaatagaaag

SEQ ID NO: 19795 - DNA, 20 bp, synthetic construct
  misc_feature 1..20: note = Description of Artificial Sequence: Synthetic oligonucleotide
  misc_feature 1..20: note = Target: FXN; (+) strand; PAM type: NRG; PAM sequence: CAG
  source 1..20: mol_type = other DNA
tcatagaaatagaaagtaga

SEQ ID NO: 19796 - DNA, 20 bp, synthetic construct
  misc_feature 1..20: note = Description of Artificial Sequence: Synthetic oligonucleotide
  misc_feature 1..20: note = Target: FXN; (+) strand; PAM type: NRG; PAM sequence: AGG
  source 1..20: mol_type = other DNA
catagaaatagaaagtagac

SEQ ID NO: 19797 - DNA, 20 bp, synthetic construct
  misc_feature 1..20: note = Description of Artificial Sequence: Synthetic oligonucleotide
  misc_feature 1..20: note = Target: FXN; (+) strand; PAM type: NRG; PAM sequence: TGG
  source 1..20: mol_type = other DNA
agaaatagaaagtagacagg

SEQ ID NO: 19798 - DNA, 20 bp, synthetic construct
  misc_feature 1..20: note = Description of Artificial Sequence: Synthetic oligonucleotide
  misc_feature 1..20: note = Target: FXN; (+) strand; PAM type: NRG; PAM sequence: AAG
  source 1..20: mol_type = other DNA
aaagtagacaggtggttact

SEQ ID NO: 19799 - DNA, 20 bp, synthetic construct
  misc_feature 1..20: note = Description of Artificial Sequence: Synthetic oligonucleotide
  misc_feature 1..20: note = Target: FXN; (+) strand; PAM type: NRG; PAM sequence: AGG
  source 1..20: mol_type = other DNA
aagtagacaggtggttacta

SEQ ID NO: 19800 - DNA, 20 bp, synthetic construct
  misc_feature 1..20: note = Description of Artificial Sequence: Synthetic oligonucleotide
  misc_feature 1..20: note = Target: FXN; (+) strand; PAM type: NRG; PAM sequence: GGG
  source 1..20: mol_type = other DNA
agtagacaggtggttactaa

SEQ ID NO: 19801 - DNA, 20 bp, synthetic construct
  misc_feature 1..20: note = Description of Artificial Sequence: Synthetic oligonucleotide
  misc_feature 1..20: note = Target: FXN; (+) strand; PAM type: NRG; PAM sequence: TGG
  source 1..20: mol_type = other DNA
caggtggttactaagggcta

SEQ ID NO: 19802 - DNA, 20 bp, synthetic construct
  misc_feature 1..20: note = Description of Artificial Sequence: Synthetic oligonucleotide
  misc_feature 1..20: note = Target: FXN; (+) strand; PAM type: NRG; PAM sequence: GGG
  source 1..20: mol_type = other DNA
aggtggttactaagggctat

SEQ ID NO: 19803 - DNA, 20 bp, synthetic construct
  misc_feature 1..20: note = Description of Artificial Sequence: Synthetic oligonucleotide
  misc_feature 1..20: note = Target: FXN; (+) strand; PAM type: NRG; PAM sequence: TGG
  source 1..20: mol_type = other DNA
ggttactaagggctatggga

SEQ ID NO: 19804 - DNA, 20 bp, synthetic construct
  misc_feature 1..20: note = Description of Artificial Sequence: Synthetic oligonucleotide
  misc_feature 1..20: note = Target: FXN; (+) strand; PAM type: NRG; PAM sequence: GGG
  source 1..20: mol_type = other DNA
gttactaagggctatgggat

SEQ ID NO: 19805 - DNA, 20 bp, synthetic construct
  misc_feature 1..20: note = Description of Artificial Sequence: Synthetic oligonucleotide
  misc_feature 1..20: note = Target: FXN; (+) strand; PAM type: NRG; PAM sequence: GGG
  source 1..20: mol_type = other DNA
ttactaagggctatgggatg

SEQ ID NO: 19806 - DNA, 20 bp, synthetic construct
  misc_feature 1..20: note = Description of Artificial Sequence: Synthetic oligonucleotide
  misc_feature 1..20: note = Target: FXN; (+) strand; PAM type: NRG; PAM sequence: TAG
  source 1..20: mol_type = other DNA
gggctatgggatggggaaat

SEQ ID NO: 19807 - DNA, 20 bp, synthetic construct
  misc_feature 1..20: note = Description of Artificial Sequence: Synthetic oligonucleotide
  misc_feature 1..20: note = Target: FXN; (+) strand; PAM type: NRG; PAM sequence: TGG
  source 1..20: mol_type = other DNA
atggggaaattagtgtctaa

SEQ ID NO: 19808 - DNA, 20 bp, synthetic construct
  misc_feature 1..20: note = Description of Artificial Sequence: Synthetic oligonucleotide
  misc_feature 1..20: note = Target: FXN; (+) strand; PAM type: NRG; PAM sequence: GGG
  source 1..20: mol_type = other DNA
tggggaaattagtgtctaat

SEQ ID NO: 19809 - DNA, 20 bp, synthetic construct
  misc_feature 1..20: note = Description of Artificial Sequence: Synthetic oligonucleotide
  misc_feature 1..20: note = Target: FXN; (+) strand; PAM type: NRG; PAM sequence: TAG
  source 1..20: mol_type = other DNA
aaattagtgtctaatgggca

SEQ ID NO: 19810 - DNA, 20 bp, synthetic construct
  misc_feature 1..20: note = Description of Artificial Sequence: Synthetic oligonucleotide
  misc_feature 1..20: note = Target: FXN; (+) strand; PAM type: NRG; PAM sequence: GAG
  source 1..20: mol_type = other DNA
attagtgtctaatgggcata

SEQ ID NO: 19811 - DNA, 20 bp, synthetic construct
  misc_feature 1..20: note = Description of Artificial Sequence: Synthetic oligonucleotide
  misc_feature 1..20: note = Target: FXN; (+) strand; PAM type: NRG; PAM sequence: CAG
  source 1..20: mol_type = other DNA
gtctaatgggcatagagttt

SEQ ID NO: 19812 - DNA, 20 bp, synthetic construct
  misc_feature 1..20: note = Description of Artificial Sequence: Synthetic oligonucleotide
  misc_feature 1..20: note = Target: FXN; (+) strand; PAM type: NRG; PAM sequence: AAG
  source 1..20: mol_type = other DNA
gcatagagtttcagtgttac

SEQ ID NO: 19813 - DNA, 20 bp, synthetic construct
  misc_feature 1..20: note = Description of Artificial Sequence: Synthetic oligonucleotide
  misc_feature 1..20: note = Target: FXN; (+) strand; PAM type: NRG; PAM sequence: AGG
  source 1..20: mol_type = other DNA
catagagtttcagtgttaca

SEQ ID NO: 19814 - DNA, 20 bp, synthetic construct
  misc_feature 1..20: note = Description of Artificial Sequence: Synthetic oligonucleotide
  misc_feature 1..20: note = Target: FXN; (+) strand; PAM type: NRG; PAM sequence: AAG
  source 1..20: mol_type = other DNA
tttcagtgttacaaggtgaa

SEQ ID NO: 19815 - DNA, 20 bp, synthetic construct
  misc_feature 1..20: note = Description of Artificial Sequence: Synthetic oligonucleotide
  misc_feature 1..20: note = Target: FXN; (+) strand; PAM type: NRG; PAM sequence: TAG
  source 1..20: mol_type = other DNA
tgttacaaggtgaaaagttc

SEQ ID NO: 19816 - DNA, 20 bp, synthetic construct
  misc_feature 1..20: note = Description of Artificial Sequence: Synthetic oligonucleotide
  misc_feature 1..20: note = Target: FXN; (+) strand; PAM type: NRG; PAM sequence: GAG
  source 1..20: mol_type = other DNA
ttacaaggtgaaaagttcta

SEQ ID NO: 19817 - DNA, 20 bp, synthetic construct
  misc_feature 1..20: note = Description of Artificial Sequence: Synthetic oligonucleotide
  misc_feature 1..20: note = Target: FXN; (+) strand; PAM type: NRG; PAM sequence: CAG
  source 1..20: mol_type = other DNA
agttctagagttatgctgcc

SEQ ID NO: 19818 - DNA, 20 bp, synthetic construct
  misc_feature 1..20: note = Description of Artificial Sequence: Synthetic oligonucleotide
  misc_feature 1..20: note = Target: FXN; (+) strand; PAM type: NRG; PAM sequence: CAG
  source 1..20: mol_type = other DNA
tctagagttatgctgcccag

SEQ ID NO: 19819 - DNA, 20 bp, synthetic construct
  misc_feature 1..20: note = Description of Artificial Sequence: Synthetic oligonucleotide
  misc_feature 1..20: note = Target: FXN; (+) strand; PAM type: NRG; PAM sequence: TGG
  source 1..20: mol_type = other DNA
attgttctgtacacttaaca

SEQ ID NO: 19820 - DNA, 20 bp, synthetic construct
  misc_feature 1..20: note = Description of Artificial Sequence: Synthetic oligonucleotide
  misc_feature 1..20: note = Target: FXN; (+) strand; PAM type: NRG; PAM sequence: TGG
  source 1..20: mol_type = other DNA
tacacttaacatggttaata

SEQ ID NO: 19821 - DNA, 20 bp, synthetic construct
  misc_feature 1..20: note = Description of Artificial Sequence: Synthetic oligonucleotide
  misc_feature 1..20: note = Target: FXN; (+) strand; PAM type: NRG; PAM sequence: TAG
  source 1..20: mol_type = other DNA
catggttaatatggtaaatt

SEQ ID NO: 19822 - DNA, 20 bp, synthetic construct
  misc_feature 1..20: note = Description of Artificial Sequence: Synthetic oligonucleotide
  misc_feature 1..20: note = Target: FXN; (+) strand; PAM type: NRG; PAM sequence: TAG
  source 1..20: mol_type = other DNA
gcgttatgtgctttttacta

SEQ ID NO: 19823 - DNA, 20 bp, synthetic construct
  misc_feature 1..20: note = Description of Artificial Sequence: Synthetic oligonucleotide
  misc_feature 1..20: note = Target: FXN; (+) strand; PAM type: NRG; PAM sequence: TGG
  source 1..20: mol_type = other DNA
aaaattaaaaaaaaaaaaaa

SEQ ID NO: 19824 - DNA, 20 bp, synthetic construct
  misc_feature 1..20: note = Description of Artificial Sequence: Synthetic oligonucleotide
  misc_feature 1..20: note = Target: FXN; (+) strand; PAM type: NRG; PAM sequence: GGG
  source 1..20: mol_type = other DNA
aaattaaaaaaaaaaaaaat

SEQ ID NO: 19825 - DNA, 20 bp, synthetic construct
  misc_feature 1..20: note = Description of Artificial Sequence: Synthetic oligonucleotide
  misc_feature 1..20: note = Target: FXN; (+) strand; PAM type: NRG; PAM sequence: GGG
  source 1..20: mol_type = other DNA
aattaaaaaaaaaaaaaatg

SEQ ID NO: 19826 - DNA, 20 bp, synthetic construct
  misc_feature 1..20: note = Description of Artificial Sequence: Synthetic oligonucleotide
  misc_feature 1..20: note = Target: FXN; (+) strand; PAM type: NRG; PAM sequence: GAG
  source 1..20: mol_type = other DNA
aaaaaaaaaaaaatggggcc

SEQ ID NO: 19827 - DNA, 20 bp, synthetic construct
  misc_feature 1..20: note = Description of Artificial Sequence: Synthetic oligonucleotide
  misc_feature 1..20: note = Target: FXN; (+) strand; PAM type: NRG; PAM sequence: CAG
  source 1..20: mol_type = other DNA
aaaaaaaatggggccgagtg

SEQ ID NO: 19828 - DNA, 20 bp, synthetic construct
  misc_feature 1..20: note = Description of Artificial Sequence: Synthetic oligonucleotide
  misc_feature 1..20: note = Target: FXN; (+) strand; PAM type: NRG; PAM sequence: TAG
  source 1..20: mol_type = other DNA
aaaaatggggccgagtgcag

SEQ ID NO: 19829 - DNA, 20 bp, synthetic construct
  misc_feature 1..20: note = Description of Artificial Sequence: Synthetic oligonucleotide
  misc_feature 1..20: note = Target: FXN; (+) strand; PAM type: NRG; PAM sequence: CAG
  source 1..20: mol_type = other DNA
tcacacctgtaacataatcc

SEQ ID NO: 19830 - DNA, 20 bp, synthetic construct
  misc_feature 1..20: note = Description of Artificial Sequence: Synthetic oligonucleotide
  misc_feature 1..20: note = Target: FXN; (+) strand; PAM type: NRG; PAM sequence: TGG
  source 1..20: mol_type = other DNA
gtaacataatcccagcactt

SEQ ID NO: 19831 - DNA, 20 bp, synthetic construct
  misc_feature 1..20: note = Description of Artificial Sequence: Synthetic oligonucleotide
  misc_feature 1..20: note = Target: FXN; (+) strand; PAM type: NRG; PAM sequence: GGG
  source 1..20: mol_type = other DNA
taacataatcccagcacttt

SEQ ID NO: 19832 - DNA, 20 bp, synthetic construct
  misc_feature 1..20: note = Description of Artificial Sequence: Synthetic oligonucleotide
  misc_feature 1..20: note = Target: FXN; (+) strand; PAM type: NRG; PAM sequence: GAG
  source 1..20: mol_type = other DNA
acataatcccagcactttgg

SEQ ID NO: 19833 - DNA, 20 bp, synthetic construct
  misc_feature 1..20: note = Description of Artificial Sequence: Synthetic oligonucleotide
  misc_feature 1..20: note = Target: FXN; (+) strand; PAM type: NRG; PAM sequence: AGG
  source 1..20: mol_type = other DNA
cataatcccagcactttggg

SEQ ID NO: 19834 - DNA, 20 bp, synthetic construct
  misc_feature 1..20: note = Description of Artificial Sequence: Synthetic oligonucleotide
  misc_feature 1..20: note = Target: FXN; (+) strand; PAM type: NRG; PAM sequence: GAG
  source 1..20: mol_type = other DNA
tcccagcactttgggaggcc

SEQ ID NO: 19835 - DNA, 20 bp, synthetic construct
  misc_feature 1..20: note = Description of Artificial Sequence: Synthetic oligonucleotide
  misc_feature 1..20: note = Target: FXN; (+) strand; PAM type: NRG; PAM sequence: AGG
  source 1..20: mol_type = other DNA
cccagcactttgggaggccg

SEQ ID NO: 19836 - DNA, 20 bp, synthetic construct
  misc_feature 1..20: note = Description of Artificial Sequence: Synthetic oligonucleotide
  misc_feature 1..20: note = Target: FXN; (+) strand; PAM type: NRG; PAM sequence: TAG
  source 1..20: mol_type = other DNA
agcactttgggaggccgagg

SEQ ID NO: 19837 - DNA, 20 bp, synthetic construct
  misc_feature 1..20: note = Description of Artificial Sequence: Synthetic oligonucleotide
  misc_feature 1..20: note = Target: FXN; (+) strand; PAM type: NRG; PAM sequence: AGG
  source 1..20: mol_type = other DNA
gcactttgggaggccgaggt

SEQ ID NO: 19838 - DNA, 20 bp, synthetic construct
  misc_feature 1..20: note = Description of Artificial Sequence: Synthetic oligonucleotide
  misc_feature 1..20: note = Target: FXN; (+) strand; PAM type: NRG; PAM sequence: GAG
  source 1..20: mol_type = other DNA
actttgggaggccgaggtag

SEQ ID NO: 19839 - DNA, 20 bp, synthetic construct
  misc_feature 1..20: note = Description of Artificial Sequence: Synthetic oligonucleotide
  misc_feature 1..20: note = Target: FXN; (+) strand; PAM type: NRG; PAM sequence: AGG
  source 1..20: mol_type = other DNA
ctttgggaggccgaggtagg

SEQ ID NO: 19840 - DNA, 20 bp, synthetic construct
  misc_feature 1..20: note = Description of Artificial Sequence: Synthetic oligonucleotide
  misc_feature 1..20: note = Target: FXN; (+) strand; PAM type: NRG; PAM sequence: GAG
  source 1..20: mol_type = other DNA
ccgaggtaggaggatcactt

SEQ ID NO: 19841 - DNA, 20 bp, synthetic construct
  misc_feature 1..20: note = Description of Artificial Sequence: Synthetic oligonucleotide
  misc_feature 1..20: note = Target: FXN; (+) strand; PAM type: NRG; PAM sequence: AGG
  source 1..20: mol_type = other DNA
cgaggtaggaggatcacttg

SEQ ID NO: 19842 - DNA, 20 bp, synthetic construct
  misc_feature 1..20: note = Description of Artificial Sequence: Synthetic oligonucleotide
  misc_feature 1..20: note = Target: FXN; (+) strand; PAM type: NRG; PAM sequence: CAG
  source 1..20: mol_type = other DNA
gtaggaggatcacttgaggc

SEQ ID NO: 19843 - DNA, 20 bp, synthetic construct
  misc_feature 1..20: note = Description of Artificial Sequence: Synthetic oligonucleotide
  misc_feature 1..20: note = Target: FXN; (+) strand; PAM type: NRG; PAM sequence: AAG
  source 1..20: mol_type = other DNA
ggaggatcacttgaggccag

SEQ ID NO: 19844 - DNA, 20 bp, synthetic construct
  misc_feature 1..20: note = Description of Artificial Sequence: Synthetic oligonucleotide
  misc_feature 1..20: note = Target: FXN; (+) strand; PAM type: NRG; PAM sequence: CAG
  source 1..20: mol_type = other DNA
tgaggccagaagtttgaaac

SEQ ID NO: 19845 - DNA, 20 bp, synthetic construct
  misc_feature 1..20: note = Description of Artificial Sequence: Synthetic oligonucleotide
  misc_feature 1..20: note = Target: FXN; (+) strand; PAM type: NRG; PAM sequence: TGG
  source 1..20: mol_type = other DNA
ccagaagtttgaaaccagcc

SEQ ID NO: 19846 - DNA, 20 bp, synthetic construct
  misc_feature 1..20: note = Description of Artificial Sequence: Synthetic oligonucleotide
  misc_feature 1..20: note = Target: FXN; (+) strand; PAM type: NRG; PAM sequence: TAG
  source 1..20: mol_type = other DNA
tgaaaccagcctggtcaata

SEQ ID NO: 19847 - DNA, 20 bp, synthetic construct
  misc_feature 1..20: note = Description of Artificial Sequence: Synthetic oligonucleotide
  misc_feature 1..20: note = Target: FXN; (+) strand; PAM type: NRG; PAM sequence: GAG
  source 1..20: mol_type = other DNA
accagcctggtcaatatagc

SEQ ID NO: 19848 - DNA, 20 bp, synthetic construct
  misc_feature 1..20: note = Description of Artificial Sequence: Synthetic oligonucleotide
  misc_feature 1..20: note = Target: FXN; (+) strand; PAM type: NRG; PAM sequence: AAG
  source 1..20: mol_type = other DNA
gcgagacctcatctctacaa

SEQ ID NO: 19849 - DNA, 20 bp, synthetic construct
  misc_feature 1..20: note = Description of Artificial Sequence: Synthetic oligonucleotide
  misc_feature 1..20: note = Target: FXN; (+) strand; PAM type: NRG; PAM sequence: TAG
  source 1..20: mol_type = other DNA
caaaagaaaaatgttaaaat

SEQ ID NO: 19850 - DNA, 20 bp, synthetic construct
  misc_feature 1..20: note = Description of Artificial Sequence: Synthetic oligonucleotide
  misc_feature 1..20: note = Target: FXN; (+) strand; PAM type: NRG; PAM sequence: CAG
  source 1..20: mol_type = other DNA
agaaaaatgttaaaattaga

SEQ ID NO: 19851 - DNA, 20 bp, synthetic construct
  misc_feature 1..20: note = Description of Artificial Sequence: Synthetic oligonucleotide
  misc_feature 1..20: note = Target: FXN; (+) strand; PAM type: NRG; PAM sequence: AGG
  source 1..20: mol_type = other DNA
gaaaaatgttaaaattagac

SEQ ID NO: 19852 - DNA, 20 bp, synthetic construct
  misc_feature 1..20: note = Description of Artificial Sequence: Synthetic oligonucleotide
  misc_feature 1..20: note = Target: FXN; (+) strand; PAM type: NRG; PAM sequence: TGG
  source 1..20: mol_type = other DNA
atgttaaaattagacaggtg

SEQ ID NO: 19853 - DNA, 20 bp, synthetic construct
  misc_feature 1..20: note = Description of Artificial Sequence: Synthetic oligonucleotide
  misc_feature 1..20: note = Target: FXN; (+) strand; PAM type: NRG; PAM sequence: TAG
  source 1..20: mol_type = other DNA
ttagacaggtgtggtgtctg

SEQ ID NO: 19854 - DNA, 20 bp, synthetic construct
  misc_feature 1..20: note = Description of Artificial Sequence: Synthetic oligonucleotide
  misc_feature 1..20: note = Target: FXN; (+) strand; PAM type: NRG; PAM sequence: CAG
  source 1..20: mol_type = other DNA
aggtgtggtgtctgtagtcc

SEQ ID NO: 19855 - DNA, 20 bp, synthetic construct
  misc_feature 1..20: note = Description of Artificial Sequence: Synthetic oligonucleotide
  misc_feature 1..20: note = Target: FXN; (+) strand; PAM type: NRG; PAM sequence: TGG
  source 1..20: mol_type = other DNA
tgtctgtagtcccagctctc

SEQ ID NO: 19856 - DNA, 20 bp, synthetic construct
  misc_feature 1..20: note = Description of Artificial Sequence: Synthetic oligonucleotide
  misc_feature 1..20: note = Target: FXN; (+) strand; PAM type: NRG; PAM sequence: GAG
  source 1..20: mol_type = other DNA
tctgtagtcccagctctctg

SEQ ID NO: 19857 - DNA, 20 bp, synthetic construct
  misc_feature 1..20: note = Description of Artificial Sequence: Synthetic oligonucleotide
  misc_feature 1..20: note = Target: FXN; (+) strand; PAM type: NRG; PAM sequence: AGG
  source 1..20: mol_type = other DNA
ctgtagtcccagctctctgg

SEQ ID NO: 19858 - DNA, 20 bp, synthetic construct
  misc_feature 1..20: note = Description of Artificial Sequence: Synthetic oligonucleotide
  misc_feature 1..20: note = Target: FXN; (+) strand; PAM type: NRG; PAM sequence: CAG
  source 1..20: mol_type = other DNA
tagtcccagctctctggagg

SEQ ID NO: 19859 - DNA, 20 bp, synthetic construct
  misc_feature 1..20: note = Description of Artificial Sequence: Synthetic oligonucleotide
  misc_feature 1..20: note = Target: FXN; (+) strand; PAM type: NRG; PAM sequence: AGG
  source 1..20: mol_type = other DNA
agtcccagctctctggaggc

SEQ ID NO: 19860 - DNA, 20 bp, synthetic construct
  misc_feature 1..20: note = Description of Artificial Sequence: Synthetic oligonucleotide
  misc_feature 1..20: note = Target: FXN; (+) strand; PAM type: NRG; PAM sequence: GGG
  source 1..20: mol_type = other DNA
gtcccagctctctggaggca

SEQ ID NO: 19861 - DNA, 20 bp, synthetic construct
  misc_feature 1..20: note = Description of Artificial Sequence: Synthetic oligonucleotide
  misc_feature 1..20: note = Target: FXN; (+) strand; PAM type: NRG; PAM sequence: GAG
  source 1..20: mol_type = other DNA
gctctctggaggcagggact

SEQ ID NO: 19862 - DNA, 20 bp, synthetic construct
  misc_feature 1..20: note = Description of Artificial Sequence: Synthetic oligonucleotide
  misc_feature 1..20: note = Target: FXN; (+) strand; PAM type: NRG; PAM sequence: CAG
  source 1..20: mol_type = other DNA
tctggaggcagggactgagt

SEQ ID NO: 19863 - DNA, 20 bp, synthetic construct
  misc_feature 1..20: note = Description of Artificial Sequence: Synthetic oligonucleotide
  misc_feature 1..20: note = Target: FXN; (+) strand; PAM type: NRG; PAM sequence: GAG
  source 1..20: mol_type = other DNA
tggaggcagggactgagtca

SEQ ID NO: 19864 - DNA, 20 bp, synthetic construct
  misc_feature 1..20: note = Description of Artificial Sequence: Synthetic oligonucleotide
  misc_feature 1..20: note = Target: FXN; (+) strand; PAM type: NRG; PAM sequence: AGG
  source 1..20: mol_type = other DNA
ggaggcagggactgagtcag

SEQ ID NO: 19865 - DNA, 20 bp, synthetic construct
  misc_feature 1..20: note = Description of Artificial Sequence: Synthetic oligonucleotide
  misc_feature 1..20: note = Target: FXN; (+) strand; PAM type: NRG; PAM sequence: GAG
  source 1..20: mol_type = other DNA
actgagtcagaggatcactt

SEQ ID NO: 19866 - DNA, 20 bp, synthetic construct
  misc_feature 1..20: note = Description of Artificial Sequence: Synthetic oligonucleotide
  misc_feature 1..20: note = Target: FXN; (+) strand; PAM type: NRG; PAM sequence: TAG
  source 1..20: mol_type = other DNA
gtcagaggatcacttgagca

SEQ ID NO: 19867 - DNA, 20 bp, synthetic construct
  misc_feature 1..20: note = Description of Artificial Sequence: Synthetic oligonucleotide
  misc_feature 1..20: note = Target: FXN; (+) strand; PAM type: NRG; PAM sequence: AGG
  source 1..20: mol_type = other DNA
tcagaggatcacttgagcat

SEQ ID NO: 19868 - DNA, 20 bp, synthetic construct
  misc_feature 1..20: note = Description of Artificial Sequence: Synthetic oligonucleotide
  misc_feature 1..20: note = Target: FXN; (+) strand; PAM type: NRG; PAM sequence: GGG
  source 1..20: mol_type = other DNA
cagaggatcacttgagcata

SEQ ID NO: 19869 - DNA, 20 bp, synthetic construct
  misc_feature 1..20: note = Description of Artificial Sequence: Synthetic oligonucleotide
  misc_feature 1..20: note = Target: FXN; (+) strand; PAM type: NRG; PAM sequence: GGG
  source 1..20: mol_type = other DNA
agaggatcacttgagcatag

SEQ ID NO: 19870 - DNA, 20 bp, synthetic construct
  misc_feature 1..20: note = Description of Artificial Sequence: Synthetic oligonucleotide
  misc_feature 1..20: note = Target: FXN; (+) strand; PAM type: NRG; PAM sequence: GAG
  source 1..20: mol_type = other DNA
tcacttgagcataggggttt

SEQ ID NO: 19871 - DNA, 20 bp, synthetic construct
  misc_feature 1..20: note = Description of Artificial Sequence: Synthetic oligonucleotide
  misc_feature 1..20: note = Target: FXN; (+) strand; PAM type: NRG; PAM sequence: AGG
  source 1..20: mol_type = other DNA
cacttgagcataggggtttg

SEQ ID NO: 19872 - DNA, 20 bp, synthetic construct
  misc_feature 1..20: note = Description of Artificial Sequence: Synthetic oligonucleotide
  misc_feature 1..20: note = Target: FXN; (+) strand; PAM type: NRG; PAM sequence: CAG
  source 1..20: mol_type = other DNA
agcataggggtttgaggctg

SEQ ID NO: 19873 - DNA, 20 bp, synthetic construct
  misc_feature 1..20: note = Description of Artificial Sequence: Synthetic oligonucleotide
  misc_feature 1..20: note = Target: FXN; (+) strand; PAM type: NRG; PAM sequence: GAG
  source 1..20: mol_type = other DNA
taggggtttgaggctgcagt

SEQ ID NO: 19874 - DNA, 20 bp, synthetic construct
  misc_feature 1..20: note = Description of Artificial Sequence: Synthetic oligonucleotide
  misc_feature 1..20: note = Target: FXN; (+) strand; PAM type: NRG; PAM sequence: CAG
  source 1..20: mol_type = other DNA
ccatgatcctgccactgctg

SEQ ID NO: 19875 - DNA, 20 bp, synthetic construct
  misc_feature 1..20: note = Description of Artificial Sequence: Synthetic oligonucleotide
  misc_feature 1..20: note = Target: FXN; (+) strand; PAM type: NRG; PAM sequence: GAG
  source 1..20: mol_type = other DNA
tcctgccactgctgcagcct

SEQ ID NO: 19876 - DNA, 20 bp, synthetic construct
  misc_feature 1..20: note = Description of Artificial Sequence: Synthetic oligonucleotide
  misc_feature 1..20: note = Target: FXN; (+) strand; PAM type: NRG; PAM sequence: CAG
  source 1..20: mol_type = other DNA
cactgctgcagcctgagcaa

SEQ ID NO: 19877 - DNA, 20 bp, synthetic construct
  misc_feature 1..20: note = Description of Artificial Sequence: Synthetic oligonucleotide
  misc_feature 1..20: note = Target: FXN; (+) strand; PAM type: NRG; PAM sequence: GAG
  source 1..20: mol_type = other DNA
ctgctgcagcctgagcaaca

SEQ ID NO: 19878 - DNA, 20 bp, synthetic construct
  misc_feature 1..20: note = Description of Artificial Sequence: Synthetic oligonucleotide
  misc_feature 1..20: note = Target: FXN; (+) strand; PAM type: NRG; PAM sequence: AAG
  source 1..20: mol_type = other DNA
tgcagcctgagcaacagagc

SEQ ID NO: 19879 - DNA, 20 bp, synthetic construct
  misc_feature 1..20: note = Description of Artificial Sequence: Synthetic oligonucleotide
  misc_feature 1..20: note = Target: FXN; (+) strand; PAM type: NRG; PAM sequence: TGG
  source 1..20: mol_type = other DNA
aaaaacaaacaaacaaaaac

SEQ ID NO: 19880 - DNA, 20 bp, synthetic construct
  misc_feature 1..20: note = Description of Artificial Sequence: Synthetic oligonucleotide
  misc_feature 1..20: note = Target: FXN; (+) strand; PAM type: NRG; PAM sequence: CAG
  source 1..20: mol_type = other DNA
aacaaacaaacaaaaactgg

SEQ ID NO: 19881 - DNA, 20 bp, synthetic construct
  misc_feature 1..20: note = Description of Artificial Sequence: Synthetic oligonucleotide
  misc_feature 1..20: note = Target: FXN; (+) strand; PAM type: NRG; PAM sequence: GAG
  source 1..20: mol_type = other DNA
aaaactggcagctgatacct

SEQ ID NO: 19882 - DNA, 20 bp, synthetic construct
  misc_feature 1..20: note = Description of Artificial Sequence: Synthetic oligonucleotide
  misc_feature 1..20: note = Target: FXN; (+) strand; PAM type: NRG; PAM sequence: GAG
  source 1..20: mol_type = other DNA
aactggcagctgatacctga

SEQ ID NO: 19883 - DNA, 20 bp, synthetic construct
  misc_feature 1..20: note = Description of Artificial Sequence: Synthetic oligonucleotide
  misc_feature 1..20: note = Target: FXN; (+) strand; PAM type: NRG; PAM sequence: TGG
  source 1..20: mol_type = other DNA
gagtgaatatcttttatcgc

SEQ ID NO: 19884 - DNA, 20 bp, synthetic construct
  misc_feature 1..20: note = Description of Artificial Sequence: Synthetic oligonucleotide
  misc_feature 1..20: note = Target: FXN; (+) strand; PAM type: NRG; PAM sequence: TGG
  source 1..20: mol_type = other DNA
tatcttttatcgctggttaa

SEQ ID NO: 19885 - DNA, 20 bp, synthetic construct
  misc_feature 1..20: note = Description of Artificial Sequence: Synthetic oligonucleotide
  misc_feature 1..20: note = Target: FXN; (+) strand; PAM type: NRG; PAM sequence: GGG
  source 1..20: mol_type = other DNA
atcttttatcgctggttaat

SEQ ID NO: 19886 - DNA, 20 bp, synthetic construct
  misc_feature 1..20: note = Description of Artificial Sequence: Synthetic oligonucleotide
  misc_feature 1..20: note = Target: FXN; (+) strand; PAM type: NRG; PAM sequence: GAG
  source 1..20: mol_type = other DNA
tatcgctggttaatgggatt

SEQ ID NO: 19887 - DNA, 20 bp, synthetic construct
  misc_feature 1..20: note = Description of Artificial Sequence: Synthetic oligonucleotide
  misc_feature 1..20: note = Target: FXN; (+) strand; PAM type: NRG; PAM sequence: GAG
  source 1..20: mol_type = other DNA
tcgctggttaatgggattga

SEQ ID NO: 19888 - DNA, 20 bp, synthetic construct
  misc_feature 1..20: note = Description of Artificial Sequence: Synthetic oligonucleotide
  misc_feature 1..20: note = Target: FXN; (+) strand; PAM type: NRG; PAM sequence: TAG
  source 1..20: mol_type = other DNA
tgagagaatgcttcatctta

SEQ ID NO: 19889 - DNA, 20 bp, synthetic construct
  misc_feature 1..20: note = Description of Artificial Sequence: Synthetic oligonucleotide
  misc_feature 1..20: note = Target: FXN; (+) strand; PAM type: NRG; PAM sequence: AAG
  source 1..20: mol_type = other DNA
agaatgcttcatcttataga

SEQ ID NO: 19890 - DNA, 20 bp, synthetic construct
  misc_feature 1..20: note = Description of Artificial Sequence: Synthetic oligonucleotide
  misc_feature 1..20: note = Target: FXN; (+) strand; PAM type: NRG; PAM sequence: CAG
  source 1..20: mol_type = other DNA
gcttcatcttatagaaagaa

SEQ ID NO: 19891 - DNA, 20 bp, synthetic construct
  misc_feature 1..20: note = Description of Artificial Sequence: Synthetic oligonucleotide
  misc_feature 1..20: note = Target: FXN; (+) strand; PAM type: NRG; PAM sequence: TGG
  source 1..20: mol_type = other DNA
tatagaaagaacagtgtctt

SEQ ID NO: 19892 - DNA, 20 bp, synthetic construct
  misc_feature 1..20: note = Description of Artificial Sequence: Synthetic oligonucleotide
  misc_feature 1..20: note = Target: FXN; (+) strand; PAM type: NRG; PAM sequence: CAG
  source 1..20: mol_type = other DNA
gaacagtgtctttggaccca

SEQ ID NO: 19893 - DNA, 20 bp, synthetic construct
  misc_feature 1..20: note = Description of Artificial Sequence: Synthetic oligonucleotide
  misc_feature 1..20: note = Target: FXN; (+) strand; PAM type: NRG; PAM sequence: GAG
  source 1..20: mol_type = other DNA
acagtgtctttggacccaca

SEQ ID NO: 19894 - DNA, 20 bp, synthetic construct
  misc_feature 1..20: note = Description of Artificial Sequence: Synthetic oligonucleotide
  misc_feature 1..20: note = Target: FXN; (+) strand; PAM type: NRG; PAM sequence: TGG
  source 1..20: mol_type = other DNA
tctttggacccacagagacc

SEQ ID NO: 19895 - DNA, 20 bp, synthetic construct
  misc_feature 1..20: note = Description of Artificial Sequence: Synthetic oligonucleotide
  misc_feature 1..20: note = Target: FXN; (+) strand; PAM type: NRG; PAM sequence: AAG
  source 1..20: mol_type = other DNA
acccacagagacctggattt

SEQ ID NO: 19896 - DNA, 20 bp, synthetic construct
  misc_feature 1..20: note = Description of Artificial Sequence: Synthetic oligonucleotide
  misc_feature 1..20: note = Target: FXN; (+) strand; PAM type: NRG; PAM sequence: TAG
  source 1..20: mol_type = other DNA
cagagacctggatttaagat

SEQ ID NO: 19897 - DNA, 20 bp, synthetic construct
  misc_feature 1..20: note = Description of Artificial Sequence: Synthetic oligonucleotide
  misc_feature 1..20: note = Target: FXN; (+) strand; PAM type: NRG; PAM sequence: GAG
  source 1..20: mol_type = other DNA
gattagctctgccaattact

SEQ ID NO: 19898 - DNA, 20 bp, synthetic construct
  misc_feature 1..20: note = Description of Artificial Sequence: Synthetic oligonucleotide
  misc_feature 1..20: note = Target: FXN; (+) strand; PAM type: NRG; PAM sequence: TGG
  source 1..20: mol_type = other DNA
gttttcctcatctgtgaaac

SEQ ID NO: 19899 - DNA, 20 bp, synthetic construct
  misc_feature 1..20: note = Description of Artificial Sequence: Synthetic oligonucleotide
  misc_feature 1..20: note = Target: FXN; (+) strand; PAM type: NRG; PAM sequence: TAG
  source 1..20: mol_type = other DNA
aatcctaccgccaacaattg

SEQ ID NO: 19900 - DNA, 20 bp, synthetic construct
  misc_feature 1..20: note = Description of Artificial Sequence: Synthetic oligonucleotide
  misc_feature 1..20: note = Target: FXN; (+) strand; PAM type: NRG; PAM sequence: AAG
  source 1..20: mol_type = other DNA
taccgccaacaattgtagtc

SEQ ID NO: 19901 - DNA, 20 bp, synthetic construct
  misc_feature 1..20: note = Description of Artificial Sequence: Synthetic oligonucleotide
  misc_feature 1..20: note = Target: FXN; (+) strand; PAM type: NRG; PAM sequence: TGG
  source 1..20: mol_type = other DNA
gccaacaattgtagtcaagt

SEQ ID NO: 19902 - DNA, 20 bp, synthetic construct
  misc_feature 1..20: note = Description of Artificial Sequence: Synthetic oligonucleotide
  misc_feature 1..20: note = Target: FXN; (+) strand; PAM type: NRG; PAM sequence: AAG
  source 1..20: mol_type = other DNA
agttggaaacaatttacaca

SEQ ID NO: 19903 - DNA, 20 bp, synthetic construct
  misc_feature 1..20: note = Description of Artificial Sequence: Synthetic oligonucleotide
  misc_feature 1..20: note = Target: FXN; (+) strand; PAM type: NRG; PAM sequence: AAG
  source 1..20: mol_type = other DNA
tacacaaagtgccaaacacc

SEQ ID NO: 19904 - DNA, 20 bp, synthetic construct
  misc_feature 1..20: note = Description of Artificial Sequence: Synthetic oligonucleotide
  misc_feature 1..20: note = Target: FXN; (+) strand; PAM type: NRG; PAM sequence: TGG
  source 1..20: mol_type = other DNA
aaagtgccaaacaccaagcc

SEQ ID NO: 19905 - DNA, 20 bp, synthetic construct
  misc_feature 1..20: note = Description of Artificial Sequence: Synthetic oligonucleotide
  misc_feature 1..20: note = Target: FXN; (+) strand; PAM type: NRG; PAM sequence: CAG
  source 1..20: mol_type = other DNA
gccaaacaccaagcctggca

SEQ ID NO: 19906 - DNA, 20 bp, synthetic construct
  misc_feature 1..20: note = Description of Artificial Sequence: Synthetic oligonucleotide
  misc_feature 1..20: note = Target: FXN; (+) strand; PAM type: NRG; PAM sequence: TAG
  source 1..20: mol_type = other DNA
aaacaccaagcctggcacag

SEQ ID NO: 19907 - DNA, 20 bp, synthetic construct
  misc_feature 1..20: note = Description of Artificial Sequence: Synthetic oligonucleotide
  misc_feature 1..20: note = Target: FXN; (+) strand; PAM type: NRG; PAM sequence: AGG
  source 1..20: mol_type = other DNA
aacaccaagcctggcacagt

SEQ ID NO: 19908 - DNA, 20 bp, synthetic construct
  misc_feature 1..20: note = Description of Artificial Sequence: Synthetic oligonucleotide
  misc_feature 1..20: note = Target: FXN; (+) strand; PAM type: NRG; PAM sequence: GAG
  source 1..20: mol_type = other DNA
agcctggcacagtaggaacc

SEQ ID NO: 19909 - DNA, 20 bp, synthetic construct
  misc_feature 1..20: note = Description of Artificial Sequence: Synthetic oligonucleotide
  misc_feature 1..20: note = Target: FXN; (+) strand; PAM type: NRG; PAM sequence: TAG
  source 1..20: mol_type = other DNA
cacagtaggaaccgagtaaa

SEQ ID NO: 19910 - DNA, 20 bp, synthetic construct
  misc_feature 1..20: note = Description of Artificial Sequence: Synthetic oligonucleotide
  misc_feature 1..20: note = Target: FXN; (+) strand; PAM type: NRG; PAM sequence: TGG
  source 1..20: mol_type = other DNA
agtaggaaccgagtaaatag

SEQ ID NO: 19911 - DNA, 20 bp, synthetic construct
  misc_feature 1..20: note = Description of Artificial Sequence: Synthetic oligonucleotide
  misc_feature 1..20: note = Target: FXN; (+) strand; PAM type: NRG; PAM sequence: CAG
  source 1..20: mol_type = other DNA
atagtggttaatatttttat

SEQ ID NO: 19912 - DNA, 20 bp, synthetic construct
  misc_feature 1..20: note = Description of Artificial Sequence: Synthetic oligonucleotide
  misc_feature 1..20: note = Target: FXN; (+) strand; PAM type: NRG; PAM sequence: CAG
  source 1..20: mol_type = other DNA
ctatacatttgtttttgaat

SEQ ID NO: 19913 - DNA, 20 bp, synthetic construct
  misc_feature 1..20: note = Description of Artificial Sequence: Synthetic oligonucleotide
  misc_feature 1..20: note = Target: FXN; (+) strand; PAM type: NRG; PAM sequence: AAG
  source 1..20: mol_type = other DNA
atttgtttttgaatcagaaa

SEQ ID NO: 19914 - DNA, 20 bp, synthetic construct
  misc_feature 1..20: note = Description of Artificial Sequence: Synthetic oligonucleotide
  misc_feature 1..20: note = Target: FXN; (+) strand; PAM type: NRG; PAM sequence: CAG
  source 1..20: mol_type = other DNA
gttattttaaaaaaataacc

SEQ ID NO: 19915 - DNA, 20 bp, synthetic construct
  misc_feature 1..20: note = Description of Artificial Sequence: Synthetic oligonucleotide
  misc_feature 1..20: note = Target: FXN; (+) strand; PAM type: NRG; PAM sequence: TAG
  source 1..20: mol_type = other DNA
attttaaaaaaataacccag

SEQ ID NO: 19916 - DNA, 20 bp, synthetic construct
  misc_feature 1..20: note = Description of Artificial Sequence: Synthetic oligonucleotide
  misc_feature 1..20: note = Target: FXN; (+) strand; PAM type: NRG; PAM sequence: CAG
  source 1..20: mol_type = other DNA
gccccttgtcccattcctat

SEQ ID NO: 19917 - DNA, 20 bp, synthetic construct
  misc_feature 1..20: note = Description of Artificial Sequence: Synthetic oligonucleotide
  misc_feature 1..20: note = Target: FXN; (+) strand; PAM type: NRG; PAM sequence: TGG
  source 1..20: mol_type = other DNA
ttattattgttactaccctc

SEQ ID NO: 19918 - DNA, 20 bp, synthetic construct
  misc_feature 1..20: note = Description of Artificial Sequence: Synthetic oligonucleotide
  misc_feature 1..20: note = Target: FXN; (+) strand; PAM type: NRG; PAM sequence: TGG
  source 1..20: mol_type = other DNA
ttcaataactctttgttttt

SEQ ID NO: 19919 - DNA, 20 bp, synthetic construct
  misc_feature 1..20: note = Description of Artificial Sequence: Synthetic oligonucleotide
  misc_feature 1..20: note = Target: FXN; (+) strand; PAM type: NRG; PAM sequence: GGG
  source 1..20: mol_type = other DNA
tcaataactctttgtttttt

SEQ ID NO: 19920 - DNA, 20 bp, synthetic construct
  misc_feature 1..20: note = Description of Artificial Sequence: Synthetic oligonucleotide
  misc_feature 1..20: note = Target: FXN; (+) strand; PAM type: NRG; PAM sequence: GAG
  source 1..20: mol_type = other DNA
ttttgttttgctttgctttt

SEQ ID NO: 19921 - DNA, 20 bp, synthetic construct
  misc_feature 1..20: note = Description of Artificial Sequence: Synthetic oligonucleotide
  misc_feature 1..20: note = Target: FXN; (+) strand; PAM type: NRG; PAM sequence: CAG
  source 1..20: mol_type = other DNA
gttttgctttgcttttgaga

SEQ ID NO: 19922 - DNA, 20 bp, synthetic construct
  misc_feature 1..20: note = Description of Artificial Sequence: Synthetic oligonucleotide
  misc_feature 1..20: note = Target: FXN; (+) strand; PAM type: NRG; PAM sequence: AGG
  source 1..20: mol_type = other DNA
ttttgctttgcttttgagac

SEQ ID NO: 19923 - DNA, 20 bp, synthetic construct
  misc_feature 1..20: note = Description of Artificial Sequence: Synthetic oligonucleotide
  misc_feature 1..20: note = Target: FXN; (+) strand; PAM type: NRG; PAM sequence: CAG
  source 1..20: mol_type = other DNA
gagacaggatctctgtcgcc

SEQ ID NO: 19924 - DNA, 20 bp, synthetic construct
  misc_feature 1..20: note = Description of Artificial Sequence: Synthetic oligonucleotide
  misc_feature 1..20: note = Target: FXN; (+) strand; PAM type: NRG; PAM sequence: TGG
  source 1..20: mol_type = other DNA
aggatctctgtcgcccagtc

SEQ ID NO: 19925 - DNA, 20 bp, synthetic construct
  misc_feature 1..20: note = Description of Artificial Sequence: Synthetic oligonucleotide
  misc_feature 1..20: note = Target: FXN; (+) strand; PAM type: NRG; PAM sequence: TAG
  source 1..20: mol_type = other DNA
ctgtcgcccagtctggtgtg

SEQ ID NO: 19926 - DNA, 20 bp, synthetic construct
  misc_feature 1..20: note = Description of Artificial Sequence: Synthetic oligonucleotide
  misc_feature 1..20: note = Target: FXN; (+) strand; PAM type: NRG; PAM sequence: TGG
  source 1..20: mol_type = other DNA
tcgcccagtctggtgtgtag

SEQ ID NO: 19927 - DNA, 20 bp, synthetic construct
  misc_feature 1..20: note = Description of Artificial Sequence: Synthetic oligonucleotide
  misc_feature 1..20: note = Target: FXN; (+) strand; PAM type: NRG; PAM sequence: CAG
  source 1..20: mol_type = other DNA
ggtgtgtagtggtgtgatct

SEQ ID NO: 19928 - DNA, 20 bp, synthetic construct
  misc_feature 1..20: note = Description of Artificial Sequence: Synthetic oligonucleotide
  misc_feature 1..20: note = Target: FXN; (+) strand; PAM type: NRG; PAM sequence: CAG
  source 1..20: mol_type = other DNA
ggtgtgatctcagctcactg

SEQ ID NO: 19929 - DNA, 20 bp, synthetic construct
  misc_feature 1..20: note = Description of Artificial Sequence: Synthetic oligonucleotide
  misc_feature 1..20: note = Target: FXN; (+) strand; PAM type: NRG; PAM sequence: TGG
  source 1..20: mol_type = other DNA
tcactgcagcctcaacctcc

SEQ ID NO: 19930 - DNA, 20 bp, synthetic construct
  misc_feature 1..20: note = Description of Artificial Sequence: Synthetic oligonucleotide
  misc_feature 1..20: note = Target: FXN; (+) strand; PAM type: NRG; PAM sequence: GGG
  source 1..20: mol_type = other DNA
cactgcagcctcaacctcct

SEQ ID NO: 19931 - DNA, 20 bp, synthetic construct
  misc_feature 1..20: note = Description of Artificial Sequence: Synthetic oligonucleotide
  misc_feature 1..20: note = Target: FXN; (+) strand; PAM type: NRG; PAM sequence: CAG
  source 1..20: mol_type = other DNA
cagcctcaacctcctgggct

SEQ ID NO: 19932 - DNA, 20 bp, synthetic construct
  misc_feature 1..20: note = Description of Artificial Sequence: Synthetic oligonucleotide
  misc_feature 1..20: note = Target: FXN; (+) strand; PAM type: NRG; PAM sequence: AGG
  source 1..20: mol_type = other DNA
agcctcaacctcctgggctc

SEQ ID NO: 19933 - DNA, 20 bp, synthetic construct
  misc_feature 1..20: note = Description of Artificial Sequence: Synthetic oligonucleotide
  misc_feature 1..20: note = Target: FXN; (+) strand; PAM type: NRG; PAM sequence: CAG
  source 1..20: mol_type = other DNA
ctcaggtgatcctcccactt

SEQ ID NO: 19934 - DNA, 20 bp, synthetic construct
  misc_feature 1..20: note = Description of Artificial Sequence: Synthetic oligonucleotide
  misc_feature 1..20: note = Target: FXN; (+) strand; PAM type: NRG; PAM sequence: AAG
  source 1..20: mol_type = other DNA
tcctcccacttcagcctccc

SEQ ID NO: 19935 - DNA, 20 bp, synthetic construct
  misc_feature 1..20: note = Description of Artificial Sequence: Synthetic oligonucleotide
  misc_feature 1..20: note = Target: FXN; (+) strand; PAM type: NRG; PAM sequence: TAG
  source 1..20: mol_type = other DNA
tcccacttcagcctcccaag

SEQ ID NO: 19936 - DNA, 20 bp, synthetic construct
  misc_feature 1..20: note = Description of Artificial Sequence: Synthetic oligonucleotide
  misc_feature 1..20: note = Target: FXN; (+) strand; PAM type: NRG; PAM sequence: TGG
  source 1..20: mol_type = other DNA
acttcagcctcccaagtagc

SEQ ID NO: 19937 - DNA, 20 bp, synthetic construct
  misc_feature 1..20: note = Description of Artificial Sequence: Synthetic oligonucleotide
  misc_feature 1..20: note = Target: FXN; (+) strand; PAM type: NRG; PAM sequence: GGG
  source 1..20: mol_type = other DNA
cttcagcctcccaagtagct

SEQ ID NO: 19938 - DNA, 20 bp, synthetic construct
  misc_feature 1..20: note = Description of Artificial Sequence: Synthetic oligonucleotide
  misc_feature 1..20: note = Target: FXN; (+) strand; PAM type: NRG; PAM sequence: CAG
  source 1..20: mol_type = other DNA
ctcccaagtagctgggacca

SEQ ID NO: 19939 - DNA, 20 bp, synthetic construct
  misc_feature 1..20: note = Description of Artificial Sequence: Synthetic oligonucleotide
  misc_feature 1..20: note = Target: FXN; (+) strand; PAM type: NRG; PAM sequence: AGG
  source 1..20: mol_type = other DNA
tcccaagtagctgggaccac

SEQ ID NO: 19940 - DNA, 20 bp, synthetic construct
  misc_feature 1..20: note = Description of Artificial Sequence: Synthetic oligonucleotide
  misc_feature 1..20: note = Target: FXN; (+) strand; PAM type: NRG; PAM sequence: TGG
  source 1..20: mol_type = other DNA
caggcgcatgccaccacact

SEQ ID NO: 19941 - DNA, 20 bp, synthetic construct
  misc_feature 1..20: note = Description of Artificial Sequence: Synthetic oligonucleotide
  misc_feature 1..20: note = Target: FXN; (+) strand; PAM type: NRG; PAM sequence: TAG
  source 1..20: mol_type = other DNA
ttggctaatttttgcatttt

SEQ ID NO: 19942 - DNA, 20 bp, synthetic construct
  misc_feature 1..20: note = Description of Artificial Sequence: Synthetic oligonucleotide
  misc_feature 1..20: note = Target: FXN; (+) strand; PAM type: NRG; PAM sequence: TAG
  source 1..20: mol_type = other DNA
gctaatttttgcatttttag

SEQ ID NO: 19943 - DNA, 20 bp, synthetic construct
  misc_feature 1..20: note = Description of Artificial Sequence: Synthetic oligonucleotide
  misc_feature 1..20: note = Target: FXN; (+) strand; PAM type: NRG; PAM sequence: GAG
  source 1..20: mol_type = other DNA
taatttttgcatttttagta

SEQ ID NO: 19944 - DNA, 20 bp, synthetic construct
  misc_feature 1..20: note = Description of Artificial Sequence: Synthetic oligonucleotide
  misc_feature 1..20: note = Target: FXN; (+) strand; PAM type: NRG; PAM sequence: CAG
  source 1..20: mol_type = other DNA
ttttgcatttttagtagaga

SEQ ID NO: 19945 - DNA, 20 bp, synthetic construct
  misc_feature 1..20: note = Description of Artificial Sequence: Synthetic oligonucleotide
  misc_feature 1..20: note = Target: FXN; (+) strand; PAM type: NRG; PAM sequence: AGG
  source 1..20: mol_type = other DNA
tttgcatttttagtagagac

SEQ ID NO: 19946 - DNA, 20 bp, synthetic construct
  misc_feature 1..20: note = Description of Artificial Sequence: Synthetic oligonucleotide
  misc_feature 1..20: note = Target: FXN; (+) strand; PAM type: NRG; PAM sequence: GGG
  source 1..20: mol_type = other DNA
ttgcatttttagtagagaca

SEQ ID NO: 19947 - DNA, 20 bp, synthetic construct
  misc_feature 1..20: note = Description of Artificial Sequence: Synthetic oligonucleotide
  misc_feature 1..20: note = Target: FXN; (+) strand; PAM type: NRG; PAM sequence: TAG
  source 1..20: mol_type = other DNA
cagggttttgccatattgcc

SEQ ID NO: 19948 - DNA, 20 bp, synthetic construct
  misc_feature 1..20: note = Description of Artificial Sequence: Synthetic oligonucleotide
  misc_feature 1..20: note = Target: FXN; (+) strand; PAM type: NRG; PAM sequence: AGG
  source 1..20: mol_type = other DNA
agggttttgccatattgcct

SEQ ID NO: 19949 - DNA, 20 bp, synthetic construct
  misc_feature 1..20: note = Description of Artificial Sequence: Synthetic oligonucleotide
  misc_feature 1..20: note = Target: FXN; (+) strand; PAM type: NRG; PAM sequence: CGG
  source 1..20: mol_type = other DNA
ttttgccatattgcctaggc

SEQ ID NO: 19950 - DNA, 20 bp, synthetic construct
  misc_feature 1..20: note = Description of Artificial Sequence: Synthetic oligonucleotide
  misc_feature 1..20: note = Target: FXN; (+) strand; PAM type: NRG; PAM sequence: TGG
  source 1..20: mol_type = other DNA
ccatattgcctaggccggtc

SEQ ID NO: 19951 - DNA, 20 bp, synthetic construct
  misc_feature 1..20: note = Description of Artificial Sequence: Synthetic oligonucleotide
  misc_feature 1..20: note = Target: FXN; (+) strand; PAM type: NRG; PAM sequence: TGG
  source 1..20: mol_type = other DNA
ctaggccggtctggaacttc

SEQ ID NO: 19952 - DNA, 20 bp, synthetic construct
  misc_feature 1..20: note = Description of Artificial Sequence: Synthetic oligonucleotide
  misc_feature 1..20: note = Target: FXN; (+) strand; PAM type: NRG; PAM sequence: GGG
  source 1..20: mol_type = other DNA
taggccggtctggaacttct

SEQ ID NO: 19953 - DNA, 20 bp, synthetic construct
  misc_feature 1..20: note = Description of Artificial Sequence: Synthetic oligonucleotide
  misc_feature 1..20: note = Target: FXN; (+) strand; PAM type: NRG; PAM sequence: AAG
  source 1..20: mol_type = other DNA
ggtctggaacttctgggctc

SEQ ID NO: 19954 - DNA, 20 bp, synthetic construct
  misc_feature 1..20: note = Description of Artificial Sequence: Synthetic oligonucleotide
  misc_feature 1..20: note = Target: FXN; (+) strand; PAM type: NRG; PAM sequence: CGG
  source 1..20: mol_type = other DNA
ctcaagccatctgcctgcct

SEQ ID NO: 19955 - DNA, 20 bp, synthetic construct
  misc_feature 1..20: note = Description of Artificial Sequence: Synthetic oligonucleotide
  misc_feature 1..20: note = Target: FXN; (+) strand; PAM type: NRG; PAM sequence: AAG
  source 1..20: mol_type = other DNA
ctgcctgcctcggcctccca

SEQ ID NO: 19956 - DNA, 20 bp, synthetic construct
  misc_feature 1..20: note = Description of Artificial Sequence: Synthetic oligonucleotide
  misc_feature 1..20: note = Target: FXN; (+) strand; PAM type: NRG; PAM sequence: TGG
  source 1..20: mol_type = other DNA
gcctcggcctcccaaagtgc

SEQ ID NO: 19957 - DNA, 20 bp, synthetic construct
  misc_feature 1..20: note = Description of Artificial Sequence: Synthetic oligonucleotide
  misc_feature 1..20: note = Target: FXN; (+) strand; PAM type: NRG; PAM sequence: CAG
  source 1..20: mol_type = other DNA
ctcccaaagtgctggaattt

SEQ ID NO: 19958 - DNA, 20 bp, synthetic construct
  misc_feature 1..20: note = Description of Artificial Sequence: Synthetic oligonucleotide
  misc_feature 1..20: note = Target: FXN; (+) strand; PAM type: NRG; PAM sequence: AGG
  source 1..20: mol_type = other DNA
tcccaaagtgctggaatttc

SEQ ID NO: 19959 - DNA, 20 bp, synthetic construct
  misc_feature 1..20: note = Description of Artificial Sequence: Synthetic oligonucleotide
  misc_feature 1..20: note = Target: FXN; (+) strand; PAM type: NRG; PAM sequence: GAG
  source 1..20: mol_type = other DNA
agtgctggaatttcaggcat

SEQ ID NO: 19960 - DNA, 20 bp, synthetic construct
  misc_feature 1..20: note = Description of Artificial Sequence: Synthetic oligonucleotide
  misc_feature 1..20: note = Target: FXN; (+) strand; PAM type: NRG; PAM sequence: TGG
  source 1..20: mol_type = other DNA
tttcaggcatgagccatgcc

SEQ ID NO: 19961 - DNA, 20 bp, synthetic construct
  misc_feature 1..20: note = Description of Artificial Sequence: Synthetic oligonucleotide
  misc_feature 1..20: note = Target: FXN; (+) strand; PAM type: NRG; PAM sequence: TAG
  source 1..20: mol_type = other DNA
tgagccatgcctggcctaaa

SEQ ID NO: 19962 - DNA, 20 bp, synthetic construct
  misc_feature 1..20: note = Description of Artificial Sequence: Synthetic oligonucleotide
  misc_feature 1..20: note = Target: FXN; (+) strand; PAM type: NRG; PAM sequence: AAG
  source 1..20: mol_type = other DNA
atagctctctgtgtttgcaa

SEQ ID NO: 19963 - DNA, 20 bp, synthetic construct
  misc_feature 1..20: note = Description of Artificial Sequence: Synthetic oligonucleotide
  misc_feature 1..20: note = Target: FXN; (+) strand; PAM type: NRG; PAM sequence: AAG
  source 1..20: mol_type = other DNA
tgtttgcaaaagtgtgttat

SEQ ID NO: 19964 - DNA, 20 bp, synthetic construct
  misc_feature 1..20: note = Description of Artificial Sequence: Synthetic oligonucleotide
  misc_feature 1..20: note = Target: FXN; (+) strand; PAM type: NRG; PAM sequence: CAG
  source 1..20: mol_type = other DNA
agtgtgttataagaatcatt

SEQ ID NO: 19965 - DNA, 20 bp, synthetic construct
  misc_feature 1..20: note = Description of Artificial Sequence: Synthetic oligonucleotide
  misc_feature 1..20: note = Target: FXN; (+) strand; PAM type: NRG; PAM sequence: GAG
  source 1..20: mol_type = other DNA
tgtgttataagaatcattca

SEQ ID NO: 19966 - DNA, 20 bp, synthetic construct
  misc_feature 1..20: note = Description of Artificial Sequence: Synthetic oligonucleotide
  misc_feature 1..20: note = Target: FXN; (+) strand; PAM type: NRG; PAM sequence: TGG
  source 1..20: mol_type = other DNA
atcattcagagcctctcgat

SEQ ID NO: 19967 - DNA, 20 bp, synthetic construct
  misc_feature 1..20: note = Description of Artificial Sequence: Synthetic oligonucleotide
  misc_feature 1..20: note = Target: FXN; (+) strand; PAM type: NRG; PAM sequence: TGG
  source 1..20: mol_type = other DNA
ttcagagcctctcgattgga

SEQ ID NO: 19968 - DNA, 20 bp, synthetic construct
  misc_feature 1..20: note = Description of Artificial Sequence: Synthetic oligonucleotide
  misc_feature 1..20: note = Target: FXN; (+) strand; PAM type: NRG; PAM sequence: GAG
  source 1..20: mol_type = other DNA
cagagcctctcgattggatg

SEQ ID NO: 19969 - DNA, 20 bp, synthetic construct
  misc_feature 1..20: note = Description of Artificial Sequence: Synthetic oligonucleotide
  misc_feature 1..20: note = Target: FXN; (+) strand; PAM type: NRG; PAM sequence: AGG
  source 1..20: mol_type = other DNA
agagcctctcgattggatgg

SEQ ID NO: 19970 - DNA, 20 bp, synthetic construct
  misc_feature 1..20: note = Description of Artificial Sequence: Synthetic oligonucleotide
  misc_feature 1..20: note = Target: FXN; (+) strand; PAM type: NRG; PAM sequence: TAG
  source 1..20: mol_type = other DNA
tctcgattggatggaggctc

SEQ ID NO: 19971 - DNA, 20 bp, synthetic construct
  misc_feature 1..20: note = Description of Artificial Sequence: Synthetic oligonucleotide
  misc_feature 1..20: note = Target: FXN; (+) strand; PAM type: NRG; PAM sequence: CAG
  source 1..20: mol_type = other DNA
gatggaggctctagaatgca

SEQ ID NO: 19972 - DNA, 20 bp, synthetic construct
  misc_feature 1..20: note = Description of Artificial Sequence: Synthetic oligonucleotide
  misc_feature 1..20: note = Target: FXN; (+) strand; PAM type: NRG; PAM sequence: AAG
  source 1..20: mol_type = other DNA
ggctctagaatgcacagaaa

SEQ ID NO: 19973 - DNA, 20 bp, synthetic construct
  misc_feature 1..20: note = Description of Artificial Sequence: Synthetic oligonucleotide
  misc_feature 1..20: note = Target: FXN; (+) strand; PAM type: NRG; PAM sequence: AGG
  source 1..20: mol_type = other DNA
gctctagaatgcacagaaaa

SEQ ID NO: 19974 - DNA, 20 bp, synthetic construct
  misc_feature 1..20: note = Description of Artificial Sequence: Synthetic oligonucleotide
  misc_feature 1..20: note = Target: FXN; (+) strand; PAM type: NRG; PAM sequence: AAG
  source 1..20: mol_type = other DNA
ctgccaccgtgtatctctgc

SEQ ID NO: 19975 - DNA, 20 bp, synthetic construct
  misc_feature 1..20: note = Description of Artificial Sequence: Synthetic oligonucleotide
  misc_feature 1..20: note = Target: FXN; (+) strand; PAM type: NRG; PAM sequence: AAG
  source 1..20: mol_type = other DNA
tatctctgcaagtcatgcac

SEQ ID NO: 19976 - DNA, 20 bp, synthetic construct
  misc_feature 1..20: note = Description of Artificial Sequence: Synthetic oligonucleotide
  misc_feature 1..20: note = Target: FXN; (+) strand; PAM type: NRG; PAM sequence: TGG
  source 1..20: mol_type = other DNA
tctgcaagtcatgcacaaga

SEQ ID NO: 19977 - DNA, 20 bp, synthetic construct
  misc_feature 1..20: note = Description of Artificial Sequence: Synthetic oligonucleotide
  misc_feature 1..20: note = Target: FXN; (+) strand; PAM type: NRG; PAM sequence: GGG
  source 1..20: mol_type = other DNA
ctgcaagtcatgcacaagat

SEQ ID NO: 19978 - DNA, 20 bp, synthetic construct
  misc_feature 1..20: note = Description of Artificial Sequence: Synthetic oligonucleotide
  misc_feature 1..20: note = Target: FXN; (+) strand; PAM type: NRG; PAM sequence: GGG
  source 1..20: mol_type = other DNA
tgcaagtcatgcacaagatg

SEQ ID NO: 19979 - DNA, 20 bp, synthetic construct
  misc_feature 1..20: note = Description of Artificial Sequence: Synthetic oligonucleotide
  misc_feature 1..20: note = Target: FXN; (+) strand; PAM type: NRG; PAM sequence: CAG
  source 1..20: mol_type = other DNA
gtcatgcacaagatggggaa

SEQ ID NO: 19980 - DNA, 20 bp, synthetic construct
  misc_feature 1..20: note = Description of Artificial Sequence: Synthetic oligonucleotide
  misc_feature 1..20: note = Target: FXN; (+) strand; PAM type: NRG; PAM sequence: CAG
  source 1..20: mol_type = other DNA
atgcacaagatggggaacag

SEQ ID NO: 19981 - DNA, 20 bp, synthetic construct
  misc_feature 1..20: note = Description of Artificial Sequence: Synthetic oligonucleotide
  misc_feature 1..20: note = Target: FXN; (+) strand; PAM type: NRG; PAM sequence: AGG
  source 1..20: mol_type = other DNA
tgcacaagatggggaacagc

SEQ ID NO: 19982 - DNA, 20 bp, synthetic construct
  misc_feature 1..20: note = Description of Artificial Sequence: Synthetic oligonucleotide
  misc_feature 1..20: note = Target: FXN; (+) strand; PAM type: NRG; PAM sequence: CAG
  source 1..20: mol_type = other DNA
gcaggcttccccctgcttac

SEQ ID NO: 19983 - DNA, 20 bp, synthetic construct
  misc_feature 1..20: note = Description of Artificial Sequence: Synthetic oligonucleotide
  misc_feature 1..20: note = Target: FXN; (+) strand; PAM type: NRG; PAM sequence: CAG
  source 1..20: mol_type = other DNA
cctgcttaccagttcaaata

SEQ ID NO: 19984 - DNA, 20 bp, synthetic construct
  misc_feature 1..20: note = Description of Artificial Sequence: Synthetic oligonucleotide
  misc_feature 1..20: note = Target: FXN; (+) strand; PAM type: NRG; PAM sequence: GAG
  source 1..20: mol_type = other DNA
tgcttaccagttcaaataca

SEQ ID NO: 19985 - DNA, 20 bp, synthetic construct
  misc_feature 1..20: note = Description of Artificial Sequence: Synthetic oligonucleotide
  misc_feature 1..20: note = Target: FXN; (+) strand; PAM type: NRG; PAM sequence: TAG
  source 1..20: mol_type = other DNA
ccagttcaaatacagagaac

SEQ ID NO: 19986 - DNA, 20 bp, synthetic construct
  misc_feature 1..20: note = Description of Artificial Sequence: Synthetic oligonucleotide
  misc_feature 1..20: note = Target: FXN; (+) strand; PAM type: NRG; PAM sequence: TAG
  source 1..20: mol_type = other DNA
aatacagagaactagccctg

SEQ ID NO: 19987 - DNA, 20 bp, synthetic construct
  misc_feature 1..20: note = Description of Artificial Sequence: Synthetic oligonucleotide
  misc_feature 1..20: note = Target: FXN; (+) strand; PAM type: NRG; PAM sequence: AAG
  source 1..20: mol_type = other DNA
ttcatatctcacccattcta

SEQ ID NO: 19988 - DNA, 20 bp, synthetic construct
  misc_feature 1..20: note = Description of Artificial Sequence: Synthetic oligonucleotide
  misc_feature 1..20: note = Target: FXN; (+) strand; PAM type: NRG; PAM sequence: GAG
  source 1..20: mol_type = other DNA
catatctcacccattctaaa

SEQ ID NO: 19989 - DNA, 20 bp, synthetic construct
  misc_feature 1..20: note = Description of Artificial Sequence: Synthetic oligonucleotide
  misc_feature 1..20: note = Target: FXN; (+) strand; PAM type: NRG; PAM sequence: CAG
  source 1..20: mol_type = other DNA
cacccattctaaagagacca

SEQ ID NO: 19990 - DNA, 20 bp, synthetic construct
  misc_feature 1..20: note = Description of Artificial Sequence: Synthetic oligonucleotide
  misc_feature 1..20: note = Target: FXN; (+) strand; PAM type: NRG; PAM sequence: AGG
  source 1..20: mol_type = other DNA
acccattctaaagagaccac

SEQ ID NO: 19991 - DNA, 20 bp, synthetic construct
  misc_feature 1..20: note = Description of Artificial Sequence: Synthetic oligonucleotide
  misc_feature 1..20: note = Target: FXN; (+) strand; PAM type: NRG; PAM sequence: TAG
  source 1..20: mol_type = other DNA
tctaaagagaccacaggcct

SEQ ID NO: 19992 - DNA, 20 bp, synthetic construct
  misc_feature 1..20: note = Description of Artificial Sequence: Synthetic oligonucleotide
  misc_feature 1..20: note = Target: FXN; (+) strand; PAM type: NRG; PAM sequence: AAG
  source 1..20: mol_type = other DNA
aaagagaccacaggccttag

SEQ ID NO: 19993 - DNA, 20 bp, synthetic construct
  misc_feature 1..20: note = Description of Artificial Sequence: Synthetic oligonucleotide
  misc_feature 1..20: note = Target: FXN; (+) strand; PAM type: NRG; PAM sequence: AAG
  source 1..20: mol_type = other DNA
gaccacaggccttagaagta

SEQ ID NO: 19994 - DNA, 20 bp, synthetic construct
  misc_feature 1..20: note = Description of Artificial Sequence: Synthetic oligonucleotide
  misc_feature 1..20: note = Target: FXN; (+) strand; PAM type: NRG; PAM sequence: AGG
  source 1..20: mol_type = other DNA
accacaggccttagaagtaa

SEQ ID NO: 19995 - DNA, 20 bp, synthetic construct
  misc_feature 1..20: note = Description of Artificial Sequence: Synthetic oligonucleotide
  misc_feature 1..20: note = Target: FXN; (+) strand; PAM type: NRG; PAM sequence: AAG
  source 1..20: mol_type = other DNA
gtaaaggactcttttgttga

SEQ ID NO: 19996 - DNA, 20 bp, synthetic construct
  misc_feature 1..20: note = Description of Artificial Sequence: Synthetic oligonucleotide
  misc_feature 1..20: note = Target: FXN; (+) strand; PAM type: NRG; PAM sequence: GAG
  source 1..20: mol_type = other DNA
aaaggactcttttgttgaaa

SEQ ID NO: 19997 - DNA, 20 bp, synthetic construct
  misc_feature 1..20: note = Description of Artificial Sequence: Synthetic oligonucleotide
  misc_feature 1..20: note = Target: FXN; (+) strand; PAM type: NRG; PAM sequence: GAG
  source 1..20: mol_type = other DNA
gagtgttttcaaatttaaat

SEQ ID NO: 19998 - DNA, 20 bp, synthetic construct
  misc_feature 1..20: note = Description of Artificial Sequence: Synthetic oligonucleotide
  misc_feature 1..20: note = Target: FXN; (+) strand; PAM type: NRG; PAM sequence: TGG
  source 1..20: mol_type = other DNA
aaatttaaatgagcatttat

SEQ ID NO: 19999 - DNA, 20 bp, synthetic construct
  misc_feature 1..20: note = Description of Artificial Sequence: Synthetic oligonucleotide
  misc_feature 1..20: note = Target: FXN; (+) strand; PAM type: NRG; PAM sequence: AAG
  source 1..20: mol_type = other DNA
aaatgagcatttattggtca

SEQ ID NO: 20000 - DNA, 20 bp, synthetic construct
  misc_feature 1..20: note = Description of Artificial Sequence: Synthetic oligonucleotide
  misc_feature 1..20: note = Target: FXN; (+) strand; PAM type: NRG; PAM sequence: TAG
  source 1..20: mol_type = other DNA
ttggtcaaagatgcaccaac

SEQ ID NO: 20001 - DNA, 20 bp, synthetic construct
  misc_feature 1..20: note = Description of Artificial Sequence: Synthetic oligonucleotide
  misc_feature 1..20: note = Target: FXN; (+) strand; PAM type: NRG; PAM sequence: AAG
  source 1..20: mol_type = other DNA
atgcaccaactagtcttttg

SEQ ID NO: 20002 - DNA, 20 bp, synthetic construct
  misc_feature 1..20: note = Description of Artificial Sequence: Synthetic oligonucleotide
  misc_feature 1..20: note = Target: FXN; (+) strand; PAM type: NRG; PAM sequence: AAG
  source 1..20: mol_type = other DNA
actagtcttttgaagaattc

SEQ ID NO: 20003 - DNA, 20 bp, synthetic construct
  misc_feature 1..20: note = Description of Artificial Sequence: Synthetic oligonucleotide
  misc_feature 1..20: note = Target: FXN; (+) strand; PAM type: NRG; PAM sequence: AGG
  source 1..20: mol_type = other DNA
ctagtcttttgaagaattca

SEQ ID NO: 20004 - DNA, 20 bp, synthetic construct
  misc_feature 1..20: note = Description of Artificial Sequence: Synthetic oligonucleotide
  misc_feature 1..20: note = Target: FXN; (+) strand; PAM type: NRG; PAM sequence: TAG
  source 1..20: mol_type = other DNA
ttgaagaattcaaggctctt

SEQ ID NO: 20005 - DNA, 20 bp, synthetic construct
  misc_feature 1..20: note = Description of Artificial Sequence: Synthetic oligonucleotide
  misc_feature 1..20: note = Target: FXN; (+) strand; PAM type: NRG; PAM sequence: GAG
  source 1..20: mol_type = other DNA
gaagaattcaaggctcttta

SEQ ID NO: 20006 - DNA, 20 bp, synthetic construct
  misc_feature 1..20: note = Description of Artificial Sequence: Synthetic oligonucleotide
  misc_feature 1..20: note = Target: FXN; (+) strand; PAM type: NRG; PAM sequence: AAG
  source 1..20: mol_type = other DNA
aggctctttagagaaaaata

SEQ ID NO: 20007 - DNA, 20 bp, synthetic construct
  misc_feature 1..20: note = Description of Artificial Sequence: Synthetic oligonucleotide
  misc_feature 1..20: note = Target: FXN; (+) strand; PAM type: NRG; PAM sequence: TGG
  source 1..20: mol_type = other DNA
tttagagaaaaataaagcct

SEQ ID NO: 20008 - DNA, 20 bp, synthetic construct
  misc_feature 1..20: note = Description of Artificial Sequence: Synthetic oligonucleotide
  misc_feature 1..20: note = Target: FXN; (+) strand; PAM type: NRG; PAM sequence: GAG
  source 1..20: mol_type = other DNA
tagagaaaaataaagccttg

SEQ ID NO: 20009 - DNA, 20 bp, synthetic construct
  misc_feature 1..20: note = Description of Artificial Sequence: Synthetic oligonucleotide
  misc_feature 1..20: note = Target: FXN; (+) strand; PAM type: NRG; PAM sequence: AGG
  source 1..20: mol_type = other DNA
agagaaaaataaagccttgg

SEQ ID NO: 20010 - DNA, 20 bp, synthetic construct
  misc_feature 1..20: note = Description of Artificial Sequence: Synthetic oligonucleotide
  misc_feature 1..20: note = Target: FXN; (+) strand; PAM type: NRG; PAM sequence: GAG
  source 1..20: mol_type = other DNA
agaaaaataaagccttggag

SEQ ID NO: 20011 - DNA, 20 bp, synthetic construct
  misc_feature 1..20: note = Description of Artificial Sequence: Synthetic oligonucleotide
  misc_feature 1..20: note = Target: FXN; (+) strand; PAM type: NRG; PAM sequence: GAG
  source 1..20: mol_type = other DNA
aaagccttggaggagtatct

SEQ ID NO: 20012 - DNA, 20 bp, synthetic construct
  misc_feature 1..20: note = Description of Artificial Sequence: Synthetic oligonucleotide
  misc_feature 1..20: note = Target: FXN; (+) strand; PAM type: NRG; PAM sequence: AAG
  source 1..20: mol_type = other DNA
gccttggaggagtatctgag

SEQ ID NO: 20013 - DNA, 20 bp, synthetic construct
  misc_feature 1..20: note = Description of Artificial Sequence: Synthetic oligonucleotide
  misc_feature 1..20: note = Target: FXN; (+) strand; PAM type: NRG; PAM sequence: TAG
  source 1..20: mol_type = other DNA
ggagtatctgagaagcttgt

SEQ ID NO: 20014 - DNA, 20 bp, synthetic construct
  misc_feature 1..20: note = Description of Artificial Sequence: Synthetic oligonucleotide
  misc_feature 1..20: note = Target: FXN; (+) strand; PAM type: NRG; PAM sequence: TGG
  source 1..20: mol_type = other DNA
tgagaagcttgttagatgcg

SEQ ID NO: 20015 - DNA, 20 bp, synthetic construct
  misc_feature 1..20: note = Description of Artificial Sequence: Synthetic oligonucleotide
  misc_feature 1..20: note = Target: FXN; (+) strand; PAM type: NRG; PAM sequence: GGG
  source 1..20: mol_type = other DNA
gagaagcttgttagatgcgt

SEQ ID NO: 20016 - DNA, 20 bp, synthetic construct
  misc_feature 1..20: note = Description of Artificial Sequence: Synthetic oligonucleotide
  misc_feature 1..20: note = Target: FXN; (+) strand; PAM type: NRG; PAM sequence: AAG
  source 1..20: mol_type = other DNA
aagcttgttagatgcgtggg

SEQ ID NO: 20017 - DNA, 20 bp, synthetic construct
  misc_feature 1..20: note = Description of Artificial Sequence: Synthetic oligonucleotide
  misc_feature 1..20: note = Target: FXN; (+) strand; PAM type: NRG; PAM sequence: GAG
  source 1..20: mol_type = other DNA
gcttgttagatgcgtgggaa

SEQ ID NO: 20018 - DNA, 20 bp, synthetic construct
  misc_feature 1..20: note = Description of Artificial Sequence: Synthetic oligonucleotide
  misc_feature 1..20: note = Target: FXN; (+) strand; PAM type: NRG; PAM sequence: TGG
  source 1..20: mol_type = other DNA
ttagatgcgtgggaagagtc

SEQ ID NO: 20019 - DNA, 20 bp, synthetic construct
  misc_feature 1..20: note = Description of Artificial Sequence: Synthetic oligonucleotide
  misc_feature 1..20: note = Target: FXN; (+) strand; PAM type: NRG; PAM sequence: TGG
  source 1..20: mol_type = other DNA
tggaaataaaaaacttcatc

SEQ ID NO: 20020 - DNA, 20 bp, synthetic construct
  misc_feature 1..20: note = Description of Artificial Sequence: Synthetic oligonucleotide
  misc_feature 1..20: note = Target: FXN; (+) strand; PAM type: NRG; PAM sequence: GAG
  source 1..20: mol_type = other DNA
gaaataaaaaacttcatctg

SEQ ID NO: 20021 - DNA, 20 bp, synthetic construct
  misc_feature 1..20: note = Description of Artificial Sequence: Synthetic oligonucleotide
  misc_feature 1..20: note = Target: FXN; (+) strand; PAM type: NRG; PAM sequence: CAG
  source 1..20: mol_type = other DNA
gagtttctgccttctaccaa

SEQ ID NO: 20022 - DNA, 20 bp, synthetic construct
  misc_feature 1..20: note = Description of Artificial Sequence: Synthetic oligonucleotide
  misc_feature 1..20: note = Target: FXN; (+) strand; PAM type: NRG; PAM sequence: GAG
  source 1..20: mol_type = other DNA
gtttctgccttctaccaaca

SEQ ID NO: 20023 - DNA, 20 bp, synthetic construct
  misc_feature 1..20: note = Description of Artificial Sequence: Synthetic oligonucleotide
  misc_feature 1..20: note = Target: FXN; (+) strand; PAM type: NRG; PAM sequence: AAG
  source 1..20: mol_type = other DNA
gccttctaccaacagagctg

SEQ ID NO: 20024 - DNA, 20 bp, synthetic construct
  misc_feature 1..20: note = Description of Artificial Sequence: Synthetic oligonucleotide
  misc_feature 1..20: note = Target: FXN; (+) strand; PAM type: NRG; PAM sequence: AAG
  source 1..20: mol_type = other DNA
gctgaagctaatgctctcct

SEQ ID NO: 20025 - DNA, 20 bp, synthetic construct
  misc_feature 1..20: note = Description of Artificial Sequence: Synthetic oligonucleotide
  misc_feature 1..20: note = Target: FXN; (+) strand; PAM type: NRG; PAM sequence: AAG
  source 1..20: mol_type = other DNA
agctaatgctctcctaagac

SEQ ID NO: 20026 - DNA, 20 bp, synthetic construct
  misc_feature 1..20: note = Description of Artificial Sequence: Synthetic oligonucleotide
  misc_feature 1..20: note = Target: FXN; (+) strand; PAM type: NRG; PAM sequence: AAG
  source 1..20: mol_type = other DNA
atgctctcctaagacaagca

SEQ ID NO: 20027 - DNA, 20 bp, synthetic construct
  misc_feature 1..20: note = Description of Artificial Sequence: Synthetic oligonucleotide
  misc_feature 1..20: note = Target: FXN; (+) strand; PAM type: NRG; PAM sequence: CAG
  source 1..20: mol_type = other DNA
ctctcctaagacaagcaaag

SEQ ID NO: 20028 - DNA, 20 bp, synthetic construct
  misc_feature 1..20: note = Description of Artificial Sequence: Synthetic oligonucleotide
  misc_feature 1..20: note = Target: FXN; (+) strand; PAM type: NRG; PAM sequence: TGG
  source 1..20: mol_type = other DNA
cctaagacaagcaaagcaga

SEQ ID NO: 20029 - DNA, 20 bp, synthetic construct
  misc_feature 1..20: note = Description of Artificial Sequence: Synthetic oligonucleotide
  misc_feature 1..20: note = Target: FXN; (+) strand; PAM type: NRG; PAM sequence: TAG
  source 1..20: mol_type = other DNA
tccttttacttcctctgtaa

SEQ ID NO: 20030 - DNA, 20 bp, synthetic construct
  misc_feature 1..20: note = Description of Artificial Sequence: Synthetic oligonucleotide
  misc_feature 1..20: note = Target: FXN; (+) strand; PAM type: NRG; PAM sequence: GAG
  source 1..20: mol_type = other DNA
acttgtcatgtctgatgttt

SEQ ID NO: 20031 - DNA, 20 bp, synthetic construct
  misc_feature 1..20: note = Description of Artificial Sequence: Synthetic oligonucleotide
  misc_feature 1..20: note = Target: FXN; (+) strand; PAM type: NRG; PAM sequence: TGG
  source 1..20: mol_type = other DNA
gtctgatgtttgagttgacg

SEQ ID NO: 20032 - DNA, 20 bp, synthetic construct
  misc_feature 1..20: note = Description of Artificial Sequence: Synthetic oligonucleotide
  misc_feature 1..20: note = Target: FXN; (+) strand; PAM type: NRG; PAM sequence: TAG
  source 1..20: mol_type = other DNA
gagttgacgtggtactctaa

SEQ ID NO: 20033 - DNA, 20 bp, synthetic construct
  misc_feature 1..20: note = Description of Artificial Sequence: Synthetic oligonucleotide
  misc_feature 1..20: note = Target: FXN; (+) strand; PAM type: NRG; PAM sequence: GAG
  source 1..20: mol_type = other DNA
gttgacgtggtactctaata

SEQ ID NO: 20034 - DNA, 20 bp, synthetic construct
  misc_feature 1..20: note = Description of Artificial Sequence: Synthetic oligonucleotide
  misc_feature 1..20: note = Target: FXN; (+) strand; PAM type: NRG; PAM sequence: TAG
  source 1..20: mol_type = other DNA
acgtggtactctaatagagt

SEQ ID NO: 20035 - DNA, 20 bp, synthetic construct
  misc_feature 1..20: note = Description of Artificial Sequence: Synthetic oligonucleotide
  misc_feature 1..20: note = Target: FXN; (+) strand; PAM type: NRG; PAM sequence: GAG
  source 1..20: mol_type = other DNA
gtggtactctaatagagtta

SEQ ID NO: 20036 - DNA, 20 bp, synthetic construct
  misc_feature 1..20: note = Description of Artificial Sequence: Synthetic oligonucleotide
  misc_feature 1..20: note = Target: FXN; (+) strand; PAM type: NRG; PAM sequence: TAG
  source 1..20: mol_type = other DNA
tgcattttttttatgtcctc

SEQ ID NO: 20037 - DNA, 20 bp, synthetic construct
  misc_feature 1..20: note = Description of Artificial Sequence: Synthetic oligonucleotide
  misc_feature 1..20: note = Target: FXN; (+) strand; PAM type: NRG; PAM sequence: TGG
  source 1..20: mol_type = other DNA
ttatgtcctctagtatgttc

SEQ ID NO: 20038 - DNA, 20 bp, synthetic construct
  misc_feature 1..20: note = Description of Artificial Sequence: Synthetic oligonucleotide
  misc_feature 1..20: note = Target: FXN; (+) strand; PAM type: NRG; PAM sequence: TGG
  source 1..20: mol_type = other DNA
ctctagtatgttctggttga

SEQ ID NO: 20039 - DNA, 20 bp, synthetic construct
  misc_feature 1..20: note = Description of Artificial Sequence: Synthetic oligonucleotide
  misc_feature 1..20: note = Target: FXN; (+) strand; PAM type: NRG; PAM sequence: GAG
  source 1..20: mol_type = other DNA
gtatgttctggttgatggtt

SEQ ID NO: 20040 - DNA, 20 bp, synthetic construct
  misc_feature 1..20: note = Description of Artificial Sequence: Synthetic oligonucleotide
  misc_feature 1..20: note = Target: FXN; (+) strand; PAM type: NRG; PAM sequence: AGG
  source 1..20: mol_type = other DNA
tatgttctggttgatggttg

SEQ ID NO: 20041 - DNA, 20 bp, synthetic construct
  misc_feature 1..20: note = Description of Artificial Sequence: Synthetic oligonucleotide
  misc_feature 1..20: note = Target: FXN; (+) strand; PAM type: NRG; PAM sequence: GGG
  source 1..20: mol_type = other DNA
atgttctggttgatggttga

SEQ ID NO: 20042 - DNA, 20 bp, synthetic construct
  misc_feature 1..20: note = Description of Artificial Sequence: Synthetic oligonucleotide
  misc_feature 1..20: note = Target: FXN; (+) strand; PAM type: NRG; PAM sequence: CAG
  source 1..20: mol_type = other DNA
gatggttgagggcaacaaac

SEQ ID NO: 20043 - DNA, 20 bp, synthetic construct
  misc_feature 1..20: note = Description of Artificial Sequence: Synthetic oligonucleotide
  misc_feature 1..20: note = Target: FXN; (+) strand; PAM type: NRG; PAM sequence: CAG
  source 1..20: mol_type = other DNA
ggttgagggcaacaaaccag

SEQ ID NO: 20044 - DNA, 20 bp, synthetic construct
  misc_feature 1..20: note = Description of Artificial Sequence: Synthetic oligonucleotide
  misc_feature 1..20: note = Target: FXN; (+) strand; PAM type: NRG; PAM sequence: CAG
  source 1..20: mol_type = other DNA
gggcaacaaaccagcagtcc

SEQ ID NO: 20045 - DNA, 20 bp, synthetic construct
  misc_feature 1..20: note = Description of Artificial Sequence: Synthetic oligonucleotide
  misc_feature 1..20: note = Target: FXN; (+) strand; PAM type: NRG; PAM sequence: CAG
  source 1..20: mol_type = other DNA
aaaccagcagtcccagatgc

SEQ ID NO: 20046 - DNA, 20 bp, synthetic construct
  misc_feature 1..20: note = Description of Artificial Sequence: Synthetic oligonucleotide
  misc_feature 1..20: note = Target: FXN; (+) strand; PAM type: NRG; PAM sequence: AAG
  source 1..20: mol_type = other DNA
cagtcccagatgccagcacc

SEQ ID NO: 20047 - DNA, 20 bp, synthetic construct
  misc_feature 1..20: note = Description of Artificial Sequence: Synthetic oligonucleotide
  misc_feature 1..20: note = Target: FXN; (+) strand; PAM type: NRG; PAM sequence: GAG
  source 1..20: mol_type = other DNA
agatgccagcaccaagacct

SEQ ID NO: 20048 - DNA, 20 bp, synthetic construct
  misc_feature 1..20: note = Description of Artificial Sequence: Synthetic oligonucleotide
  misc_feature 1..20: note = Target: FXN; (+) strand; PAM type: NRG; PAM sequence: CAG
  source 1..20: mol_type = other DNA
gccagcaccaagacctgaga

SEQ ID NO: 20049 - DNA, 20 bp, synthetic construct
  misc_feature 1..20: note = Description of Artificial Sequence: Synthetic oligonucleotide
  misc_feature 1..20: note = Target: FXN; (+) strand; PAM type: NRG; PAM sequence: AGG
  source 1..20: mol_type = other DNA
ccagcaccaagacctgagac

SEQ ID NO: 20050 - DNA, 20 bp, synthetic construct
  misc_feature 1..20: note = Description of Artificial Sequence: Synthetic oligonucleotide
  misc_feature 1..20: note = Target: FXN; (+) strand; PAM type: NRG; PAM sequence: GAG
  source 1..20: mol_type = other DNA
gacaggtcacttaactctcc

SEQ ID NO: 20051 - DNA, 20 bp, synthetic construct
  misc_feature 1..20: note = Description of Artificial Sequence: Synthetic oligonucleotide
  misc_feature 1..20: note = Target: FXN; (+) strand; PAM type: NRG; PAM sequence: CAG
  source 1..20: mol_type = other DNA
tcaccaccattctcaccttg

SEQ ID NO: 20052 - DNA, 20 bp, synthetic construct
  misc_feature 1..20: note = Description of Artificial Sequence: Synthetic oligonucleotide
  misc_feature 1..20: note = Target: FXN; (+) strand; PAM type: NRG; PAM sequence: CAG
  source 1..20: mol_type = other DNA
ttctcaccttgcagacctca

SEQ ID NO: 20053 - DNA, 20 bp, synthetic construct
  misc_feature 1..20: note = Description of Artificial Sequence: Synthetic oligonucleotide
  misc_feature 1..20: note = Target: FXN; (+) strand; PAM type: NRG; PAM sequence: AGG
  source 1..20: mol_type = other DNA
tctcaccttgcagacctcac

SEQ ID NO: 20054 - DNA, 20 bp, synthetic construct
  misc_feature 1..20: note = Description of Artificial Sequence: Synthetic oligonucleotide
  misc_feature 1..20: note = Target: FXN; (+) strand; PAM type: NRG; PAM sequence: GGG
  source 1..20: mol_type = other DNA
ctcaccttgcagacctcaca

SEQ ID NO: 20055 - DNA, 20 bp, synthetic construct
  misc_feature 1..20: note = Description of Artificial Sequence: Synthetic oligonucleotide
  misc_feature 1..20: note = Target: FXN; (+) strand; PAM type: NRG; PAM sequence: CAG
  source 1..20: mol_type = other DNA
cttgcagacctcacagggaa

SEQ ID NO: 20056 - DNA, 20 bp, synthetic construct
  misc_feature 1..20: note = Description of Artificial Sequence: Synthetic oligonucleotide
  misc_feature 1..20: note = Target: FXN; (+) strand; PAM type: NRG; PAM sequence: AGG
  source 1..20: mol_type = other DNA
ttgcagacctcacagggaac

SEQ ID NO: 20057 - DNA, 20 bp, synthetic construct
  misc_feature 1..20: note = Description of Artificial Sequence: Synthetic oligonucleotide
  misc_feature 1..20: note = Target: FXN; (+) strand; PAM type: NRG; PAM sequence: GGG
  source 1..20: mol_type = other DNA
tgcagacctcacagggaaca

SEQ ID NO: 20058 - DNA, 20 bp, synthetic construct
  misc_feature 1..20: note = Description of Artificial Sequence: Synthetic oligonucleotide
  misc_feature 1..20: note = Target: FXN; (+) strand; PAM type: NRG; PAM sequence: AAG
  source 1..20: mol_type = other DNA
gacctcacagggaacaggga

SEQ ID NO: 20059 - DNA, 20 bp, synthetic construct
  misc_feature 1..20: note = Description of Artificial Sequence: Synthetic oligonucleotide
  misc_feature 1..20: note = Target: FXN; (+) strand; PAM type: NRG; PAM sequence: GAG
  source 1..20: mol_type = other DNA
gggaacagggaaagctctat

SEQ ID NO: 20060 - DNA, 20 bp, synthetic construct
  misc_feature 1..20: note = Description of Artificial Sequence: Synthetic oligonucleotide
  misc_feature 1..20: note = Target: FXN; (+) strand; PAM type: NRG; PAM sequence: AAG
  source 1..20: mol_type = other DNA
taatcctattctgattctga

SEQ ID NO: 20061 - DNA, 20 bp, synthetic construct
  misc_feature 1..20: note = Description of Artificial Sequence: Synthetic oligonucleotide
  misc_feature 1..20: note = Target: FXN; (+) strand; PAM type: NRG; PAM sequence: AAG
  source 1..20: mol_type = other DNA
ctattctgattctgaaagca

SEQ ID NO: 20062 - DNA, 20 bp, synthetic construct
  misc_feature 1..20: note = Description of Artificial Sequence: Synthetic oligonucleotide
  misc_feature 1..20: note = Target: FXN; (+) strand; PAM type: NRG; PAM sequence: AAG
  source 1..20: mol_type = other DNA
ctcctatttctaaatactaa

SEQ ID NO: 20063 - DNA, 20 bp, synthetic construct
  misc_feature 1..20: note = Description of Artificial Sequence: Synthetic oligonucleotide
  misc_feature 1..20: note = Target: FXN; (+) strand; PAM type: NRG; PAM sequence: TGG
  source 1..20: mol_type = other DNA
tactaaaagacatttcttta

SEQ ID NO: 20064 - DNA, 20 bp, synthetic construct
  misc_feature 1..20: note = Description of Artificial Sequence: Synthetic oligonucleotide
  misc_feature 1..20: note = Target: FXN; (+) strand; PAM type: NRG; PAM sequence: TAG
  source 1..20: mol_type = other DNA
tggtgtattttgtgtacttg

SEQ ID NO: 20065 - DNA, 20 bp, synthetic construct
  misc_feature 1..20: note = Description of Artificial Sequence: Synthetic oligonucleotide
  misc_feature 1..20: note = Target: FXN; (+) strand; PAM type: NRG; PAM sequence: TGG
  source 1..20: mol_type = other DNA
attttgtgtacttgtagaaa

SEQ ID NO: 20066 - DNA, 20 bp, synthetic construct
  misc_feature 1..20: note = Description of Artificial Sequence: Synthetic oligonucleotide
  misc_feature 1..20: note = Target: FXN; (+) strand; PAM type: NRG; PAM sequence: AAG
  source 1..20: mol_type = other DNA
tgtgtacttgtagaaatgga

SEQ ID NO: 20067 - DNA, 20 bp, synthetic construct
  misc_feature 1..20: note = Description of Artificial Sequence: Synthetic oligonucleotide
  misc_feature 1..20: note = Target: FXN; (+) strand; PAM type: NRG; PAM sequence: GAG
  source 1..20: mol_type = other DNA
ttgtagaaatggaaagtgtt

SEQ ID NO: 20068 - DNA, 20 bp, synthetic construct
  misc_feature 1..20: note = Description of Artificial Sequence: Synthetic oligonucleotide
  misc_feature 1..20: note = Target: FXN; (+) strand; PAM type: NRG; PAM sequence: AAG
  source 1..20: mol_type = other DNA
aagtgttgagataaaacatg

SEQ ID NO: 20069 - DNA, 20 bp, synthetic construct
  misc_feature 1..20: note = Description of Artificial Sequence: Synthetic oligonucleotide
  misc_feature 1..20: note = Target: FXN; (+) strand; PAM type: NRG; PAM sequence: AAG
  source 1..20: mol_type = other DNA
aacatgaagcaatgatgaca

SEQ ID NO: 20070 - DNA, 20 bp, synthetic construct
  misc_feature 1..20: note = Description of Artificial Sequence: Synthetic oligonucleotide
  misc_feature 1..20: note = Target: FXN; (+) strand; PAM type: NRG; PAM sequence: TAG
  source 1..20: mol_type = other DNA
tttttttccacctaatcccc

SEQ ID NO: 20071 - DNA, 20 bp, synthetic construct
  misc_feature 1..20: note = Description of Artificial Sequence: Synthetic oligonucleotide
  misc_feature 1..20: note = Target: FXN; (+) strand; PAM type: NRG; PAM sequence: GAG
  source 1..20: mol_type = other DNA
tttttccacctaatccccta

SEQ ID NO: 20072 - DNA, 20 bp, synthetic construct
  misc_feature 1..20: note = Description of Artificial Sequence: Synthetic oligonucleotide
  misc_feature 1..20: note = Target: FXN; (+) strand; PAM type: NRG; PAM sequence: TGG
  source 1..20: mol_type = other DNA
ttccacctaatcccctagag

SEQ ID NO: 20073 - DNA, 20 bp, synthetic construct
  misc_feature 1..20: note = Description of Artificial Sequence: Synthetic oligonucleotide
  misc_feature 1..20: note = Target: FXN; (+) strand; PAM type: NRG; PAM sequence: TGG
  source 1..20: mol_type = other DNA
tggtgtcttaactgtcaaac

SEQ ID NO: 20074 - DNA, 20 bp, synthetic construct
  misc_feature 1..20: note = Description of Artificial Sequence: Synthetic oligonucleotide
  misc_feature 1..20: note = Target: FXN; (+) strand; PAM type: NRG; PAM sequence: GGG
  source 1..20: mol_type = other DNA
ggtgtcttaactgtcaaact

SEQ ID NO: 20075 - DNA, 20 bp, synthetic construct
  misc_feature 1..20: note = Description of Artificial Sequence: Synthetic oligonucleotide
  misc_feature 1..20: note = Target: FXN; (+) strand; PAM type: NRG; PAM sequence: TGG
  source 1..20: mol_type = other DNA
gtcttaactgtcaaactggg

SEQ ID NO: 20076 - DNA, 20 bp, synthetic construct
  misc_feature 1..20: note = Description of Artificial Sequence: Synthetic oligonucleotide
  misc_feature 1..20: note = Target: FXN; (+) strand; PAM type: NRG; PAM sequence: GAG
  source 1..20: mol_type = other DNA
cttaactgtcaaactgggtg

SEQ ID NO: 20077 - DNA, 20 bp, synthetic construct
  misc_feature 1..20: note = Description of Artificial Sequence: Synthetic oligonucleotide
  misc_feature 1..20: note = Target: FXN; (+) strand; PAM type: NRG; PAM sequence: TAG
  source 1..20: mol_type = other DNA
tgtcaaactgggtggagatc

SEQ ID NO: 20078 - DNA, 20 bp, synthetic construct
  misc_feature 1..20: note = Description of Artificial Sequence: Synthetic oligonucleotide
  misc_feature 1..20: note = Target: FXN; (+) strand; PAM type: NRG; PAM sequence: AGG
  source 1..20: mol_type = other DNA
gtcaaactgggtggagatct

SEQ ID NO: 20079 - DNA, 20 bp, synthetic construct
  misc_feature 1..20: note = Description of Artificial Sequence: Synthetic oligonucleotide
  misc_feature 1..20: note = Target: FXN; (+) strand; PAM type: NRG; PAM sequence: AAG
  source 1..20: mol_type = other DNA
taggaacctatgtgatcaac

SEQ ID NO: 20080 - DNA, 20 bp, synthetic construct
  misc_feature 1..20: note = Description of Artificial Sequence: Synthetic oligonucleotide
  misc_feature 1..20: note = Target: FXN; (+) strand; PAM type: NRG; PAM sequence: CAG
  source 1..20: mol_type = other DNA
gaacctatgtgatcaacaag

SEQ ID NO: 20081 - DNA, 20 bp, synthetic construct
  misc_feature 1..20: note = Description of Artificial Sequence: Synthetic oligonucleotide
  misc_feature 1..20: note = Target: FXN; (+) strand; PAM type: NRG; PAM sequence: AAG
  source 1..20: mol_type = other DNA
tcaacaagcagacgccaaac

SEQ ID NO: 20082 - DNA, 20 bp, synthetic construct
  misc_feature 1..20: note = Description of Artificial Sequence: Synthetic oligonucleotide
  misc_feature 1..20: note = Target: FXN; (+) strand; PAM type: NRG; PAM sequence: TGG
  source 1..20: mol_type = other DNA
agacgccaaacaagcaaatc

SEQ ID NO: 20083 - DNA, 20 bp, synthetic construct
  misc_feature 1..20: note = Description of Artificial Sequence: Synthetic oligonucleotide
  misc_feature 1..20: note = Target: FXN; (+) strand; PAM type: NRG; PAM sequence: CAG
  source 1..20: mol_type = other DNA
atctggctatcttctccatc

SEQ ID NO: 20084 - DNA, 20 bp, synthetic construct
  misc_feature 1..20: note = Description of Artificial Sequence: Synthetic oligonucleotide
  misc_feature 1..20: note = Target: FXN; (+) strand; PAM type: NRG; PAM sequence: AGG
  source 1..20: mol_type = other DNA
tctggctatcttctccatcc

SEQ ID NO: 20085 - DNA, 20 bp, synthetic construct
  misc_feature 1..20: note = Description of Artificial Sequence: Synthetic oligonucleotide
  misc_feature 1..20: note = Target: FXN; (+) strand; PAM type: NRG; PAM sequence: TAG
  source 1..20: mol_type = other DNA
atcttctccatccaggtatg

SEQ ID NO: 20086 - DNA, 20 bp, synthetic construct
  misc_feature 1..20: note = Description of Artificial Sequence: Synthetic oligonucleotide
  misc_feature 1..20: note = Target: FXN; (+) strand; PAM type: NRG; PAM sequence: AGG
  source 1..20: mol_type = other DNA
tcttctccatccaggtatgt

SEQ ID NO: 20087 - DNA, 20 bp, synthetic construct
  misc_feature 1..20: note = Description of Artificial Sequence: Synthetic oligonucleotide
  misc_feature 1..20: note = Target: FXN; (+) strand; PAM type: NRG; PAM sequence: CAG
  source 1..20: mol_type = other DNA
tccaggtatgtaggtatgtt

SEQ ID NO: 20088 - DNA, 20 bp, synthetic construct
  misc_feature 1..20: note = Description of Artificial Sequence: Synthetic oligonucleotide
  misc_feature 1..20: note = Target: FXN; (+) strand; PAM type: NRG; PAM sequence: AAG
  source 1..20: mol_type = other DNA
aggtatgtaggtatgttcag

SEQ ID NO: 20089 - DNA, 20 bp, synthetic construct
  misc_feature 1..20: note = Description of Artificial Sequence: Synthetic oligonucleotide
  misc_feature 1..20: note = Target: FXN; (+) strand; PAM type: NRG; PAM sequence: AAG
  source 1..20: mol_type = other DNA
gtcaacatatgtaattctta

SEQ ID NO: 20090 - DNA, 20 bp, synthetic construct
  misc_feature 1..20: note = Description of Artificial Sequence: Synthetic oligonucleotide
  misc_feature 1..20: note = Target: FXN; (+) strand; PAM type: NRG; PAM sequence: TGG
  source 1..20: mol_type = other DNA
acttccgaaatgtgacattg

SEQ ID NO: 20091 - DNA, 20 bp, synthetic construct
  misc_feature 1..20: note = Description of Artificial Sequence: Synthetic oligonucleotide
  misc_feature 1..20: note = Target: FXN; (+) strand; PAM type: NRG; PAM sequence: AAG
  source 1..20: mol_type = other DNA
tgtgacattgtggaccattt

SEQ ID NO: 20092 - DNA, 20 bp, synthetic construct
  misc_feature 1..20: note = Description of Artificial Sequence: Synthetic oligonucleotide
  misc_feature 1..20: note = Target: FXN; (+) strand; PAM type: NRG; PAM sequence: CGG
  source 1..20: mol_type = other DNA
gtggaccatttaagaaatgt

SEQ ID NO: 20093 - DNA, 20 bp, synthetic construct
  misc_feature 1..20: note = Description of Artificial Sequence: Synthetic oligonucleotide
  misc_feature 1..20: note = Target: FXN; (+) strand; PAM type: NRG; PAM sequence: GAG
  source 1..20: mol_type = other DNA
ccatttaagaaatgtcggct

SEQ ID NO: 20094 - DNA, 20 bp, synthetic construct
  misc_feature 1..20: note = Description of Artificial Sequence: Synthetic oligonucleotide
  misc_feature 1..20: note = Target: FXN; (+) strand; PAM type: NRG; PAM sequence: CAG
  source 1..20: mol_type = other DNA
taagaaatgtcggctgagca

SEQ ID NO: 20095 - DNA, 20 bp, synthetic construct
  misc_feature 1..20: note = Description of Artificial Sequence: Synthetic oligonucleotide
  misc_feature 1..20: note = Target: FXN; (+) strand; PAM type: NRG; PAM sequence: TGG
  source 1..20: mol_type = other DNA
gaaatgtcggctgagcacag

SEQ ID NO: 20096 - DNA, 20 bp, synthetic construct
  misc_feature 1..20: note = Description of Artificial Sequence: Synthetic oligonucleotide
  misc_feature 1..20: note = Target: FXN; (+) strand; PAM type: NRG; PAM sequence: GAG
  source 1..20: mol_type = other DNA
acctgtaatcccaacacttt

SEQ ID NO: 20097 - DNA, 20 bp, synthetic construct
  misc_feature 1..20: note = Description of Artificial Sequence: Synthetic oligonucleotide
  misc_feature 1..20: note = Target: FXN; (+) strand; PAM type: NRG; PAM sequence: GAG
  source 1..20: mol_type = other DNA
ctgtaatcccaacactttga

SEQ ID NO: 20098 - DNA, 20 bp, synthetic construct
  misc_feature 1..20: note = Description of Artificial Sequence: Synthetic oligonucleotide
  misc_feature 1..20: note = Target: FXN; (+) strand; PAM type: NRG; PAM sequence: AGG
  source 1..20: mol_type = other DNA
tgtaatcccaacactttgag

SEQ ID NO: 20099 - DNA, 20 bp, synthetic construct
  misc_feature 1..20: note = Description of Artificial Sequence: Synthetic oligonucleotide
  misc_feature 1..20: note = Target: FXN; (+) strand; PAM type: NRG; PAM sequence: GAG
  source 1..20: mol_type = other DNA
tcccaacactttgagaggct

SEQ ID NO: 20100 - DNA, 20 bp, synthetic construct
  misc_feature 1..20: note = Description of Artificial Sequence: Synthetic oligonucleotide
  misc_feature 1..20: note = Target: FXN; (+) strand; PAM type: NRG; PAM sequence: AGG
  source 1..20: mol_type = other DNA
cccaacactttgagaggctg

SEQ ID NO: 20101 - DNA, 20 bp, synthetic construct
  misc_feature 1..20: note = Description of Artificial Sequence: Synthetic oligonucleotide
  misc_feature 1..20: note = Target: FXN; (+) strand; PAM type: NRG; PAM sequence: TAG
  source 1..20: mol_type = other DNA
aacactttgagaggctgagg

SEQ ID NO: 20102 - DNA, 20 bp, synthetic construct
  misc_feature 1..20: note = Description of Artificial Sequence: Synthetic oligonucleotide
  misc_feature 1..20: note = Target: FXN; (+) strand; PAM type: NRG; PAM sequence: AGG
  source 1..20: mol_type = other DNA
acactttgagaggctgaggt

SEQ ID NO: 20103 - DNA, 20 bp, synthetic construct
  misc_feature 1..20: note = Description of Artificial Sequence: Synthetic oligonucleotide
  misc_feature 1..20: note = Target: FXN; (+) strand; PAM type: NRG; PAM sequence: GAG
  source 1..20: mol_type = other DNA
actttgagaggctgaggtag

SEQ ID NO: 20104 - DNA, 20 bp, synthetic construct
  misc_feature 1..20: note = Description of Artificial Sequence: Synthetic oligonucleotide
  misc_feature 1..20: note = Target: FXN; (+) strand; PAM type: NRG; PAM sequence: AGG
  source 1..20: mol_type = other DNA
ctttgagaggctgaggtagg

SEQ ID NO: 20105 - DNA, 20 bp, synthetic construct
  misc_feature 1..20: note = Description of Artificial Sequence: Synthetic oligonucleotide
  misc_feature 1..20: note = Target: FXN; (+) strand; PAM type: NRG; PAM sequence: GAG
  source 1..20: mol_type = other DNA
ctgaggtaggaggatcactt

SEQ ID NO: 20106 - DNA, 20 bp, synthetic construct
  misc_feature 1..20: note = Description of Artificial Sequence: Synthetic oligonucleotide
  misc_feature 1..20: note = Target: FXN; (+) strand; PAM type: NRG; PAM sequence: AGG
  source 1..20: mol_type = other DNA
tgaggtaggaggatcacttg

SEQ ID NO: 20107 - DNA, 20 bp, synthetic construct
  misc_feature 1..20: note = Description of Artificial Sequence: Synthetic oligonucleotide
  misc_feature 1..20: note = Target: FXN; (+) strand; PAM type: NRG; PAM sequence: CAG
  source 1..20: mol_type = other DNA
gtaggaggatcacttgagga

SEQ ID NO: 20108 - DNA, 20 bp, synthetic construct
  misc_feature 1..20: note = Description of Artificial Sequence: Synthetic oligonucleotide
  misc_feature 1..20: note = Target: FXN; (+) strand; PAM type: NRG; PAM sequence: AGG
  source 1..20: mol_type = other DNA
taggaggatcacttgaggac

SEQ ID NO: 20109 - DNA, 20 bp, synthetic construct
  misc_feature 1..20: note = Description of Artificial Sequence: Synthetic oligonucleotide
  misc_feature 1..20: note = Target: FXN; (+) strand; PAM type: NRG; PAM sequence: GAG
  source 1..20: mol_type = other DNA
ggaggatcacttgaggacag

SEQ ID NO: 20110 - DNA, 20 bp, synthetic construct
  misc_feature 1..20: note = Description of Artificial Sequence: Synthetic oligonucleotide
  misc_feature 1..20: note = Target: FXN; (+) strand; PAM type: NRG; PAM sequence: CAG
  source 1..20: mol_type = other DNA
atcacttgaggacaggagtt

SEQ ID NO: 20111 - DNA, 20 bp, synthetic construct
  misc_feature 1..20: note = Description of Artificial Sequence: Synthetic oligonucleotide
  misc_feature 1..20: note = Target: FXN; (+) strand; PAM type: NRG; PAM sequence: TGG
  source 1..20: mol_type = other DNA
acaggagttcagaaccatcc

SEQ ID NO: 20112 - DNA, 20 bp, synthetic construct
  misc_feature 1..20: note = Description of Artificial Sequence: Synthetic oligonucleotide
  misc_feature 1..20: note = Target: FXN; (+) strand; PAM type: NRG; PAM sequence: GGG
  source 1..20: mol_type = other DNA
caggagttcagaaccatcct

SEQ ID NO: 20113 - DNA, 20 bp, synthetic construct
  misc_feature 1..20: note = Description of Artificial Sequence: Synthetic oligonucleotide
  misc_feature 1..20: note = Target: FXN; (+) strand; PAM type: NRG; PAM sequence: TAG
  source 1..20: mol_type = other DNA
cagaaccatcctgggcaaca

SEQ ID NO: 20114 - DNA, 20 bp, synthetic construct
  misc_feature 1..20: note = Description of Artificial Sequence: Synthetic oligonucleotide
  misc_feature 1..20: note = Target: FXN; (+) strand; PAM type: NRG; PAM sequence: GAG
  source 1..20: mol_type = other DNA
accatcctgggcaacatagt

SEQ ID NO: 20115 - DNA, 20 bp, synthetic construct
  misc_feature 1..20: note = Description of Artificial Sequence: Synthetic oligonucleotide
  misc_feature 1..20: note = Target: FXN; (+) strand; PAM type: NRG; PAM sequence: AAG
  source 1..20: mol_type = other DNA
agtgagtccctgtctctgta

SEQ ID NO: 20116 - DNA, 20 bp, synthetic construct
  misc_feature 1..20: note = Description of Artificial Sequence: Synthetic oligonucleotide
  misc_feature 1..20: note = Target: FXN; (+) strand; PAM type: NRG; PAM sequence: AAG
  source 1..20: mol_type = other DNA
ctgtaaagaaaataaaaata

SEQ ID NO: 20117 - DNA, 20 bp, synthetic construct
  misc_feature 1..20: note = Description of Artificial Sequence: Synthetic oligonucleotide
  misc_feature 1..20: note = Target: FXN; (+) strand; PAM type: NRG; PAM sequence: CAG
  source 1..20: mol_type = other DNA
agaaaataaaaataaagtca

SEQ ID NO: 20118 - DNA, 20 bp, synthetic construct
  misc_feature 1..20: note = Description of Artificial Sequence: Synthetic oligonucleotide
  misc_feature 1..20: note = Target: FXN; (+) strand; PAM type: NRG; PAM sequence: TGG
  source 1..20: mol_type = other DNA
aataaaaataaagtcacagc

SEQ ID NO: 20119 - DNA, 20 bp, synthetic construct
  misc_feature 1..20: note = Description of Artificial Sequence: Synthetic oligonucleotide
  misc_feature 1..20: note = Target: FXN; (+) strand; PAM type: NRG; PAM sequence: GGG
  source 1..20: mol_type = other DNA
ataaaaataaagtcacagct

SEQ ID NO: 20120 - DNA, 20 bp, synthetic construct
  misc_feature 1..20: note = Description of Artificial Sequence: Synthetic oligonucleotide
  misc_feature 1..20: note = Target: FXN; (+) strand; PAM type: NRG; PAM sequence: CAG
  source 1..20: mol_type = other DNA
aataaagtcacagctgggtg

SEQ ID NO: 20121 - DNA, 20 bp, synthetic construct
  misc_feature 1..20: note = Description of Artificial Sequence: Synthetic oligonucleotide
  misc_feature 1..20: note = Target: FXN; (+) strand; PAM type: NRG; PAM sequence: AGG
  source 1..20: mol_type = other DNA
ataaagtcacagctgggtgc

SEQ ID NO: 20122 - DNA, 20 bp, synthetic construct
  misc_feature 1..20: note = Description of Artificial Sequence: Synthetic oligonucleotide
  misc_feature 1..20: note = Target: FXN; (+) strand; PAM type: NRG; PAM sequence: CAG
  source 1..20: mol_type = other DNA
caggcttacacctgtaatcc

SEQ ID NO: 20123 - DNA, 20 bp, synthetic construct
  misc_feature 1..20: note = Description of Artificial Sequence: Synthetic oligonucleotide
  misc_feature 1..20: note = Target: FXN; (+) strand; PAM type: NRG; PAM sequence: TGG
  source 1..20: mol_type = other DNA
cacctgtaatcccagcactt

SEQ ID NO: 20124 - DNA, 20 bp, synthetic construct
  misc_feature 1..20: note = Description of Artificial Sequence: Synthetic oligonucleotide
  misc_feature 1..20: note = Target: FXN; (+) strand; PAM type: NRG; PAM sequence: GGG
  source 1..20: mol_type = other DNA
acctgtaatcccagcacttt

SEQ ID NO: 20125 - DNA, 20 bp, synthetic construct
  misc_feature 1..20: note = Description of Artificial Sequence: Synthetic oligonucleotide
  misc_feature 1..20: note = Target: FXN; (+) strand; PAM type: NRG; PAM sequence: GAG
  source 1..20: mol_type = other DNA
ctgtaatcccagcactttgg

SEQ ID NO: 20126 - DNA, 20 bp, synthetic construct
  misc_feature 1..20: note = Description of Artificial Sequence: Synthetic oligonucleotide
  misc_feature 1..20: note = Target: FXN; (+) strand; PAM type: NRG; PAM sequence: AGG
  source 1..20: mol_type = other DNA
tgtaatcccagcactttggg

SEQ ID NO: 20127 - DNA, 20 bp, synthetic construct
  misc_feature 1..20: note = Description of Artificial Sequence: Synthetic oligonucleotide
  misc_feature 1..20: note = Target: FXN; (+) strand; PAM type: NRG; PAM sequence: AAG
  source 1..20: mol_type = other DNA
tcccagcactttgggaggcc

SEQ ID NO: 20128 - DNA, 20 bp, synthetic construct
  misc_feature 1..20: note = Description of Artificial Sequence: Synthetic oligonucleotide
  misc_feature 1..20: note = Target: FXN; (+) strand; PAM type: NRG; PAM sequence: AGG
  source 1..20: mol_type = other DNA
cccagcactttgggaggcca

SEQ ID NO: 20129 - DNA, 20 bp, synthetic construct
  misc_feature 1..20: note = Description of Artificial Sequence: Synthetic oligonucleotide
  misc_feature 1..20: note = Target: FXN; (+) strand; PAM type: NRG; PAM sequence: TGG
  source 1..20: mol_type = other DNA
ctttgggaggccaaggcctg

SEQ ID NO: 20130 - DNA, 20 bp, synthetic construct
  misc_feature 1..20: note = Description of Artificial Sequence: Synthetic oligonucleotide
  misc_feature 1..20: note = Target: FXN; (+) strand; PAM type: NRG; PAM sequence: GAG
  source 1..20: mol_type = other DNA
ccaaggcctgtggatcactt

SEQ ID NO: 20131 - DNA, 20 bp, synthetic construct
  misc_feature 1..20: note = Description of Artificial Sequence: Synthetic oligonucleotide
  misc_feature 1..20: note = Target: FXN; (+) strand; PAM type: NRG; PAM sequence: CAG
  source 1..20: mol_type = other DNA
gcctgtggatcacttgagct

SEQ ID NO: 20132 - DNA, 20 bp, synthetic construct
  misc_feature 1..20: note = Description of Artificial Sequence: Synthetic oligonucleotide
  misc_feature 1..20: note = Target: FXN; (+) strand; PAM type: NRG; PAM sequence: AGG
  source 1..20: mol_type = other DNA
cctgtggatcacttgagctc

SEQ ID NO: 20133 - DNA, 20 bp, synthetic construct
  misc_feature 1..20: note = Description of Artificial Sequence: Synthetic oligonucleotide
  misc_feature 1..20: note = Target: FXN; (+) strand; PAM type: NRG; PAM sequence: GAG
  source 1..20: mol_type = other DNA
tgtggatcacttgagctcag

SEQ ID NO: 20134 - DNA, 20 bp, synthetic construct
  misc_feature 1..20: note = Description of Artificial Sequence: Synthetic oligonucleotide
  misc_feature 1..20: note = Target: FXN; (+) strand; PAM type: NRG; PAM sequence: GAG
  source 1..20: mol_type = other DNA
tcacttgagctcaggagttt

SEQ ID NO: 20135 - DNA, 20 bp, synthetic construct
  misc_feature 1..20: note = Description of Artificial Sequence: Synthetic oligonucleotide
  misc_feature 1..20: note = Target: FXN; (+) strand; PAM type: NRG; PAM sequence: CAG
  source 1..20: mol_type = other DNA
tgagctcaggagtttgagac

SEQ ID NO: 20136 - DNA, 20 bp, synthetic construct
  misc_feature 1..20: note = Description of Artificial Sequence: Synthetic oligonucleotide
  misc_feature 1..20: note = Target: FXN; (+) strand; PAM type: NRG; PAM sequence: TGG
  source 1..20: mol_type = other DNA
tcaggagtttgagaccagcc

SEQ ID NO: 20137 - DNA, 20 bp, synthetic construct
  misc_feature 1..20: note = Description of Artificial Sequence: Synthetic oligonucleotide
  misc_feature 1..20: note = Target: FXN; (+) strand; PAM type: NRG; PAM sequence: GGG
  source 1..20: mol_type = other DNA
caggagtttgagaccagcct

SEQ ID NO: 20138 - DNA, 20 bp, synthetic construct
  misc_feature 1..20: note = Description of Artificial Sequence: Synthetic oligonucleotide
  misc_feature 1..20: note = Target: FXN; (+) strand; PAM type: NRG; PAM sequence: AAG
  source 1..20: mol_type = other DNA
ccagcctgggcaatgtcaca

SEQ ID NO: 20139 - DNA, 20 bp, synthetic construct
  misc_feature 1..20: note = Description of Artificial Sequence: Synthetic oligonucleotide
  misc_feature 1..20: note = Target: FXN; (+) strand; PAM type: NRG; PAM sequence: TAG
  source 1..20: mol_type = other DNA
tctactaaaaatataaaaat

SEQ ID NO: 20140 - DNA, 20 bp, synthetic construct
  misc_feature 1..20: note = Description of Artificial Sequence: Synthetic oligonucleotide
  misc_feature 1..20: note = Target: FXN; (+) strand; PAM type: NRG; PAM sequence: CAG
  source 1..20: mol_type = other DNA
ctaaaaatataaaaattagc

SEQ ID NO: 20141 - DNA, 20 bp, synthetic construct
  misc_feature 1..20: note = Description of Artificial Sequence: Synthetic oligonucleotide
  misc_feature 1..20: note = Target: FXN; (+) strand; PAM type: NRG; PAM sequence: AGG
  source 1..20: mol_type = other DNA
taaaaatataaaaattagcc

SEQ ID NO: 20142 - DNA, 20 bp, synthetic construct
  misc_feature 1..20: note = Description of Artificial Sequence: Synthetic oligonucleotide
  misc_feature 1..20: note = Target: FXN; (+) strand; PAM type: NRG; PAM sequence: TGG
  source 1..20: mol_type = other DNA
atataaaaattagccaggtg

SEQ ID NO: 20143 - DNA, 20 bp, synthetic construct
  misc_feature 1..20: note = Description of Artificial Sequence: Synthetic oligonucleotide
  misc_feature 1..20: note = Target: FXN; (+) strand; PAM type: NRG; PAM sequence: TGG
  source 1..20: mol_type = other DNA
taaaaattagccaggtgtgg

SEQ ID NO: 20144 - DNA, 20 bp, synthetic construct
  misc_feature 1..20: note = Description of Artificial Sequence: Synthetic oligonucleotide
  misc_feature 1..20: note = Target: FXN; (+) strand; PAM type: NRG; PAM sequence: TAG
  source 1..20: mol_type = other DNA
ggtgtggtggcacacgccta

SEQ ID NO: 20145 - DNA, 20 bp, synthetic construct
  misc_feature 1..20: note = Description of Artificial Sequence: Synthetic oligonucleotide
  misc_feature 1..20: note = Target: FXN; (+) strand; PAM type: NRG; PAM sequence: TGG
  source 1..20: mol_type = other DNA
cgcctatagtcccaactact

SEQ ID NO: 20146 - DNA, 20 bp, synthetic construct
  misc_feature 1..20: note = Description of Artificial Sequence: Synthetic oligonucleotide
  misc_feature 1..20: note = Target: FXN; (+) strand; PAM type: NRG; PAM sequence: AAG
  source 1..20: mol_type = other DNA
ctatagtcccaactacttgg

SEQ ID NO: 20147 - DNA, 20 bp, synthetic construct
  misc_feature 1..20: note = Description of Artificial Sequence: Synthetic oligonucleotide
  misc_feature 1..20: note = Target: FXN; (+) strand; PAM type: NRG; PAM sequence: AGG
  source 1..20: mol_type = other DNA
tatagtcccaactacttgga

SEQ ID NO: 20148 - DNA, 20 bp, synthetic construct
  misc_feature 1..20: note = Description of Artificial Sequence: Synthetic oligonucleotide
  misc_feature 1..20: note = Target: FXN; (+) strand; PAM type: NRG; PAM sequence: GAG
  source 1..20: mol_type = other DNA
tcccaactacttggaaggct

SEQ ID NO: 20149 - DNA, 20 bp, synthetic construct
  misc_feature 1..20: note = Description of Artificial Sequence: Synthetic oligonucleotide
  misc_feature 1..20: note = Target: FXN; (+) strand; PAM type: NRG; PAM sequence: AGG
  source 1..20: mol_type = other DNA
cccaactacttggaaggctg

SEQ ID NO: 20150 - DNA, 20 bp, synthetic construct
  misc_feature 1..20: note = Description of Artificial Sequence: Synthetic oligonucleotide
  misc_feature 1..20: note = Target: FXN; (+) strand; PAM type: NRG; PAM sequence: GAG
  source 1..20: mol_type = other DNA
ctacttggaaggctgaggtt

SEQ ID NO: 20151 - DNA, 20 bp, synthetic construct
  misc_feature 1..20: note = Description of Artificial Sequence: Synthetic oligonucleotide
  misc_feature 1..20: note = Target: FXN; (+) strand; PAM type: NRG; PAM sequence: CAG
  source 1..20: mol_type = other DNA
ggaaggctgaggttgagcct

SEQ ID NO: 20152 - DNA, 20 bp, synthetic construct
  misc_feature 1..20: note = Description of Artificial Sequence: Synthetic oligonucleotide
  misc_feature 1..20: note = Target: FXN; (+) strand; PAM type: NRG; PAM sequence: GAG
  source 1..20: mol_type = other DNA
ctgaggttgagcctcagcct

SEQ ID NO: 20153 - DNA, 20 bp, synthetic construct
  misc_feature 1..20: note = Description of Artificial Sequence: Synthetic oligonucleotide
  misc_feature 1..20: note = Target: FXN; (+) strand; PAM type: NRG; PAM sequence: CAG
  source 1..20: mol_type = other DNA
gttgagcctcagcctgagcc

SEQ ID NO: 20154 - DNA, 20 bp, synthetic construct
  misc_feature 1..20: note = Description of Artificial Sequence: Synthetic oligonucleotide
  misc_feature 1..20: note = Target: FXN; (+) strand; PAM type: NRG; PAM sequence: AGG
  source 1..20: mol_type = other DNA
ttgagcctcagcctgagccc

SEQ ID NO: 20155 - DNA, 20 bp, synthetic construct
  misc_feature 1..20: note = Description of Artificial Sequence: Synthetic oligonucleotide
  misc_feature 1..20: note = Target: FXN; (+) strand; PAM type: NRG; PAM sequence: GAG
  source 1..20: mol_type = other DNA
gagcctcagcctgagcccag

SEQ ID NO: 20156 - DNA, 20 bp, synthetic construct
  misc_feature 1..20: note = Description of Artificial Sequence: Synthetic oligonucleotide
  misc_feature 1..20: note = Target: FXN; (+) strand; PAM type: NRG; PAM sequence: AGG
  source 1..20: mol_type = other DNA
agcctcagcctgagcccagg

SEQ ID NO: 20157 - DNA, 20 bp, synthetic construct
  misc_feature 1..20: note = Description of Artificial Sequence: Synthetic oligonucleotide
  misc_feature 1..20: note = Target: FXN; (+) strand; PAM type: NRG; PAM sequence: TGG
  source 1..20: mol_type = other DNA
ctcagcctgagcccaggagg

SEQ ID NO: 20158 - DNA, 20 bp, synthetic construct
  misc_feature 1..20: note = Description of Artificial Sequence: Synthetic oligonucleotide
  misc_feature 1..20: note = Target: FXN; (+) strand; PAM type: NRG; PAM sequence: GAG
  source 1..20: mol_type = other DNA
cagcctgagcccaggaggtg

SEQ ID NO: 20159 - DNA, 20 bp, synthetic construct
  misc_feature 1..20: note = Description of Artificial Sequence: Synthetic oligonucleotide
  misc_feature 1..20: note = Target: FXN; (+) strand; PAM type: NRG; PAM sequence: AGG
  source 1..20: mol_type = other DNA
agcctgagcccaggaggtgg

SEQ ID NO: 20160 - DNA, 20 bp, synthetic construct
  misc_feature 1..20: note = Description of Artificial Sequence: Synthetic oligonucleotide
  misc_feature 1..20: note = Target: FXN; (+) strand; PAM type: NRG; PAM sequence: CAG
  source 1..20: mol_type = other DNA
agcccaggaggtggaggttg

SEQ ID NO: 20161 - DNA, 20 bp, synthetic construct
  misc_feature 1..20: note = Description of Artificial Sequence: Synthetic oligonucleotide
  misc_feature 1..20: note = Target: FXN; (+) strand; PAM type: NRG; PAM sequence: GAG
  source 1..20: mol_type = other DNA
caggaggtggaggttgcagt

SEQ ID NO: 20162 - DNA, 20 bp, synthetic construct
  misc_feature 1..20: note = Description of Artificial Sequence: Synthetic oligonucleotide
  misc_feature 1..20: note = Target: FXN; (+) strand; PAM type: NRG; PAM sequence: AAG
  source 1..20: mol_type = other DNA
ggtggaggttgcagtgagcc

SEQ ID NO: 20163 - DNA, 20 bp, synthetic construct
  misc_feature 1..20: note = Description of Artificial Sequence: Synthetic oligonucleotide
  misc_feature 1..20: note = Target: FXN; (+) strand; PAM type: NRG; PAM sequence: CAG
  source 1..20: mol_type = other DNA
aagatcgcgccactgcactc

SEQ ID NO: 20164 - DNA, 20 bp, synthetic construct
  misc_feature 1..20: note = Description of Artificial Sequence: Synthetic oligonucleotide
  misc_feature 1..20: note = Target: FXN; (+) strand; PAM type: NRG; PAM sequence: TGG
  source 1..20: mol_type = other DNA
cgcgccactgcactccagcc

SEQ ID NO: 20165 - DNA, 20 bp, synthetic construct
  misc_feature 1..20: note = Description of Artificial Sequence: Synthetic oligonucleotide
  misc_feature 1..20: note = Target: FXN; (+) strand; PAM type: NRG; PAM sequence: GGG
  source 1..20: mol_type = other DNA
gcgccactgcactccagcct

SEQ ID NO: 20166 - DNA, 20 bp, synthetic construct
  misc_feature 1..20: note = Description of Artificial Sequence: Synthetic oligonucleotide
  misc_feature 1..20: note = Target: FXN; (+) strand; PAM type: NRG; PAM sequence: CAG
  source 1..20: mol_type = other DNA
ctgcactccagcctgggcaa

SEQ ID NO: 20167 - DNA, 20 bp, synthetic construct
  misc_feature 1..20: note = Description of Artificial Sequence: Synthetic oligonucleotide
  misc_feature 1..20: note = Target: FXN; (+) strand; PAM type: NRG; PAM sequence: AGG
  source 1..20: mol_type = other DNA
tgcactccagcctgggcaac

SEQ ID NO: 20168 - DNA, 20 bp, synthetic construct
  misc_feature 1..20: note = Description of Artificial Sequence: Synthetic oligonucleotide
  misc_feature 1..20: note = Target: FXN; (+) strand; PAM type: NRG; PAM sequence: GGG
  source 1..20: mol_type = other DNA
gcactccagcctgggcaaca

SEQ ID NO: 20169 - DNA, 20 bp, synthetic construct
  misc_feature 1..20: note = Description of Artificial Sequence: Synthetic oligonucleotide
  misc_feature 1..20: note = Target: FXN; (+) strand; PAM type: NRG; PAM sequence: CAG
  source 1..20: mol_type = other DNA
tccagcctgggcaacagggc

SEQ ID NO: 20170 - DNA, 20 bp, synthetic construct
  misc_feature 1..20: note = Description of Artificial Sequence: Synthetic oligonucleotide
  misc_feature 1..20: note = Target: FXN; (+) strand; PAM type: NRG; PAM sequence: AAG
  source 1..20: mol_type = other DNA
ctgtcccaaaaaaaaaaaaa

SEQ ID NO: 20171 - DNA, 20 bp, synthetic construct
  misc_feature 1..20: note = Description of Artificial Sequence: Synthetic oligonucleotide
  misc_feature 1..20: note = Target: FXN; (+) strand; PAM type: NRG; PAM sequence: TAG
  source 1..20: mol_type = other DNA
aaaaagtcatcgtcttatgt

SEQ ID NO: 20172 - DNA, 20 bp, synthetic construct
  misc_feature 1..20: note = Description of Artificial Sequence: Synthetic oligonucleotide
  misc_feature 1..20: note = Target: FXN; (+) strand; PAM type: NRG; PAM sequence: AAG
  source 1..20: mol_type = other DNA
tcttatgttagcatccttgt

SEQ ID NO: 20173 - DNA, 20 bp, synthetic construct
  misc_feature 1..20: note = Description of Artificial Sequence: Synthetic oligonucleotide
  misc_feature 1..20: note = Target: FXN; (+) strand; PAM type: NRG; PAM sequence: GAG
  source 1..20: mol_type = other DNA
atgttagcatccttgtaagt

SEQ ID NO: 20174 - DNA, 20 bp, synthetic construct
  misc_feature 1..20: note = Description of Artificial Sequence: Synthetic oligonucleotide
  misc_feature 1..20: note = Target: FXN; (+) strand; PAM type: NRG; PAM sequence: CAG
  source 1..20: mol_type = other DNA
gagcctttcctgatattttg

SEQ ID NO: 20175 - DNA, 20 bp, synthetic construct
  misc_feature 1..20: note = Description of Artificial Sequence: Synthetic oligonucleotide
  misc_feature 1..20: note = Target: FXN; (+) strand; PAM type: NRG; PAM sequence: CAG
  source 1..20: mol_type = other DNA
tttgcagcctgtctcattct

SEQ ID NO: 20176 - DNA, 20 bp, synthetic construct
  misc_feature 1..20: note = Description of Artificial Sequence: Synthetic oligonucleotide
  misc_feature 1..20: note = Target: FXN; (+) strand; PAM type: NRG; PAM sequence: TAG
  source 1..20: mol_type = other DNA
gcagcctgtctcattctcag

SEQ ID NO: 20177 - DNA, 20 bp, synthetic construct
  misc_feature 1..20: note = Description of Artificial Sequence: Synthetic oligonucleotide
  misc_feature 1..20: note = Target: FXN; (+) strand; PAM type: NRG; PAM sequence: AAG
  source 1..20: mol_type = other DNA
ctgtctcattctcagtagaa

SEQ ID NO: 20178 - DNA, 20 bp, synthetic construct
  misc_feature 1..20: note = Description of Artificial Sequence: Synthetic oligonucleotide
  misc_feature 1..20: note = Target: FXN; (+) strand; PAM type: NRG; PAM sequence: TAG
  source 1..20: mol_type = other DNA
ctcagtagaaaagtttactc

SEQ ID NO: 20179 - DNA, 20 bp, synthetic construct
  misc_feature 1..20: note = Description of Artificial Sequence: Synthetic oligonucleotide
  misc_feature 1..20: note = Target: FXN; (+) strand; PAM type: NRG; PAM sequence: TGG
  source 1..20: mol_type = other DNA
acttctccctgctgacaatt

SEQ ID NO: 20180 - DNA, 20 bp, synthetic construct
  misc_feature 1..20: note = Description of Artificial Sequence: Synthetic oligonucleotide
  misc_feature 1..20: note = Target: FXN; (+) strand; PAM type: NRG; PAM sequence: AAG
  source 1..20: mol_type = other DNA
gctgacaatttggatactgt

SEQ ID NO: 20181 - DNA, 20 bp, synthetic construct
  misc_feature 1..20: note = Description of Artificial Sequence: Synthetic oligonucleotide
  misc_feature 1..20: note = Target: FXN; (+) strand; PAM type: NRG; PAM sequence: CAG
  source 1..20: mol_type = other DNA
gacaatttggatactgtaag

SEQ ID NO: 20182 - DNA, 20 bp, synthetic construct
  misc_feature 1..20: note = Description of Artificial Sequence: Synthetic oligonucleotide
  misc_feature 1..20: note = Target: FXN; (+) strand; PAM type: NRG; PAM sequence: AGG
  source 1..20: mol_type = other DNA
acaatttggatactgtaagc

SEQ ID NO: 20183 - DNA, 20 bp, synthetic construct
  misc_feature 1..20: note = Description of Artificial Sequence: Synthetic oligonucleotide
  misc_feature 1..20: note = Target: FXN; (+) strand; PAM type: NRG; PAM sequence: CAG
  source 1..20: mol_type = other DNA
tggatactgtaagcaggcat

SEQ ID NO: 20184 - DNA, 20 bp, synthetic construct
  misc_feature 1..20: note = Description of Artificial Sequence: Synthetic oligonucleotide
  misc_feature 1..20: note = Target: FXN; (+) strand; PAM type: NRG; PAM sequence: AGG
  source 1..20: mol_type = other DNA
ggatactgtaagcaggcatc

SEQ ID NO: 20185 - DNA, 20 bp, synthetic construct
  misc_feature 1..20: note = Description of Artificial Sequence: Synthetic oligonucleotide
  misc_feature 1..20: note = Target: FXN; (+) strand; PAM type: NRG; PAM sequence: AAG
  source 1..20: mol_type = other DNA
taagcaggcatcaggatatt

SEQ ID NO: 20186 - DNA, 20 bp, synthetic construct
  misc_feature 1..20: note = Description of Artificial Sequence: Synthetic oligonucleotide
  misc_feature 1..20: note = Target: FXN; (+) strand; PAM type: NRG; PAM sequence: AAG
  source 1..20: mol_type = other DNA
catcaggatattaagatctg

SEQ ID NO: 20187 - DNA, 20 bp, synthetic construct
  misc_feature 1..20: note = Description of Artificial Sequence: Synthetic oligonucleotide
  misc_feature 1..20: note = Target: FXN; (+) strand; PAM type: NRG; PAM sequence: GAG
  source 1..20: mol_type = other DNA
aggatattaagatctgaagt

SEQ ID NO: 20188 - DNA, 20 bp, synthetic construct
  misc_feature 1..20: note = Description of Artificial Sequence: Synthetic oligonucleotide
  misc_feature 1..20: note = Target: FXN; (+) strand; PAM type: NRG; PAM sequence: TAG
  source 1..20: mol_type = other DNA
atattaagatctgaagtgag

SEQ ID NO: 20189 - DNA, 20 bp, synthetic construct
  misc_feature 1..20: note = Description of Artificial Sequence: Synthetic oligonucleotide
  misc_feature 1..20: note = Target: FXN; (+) strand; PAM type: NRG; PAM sequence: CAG
  source 1..20: mol_type = other DNA
gcttataacttttccaaatc

SEQ ID NO: 20190 - DNA, 20 bp, synthetic construct
  misc_feature 1..20: note = Description of Artificial Sequence: Synthetic oligonucleotide
  misc_feature 1..20: note = Target: FXN; (+) strand; PAM type: NRG; PAM sequence: TAG
  source 1..20: mol_type = other DNA
taacttttccaaatccagcc

SEQ ID NO: 20191 - DNA, 20 bp, synthetic construct
  misc_feature 1..20: note = Description of Artificial Sequence: Synthetic oligonucleotide
  misc_feature 1..20: note = Target: FXN; (+) strand; PAM type: NRG; PAM sequence: CAG
  source 1..20: mol_type = other DNA
ttttccaaatccagcctaga

SEQ ID NO: 20192 - DNA, 20 bp, synthetic construct
  misc_feature 1..20: note = Description of Artificial Sequence: Synthetic oligonucleotide
  misc_feature 1..20: note = Target: FXN; (+) strand; PAM type: NRG; PAM sequence: AAG
  source 1..20: mol_type = other DNA
aattattgccctgactttaa

SEQ ID NO: 20193 - DNA, 20 bp, synthetic construct
  misc_feature 1..20: note = Description of Artificial Sequence: Synthetic oligonucleotide
  misc_feature 1..20: note = Target: FXN; (+) strand; PAM type: NRG; PAM sequence: AAG
  source 1..20: mol_type = other DNA
tattgccctgactttaaaag

SEQ ID NO: 20194 - DNA, 20 bp, synthetic construct
  misc_feature 1..20: note = Description of Artificial Sequence: Synthetic oligonucleotide
  misc_feature 1..20: note = Target: FXN; (+) strand; PAM type: NRG; PAM sequence: TAG
  source 1..20: mol_type = other DNA
agaagctacttttgaccttg

SEQ ID NO: 20195 - DNA, 20 bp, synthetic construct
  misc_feature 1..20: note = Description of Artificial Sequence: Synthetic oligonucleotide
  misc_feature 1..20: note = Target: FXN; (+) strand; PAM type: NRG; PAM sequence: AAG
  source 1..20: mol_type = other DNA
tgaccttgtagcgtttgaac

SEQ ID NO: 20196 - DNA, 20 bp, synthetic construct
  misc_feature 1..20: note = Description of Artificial Sequence: Synthetic oligonucleotide
  misc_feature 1..20: note = Target: FXN; (+) strand; PAM type: NRG; PAM sequence: AAG
  source 1..20: mol_type = other DNA
caagttgcactttgtcttca

SEQ ID NO: 20197 - DNA, 20 bp, synthetic construct
  misc_feature 1..20: note = Description of Artificial Sequence: Synthetic oligonucleotide
  misc_feature 1..20: note = Target: FXN; (+) strand; PAM type: NRG; PAM sequence: AAG
  source 1..20: mol_type = other DNA
ttgcactttgtcttcaaagc

SEQ ID NO: 20198 - DNA, 20 bp, synthetic construct
  misc_feature 1..20: note = Description of Artificial Sequence: Synthetic oligonucleotide
  misc_feature 1..20: note = Target: FXN; (+) strand; PAM type: NRG; PAM sequence: AAG
  source 1..20: mol_type = other DNA
tttgtcttcaaagcaagtta

SEQ ID NO: 20199 - DNA, 20 bp, synthetic construct
  misc_feature 1..20: note = Description of Artificial Sequence: Synthetic oligonucleotide
  misc_feature 1..20: note = Target: FXN; (+) strand; PAM type: NRG; PAM sequence: GAG
  source 1..20: mol_type = other DNA
gtttgacctctacttgtttt

SEQ ID NO: 20200 - DNA, 20 bp, synthetic construct
  misc_feature 1..20: note = Description of Artificial Sequence: Synthetic oligonucleotide
  misc_feature 1..20: note = Target: FXN; (+) strand; PAM type: NRG; PAM sequence: CAG
  source 1..20: mol_type = other DNA
tctacttgttttgagcctct

SEQ ID NO: 20201 - DNA, 20 bp, synthetic construct
  misc_feature 1..20: note = Description of Artificial Sequence: Synthetic oligonucleotide
  misc_feature 1..20: note = Target: FXN; (+) strand; PAM type: NRG; PAM sequence: AGG
  source 1..20: mol_type = other DNA
ctacttgttttgagcctctc

SEQ ID NO: 20202 - DNA, 20 bp, synthetic construct
  misc_feature 1..20: note = Description of Artificial Sequence: Synthetic oligonucleotide
  misc_feature 1..20: note = Target: FXN; (+) strand; PAM type: NRG; PAM sequence: AAG
  source 1..20: mol_type = other DNA
tgttttgagcctctcaggta

SEQ ID NO: 20203 - DNA, 20 bp, synthetic construct
  misc_feature 1..20: note = Description of Artificial Sequence: Synthetic oligonucleotide
  misc_feature 1..20: note = Target: FXN; (+) strand; PAM type: NRG; PAM sequence: AGG
  source 1..20: mol_type = other DNA
gttttgagcctctcaggtaa

SEQ ID NO: 20204 - DNA, 20 bp, synthetic construct
  misc_feature 1..20: note = Description of Artificial Sequence: Synthetic oligonucleotide
  misc_feature 1..20: note = Target: FXN; (+) strand; PAM type: NRG; PAM sequence: GGG
  source 1..20: mol_type = other DNA
ttttgagcctctcaggtaaa

SEQ ID NO: 20205 - DNA, 20 bp, synthetic construct
  misc_feature 1..20: note = Description of Artificial Sequence: Synthetic oligonucleotide
  misc_feature 1..20: note = Target: FXN; (+) strand; PAM type: NRG; PAM sequence: CAG
  source 1..20: mol_type = other DNA
ggttatttgaattccctttg

SEQ ID NO: 20206 - DNA, 20 bp, synthetic construct
  misc_feature 1..20: note = Description of Artificial Sequence: Synthetic oligonucleotide
  misc_feature 1..20: note = Target: FXN; (+) strand; PAM type: NRG; PAM sequence: AGG
  source 1..20: mol_type = other DNA
gttatttgaattccctttgc

SEQ ID NO: 20207 - DNA, 20 bp, synthetic construct
  misc_feature 1..20: note = Description of Artificial Sequence: Synthetic oligonucleotide
  misc_feature 1..20: note = Target: FXN; (+) strand; PAM type: NRG; PAM sequence: TGG
  source 1..20: mol_type = other DNA
tttgaattccctttgcaggt

SEQ ID NO: 20208 - DNA, 20 bp, synthetic construct
  misc_feature 1..20: note = Description of Artificial Sequence: Synthetic oligonucleotide
  misc_feature 1..20: note = Target: FXN; (+) strand; PAM type: NRG; PAM sequence: GGG
  source 1..20: mol_type = other DNA
ttgaattccctttgcaggtt

SEQ ID NO: 20209 - DNA, 20 bp, synthetic construct
  misc_feature 1..20: note = Description of Artificial Sequence: Synthetic oligonucleotide
  misc_feature 1..20: note = Target: FXN; (+) strand; PAM type: NRG; PAM sequence: GGG
  source 1..20: mol_type = other DNA
tgaattccctttgcaggttg

SEQ ID NO: 20210 - DNA, 20 bp, synthetic construct
  misc_feature 1..20: note = Description of Artificial Sequence: Synthetic oligonucleotide
  misc_feature 1..20: note = Target: FXN; (+) strand; PAM type: NRG; PAM sequence: TGG
  source 1..20: mol_type = other DNA
ggttggggttgtgtaccctg

SEQ ID NO: 20211 - DNA, 20 bp, synthetic construct
  misc_feature 1..20: note = Description of Artificial Sequence: Synthetic oligonucleotide
  misc_feature 1..20: note = Target: FXN; (+) strand; PAM type: NRG; PAM sequence: GAG
  source 1..20: mol_type = other DNA
ttggggttgtgtaccctgtg

SEQ ID NO: 20212 - DNA, 20 bp, synthetic construct
  misc_feature 1..20: note = Description of Artificial Sequence: Synthetic oligonucleotide
  misc_feature 1..20: note = Target: FXN; (+) strand; PAM type: NRG; PAM sequence: AGG
  source 1..20: mol_type = other DNA
tggggttgtgtaccctgtgg

SEQ ID NO: 20213 - DNA, 20 bp, synthetic construct
  misc_feature 1..20: note = Description of Artificial Sequence: Synthetic oligonucleotide
  misc_feature 1..20: note = Target: FXN; (+) strand; PAM type: NRG; PAM sequence: TGG
  source 1..20: mol_type = other DNA
ggttgtgtaccctgtggagg

SEQ ID NO: 20214 - DNA, 20 bp, synthetic construct
  misc_feature 1..20: note = Description of Artificial Sequence: Synthetic oligonucleotide
  misc_feature 1..20: note = Target: FXN; (+) strand; PAM type: NRG; PAM sequence: TAG
  source 1..20: mol_type = other DNA
tgtgtaccctgtggaggtgg

SEQ ID NO: 20215 - DNA, 20 bp, synthetic construct
  misc_feature 1..20: note = Description of Artificial Sequence: Synthetic oligonucleotide
  misc_feature 1..20: note = Target: FXN; (+) strand; PAM type: NRG; PAM sequence: GAG
  source 1..20: mol_type = other DNA
tgtaccctgtggaggtggta

SEQ ID NO: 20216 - DNA, 20 bp, synthetic construct
  misc_feature 1..20: note = Description of Artificial Sequence: Synthetic oligonucleotide
  misc_feature 1..20: note = Target: FXN; (+) strand; PAM type: NRG; PAM sequence: CAG
  source 1..20: mol_type = other DNA
agtgttatatattgctgctc

SEQ ID NO: 20217 - DNA, 20 bp, synthetic construct
  misc_feature 1..20: note = Description of Artificial Sequence: Synthetic oligonucleotide
  misc_feature 1..20: note = Target: FXN; (+) strand; PAM type: NRG; PAM sequence: AGG
  source 1..20: mol_type = other DNA
gtgttatatattgctgctcc

SEQ ID NO: 20218 - DNA, 20 bp, synthetic construct
  misc_feature 1..20: note = Description of Artificial Sequence: Synthetic oligonucleotide
  misc_feature 1..20: note = Target: FXN; (+) strand; PAM type: NRG; PAM sequence: GGG
  source 1..20: mol_type = other DNA
tgttatatattgctgctcca

SEQ ID NO: 20219 - DNA, 20 bp, synthetic construct
  misc_feature 1..20: note = Description of Artificial Sequence: Synthetic oligonucleotide
  misc_feature 1..20: note = Target: FXN; (+) strand; PAM type: NRG; PAM sequence: TAG
  source 1..20: mol_type = other DNA
ccattgatgtgctttcaatc

SEQ ID NO: 20220 - DNA, 20 bp, synthetic construct
  misc_feature 1..20: note = Description of Artificial Sequence: Synthetic oligonucleotide
  misc_feature 1..20: note = Target: FXN; (+) strand; PAM type: NRG; PAM sequence: GAG
  source 1..20: mol_type = other DNA
attgatgtgctttcaatcta

SEQ ID NO: 20221 - DNA, 20 bp, synthetic construct
  misc_feature 1..20: note = Description of Artificial Sequence: Synthetic oligonucleotide
  misc_feature 1..20: note = Target: FXN; (+) strand; PAM type: NRG; PAM sequence: AGG
  source 1..20: mol_type = other DNA
ttgatgtgctttcaatctag

SEQ ID NO: 20222 - DNA, 20 bp, synthetic construct
  misc_feature 1..20: note = Description of Artificial Sequence: Synthetic oligonucleotide
  misc_feature 1..20: note = Target: FXN; (+) strand; PAM type: NRG; PAM sequence: AAG
  source 1..20: mol_type = other DNA
ctttcaatctagaggaataa

SEQ ID NO: 20223 - DNA, 20 bp, synthetic construct
  misc_feature 1..20: note = Description of Artificial Sequence: Synthetic oligonucleotide
  misc_feature 1..20: note = Target: FXN; (+) strand; PAM type: NRG; PAM sequence: TGG
  source 1..20: mol_type = other DNA
agaggaataaaagattgtgt

SEQ ID NO: 20224 - DNA, 20 bp, synthetic construct
  misc_feature 1..20: note = Description of Artificial Sequence: Synthetic oligonucleotide
  misc_feature 1..20: note = Target: FXN; (+) strand; PAM type: NRG; PAM sequence: GAG
  source 1..20: mol_type = other DNA
aggaataaaagattgtgttg

SEQ ID NO: 20225 - DNA, 20 bp, synthetic construct
  misc_feature 1..20: note = Description of Artificial Sequence: Synthetic oligonucleotide
  misc_feature 1..20: note = Target: FXN; (+) strand; PAM type: NRG; PAM sequence: TGG
  source 1..20: mol_type = other DNA
attgtgttggagacacaatg

SEQ ID NO: 20226 - DNA, 20 bp, synthetic construct
  misc_feature 1..20: note = Description of Artificial Sequence: Synthetic oligonucleotide
  misc_feature 1..20: note = Target: FXN; (+) strand; PAM type: NRG; PAM sequence: TAG
  source 1..20: mol_type = other DNA
gagacacaatgtggcctgca

SEQ ID NO: 20227 - DNA, 20 bp, synthetic construct
  misc_feature 1..20: note = Description of Artificial Sequence: Synthetic oligonucleotide
  misc_feature 1..20: note = Target: FXN; (+) strand; PAM type: NRG; PAM sequence: AAG
  source 1..20: mol_type = other DNA
gtggcctgcatagcatctga

SEQ ID NO: 20228 - DNA, 20 bp, synthetic construct
  misc_feature 1..20: note = Description of Artificial Sequence: Synthetic oligonucleotide
  misc_feature 1..20: note = Target: FXN; (+) strand; PAM type: NRG; PAM sequence: GAG
  source 1..20: mol_type = other DNA
tgcatagcatctgaaagcct

SEQ ID NO: 20229 - DNA, 20 bp, synthetic construct
  misc_feature 1..20: note = Description of Artificial Sequence: Synthetic oligonucleotide
  misc_feature 1..20: note = Target: FXN; (+) strand; PAM type: NRG; PAM sequence: CAG
  source 1..20: mol_type = other DNA
tctgaaagcctgagaacatg

SEQ ID NO: 20230 - DNA, 20 bp, synthetic construct
  misc_feature 1..20: note = Description of Artificial Sequence: Synthetic oligonucleotide
  misc_feature 1..20: note = Target: FXN; (+) strand; PAM type: NRG; PAM sequence: AGG
  source 1..20: mol_type = other DNA
ctgaaagcctgagaacatgc

SEQ ID NO: 20231 - DNA, 20 bp, synthetic construct
  misc_feature 1..20: note = Description of Artificial Sequence: Synthetic oligonucleotide
  misc_feature 1..20: note = Target: FXN; (+) strand; PAM type: NRG; PAM sequence: GGG
  source 1..20: mol_type = other DNA
tgaaagcctgagaacatgca

SEQ ID NO: 20232 - DNA, 20 bp, synthetic construct
  misc_feature 1..20: note = Description of Artificial Sequence: Synthetic oligonucleotide
  misc_feature 1..20: note = Target: FXN; (+) strand; PAM type: NRG; PAM sequence: GAG
  source 1..20: mol_type = other DNA
aaagcctgagaacatgcagg

SEQ ID NO: 20233 - DNA, 20 bp, synthetic construct
  misc_feature 1..20: note = Description of Artificial Sequence: Synthetic oligonucleotide
  misc_feature 1..20: note = Target: FXN; (+) strand; PAM type: NRG; PAM sequence: GAG
  source 1..20: mol_type = other DNA
agcctgagaacatgcaggga

SEQ ID NO: 20234 - DNA, 20 bp, synthetic construct
  misc_feature 1..20: note = Description of Artificial Sequence: Synthetic oligonucleotide
  misc_feature 1..20: note = Target: FXN; (+) strand; PAM type: NRG; PAM sequence: CAG
  source 1..20: mol_type = other DNA
gagagacatccctcatccct

SEQ ID NO: 20235 - DNA, 20 bp, synthetic construct
  misc_feature 1..20: note = Description of Artificial Sequence: Synthetic oligonucleotide
  misc_feature 1..20: note = Target: FXN; (+) strand; PAM type: NRG; PAM sequence: CAG
  source 1..20: mol_type = other DNA
agacatccctcatccctcag

SEQ ID NO: 20236 - DNA, 20 bp, synthetic construct
  misc_feature 1..20: note = Description of Artificial Sequence: Synthetic oligonucleotide
  misc_feature 1..20: note = Target: FXN; (+) strand; PAM type: NRG; PAM sequence: TGG
  source 1..20: mol_type = other DNA
tccctcatccctcagcagcc

SEQ ID NO: 20237 - DNA, 20 bp, synthetic construct
  misc_feature 1..20: note = Description of Artificial Sequence: Synthetic oligonucleotide
  misc_feature 1..20: note = Target: FXN; (+) strand; PAM type: NRG; PAM sequence: AAG
  source 1..20: mol_type = other DNA
cagcagcctggctgctgttg

SEQ ID NO: 20238 - DNA, 20 bp, synthetic construct
  misc_feature 1..20: note = Description of Artificial Sequence: Synthetic oligonucleotide
  misc_feature 1..20: note = Target: FXN; (+) strand; PAM type: NRG; PAM sequence: TGG
  source 1..20: mol_type = other DNA
cagcctggctgctgttgaag

SEQ ID NO: 20239 - DNA, 20 bp, synthetic construct
  misc_feature 1..20: note = Description of Artificial Sequence: Synthetic oligonucleotide
  misc_feature 1..20: note = Target: FXN; (+) strand; PAM type: NRG; PAM sequence: AAG
  source 1..20: mol_type = other DNA
gctgctgttgaagtggttgt

SEQ ID NO: 20240 - DNA, 20 bp, synthetic construct
  misc_feature 1..20: note = Description of Artificial Sequence: Synthetic oligonucleotide
  misc_feature 1..20: note = Target: FXN; (+) strand; PAM type: NRG; PAM sequence: AAG
  source 1..20: mol_type = other DNA
ctgttgaagtggttgtaaga

SEQ ID NO: 20241 - DNA, 20 bp, synthetic construct
  misc_feature 1..20: note = Description of Artificial Sequence: Synthetic oligonucleotide
  misc_feature 1..20: note = Target: FXN; (+) strand; PAM type: NRG; PAM sequence: AAG
  source 1..20: mol_type = other DNA
aagtggttgtaagaaagtaa

SEQ ID NO: 20242 - DNA, 20 bp, synthetic construct
  misc_feature 1..20: note = Description of Artificial Sequence: Synthetic oligonucleotide
  misc_feature 1..20: note = Target: FXN; (+) strand; PAM type: NRG; PAM sequence: GAG
  source 1..20: mol_type = other DNA
gtggttgtaagaaagtaaaa

SEQ ID NO: 20243 - DNA, 20 bp, synthetic construct
  misc_feature 1..20: note = Description of Artificial Sequence: Synthetic oligonucleotide
  misc_feature 1..20: note = Target: FXN; (+) strand; PAM type: NRG; PAM sequence: CAG
  source 1..20: mol_type = other DNA
aaatgcccacaaaacgttct

SEQ ID NO: 20244 - DNA, 20 bp, synthetic construct
  misc_feature 1..20: note = Description of Artificial Sequence: Synthetic oligonucleotide
  misc_feature 1..20: note = Target: FXN; (+) strand; PAM type: NRG; PAM sequence: CAG
  source 1..20: mol_type = other DNA
ccacaaaacgttctcagatc

SEQ ID NO: 20245 - DNA, 20 bp, synthetic construct
  misc_feature 1..20: note = Description of Artificial Sequence: Synthetic oligonucleotide
  misc_feature 1..20: note = Target: FXN; (+) strand; PAM type: NRG; PAM sequence: TAG
  source 1..20: mol_type = other DNA
tctcagatccagtcattcat

SEQ ID NO: 20246 - DNA, 20 bp, synthetic construct
  misc_feature 1..20: note = Description of Artificial Sequence: Synthetic oligonucleotide
  misc_feature 1..20: note = Target: FXN; (+) strand; PAM type: NRG; PAM sequence: AAG
  source 1..20: mol_type = other DNA
gtcattcattagcacttcca

SEQ ID NO: 20247 - DNA, 20 bp, synthetic construct
  misc_feature 1..20: note = Description of Artificial Sequence: Synthetic oligonucleotide
  misc_feature 1..20: note = Target: FXN; (+) strand; PAM type: NRG; PAM sequence: GAG
  source 1..20: mol_type = other DNA
cattcattagcacttccaaa

SEQ ID NO: 20248 - DNA, 20 bp, synthetic construct
  misc_feature 1..20: note = Description of Artificial Sequence: Synthetic oligonucleotide
  misc_feature 1..20: note = Target: FXN; (+) strand; PAM type: NRG; PAM sequence: GAG
  source 1..20: mol_type = other DNA
ttcattagcacttccaaaga

SEQ ID NO: 20249 - DNA, 20 bp, synthetic construct
  misc_feature 1..20: note = Description of Artificial Sequence: Synthetic oligonucleotide
  misc_feature 1..20: note = Target: FXN; (+) strand; PAM type: NRG; PAM sequence: TGG
  source 1..20: mol_type = other DNA
agagcatgttgactgtgaat

SEQ ID NO: 20250 - DNA, 20 bp, synthetic construct
  misc_feature 1..20: note = Description of Artificial Sequence: Synthetic oligonucleotide
  misc_feature 1..20: note = Target: FXN; (+) strand; PAM type: NRG; PAM sequence: GGG
  source 1..20: mol_type = other DNA
gagcatgttgactgtgaatt

SEQ ID NO: 20251 - DNA, 20 bp, synthetic construct
  misc_feature 1..20: note = Description of Artificial Sequence: Synthetic oligonucleotide
  misc_feature 1..20: note = Target: FXN; (+) strand; PAM type: NRG; PAM sequence: AAG
  source 1..20: mol_type = other DNA
atgttgactgtgaattggga

SEQ ID NO: 20252 - DNA, 20 bp, synthetic construct
  misc_feature 1..20: note = Description of Artificial Sequence: Synthetic oligonucleotide
  misc_feature 1..20: note = Target: FXN; (+) strand; PAM type: NRG; PAM sequence: AGG
  source 1..20: mol_type = other DNA
tgttgactgtgaattgggaa

SEQ ID NO: 20253 - DNA, 20 bp, synthetic construct
  misc_feature 1..20: note = Description of Artificial Sequence: Synthetic oligonucleotide
  misc_feature 1..20: note = Target: FXN; (+) strand; PAM type: NRG; PAM sequence: GGG
  source 1..20: mol_type = other DNA
gttgactgtgaattgggaaa

SEQ ID NO: 20254 - DNA, 20 bp, synthetic construct
  misc_feature 1..20: note = Description of Artificial Sequence: Synthetic oligonucleotide
  misc_feature 1..20: note = Target: FXN; (+) strand; PAM type: NRG; PAM sequence: CAG
  source 1..20: mol_type = other DNA
actgtgaattgggaaagggc

SEQ ID NO: 20255 - DNA, 20 bp, synthetic construct
  misc_feature 1..20: note = Description of Artificial Sequence: Synthetic oligonucleotide
  misc_feature 1..20: note = Target: FXN; (+) strand; PAM type: NRG; PAM sequence: TAG
  source 1..20: mol_type = other DNA
gggaaagggccagataaaac

SEQ ID NO: 20256 - DNA, 20 bp, synthetic construct
  misc_feature 1..20: note = Description of Artificial Sequence: Synthetic oligonucleotide
  misc_feature 1..20: note = Target: FXN; (+) strand; PAM type: NRG; PAM sequence: TAG
  source 1..20: mol_type = other DNA
agggccagataaaactagca

SEQ ID NO: 20257 - DNA, 20 bp, synthetic construct
  misc_feature 1..20: note = Description of Artificial Sequence: Synthetic oligonucleotide
  misc_feature 1..20: note = Target: FXN; (+) strand; PAM type: NRG; PAM sequence: AAG
  source 1..20: mol_type = other DNA
actagcatagaattctttga

SEQ ID NO: 20258 - DNA, 20 bp, synthetic construct
  misc_feature 1..20: note = Description of Artificial Sequence: Synthetic oligonucleotide
  misc_feature 1..20: note = Target: FXN; (+) strand; PAM type: NRG; PAM sequence: CGG
  source 1..20: mol_type = other DNA
agaattctttgaaagactaa

SEQ ID NO: 20259 - DNA, 20 bp, synthetic construct
  misc_feature 1..20: note = Description of Artificial Sequence: Synthetic oligonucleotide
  misc_feature 1..20: note = Target: FXN; (+) strand; PAM type: NRG; PAM sequence: TAG
  source 1..20: mol_type = other DNA
cctaacattgacatcatttt

SEQ ID NO: 20260 - DNA, 20 bp, synthetic construct
  misc_feature 1..20: note = Description of Artificial Sequence: Synthetic oligonucleotide
  misc_feature 1..20: note = Target: FXN; (+) strand; PAM type: NRG; PAM sequence: AGG
  source 1..20: mol_type = other DNA
ctaacattgacatcattttt

SEQ ID NO: 20261 - DNA, 20 bp, synthetic construct
  misc_feature 1..20: note = Description of Artificial Sequence: Synthetic oligonucleotide
  misc_feature 1..20: note = Target: FXN; (+) strand; PAM type: NRG; PAM sequence: CAG
  source 1..20: mol_type = other DNA
gtgatctctaatgctttgtt

SEQ ID NO: 20262 - DNA, 20 bp, synthetic construct
  misc_feature 1..20: note = Description of Artificial Sequence: Synthetic oligonucleotide
  misc_feature 1..20: note = Target: FXN; (+) strand; PAM type: NRG; PAM sequence: TAG
  source 1..20: mol_type = other DNA
aatgctttgttcagaataaa

SEQ ID NO: 20263 - DNA, 20 bp, synthetic construct
  misc_feature 1..20: note = Description of Artificial Sequence: Synthetic oligonucleotide
  misc_feature 1..20: note = Target: FXN; (+) strand; PAM type: NRG; PAM sequence: AAG
  source 1..20: mol_type = other DNA
ctttccccacactttcatcc

SEQ ID NO: 20264 - DNA, 20 bp, synthetic construct
  misc_feature 1..20: note = Description of Artificial Sequence: Synthetic oligonucleotide
  misc_feature 1..20: note = Target: FXN; (+) strand; PAM type: NRG; PAM sequence: AAG
  source 1..20: mol_type = other DNA
tccccacactttcatccaag

SEQ ID NO: 20265 - DNA, 20 bp, synthetic construct
  misc_feature 1..20: note = Description of Artificial Sequence: Synthetic oligonucleotide
  misc_feature 1..20: note = Target: FXN; (+) strand; PAM type: NRG; PAM sequence: TAG
  source 1..20: mol_type = other DNA
ctttcatccaagaagtgtgc

SEQ ID NO: 20266 - DNA, 20 bp, synthetic construct
  misc_feature 1..20: note = Description of Artificial Sequence: Synthetic oligonucleotide
  misc_feature 1..20: note = Target: FXN; (+) strand; PAM type: NRG; PAM sequence: GAG
  source 1..20: mol_type = other DNA
ttcatccaagaagtgtgcta

SEQ ID NO: 20267 - DNA, 20 bp, synthetic construct
  misc_feature 1..20: note = Description of Artificial Sequence: Synthetic oligonucleotide
  misc_feature 1..20: note = Target: FXN; (+) strand; PAM type: NRG; PAM sequence: CAG
  source 1..20: mol_type = other DNA
gtgctagagttcaacaaaaa

SEQ ID NO: 20268 - DNA, 20 bp, synthetic construct
  misc_feature 1..20: note = Description of Artificial Sequence: Synthetic oligonucleotide
  misc_feature 1..20: note = Target: FXN; (+) strand; PAM type: NRG; PAM sequence: TAG
  source 1..20: mol_type = other DNA
gagttcaacaaaaacagcac

SEQ ID NO: 20269 - DNA, 20 bp, synthetic construct
  misc_feature 1..20: note = Description of Artificial Sequence: Synthetic oligonucleotide
  misc_feature 1..20: note = Target: FXN; (+) strand; PAM type: NRG; PAM sequence: TAG
  source 1..20: mol_type = other DNA
actagaaatcactgtcattc

SEQ ID NO: 20270 - DNA, 20 bp, synthetic construct
  misc_feature 1..20: note = Description of Artificial Sequence: Synthetic oligonucleotide
  misc_feature 1..20: note = Target: FXN; (+) strand; PAM type: NRG; PAM sequence: AGG
  source 1..20: mol_type = other DNA
ctagaaatcactgtcattct

SEQ ID NO: 20271 - DNA, 20 bp, synthetic construct
  misc_feature 1..20: note = Description of Artificial Sequence: Synthetic oligonucleotide
  misc_feature 1..20: note = Target: FXN; (+) strand; PAM type: NRG; PAM sequence: AAG
  source 1..20: mol_type = other DNA
gaaatcactgtcattctagg

SEQ ID NO: 20272 - DNA, 20 bp, synthetic construct
  misc_feature 1..20: note = Description of Artificial Sequence: Synthetic oligonucleotide
  misc_feature 1..20: note = Target: FXN; (+) strand; PAM type: NRG; PAM sequence: AGG
  source 1..20: mol_type = other DNA
aaatcactgtcattctagga

SEQ ID NO: 20273 - DNA, 20 bp, synthetic construct
  misc_feature 1..20: note = Description of Artificial Sequence: Synthetic oligonucleotide
  misc_feature 1..20: note = Target: FXN; (+) strand; PAM type: NRG; PAM sequence: CAG
  source 1..20: mol_type = other DNA
tctaggaaggccctaattca

SEQ ID NO: 20274 - DNA, 20 bp, synthetic construct
  misc_feature 1..20: note = Description of Artificial Sequence: Synthetic oligonucleotide
  misc_feature 1..20: note = Target: FXN; (+) strand; PAM type: NRG; PAM sequence: TGG
  source 1..20: mol_type = other DNA
ccctaattcacagattgtat

SEQ ID NO: 20275 - DNA, 20 bp, synthetic construct
  misc_feature 1..20: note = Description of Artificial Sequence: Synthetic oligonucleotide
  misc_feature 1..20: note = Target: FXN; (+) strand; PAM type: NRG; PAM sequence: TAG
  source 1..20: mol_type = other DNA
tcacagattgtattggtttt

SEQ ID NO: 20276 - DNA, 20 bp, synthetic construct
  misc_feature 1..20: note = Description of Artificial Sequence: Synthetic oligonucleotide
  misc_feature 1..20: note = Target: FXN; (+) strand; PAM type: NRG; PAM sequence: CAG
  source 1..20: mol_type = other DNA
attgtattggtttttagacc

SEQ ID NO: 20277 - DNA, 20 bp, synthetic construct
  misc_feature 1..20: note = Description of Artificial Sequence: Synthetic oligonucleotide
  misc_feature 1..20: note = Target: FXN; (+) strand; PAM type: NRG; PAM sequence: TAG
  source 1..20: mol_type = other DNA
tattggtttttagacccagt

SEQ ID NO: 20278 - DNA, 20 bp, synthetic construct
  misc_feature 1..20: note = Description of Artificial Sequence: Synthetic oligonucleotide
  misc_feature 1..20: note = Target: FXN; (+) strand; PAM type: NRG; PAM sequence: TGG
  source 1..20: mol_type = other DNA
tttagacccagttagtgtgc

SEQ ID NO: 20279 - DNA, 20 bp, synthetic construct
  misc_feature 1..20: note = Description of Artificial Sequence: Synthetic oligonucleotide
  misc_feature 1..20: note = Target: FXN; (+) strand; PAM type: NRG; PAM sequence: GAG
  source 1..20: mol_type = other DNA
tagacccagttagtgtgctg

SEQ ID NO: 20280 - DNA, 20 bp, synthetic construct
  misc_feature 1..20: note = Description of Artificial Sequence: Synthetic oligonucleotide
  misc_feature 1..20: note = Target: FXN; (+) strand; PAM type: NRG; PAM sequence: AGG
  source 1..20: mol_type = other DNA
agacccagttagtgtgctgg

SEQ ID NO: 20281 - DNA, 20 bp, synthetic construct
  misc_feature 1..20: note = Description of Artificial Sequence: Synthetic oligonucleotide
  misc_feature 1..20: note = Target: FXN; (+) strand; PAM type: NRG; PAM sequence: TGG
  source 1..20: mol_type = other DNA
ccagttagtgtgctggaggt

SEQ ID NO: 20282 - DNA, 20 bp, synthetic construct
  misc_feature 1..20: note = Description of Artificial Sequence: Synthetic oligonucleotide
  misc_feature 1..20: note = Target: FXN; (+) strand; PAM type: NRG; PAM sequence: GAG
  source 1..20: mol_type = other DNA
agttagtgtgctggaggttg

SEQ ID NO: 20283 - DNA, 20 bp, synthetic construct
  misc_feature 1..20: note = Description of Artificial Sequence: Synthetic oligonucleotide
  misc_feature 1..20: note = Target: FXN; (+) strand; PAM type: NRG; PAM sequence: AGG
  source 1..20: mol_type = other DNA
gttagtgtgctggaggttgg

SEQ ID NO: 20284 - DNA, 20 bp, synthetic construct
  misc_feature 1..20: note = Description of Artificial Sequence: Synthetic oligonucleotide
  misc_feature 1..20: note = Target: FXN; (+) strand; PAM type: NRG; PAM sequence: TGG
  source 1..20: mol_type = other DNA
ttggaggattttaacctctg

SEQ ID NO: 20285 - DNA, 20 bp, synthetic construct
  misc_feature 1..20: note = Description of Artificial Sequence: Synthetic oligonucleotide
  misc_feature 1..20: note = Target: FXN; (+) strand; PAM type: NRG; PAM sequence: GGG
  source 1..20: mol_type = other DNA
tggaggattttaacctctgt

SEQ ID NO: 20286 - DNA, 20 bp, synthetic construct
  misc_feature 1..20: note = Description of Artificial Sequence: Synthetic oligonucleotide
  misc_feature 1..20: note = Target: FXN; (+) strand; PAM type: NRG; PAM sequence: TAG
  source 1..20: mol_type = other DNA
tttaacctctgtgggccaac

SEQ ID NO: 20287 - DNA, 20 bp, synthetic construct
  misc_feature 1..20: note = Description of Artificial Sequence: Synthetic oligonucleotide
  misc_feature 1..20: note = Target: FXN; (+) strand; PAM type: NRG; PAM sequence: TGG
  source 1..20: mol_type = other DNA
tgtgggccaactagcctctg

SEQ ID NO: 20288 - DNA, 20 bp, synthetic construct
  misc_feature 1..20: note = Description of Artificial Sequence: Synthetic oligonucleotide
  misc_feature 1..20: note = Target: FXN; (+) strand; PAM type: NRG; PAM sequence: CAG
  source 1..20: mol_type = other DNA
ccaactagcctctgtggcct

SEQ ID NO: 20289 - DNA, 20 bp, synthetic construct
  misc_feature 1..20: note = Description of Artificial Sequence: Synthetic oligonucleotide
  misc_feature 1..20: note = Target: FXN; (+) strand; PAM type: NRG; PAM sequence: TGG
  source 1..20: mol_type = other DNA
tcagtcattcttcctgaccc

SEQ ID NO: 20290 - DNA, 20 bp, synthetic construct
  misc_feature 1..20: note = Description of Artificial Sequence: Synthetic oligonucleotide
  misc_feature 1..20: note = Target: FXN; (+) strand; PAM type: NRG; PAM sequence: GAG
  source 1..20: mol_type = other DNA
tcctgaccctggctgtgctt

SEQ ID NO: 20291 - DNA, 20 bp, synthetic construct
  misc_feature 1..20: note = Description of Artificial Sequence: Synthetic oligonucleotide
  misc_feature 1..20: note = Target: FXN; (+) strand; PAM type: NRG; PAM sequence: CGG
  source 1..20: mol_type = other DNA
gtgttcttatccttcatctc

SEQ ID NO: 20292 - DNA, 20 bp, synthetic construct
  misc_feature 1..20: note = Description of Artificial Sequence: Synthetic oligonucleotide
  misc_feature 1..20: note = Target: FXN; (+) strand; PAM type: NRG; PAM sequence: GGG
  source 1..20: mol_type = other DNA
tgttcttatccttcatctcc

SEQ ID NO: 20293 - DNA, 20 bp, synthetic construct
  misc_feature 1..20: note = Description of Artificial Sequence: Synthetic oligonucleotide
  misc_feature 1..20: note = Target: FXN; (+) strand; PAM type: NRG; PAM sequence: GGG
  source 1..20: mol_type = other DNA
gttcttatccttcatctccg

SEQ ID NO: 20294 - DNA, 20 bp, synthetic construct
  misc_feature 1..20: note = Description of Artificial Sequence: Synthetic oligonucleotide
  misc_feature 1..20: note = Target: FXN; (+) strand; PAM type: NRG; PAM sequence: GGG
  source 1..20: mol_type = other DNA
ttcttatccttcatctccgg

SEQ ID NO: 20295 - DNA, 20 bp, synthetic construct
  misc_feature 1..20: note = Description of Artificial Sequence: Synthetic oligonucleotide
  misc_feature 1..20: note = Target: FXN; (+) strand; PAM type: NRG; PAM sequence: AAG
  source 1..20: mol_type = other DNA
ccttcatctccgggggaacg

SEQ ID NO: 20296 - DNA, 20 bp, synthetic construct
  misc_feature 1..20: note = Description of Artificial Sequence: Synthetic oligonucleotide
  misc_feature 1..20: note = Target: FXN; (+) strand; PAM type: NRG; PAM sequence: TGG
  source 1..20: mol_type = other DNA
tcatctccgggggaacgaag

SEQ ID NO: 20297 - DNA, 20 bp, synthetic construct
  misc_feature 1..20: note = Description of Artificial Sequence: Synthetic oligonucleotide
  misc_feature 1..20: note = Target: FXN; (+) strand; PAM type: NRG; PAM sequence: CAG
  source 1..20: mol_type = other DNA
tccgggggaacgaagtggat

SEQ ID NO: 20298 - DNA, 20 bp, synthetic construct
  misc_feature 1..20: note = Description of Artificial Sequence: Synthetic oligonucleotide
  misc_feature 1..20: note = Target: FXN; (+) strand; PAM type: NRG; PAM sequence: CGG
  source 1..20: mol_type = other DNA
gggaacgaagtggatcagct

SEQ ID NO: 20299 - DNA, 20 bp, synthetic construct
  misc_feature 1..20: note = Description of Artificial Sequence: Synthetic oligonucleotide
  misc_feature 1..20: note = Target: FXN; (+) strand; PAM type: NRG; PAM sequence: CAG
  source 1..20: mol_type = other DNA
cgaagtggatcagctcggtc

SEQ ID NO: 20300 - DNA, 20 bp, synthetic construct
  misc_feature 1..20: note = Description of Artificial Sequence: Synthetic oligonucleotide
  misc_feature 1..20: note = Target: FXN; (+) strand; PAM type: NRG; PAM sequence: TGG
  source 1..20: mol_type = other DNA
ctcggtccagcgatcacttt

SEQ ID NO: 20301 - DNA, 20 bp, synthetic construct
  misc_feature 1..20: note = Description of Artificial Sequence: Synthetic oligonucleotide
  misc_feature 1..20: note = Target: FXN; (+) strand; PAM type: NRG; PAM sequence: GGG
  source 1..20: mol_type = other DNA
tcggtccagcgatcactttt

SEQ ID NO: 20302 - DNA, 20 bp, synthetic construct
  misc_feature 1..20: note = Description of Artificial Sequence: Synthetic oligonucleotide
  misc_feature 1..20: note = Target: FXN; (+) strand; PAM type: NRG; PAM sequence: GGG
  source 1..20: mol_type = other DNA
cggtccagcgatcacttttg

SEQ ID NO: 20303 - DNA, 20 bp, synthetic construct
  misc_feature 1..20: note = Description of Artificial Sequence: Synthetic oligonucleotide
  misc_feature 1..20: note = Target: FXN; (+) strand; PAM type: NRG; PAM sequence: CAG
  source 1..20: mol_type = other DNA
cagcgatcacttttggggat

SEQ ID NO: 20304 - DNA, 20 bp, synthetic construct
  misc_feature 1..20: note = Description of Artificial Sequence: Synthetic oligonucleotide
  misc_feature 1..20: note = Target: FXN; (+) strand; PAM type: NRG; PAM sequence: TGG
  source 1..20: mol_type = other DNA
cgatcacttttggggatcag

SEQ ID NO: 20305 - DNA, 20 bp, synthetic construct
  misc_feature 1..20: note = Description of Artificial Sequence: Synthetic oligonucleotide
  misc_feature 1..20: note = Target: FXN; (+) strand; PAM type: NRG; PAM sequence: TAG
  source 1..20: mol_type = other DNA
tttggggatcagtggctttg

SEQ ID NO: 20306 - DNA, 20 bp, synthetic construct
  misc_feature 1..20: note = Description of Artificial Sequence: Synthetic oligonucleotide
  misc_feature 1..20: note = Target: FXN; (+) strand; PAM type: NRG; PAM sequence: CGG
  source 1..20: mol_type = other DNA
atcagtggctttgtagatat

SEQ ID NO: 20307 - DNA, 20 bp, synthetic construct
  misc_feature 1..20: note = Description of Artificial Sequence: Synthetic oligonucleotide
  misc_feature 1..20: note = Target: FXN; (+) strand; PAM type: NRG; PAM sequence: GGG
  source 1..20: mol_type = other DNA
tcagtggctttgtagatatc

SEQ ID NO: 20308 - DNA, 20 bp, synthetic construct
  misc_feature 1..20: note = Description of Artificial Sequence: Synthetic oligonucleotide
  misc_feature 1..20: note = Target: FXN; (+) strand; PAM type: NRG; PAM sequence: CAG
  source 1..20: mol_type = other DNA
gtggctttgtagatatcggg

SEQ ID NO: 20309 - DNA, 20 bp, synthetic construct
  misc_feature 1..20: note = Description of Artificial Sequence: Synthetic oligonucleotide
  misc_feature 1..20: note = Target: FXN; (+) strand; PAM type: NRG; PAM sequence: AGG
  source 1..20: mol_type = other DNA
tggctttgtagatatcgggc

SEQ ID NO: 20310 - DNA, 20 bp, synthetic construct
  misc_feature 1..20: note = Description of Artificial Sequence: Synthetic oligonucleotide
  misc_feature 1..20: note = Target: FXN; (+) strand; PAM type: NRG; PAM sequence: AAG
  source 1..20: mol_type = other DNA
cgggcaggcacttaccccaa

SEQ ID NO: 20311 - DNA, 20 bp, synthetic construct
  misc_feature 1..20: note = Description of Artificial Sequence: Synthetic oligonucleotide
  misc_feature 1..20: note = Target: FXN; (+) strand; PAM type: NRG; PAM sequence: AAG
  source 1..20: mol_type = other DNA
aagaactttccccatatctg

SEQ ID NO: 20312 - DNA, 20 bp, synthetic construct
  misc_feature 1..20: note = Description of Artificial Sequence: Synthetic oligonucleotide
  misc_feature 1..20: note = Target: FXN; (+) strand; PAM type: NRG; PAM sequence: TGG
  source 1..20: mol_type = other DNA
gaaaacgtccatatcgtatt

SEQ ID NO: 20313 - DNA, 20 bp, synthetic construct
  misc_feature 1..20: note = Description of Artificial Sequence: Synthetic oligonucleotide
  misc_feature 1..20: note = Target: FXN; (+) strand; PAM type: NRG; PAM sequence: CAG
  source 1..20: mol_type = other DNA
tcgtatttggacacactgcc

SEQ ID NO: 20314 - DNA, 20 bp, synthetic construct
  misc_feature 1..20: note = Description of Artificial Sequence: Synthetic oligonucleotide
  misc_feature 1..20: note = Target: FXN; (+) strand; PAM type: NRG; PAM sequence: TAG
  source 1..20: mol_type = other DNA
cactgcccagcaatacgctc

SEQ ID NO: 20315 - DNA, 20 bp, synthetic construct
  misc_feature 1..20: note = Description of Artificial Sequence: Synthetic oligonucleotide
  misc_feature 1..20: note = Target: FXN; (+) strand; PAM type: NRG; PAM sequence: CAG
  source 1..20: mol_type = other DNA
caatacgctctagctgtgtt

SEQ ID NO: 20316 - DNA, 20 bp, synthetic construct
  misc_feature 1..20: note = Description of Artificial Sequence: Synthetic oligonucleotide
  misc_feature 1..20: note = Target: FXN; (+) strand; PAM type: NRG; PAM sequence: AAG
  source 1..20: mol_type = other DNA
tacgctctagctgtgttcag

SEQ ID NO: 20317 - DNA, 20 bp, synthetic construct
  misc_feature 1..20: note = Description of Artificial Sequence: Synthetic oligonucleotide
  misc_feature 1..20: note = Target: FXN; (+) strand; PAM type: NRG; PAM sequence: TGG
  source 1..20: mol_type = other DNA
tctagctgtgttcagaagca

SEQ ID NO: 20318 - DNA, 20 bp, synthetic construct
  misc_feature 1..20: note = Description of Artificial Sequence: Synthetic oligonucleotide
  misc_feature 1..20: note = Target: FXN; (+) strand; PAM type: NRG; PAM sequence: GGG
  source 1..20: mol_type = other DNA
ctagctgtgttcagaagcat

SEQ ID NO: 20319 - DNA, 20 bp, synthetic construct
  misc_feature 1..20: note = Description of Artificial Sequence: Synthetic oligonucleotide
  misc_feature 1..20: note = Target: FXN; (+) strand; PAM type: NRG; PAM sequence: TGG
  source 1..20: mol_type = other DNA
tgttcagaagcatgggaatt

SEQ ID NO: 20320 - DNA, 20 bp, synthetic construct
  misc_feature 1..20: note = Description of Artificial Sequence: Synthetic oligonucleotide
  misc_feature 1..20: note = Target: FXN; (+) strand; PAM type: NRG; PAM sequence: AAG
  source 1..20: mol_type = other DNA
cagaagcatgggaatttgga

SEQ ID NO: 20321 - DNA, 20 bp, synthetic construct
  misc_feature 1..20: note = Description of Artificial Sequence: Synthetic oligonucleotide
  misc_feature 1..20: note = Target: FXN; (+) strand; PAM type: NRG; PAM sequence: GAG
  source 1..20: mol_type = other DNA
ggaatttggaaagatctgct

SEQ ID NO: 20322 - DNA, 20 bp, synthetic construct
  misc_feature 1..20: note = Description of Artificial Sequence: Synthetic oligonucleotide
  misc_feature 1..20: note = Target: FXN; (+) strand; PAM type: NRG; PAM sequence: CAG
  source 1..20: mol_type = other DNA
gagcatgccgtttactgtca

SEQ ID NO: 20323 - DNA, 20 bp, synthetic construct
  misc_feature 1..20: note = Description of Artificial Sequence: Synthetic oligonucleotide
  misc_feature 1..20: note = Target: FXN; (+) strand; PAM type: NRG; PAM sequence: TGG
  source 1..20: mol_type = other DNA
aaaaaatatatatatatata

SEQ ID NO: 20324 - DNA, 20 bp, synthetic construct
  misc_feature 1..20: note = Description of Artificial Sequence: Synthetic oligonucleotide
  misc_feature 1..20: note = Target: FXN; (+) strand; PAM type: NRG; PAM sequence: GGG
  source 1..20: mol_type = other DNA
aaaaatatatatatatatat

SEQ ID NO: 20325 - DNA, 20 bp, synthetic construct
  misc_feature 1..20: note = Description of Artificial Sequence: Synthetic oligonucleotide
  misc_feature 1..20: note = Target: FXN; (+) strand; PAM type: NRG; PAM sequence: GGG
  source 1..20: mol_type = other DNA
aaaatatatatatatatatg

SEQ ID NO: 20326 - DNA, 20 bp, synthetic construct
  misc_feature 1..20: note = Description of Artificial Sequence: Synthetic oligonucleotide
  misc_feature 1..20: note = Target: FXN; (+) strand; PAM type: NRG; PAM sequence: GGG
  source 1..20: mol_type = other DNA
aaatatatatatatatatgg

SEQ ID NO: 20327 - DNA, 20 bp, synthetic construct
  misc_feature 1..20: note = Description of Artificial Sequence: Synthetic oligonucleotide
  misc_feature 1..20: note = Target: FXN; (+) strand; PAM type: NRG; PAM sequence: CGG
  source 1..20: mol_type = other DNA
atatatatatatatggggga

SEQ ID NO: 20328 - DNA, 20 bp, synthetic construct
  misc_feature 1..20: note = Description of Artificial Sequence: Synthetic oligonucleotide
  misc_feature 1..20: note = Target: FXN; (+) strand; PAM type: NRG; PAM sequence: GGG
  source 1..20: mol_type = other DNA
tatatatatatatgggggac

SEQ ID NO: 20329 - DNA, 20 bp, synthetic construct
  misc_feature 1..20: note = Description of Artificial Sequence: Synthetic oligonucleotide
  misc_feature 1..20: note = Target: FXN; (+) strand; PAM type: NRG; PAM sequence: GGG
  source 1..20: mol_type = other DNA
atatatatatatgggggacg

SEQ ID NO: 20330 - DNA, 20 bp, synthetic construct
  misc_feature 1..20: note = Description of Artificial Sequence: Synthetic oligonucleotide
  misc_feature 1..20: note = Target: FXN; (+) strand; PAM type: NRG; PAM sequence: CAG
  source 1..20: mol_type = other DNA
tatatatatgggggacgggg

SEQ ID NO: 20331 - DNA, 20 bp, synthetic construct
  misc_feature 1..20: note = Description of Artificial Sequence: Synthetic oligonucleotide
  misc_feature 1..20: note = Target: FXN; (+) strand; PAM type: NRG; PAM sequence: AGG
  source 1..20: mol_type = other DNA
atatatatgggggacggggc

SEQ ID NO: 20332 - DNA, 20 bp, synthetic construct
  misc_feature 1..20: note = Description of Artificial Sequence: Synthetic oligonucleotide
  misc_feature 1..20: note = Target: FXN; (+) strand; PAM type: NRG; PAM sequence: GAG
  source 1..20: mol_type = other DNA
tatgggggacggggcaggtt

SEQ ID NO: 20333 - DNA, 20 bp, synthetic construct
  misc_feature 1..20: note = Description of Artificial Sequence: Synthetic oligonucleotide
  misc_feature 1..20: note = Target: FXN; (+) strand; PAM type: NRG; PAM sequence: TGG
  source 1..20: mol_type = other DNA
gggacggggcaggttgagac

SEQ ID NO: 20334 - DNA, 20 bp, synthetic construct
  misc_feature 1..20: note = Description of Artificial Sequence: Synthetic oligonucleotide
  misc_feature 1..20: note = Target: FXN; (+) strand; PAM type: NRG; PAM sequence: GGG
  source 1..20: mol_type = other DNA
ggacggggcaggttgagact

SEQ ID NO: 20335 - DNA, 20 bp, synthetic construct
  misc_feature 1..20: note = Description of Artificial Sequence: Synthetic oligonucleotide
  misc_feature 1..20: note = Target: FXN; (+) strand; PAM type: NRG; PAM sequence: GAG
  source 1..20: mol_type = other DNA
ggggcaggttgagactgggt

SEQ ID NO: 20336 - DNA, 20 bp, synthetic construct
  misc_feature 1..20: note = Description of Artificial Sequence: Synthetic oligonucleotide
  misc_feature 1..20: note = Target: FXN; (+) strand; PAM type: NRG; PAM sequence: AAG
  source 1..20: mol_type = other DNA
gttgagactgggtgagactg

SEQ ID NO: 20337 - DNA, 20 bp, synthetic construct
  misc_feature 1..20: note = Description of Artificial Sequence: Synthetic oligonucleotide
  misc_feature 1..20: note = Target: FXN; (+) strand; PAM type: NRG; PAM sequence: GAG
  source 1..20: mol_type = other DNA
tgagactgggtgagactgaa

SEQ ID NO: 20338 - DNA, 20 bp, synthetic construct
  misc_feature 1..20: note = Description of Artificial Sequence: Synthetic oligonucleotide
  misc_feature 1..20: note = Target: FXN; (+) strand; PAM type: NRG; PAM sequence: AGG
  source 1..20: mol_type = other DNA
gagactgggtgagactgaag

SEQ ID NO: 20339 - DNA, 20 bp, synthetic construct
  misc_feature 1..20: note = Description of Artificial Sequence: Synthetic oligonucleotide
  misc_feature 1..20: note = Target: FXN; (+) strand; PAM type: NRG; PAM sequence: TGG
  source 1..20: mol_type = other DNA
gtgagactgaagaggtgcct

SEQ ID NO: 20340 - DNA, 20 bp, synthetic construct
  misc_feature 1..20: note = Description of Artificial Sequence: Synthetic oligonucleotide
  misc_feature 1..20: note = Target: FXN; (+) strand; PAM type: NRG; PAM sequence: CAG
  source 1..20: mol_type = other DNA
gactgaagaggtgccttggc

SEQ ID NO: 20341 - DNA, 20 bp, synthetic construct
  misc_feature 1..20: note = Description of Artificial Sequence: Synthetic oligonucleotide
  misc_feature 1..20: note = Target: FXN; (+) strand; PAM type: NRG; PAM sequence: GAG
  source 1..20: mol_type = other DNA
ctgaagaggtgccttggcca

SEQ ID NO: 20342 - DNA, 20 bp, synthetic construct
  misc_feature 1..20: note = Description of Artificial Sequence: Synthetic oligonucleotide
  misc_feature 1..20: note = Target: FXN; (+) strand; PAM type: NRG; PAM sequence: CAG
  source 1..20: mol_type = other DNA
aagaggtgccttggccagag

SEQ ID NO: 20343 - DNA, 20 bp, synthetic construct
  misc_feature 1..20: note = Description of Artificial Sequence: Synthetic oligonucleotide
  misc_feature 1..20: note = Target: FXN; (+) strand; PAM type: NRG; PAM sequence: AGG
  source 1..20: mol_type = other DNA
agaggtgccttggccagagc

SEQ ID NO: 20344 - DNA, 20 bp, synthetic construct
  misc_feature 1..20: note = Description of Artificial Sequence: Synthetic oligonucleotide
  misc_feature 1..20: note = Target: FXN; (+) strand; PAM type: NRG; PAM sequence: CAG
  source 1..20: mol_type = other DNA
tggccagagcaggccacacc

SEQ ID NO: 20345 - DNA, 20 bp, synthetic construct
  misc_feature 1..20: note = Description of Artificial Sequence: Synthetic oligonucleotide
  misc_feature 1..20: note = Target: FXN; (+) strand; PAM type: NRG; PAM sequence: GAG
  source 1..20: mol_type = other DNA
gccagagcaggccacaccca

SEQ ID NO: 20346 - DNA, 20 bp, synthetic construct
  misc_feature 1..20: note = Description of Artificial Sequence: Synthetic oligonucleotide
  misc_feature 1..20: note = Target: FXN; (+) strand; PAM type: NRG; PAM sequence: CAG
  source 1..20: mol_type = other DNA
caggccacacccagagacca

SEQ ID NO: 20347 - DNA, 20 bp, synthetic construct
  misc_feature 1..20: note = Description of Artificial Sequence: Synthetic oligonucleotide
  misc_feature 1..20: note = Target: FXN; (+) strand; PAM type: NRG; PAM sequence: AGG
  source 1..20: mol_type = other DNA
aggccacacccagagaccac

SEQ ID NO: 20348 - DNA, 20 bp, synthetic construct
  misc_feature 1..20: note = Description of Artificial Sequence: Synthetic oligonucleotide
  misc_feature 1..20: note = Target: FXN; (+) strand; PAM type: NRG; PAM sequence: CGG
  source 1..20: mol_type = other DNA
cccagagaccacaggctccc

SEQ ID NO: 20349 - DNA, 20 bp, synthetic construct
  misc_feature 1..20: note = Description of Artificial Sequence: Synthetic oligonucleotide
  misc_feature 1..20: note = Target: FXN; (+) strand; PAM type: NRG; PAM sequence: CAG
  source 1..20: mol_type = other DNA
acaggctccccggtccacct

SEQ ID NO: 20350 - DNA, 20 bp, synthetic construct
  misc_feature 1..20: note = Description of Artificial Sequence: Synthetic oligonucleotide
  misc_feature 1..20: note = Target: FXN; (+) strand; PAM type: NRG; PAM sequence: AGG
  source 1..20: mol_type = other DNA
caggctccccggtccacctc

SEQ ID NO: 20351 - DNA, 20 bp, synthetic construct
  misc_feature 1..20: note = Description of Artificial Sequence: Synthetic oligonucleotide
  misc_feature 1..20: note = Target: FXN; (+) strand; PAM type: NRG; PAM sequence: CGG
  source 1..20: mol_type = other DNA
tccccttcctgcgccgtttc

SEQ ID NO: 20352 - DNA, 20 bp, synthetic construct
  misc_feature 1..20: note = Description of Artificial Sequence: Synthetic oligonucleotide
  misc_feature 1..20: note = Target: FXN; (+) strand; PAM type: NRG; PAM sequence: CAG
  source 1..20: mol_type = other DNA
ccttcctgcgccgtttccgg

SEQ ID NO: 20353 - DNA, 20 bp, synthetic construct
  misc_feature 1..20: note = Description of Artificial Sequence: Synthetic oligonucleotide
  misc_feature 1..20: note = Target: FXN; (+) strand; PAM type: NRG; PAM sequence: CAG
  source 1..20: mol_type = other DNA
tgcgccgtttccggcagatc

SEQ ID NO: 20354 - DNA, 20 bp, synthetic construct
  misc_feature 1..20: note = Description of Artificial Sequence: Synthetic oligonucleotide
  misc_feature 1..20: note = Target: FXN; (+) strand; PAM type: NRG; PAM sequence: GAG
  source 1..20: mol_type = other DNA
cgccgtttccggcagatcca

SEQ ID NO: 20355 - DNA, 20 bp, synthetic construct
  misc_feature 1..20: note = Description of Artificial Sequence: Synthetic oligonucleotide
  misc_feature 1..20: note = Target: FXN; (+) strand; PAM type: NRG; PAM sequence: TGG
  source 1..20: mol_type = other DNA
cgtttccggcagatccagag

SEQ ID NO: 20356 - DNA, 20 bp, synthetic construct
  misc_feature 1..20: note = Description of Artificial Sequence: Synthetic oligonucleotide
  misc_feature 1..20: note = Target: FXN; (+) strand; PAM type: NRG; PAM sequence: CGG
  source 1..20: mol_type = other DNA
agatccagagtggccaccgc

SEQ ID NO: 20357 - DNA, 20 bp, synthetic construct
  misc_feature 1..20: note = Description of Artificial Sequence: Synthetic oligonucleotide
  misc_feature 1..20: note = Target: FXN; (+) strand; PAM type: NRG; PAM sequence: TGG
  source 1..20: mol_type = other DNA
ccagagtggccaccgccgga

SEQ ID NO: 20358 - DNA, 20 bp, synthetic construct
  misc_feature 1..20: note = Description of Artificial Sequence: Synthetic oligonucleotide
  misc_feature 1..20: note = Target: FXN; (+) strand; PAM type: NRG; PAM sequence: GGG
  source 1..20: mol_type = other DNA
cagagtggccaccgccggat

SEQ ID NO: 20359 - DNA, 20 bp, synthetic construct
  misc_feature 1..20: note = Description of Artificial Sequence: Synthetic oligonucleotide
  misc_feature 1..20: note = Target: FXN; (+) strand; PAM type: NRG; PAM sequence: GAG
  source 1..20: mol_type = other DNA
gagtggccaccgccggatgg

SEQ ID NO: 20360 - DNA, 20 bp, synthetic construct
  misc_feature 1..20: note = Description of Artificial Sequence: Synthetic oligonucleotide
  misc_feature 1..20: note = Target: FXN; (+) strand; PAM type: NRG; PAM sequence: CGG
  source 1..20: mol_type = other DNA
ggccaccgccggatgggagt

SEQ ID NO: 20361 - DNA, 20 bp, synthetic construct
  misc_feature 1..20: note = Description of Artificial Sequence: Synthetic oligonucleotide
  misc_feature 1..20: note = Target: FXN; (+) strand; PAM type: NRG; PAM sequence: GGG
  source 1..20: mol_type = other DNA
gccaccgccggatgggagtc

SEQ ID NO: 20362 - DNA, 20 bp, synthetic construct
  misc_feature 1..20: note = Description of Artificial Sequence: Synthetic oligonucleotide
  misc_feature 1..20: note = Target: FXN; (+) strand; PAM type: NRG; PAM sequence: GGG
  source 1..20: mol_type = other DNA
ccaccgccggatgggagtcg

SEQ ID NO: 20363 - DNA, 20 bp, synthetic construct
  misc_feature 1..20: note = Description of Artificial Sequence: Synthetic oligonucleotide
  misc_feature 1..20: note = Target: FXN; (+) strand; PAM type: NRG; PAM sequence: GGG
  source 1..20: mol_type = other DNA
caccgccggatgggagtcgg

SEQ ID NO: 20364 - DNA, 20 bp, synthetic construct
  misc_feature 1..20: note = Description of Artificial Sequence: Synthetic oligonucleotide
  misc_feature 1..20: note = Target: FXN; (+) strand; PAM type: NRG; PAM sequence: AAG
  source 1..20: mol_type = other DNA
cgccggatgggagtcggggg

SEQ ID NO: 20365 - DNA, 20 bp, synthetic construct
  misc_feature 1..20: note = Description of Artificial Sequence: Synthetic oligonucleotide
  misc_feature 1..20: note = Target: FXN; (+) strand; PAM type: NRG; PAM sequence: AGG
  source 1..20: mol_type = other DNA
gccggatgggagtcggggga

SEQ ID NO: 20366 - DNA, 20 bp, synthetic construct
  misc_feature 1..20: note = Description of Artificial Sequence: Synthetic oligonucleotide
  misc_feature 1..20: note = Target: FXN; (+) strand; PAM type: NRG; PAM sequence: GGG
  source 1..20: mol_type = other DNA
ccggatgggagtcgggggaa

SEQ ID NO: 20367 - DNA, 20 bp, synthetic construct
  misc_feature 1..20: note = Description of Artificial Sequence: Synthetic oligonucleotide
  misc_feature 1..20: note = Target: FXN; (+) strand; PAM type: NRG; PAM sequence: GAG
  source 1..20: mol_type = other DNA
ggatgggagtcgggggaagg

SEQ ID NO: 20368 - DNA, 20 bp, synthetic construct
  misc_feature 1..20: note = Description of Artificial Sequence: Synthetic oligonucleotide
  misc_feature 1..20: note = Target: FXN; (+) strand; PAM type: NRG; PAM sequence: AGG
  source 1..20: mol_type = other DNA
gatgggagtcgggggaaggg

SEQ ID NO: 20369 - DNA, 20 bp, synthetic construct
  misc_feature 1..20: note = Description of Artificial Sequence: Synthetic oligonucleotide
  misc_feature 1..20: note = Target: FXN; (+) strand; PAM type: NRG; PAM sequence: CAG
  source 1..20: mol_type = other DNA
gggagtcgggggaagggagg

SEQ ID NO: 20370 - DNA, 20 bp, synthetic construct
  misc_feature 1..20: note = Description of Artificial Sequence: Synthetic oligonucleotide
  misc_feature 1..20: note = Target: FXN; (+) strand; PAM type: NRG; PAM sequence: GAG
  source 1..20: mol_type = other DNA
gagtcgggggaagggaggca

SEQ ID NO: 20371 - DNA, 20 bp, synthetic construct
  misc_feature 1..20: note = Description of Artificial Sequence: Synthetic oligonucleotide
  misc_feature 1..20: note = Target: FXN; (+) strand; PAM type: NRG; PAM sequence: AAG
  source 1..20: mol_type = other DNA
tcgggggaagggaggcagag

SEQ ID NO: 20372 - DNA, 20 bp, synthetic construct
  misc_feature 1..20: note = Description of Artificial Sequence: Synthetic oligonucleotide
  misc_feature 1..20: note = Target: FXN; (+) strand; PAM type: NRG; PAM sequence: CGG
  source 1..20: mol_type = other DNA
ggggaagggaggcagagaag

SEQ ID NO: 20373 - DNA, 20 bp, synthetic construct
  misc_feature 1..20: note = Description of Artificial Sequence: Synthetic oligonucleotide
  misc_feature 1..20: note = Target: FXN; (+) strand; PAM type: NRG; PAM sequence: GGG
  source 1..20: mol_type = other DNA
gggaagggaggcagagaagc

SEQ ID NO: 20374 - DNA, 20 bp, synthetic construct
  misc_feature 1..20: note = Description of Artificial Sequence: Synthetic oligonucleotide
  misc_feature 1..20: note = Target: FXN; (+) strand; PAM type: NRG; PAM sequence: GAG
  source 1..20: mol_type = other DNA
gaggcagagaagcgggccct

SEQ ID NO: 20375 - DNA, 20 bp, synthetic construct
  misc_feature 1..20: note = Description of Artificial Sequence: Synthetic oligonucleotide
  misc_feature 1..20: note = Target: FXN; (+) strand; PAM type: NRG; PAM sequence: AGG
  source 1..20: mol_type = other DNA
aggcagagaagcgggccctg

SEQ ID NO: 20376 - DNA, 20 bp, synthetic construct
  misc_feature 1..20: note = Description of Artificial Sequence: Synthetic oligonucleotide
  misc_feature 1..20: note = Target: FXN; (+) strand; PAM type: NRG; PAM sequence: AAG
  source 1..20: mol_type = other DNA
gagaagcgggccctgaggac

SEQ ID NO: 20377 - DNA, 20 bp, synthetic construct
  misc_feature 1..20: note = Description of Artificial Sequence: Synthetic oligonucleotide
  misc_feature 1..20: note = Target: FXN; (+) strand; PAM type: NRG; PAM sequence: CAG
  source 1..20: mol_type = other DNA
gggccctgaggacaagctct

SEQ ID NO: 20378 - DNA, 20 bp, synthetic construct
  misc_feature 1..20: note = Description of Artificial Sequence: Synthetic oligonucleotide
  misc_feature 1..20: note = Target: FXN; (+) strand; PAM type: NRG; PAM sequence: TGG
  source 1..20: mol_type = other DNA
acaagctctcagtgcttctg

SEQ ID NO: 20379 - DNA, 20 bp, synthetic construct
  misc_feature 1..20: note = Description of Artificial Sequence: Synthetic oligonucleotide
  misc_feature 1..20: note = Target: FXN; (+) strand; PAM type: NRG; PAM sequence: GGG
  source 1..20: mol_type = other DNA
caagctctcagtgcttctgt

SEQ ID NO: 20380 - DNA, 20 bp, synthetic construct
  misc_feature 1..20: note = Description of Artificial Sequence: Synthetic oligonucleotide
  misc_feature 1..20: note = Target: FXN; (+) strand; PAM type: NRG; PAM sequence: AAG
  source 1..20: mol_type = other DNA
gctctcagtgcttctgtggg

SEQ ID NO: 20381 - DNA, 20 bp, synthetic construct
  misc_feature 1..20: note = Description of Artificial Sequence: Synthetic oligonucleotide
  misc_feature 1..20: note = Target: FXN; (+) strand; PAM type: NRG; PAM sequence: TGG
  source 1..20: mol_type = other DNA
ctcagtgcttctgtgggaag

SEQ ID NO: 20382 - DNA, 20 bp, synthetic construct
  misc_feature 1..20: note = Description of Artificial Sequence: Synthetic oligonucleotide
  misc_feature 1..20: note = Target: FXN; (+) strand; PAM type: NRG; PAM sequence: CGG
  source 1..20: mol_type = other DNA
agtgcttctgtgggaagtgg

SEQ ID NO: 20383 - DNA, 20 bp, synthetic construct
  misc_feature 1..20: note = Description of Artificial Sequence: Synthetic oligonucleotide
  misc_feature 1..20: note = Target: FXN; (+) strand; PAM type: NRG; PAM sequence: AAG
  source 1..20: mol_type = other DNA
cttctgtgggaagtggcggc

SEQ ID NO: 20384 - DNA, 20 bp, synthetic construct
  misc_feature 1..20: note = Description of Artificial Sequence: Synthetic oligonucleotide
  misc_feature 1..20: note = Target: FXN; (+) strand; PAM type: NRG; PAM sequence: CGG
  source 1..20: mol_type = other DNA
tgtgggaagtggcggcaaga

SEQ ID NO: 20385 - DNA, 20 bp, synthetic construct
  misc_feature 1..20: note = Description of Artificial Sequence: Synthetic oligonucleotide
  misc_feature 1..20: note = Target: FXN; (+) strand; PAM type: NRG; PAM sequence: CAG
  source 1..20: mol_type = other DNA
gggaagtggcggcaagacgg

SEQ ID NO: 20386 - DNA, 20 bp, synthetic construct
  misc_feature 1..20: note = Description of Artificial Sequence: Synthetic oligonucleotide
  misc_feature 1..20: note = Target: FXN; (+) strand; PAM type: NRG; PAM sequence: CAG
  source 1..20: mol_type = other DNA
ggcggcaagacggcagctcc

SEQ ID NO: 20387 - DNA, 20 bp, synthetic construct
  misc_feature 1..20: note = Description of Artificial Sequence: Synthetic oligonucleotide
  misc_feature 1..20: note = Target: FXN; (+) strand; PAM type: NRG; PAM sequence: CGG
  source 1..20: mol_type = other DNA
ggcaagacggcagctcccag

SEQ ID NO: 20388 - DNA, 20 bp, synthetic construct
  misc_feature 1..20: note = Description of Artificial Sequence: Synthetic oligonucleotide
  misc_feature 1..20: note = Target: FXN; (+) strand; PAM type: NRG; PAM sequence: GGG
  source 1..20: mol_type = other DNA
gcaagacggcagctcccagc

SEQ ID NO: 20389 - DNA, 20 bp, synthetic construct
  misc_feature 1..20: note = Description of Artificial Sequence: Synthetic oligonucleotide
  misc_feature 1..20: note = Target: FXN; (+) strand; PAM type: NRG; PAM sequence: GGG
  source 1..20: mol_type = other DNA
caagacggcagctcccagcg

SEQ ID NO: 20390 - DNA, 20 bp, synthetic construct
  misc_feature 1..20: note = Description of Artificial Sequence: Synthetic oligonucleotide
  misc_feature 1..20: note = Target: FXN; (+) strand; PAM type: NRG; PAM sequence: GGG
  source 1..20: mol_type = other DNA
aagacggcagctcccagcgg

SEQ ID NO: 20391 - DNA, 20 bp, synthetic construct
  misc_feature 1..20: note = Description of Artificial Sequence: Synthetic oligonucleotide
  misc_feature 1..20: note = Target: FXN; (+) strand; PAM type: NRG; PAM sequence: TGG
  source 1..20: mol_type = other DNA
cggcagctcccagcggggga

SEQ ID NO: 20392 - DNA, 20 bp, synthetic construct
  misc_feature 1..20: note = Description of Artificial Sequence: Synthetic oligonucleotide
  misc_feature 1..20: note = Target: FXN; (+) strand; PAM type: NRG; PAM sequence: GAG
  source 1..20: mol_type = other DNA
gcagctcccagcgggggatg

SEQ ID NO: 20393 - DNA, 20 bp, synthetic construct
  misc_feature 1..20: note = Description of Artificial Sequence: Synthetic oligonucleotide
  misc_feature 1..20: note = Target: FXN; (+) strand; PAM type: NRG; PAM sequence: AGG
  source 1..20: mol_type = other DNA
cagctcccagcgggggatgg

SEQ ID NO: 20394 - DNA, 20 bp, synthetic construct
  misc_feature 1..20: note = Description of Artificial Sequence: Synthetic oligonucleotide
  misc_feature 1..20: note = Target: FXN; (+) strand; PAM type: NRG; PAM sequence: GAG
  source 1..20: mol_type = other DNA
cccagcgggggatggaggcc

SEQ ID NO: 20395 - DNA, 20 bp, synthetic construct
  misc_feature 1..20: note = Description of Artificial Sequence: Synthetic oligonucleotide
  misc_feature 1..20: note = Target: FXN; (+) strand; PAM type: NRG; PAM sequence: CAG
  source 1..20: mol_type = other DNA
gcgggggatggaggccgagt

SEQ ID NO: 20396 - DNA, 20 bp, synthetic construct
  misc_feature 1..20: note = Description of Artificial Sequence: Synthetic oligonucleotide
  misc_feature 1..20: note = Target: FXN; (+) strand; PAM type: NRG; PAM sequence: TGG
  source 1..20: mol_type = other DNA
tggaggccgagtcagtctgc

SEQ ID NO: 20397 - DNA, 20 bp, synthetic construct
  misc_feature 1..20: note = Description of Artificial Sequence: Synthetic oligonucleotide
  misc_feature 1..20: note = Target: FXN; (+) strand; PAM type: NRG; PAM sequence: TGG
  source 1..20: mol_type = other DNA
cgagtcagtctgctggtcac

SEQ ID NO: 20398 - DNA, 20 bp, synthetic construct
  misc_feature 1..20: note = Description of Artificial Sequence: Synthetic oligonucleotide
  misc_feature 1..20: note = Target: FXN; (+) strand; PAM type: NRG; PAM sequence: GAG
  source 1..20: mol_type = other DNA
agtcagtctgctggtcactg

SEQ ID NO: 20399 - DNA, 20 bp, synthetic construct
  misc_feature 1..20: note = Description of Artificial Sequence: Synthetic oligonucleotide
  misc_feature 1..20: note = Target: FXN; (+) strand; PAM type: NRG; PAM sequence: AGG
  source 1..20: mol_type = other DNA
gtcagtctgctggtcactgg

SEQ ID NO: 20400 - DNA, 20 bp, synthetic construct
  misc_feature 1..20: note = Description of Artificial Sequence: Synthetic oligonucleotide
  misc_feature 1..20: note = Target: FXN; (+) strand; PAM type: NRG; PAM sequence: CAG
  source 1..20: mol_type = other DNA
gtctgctggtcactggaggc

SEQ ID NO: 20401 - DNA, 20 bp, synthetic construct
  misc_feature 1..20: note = Description of Artificial Sequence: Synthetic oligonucleotide
  misc_feature 1..20: note = Target: FXN; (+) strand; PAM type: NRG; PAM sequence: AGG
  source 1..20: mol_type = other DNA
tctgctggtcactggaggcc

SEQ ID NO: 20402 - DNA, 20 bp, synthetic construct
  misc_feature 1..20: note = Description of Artificial Sequence: Synthetic oligonucleotide
  misc_feature 1..20: note = Target: FXN; (+) strand; PAM type: NRG; PAM sequence: CAG
  source 1..20: mol_type = other DNA
ggccaggatgctgcctaaca

SEQ ID NO: 20403 - DNA, 20 bp, synthetic construct
  misc_feature 1..20: note = Description of Artificial Sequence: Synthetic oligonucleotide
  misc_feature 1..20: note = Target: FXN; (+) strand; PAM type: NRG; PAM sequence: CGG
  source 1..20: mol_type = other DNA
ctaacacagccgtcccgctc

SEQ ID NO: 20404 - DNA, 20 bp, synthetic construct
  misc_feature 1..20: note = Description of Artificial Sequence: Synthetic oligonucleotide
  misc_feature 1..20: note = Target: FXN; (+) strand; PAM type: NRG; PAM sequence: GGG
  source 1..20: mol_type = other DNA
taacacagccgtcccgctcc

SEQ ID NO: 20405 - DNA, 20 bp, synthetic construct
  misc_feature 1..20: note = Description of Artificial Sequence: Synthetic oligonucleotide
  misc_feature 1..20: note = Target: FXN; (+) strand; PAM type: NRG; PAM sequence: CAG
  source 1..20: mol_type = other DNA
cccgctccgggcctcaccac

SEQ ID NO: 20406 - DNA, 20 bp, synthetic construct
  misc_feature 1..20: note = Description of Artificial Sequence: Synthetic oligonucleotide
  misc_feature 1..20: note = Target: FXN; (+) strand; PAM type: NRG; PAM sequence: AGG
  source 1..20: mol_type = other DNA
ccgctccgggcctcaccacc

SEQ ID NO: 20407 - DNA, 20 bp, synthetic construct
  misc_feature 1..20: note = Description of Artificial Sequence: Synthetic oligonucleotide
  misc_feature 1..20: note = Target: FXN; (+) strand; PAM type: NRG; PAM sequence: GGG
  source 1..20: mol_type = other DNA
cgctccgggcctcaccacca

SEQ ID NO: 20408 - DNA, 20 bp, synthetic construct
  misc_feature 1..20: note = Description of Artificial Sequence: Synthetic oligonucleotide
  misc_feature 1..20: note = Target: FXN; (+) strand; PAM type: NRG; PAM sequence: CGG
  source 1..20: mol_type = other DNA
tccgggcctcaccaccaggg

SEQ ID NO: 20409 - DNA, 20 bp, synthetic construct
  misc_feature 1..20: note = Description of Artificial Sequence: Synthetic oligonucleotide
  misc_feature 1..20: note = Target: FXN; (+) strand; PAM type: NRG; PAM sequence: CGG
  source 1..20: mol_type = other DNA
agggcggctctccccactcc

SEQ ID NO: 20410 - DNA, 20 bp, synthetic construct
  misc_feature 1..20: note = Description of Artificial Sequence: Synthetic oligonucleotide
  misc_feature 1..20: note = Target: FXN; (+) strand; PAM type: NRG; PAM sequence: CAG
  source 1..20: mol_type = other DNA
ctcccggcctgctgcccaca

SEQ ID NO: 20411 - DNA, 20 bp, synthetic construct
  misc_feature 1..20: note = Description of Artificial Sequence: Synthetic oligonucleotide
  misc_feature 1..20: note = Target: FXN; (+) strand; PAM type: NRG; PAM sequence: CGG
  source 1..20: mol_type = other DNA
cctgctgcccacacagactg

SEQ ID NO: 20412 - DNA, 20 bp, synthetic construct
  misc_feature 1..20: note = Description of Artificial Sequence: Synthetic oligonucleotide
  misc_feature 1..20: note = Target: FXN; (+) strand; PAM type: NRG; PAM sequence: GGG
  source 1..20: mol_type = other DNA
ctgctgcccacacagactgc

SEQ ID NO: 20413 - DNA, 20 bp, synthetic construct
  misc_feature 1..20: note = Description of Artificial Sequence: Synthetic oligonucleotide
  misc_feature 1..20: note = Target: FXN; (+) strand; PAM type: NRG; PAM sequence: GGG
  source 1..20: mol_type = other DNA
tgctgcccacacagactgcg

SEQ ID NO: 20414 - DNA, 20 bp, synthetic construct
  misc_feature 1..20: note = Description of Artificial Sequence: Synthetic oligonucleotide
  misc_feature 1..20: note = Target: FXN; (+) strand; PAM type: NRG; PAM sequence: CGG
  source 1..20: mol_type = other DNA
ccacacagactgcggggttc

SEQ ID NO: 20415 - DNA, 20 bp, synthetic construct
  misc_feature 1..20: note = Description of Artificial Sequence: Synthetic oligonucleotide
  misc_feature 1..20: note = Target: FXN; (+) strand; PAM type: NRG; PAM sequence: GGG
  source 1..20: mol_type = other DNA
cacacagactgcggggttcc

SEQ ID NO: 20416 - DNA, 20 bp, synthetic construct
  misc_feature 1..20: note = Description of Artificial Sequence: Synthetic oligonucleotide
  misc_feature 1..20: note = Target: FXN; (+) strand; PAM type: NRG; PAM sequence: GGG
  source 1..20: mol_type = other DNA
acacagactgcggggttccg

SEQ ID NO: 20417 - DNA, 20 bp, synthetic construct
  misc_feature 1..20: note = Description of Artificial Sequence: Synthetic oligonucleotide
  misc_feature 1..20: note = Target: FXN; (+) strand; PAM type: NRG; PAM sequence: GGG
  source 1..20: mol_type = other DNA
cacagactgcggggttccgg

SEQ ID NO: 20418 - DNA, 20 bp, synthetic construct
  misc_feature 1..20: note = Description of Artificial Sequence: Synthetic oligonucleotide
  misc_feature 1..20: note = Target: FXN; (+) strand; PAM type: NRG; PAM sequence: GAG
  source 1..20: mol_type = other DNA
cagactgcggggttccgggg

SEQ ID NO: 20419 - DNA, 20 bp, synthetic construct
  misc_feature 1..20: note = Description of Artificial Sequence: Synthetic oligonucleotide
  misc_feature 1..20: note = Target: FXN; (+) strand; PAM type: NRG; PAM sequence: CAG
  source 1..20: mol_type = other DNA
actgcggggttccgggggag

SEQ ID NO: 20420 - DNA, 20 bp, synthetic construct
  misc_feature 1..20: note = Description of Artificial Sequence: Synthetic oligonucleotide
  misc_feature 1..20: note = Target: FXN; (+) strand; PAM type: NRG; PAM sequence: AGG
  source 1..20: mol_type = other DNA
ctgcggggttccgggggagc

SEQ ID NO: 20421 - DNA, 20 bp, synthetic construct
  misc_feature 1..20: note = Description of Artificial Sequence: Synthetic oligonucleotide
  misc_feature 1..20: note = Target: FXN; (+) strand; PAM type: NRG; PAM sequence: CAG
  source 1..20: mol_type = other DNA
ggttccgggggagcaggacc

SEQ ID NO: 20422 - DNA, 20 bp, synthetic construct
  misc_feature 1..20: note = Description of Artificial Sequence: Synthetic oligonucleotide
  misc_feature 1..20: note = Target: FXN; (+) strand; PAM type: NRG; PAM sequence: AGG
  source 1..20: mol_type = other DNA
gttccgggggagcaggaccc

SEQ ID NO: 20423 - DNA, 20 bp, synthetic construct
  misc_feature 1..20: note = Description of Artificial Sequence: Synthetic oligonucleotide
  misc_feature 1..20: note = Target: FXN; (+) strand; PAM type: NRG; PAM sequence: TGG
  source 1..20: mol_type = other DNA
ccgttctgcgcctgtcttct

SEQ ID NO: 20424 - DNA, 20 bp, synthetic construct
  misc_feature 1..20: note = Description of Artificial Sequence: Synthetic oligonucleotide
  misc_feature 1..20: note = Target: FXN; (+) strand; PAM type: NRG; PAM sequence: AAG
  source 1..20: mol_type = other DNA
ttctgcgcctgtcttcttgg

SEQ ID NO: 20425 - DNA, 20 bp, synthetic construct
  misc_feature 1..20: note = Description of Artificial Sequence: Synthetic oligonucleotide
  misc_feature 1..20: note = Target: FXN; (+) strand; PAM type: NRG; PAM sequence: AGG
  source 1..20: mol_type = other DNA
tctgcgcctgtcttcttgga

SEQ ID NO: 20426 - DNA, 20 bp, synthetic construct
  misc_feature 1..20: note = Description of Artificial Sequence: Synthetic oligonucleotide
  misc_feature 1..20: note = Target: FXN; (+) strand; PAM type: NRG; PAM sequence: GAG
  source 1..20: mol_type = other DNA
tgcgcctgtcttcttggaag

SEQ ID NO: 20427 - DNA, 20 bp, synthetic construct
  misc_feature 1..20: note = Description of Artificial Sequence: Synthetic oligonucleotide
  misc_feature 1..20: note = Target: FXN; (+) strand; PAM type: NRG; PAM sequence: CAG
  source 1..20: mol_type = other DNA
gcctgtcttcttggaaggag

SEQ ID NO: 20428 - DNA, 20 bp, synthetic construct
  misc_feature 1..20: note = Description of Artificial Sequence: Synthetic oligonucleotide
  misc_feature 1..20: note = Target: FXN; (+) strand; PAM type: NRG; PAM sequence: AGG
  source 1..20: mol_type = other DNA
cctgtcttcttggaaggagc

SEQ ID NO: 20429 - DNA, 20 bp, synthetic construct
  misc_feature 1..20: note = Description of Artificial Sequence: Synthetic oligonucleotide
  misc_feature 1..20: note = Target: FXN; (+) strand; PAM type: NRG; PAM sequence: CGG
  source 1..20: mol_type = other DNA
tcttcttggaaggagcaggc

SEQ ID NO: 20430 - DNA, 20 bp, synthetic construct
  misc_feature 1..20: note = Description of Artificial Sequence: Synthetic oligonucleotide
  misc_feature 1..20: note = Target: FXN; (+) strand; PAM type: NRG; PAM sequence: GAG
  source 1..20: mol_type = other DNA
ttcttggaaggagcaggccg

SEQ ID NO: 20431 - DNA, 20 bp, synthetic construct
  misc_feature 1..20: note = Description of Artificial Sequence: Synthetic oligonucleotide
  misc_feature 1..20: note = Target: FXN; (+) strand; PAM type: NRG; PAM sequence: CGG
  source 1..20: mol_type = other DNA
ggaaggagcaggccggagcg

SEQ ID NO: 20432 - DNA, 20 bp, synthetic construct
  misc_feature 1..20: note = Description of Artificial Sequence: Synthetic oligonucleotide
  misc_feature 1..20: note = Target: FXN; (+) strand; PAM type: NRG; PAM sequence: GGG
  source 1..20: mol_type = other DNA
gaaggagcaggccggagcgc

SEQ ID NO: 20433 - DNA, 20 bp, synthetic construct
  misc_feature 1..20: note = Description of Artificial Sequence: Synthetic oligonucleotide
  misc_feature 1..20: note = Target: FXN; (+) strand; PAM type: NRG; PAM sequence: GAG
  source 1..20: mol_type = other DNA
aggagcaggccggagcgcgg

SEQ ID NO: 20434 - DNA, 20 bp, synthetic construct
  misc_feature 1..20: note = Description of Artificial Sequence: Synthetic oligonucleotide
  misc_feature 1..20: note = Target: FXN; (+) strand; PAM type: NRG; PAM sequence: TAG
  source 1..20: mol_type = other DNA
cggagcgcgggagcgccgtg

SEQ ID NO: 20435 - DNA, 20 bp, synthetic construct
  misc_feature 1..20: note = Description of Artificial Sequence: Synthetic oligonucleotide
  misc_feature 1..20: note = Target: FXN; (+) strand; PAM type: NRG; PAM sequence: AAG
  source 1..20: mol_type = other DNA
gccgtgtagctgtacctgcg

SEQ ID NO: 20436 - DNA, 20 bp, synthetic construct
  misc_feature 1..20: note = Description of Artificial Sequence: Synthetic oligonucleotide
  misc_feature 1..20: note = Target: FXN; (+) strand; PAM type: NRG; PAM sequence: AGG
  source 1..20: mol_type = other DNA
ccgtgtagctgtacctgcga

SEQ ID NO: 20437 - DNA, 20 bp, synthetic construct
  misc_feature 1..20: note = Description of Artificial Sequence: Synthetic oligonucleotide
  misc_feature 1..20: note = Target: FXN; (+) strand; PAM type: NRG; PAM sequence: CAG
  source 1..20: mol_type = other DNA
tagctgtacctgcgaaggca

SEQ ID NO: 20438 - DNA, 20 bp, synthetic construct
  misc_feature 1..20: note = Description of Artificial Sequence: Synthetic oligonucleotide
  misc_feature 1..20: note = Target: FXN; (+) strand; PAM type: NRG; PAM sequence: AGG
  source 1..20: mol_type = other DNA
agctgtacctgcgaaggcac

SEQ ID NO: 20439 - DNA, 20 bp, synthetic construct
  misc_feature 1..20: note = Description of Artificial Sequence: Synthetic oligonucleotide
  misc_feature 1..20: note = Target: FXN; (+) strand; PAM type: NRG; PAM sequence: CGG
  source 1..20: mol_type = other DNA
tgcgaaggcacaggattccg

SEQ ID NO: 20440 - DNA, 20 bp, synthetic construct
  misc_feature 1..20: note = Description of Artificial Sequence: Synthetic oligonucleotide
  misc_feature 1..20: note = Target: FXN; (+) strand; PAM type: NRG; PAM sequence: GGG
  source 1..20: mol_type = other DNA
gcgaaggcacaggattccgc

SEQ ID NO: 20441 - DNA, 20 bp, synthetic construct
  misc_feature 1..20: note = Description of Artificial Sequence: Synthetic oligonucleotide
  misc_feature 1..20: note = Target: FXN; (+) strand; PAM type: NRG; PAM sequence: AAG
  source 1..20: mol_type = other DNA
aaggcacaggattccgcggg

SEQ ID NO: 20442 - DNA, 20 bp, synthetic construct
  misc_feature 1..20: note = Description of Artificial Sequence: Synthetic oligonucleotide
  misc_feature 1..20: note = Target: FXN; (+) strand; PAM type: NRG; PAM sequence: CAG
  source 1..20: mol_type = other DNA
gattccgcgggaagatcccg

SEQ ID NO: 20443 - DNA, 20 bp, synthetic construct
  misc_feature 1..20: note = Description of Artificial Sequence: Synthetic oligonucleotide
  misc_feature 1..20: note = Target: FXN; (+) strand; PAM type: NRG; PAM sequence: CGG
  source 1..20: mol_type = other DNA
gcgggaagatcccgcagttt

SEQ ID NO: 20444 - DNA, 20 bp, synthetic construct
  misc_feature 1..20: note = Description of Artificial Sequence: Synthetic oligonucleotide
  misc_feature 1..20: note = Target: FXN; (+) strand; PAM type: NRG; PAM sequence: GGG
  source 1..20: mol_type = other DNA
cgggaagatcccgcagtttc

SEQ ID NO: 20445 - DNA, 20 bp, synthetic construct
  misc_feature 1..20: note = Description of Artificial Sequence: Synthetic oligonucleotide
  misc_feature 1..20: note = Target: FXN; (+) strand; PAM type: NRG; PAM sequence: TGG
  source 1..20: mol_type = other DNA
cgtcattgtttttatacctg

SEQ ID NO: 20446 - DNA, 20 bp, synthetic construct
  misc_feature 1..20: note = Description of Artificial Sequence: Synthetic oligonucleotide
  misc_feature 1..20: note = Target: FXN; (+) strand; PAM type: NRG; PAM sequence: TGG
  source 1..20: mol_type = other DNA
gtttttatacctgtggcaaa

SEQ ID NO: 20447 - DNA, 20 bp, synthetic construct
  misc_feature 1..20: note = Description of Artificial Sequence: Synthetic oligonucleotide
  misc_feature 1..20: note = Target: FXN; (+) strand; PAM type: NRG; PAM sequence: CAG
  source 1..20: mol_type = other DNA
cctgtggcaaatggcatgac

SEQ ID NO: 20448 - DNA, 20 bp, synthetic construct
  misc_feature 1..20: note = Description of Artificial Sequence: Synthetic oligonucleotide
  misc_feature 1..20: note = Target: FXN; (+) strand; PAM type: NRG; PAM sequence: CGG
  source 1..20: mol_type = other DNA
aaatggcatgaccagacaca

SEQ ID NO: 20449 - DNA, 20 bp, synthetic construct
  misc_feature 1..20: note = Description of Artificial Sequence: Synthetic oligonucleotide
  misc_feature 1..20: note = Target: FXN; (+) strand; PAM type: NRG; PAM sequence: TGG
  source 1..20: mol_type = other DNA
accagacacacggttatgtc

SEQ ID NO: 20450 - DNA, 20 bp, synthetic construct
  misc_feature 1..20: note = Description of Artificial Sequence: Synthetic oligonucleotide
  misc_feature 1..20: note = Target: FXN; (+) strand; PAM type: NRG; PAM sequence: GAG
  source 1..20: mol_type = other DNA
cagacacacggttatgtctg

SEQ ID NO: 20451 - DNA, 20 bp, synthetic construct
  misc_feature 1..20: note = Description of Artificial Sequence: Synthetic oligonucleotide
  misc_feature 1..20: note = Target: FXN; (+) strand; PAM type: NRG; PAM sequence: TAG
  source 1..20: mol_type = other DNA
tatgtctggagaaacccctg

SEQ ID NO: 20452 - DNA, 20 bp, synthetic construct
  misc_feature 1..20: note = Description of Artificial Sequence: Synthetic oligonucleotide
  misc_feature 1..20: note = Target: FXN; (+) strand; PAM type: NRG; PAM sequence: GAG
  source 1..20: mol_type = other DNA
tgtctggagaaacccctgta

SEQ ID NO: 20453 - DNA, 20 bp, synthetic construct
  misc_feature 1..20: note = Description of Artificial Sequence: Synthetic oligonucleotide
  misc_feature 1..20: note = Target: FXN; (+) strand; PAM type: NRG; PAM sequence: AGG
  source 1..20: mol_type = other DNA
gtctggagaaacccctgtag

SEQ ID NO: 20454 - DNA, 20 bp, synthetic construct
  misc_feature 1..20: note = Description of Artificial Sequence: Synthetic oligonucleotide
  misc_feature 1..20: note = Target: FXN; (+) strand; PAM type: NRG; PAM sequence: GAG
  source 1..20: mol_type = other DNA
ctggagaaacccctgtagag

SEQ ID NO: 20455 - DNA, 20 bp, synthetic construct
  misc_feature 1..20: note = Description of Artificial Sequence: Synthetic oligonucleotide
  misc_feature 1..20: note = Target: FXN; (+) strand; PAM type: NRG; PAM sequence: CAG
  source 1..20: mol_type = other DNA
gagaaacccctgtagaggag

SEQ ID NO: 20456 - DNA, 20 bp, synthetic construct
  misc_feature 1..20: note = Description of Artificial Sequence: Synthetic oligonucleotide
  misc_feature 1..20: note = Target: FXN; (+) strand; PAM type: NRG; PAM sequence: AGG
  source 1..20: mol_type = other DNA
agaaacccctgtagaggagc

SEQ ID NO: 20457 - DNA, 20 bp, synthetic construct
  misc_feature 1..20: note = Description of Artificial Sequence: Synthetic oligonucleotide
  misc_feature 1..20: note = Target: FXN; (+) strand; PAM type: NRG; PAM sequence: GAG
  source 1..20: mol_type = other DNA
aaacccctgtagaggagcag

SEQ ID NO: 20458 - DNA, 20 bp, synthetic construct
  misc_feature 1..20: note = Description of Artificial Sequence: Synthetic oligonucleotide
  misc_feature 1..20: note = Target: FXN; (+) strand; PAM type: NRG; PAM sequence: AGG
  source 1..20: mol_type = other DNA
aacccctgtagaggagcagg

SEQ ID NO: 20459 - DNA, 20 bp, synthetic construct
  misc_feature 1..20: note = Description of Artificial Sequence: Synthetic oligonucleotide
  misc_feature 1..20: note = Target: FXN; (+) strand; PAM type: NRG; PAM sequence: TGG
  source 1..20: mol_type = other DNA
tgtagaggagcaggaggttg

SEQ ID NO: 20460 - DNA, 20 bp, synthetic construct
  misc_feature 1..20: note = Description of Artificial Sequence: Synthetic oligonucleotide
  misc_feature 1..20: note = Target: FXN; (+) strand; PAM type: NRG; PAM sequence: TGG
  source 1..20: mol_type = other DNA
aggaggttgtggacatgctg

SEQ ID NO: 20461 - DNA, 20 bp, synthetic construct
  misc_feature 1..20: note = Description of Artificial Sequence: Synthetic oligonucleotide
  misc_feature 1..20: note = Target: FXN; (+) strand; PAM type: NRG; PAM sequence: CGG
  source 1..20: mol_type = other DNA
gttgtggacatgctgtggcc

SEQ ID NO: 20462 - DNA, 20 bp, synthetic construct
  misc_feature 1..20: note = Description of Artificial Sequence: Synthetic oligonucleotide
  misc_feature 1..20: note = Target: FXN; (+) strand; PAM type: NRG; PAM sequence: CAG
  source 1..20: mol_type = other DNA
tggacatgctgtggcccgga

SEQ ID NO: 20463 - DNA, 20 bp, synthetic construct
  misc_feature 1..20: note = Description of Artificial Sequence: Synthetic oligonucleotide
  misc_feature 1..20: note = Target: FXN; (+) strand; PAM type: NRG; PAM sequence: TGG
  source 1..20: mol_type = other DNA
acatgctgtggcccggacag

SEQ ID NO: 20464 - DNA, 20 bp, synthetic construct
  misc_feature 1..20: note = Description of Artificial Sequence: Synthetic oligonucleotide
  misc_feature 1..20: note = Target: FXN; (+) strand; PAM type: NRG; PAM sequence: GAG
  source 1..20: mol_type = other DNA
tggcccggacagtggctgcc

SEQ ID NO: 20465 - DNA, 20 bp, synthetic construct
  misc_feature 1..20: note = Description of Artificial Sequence: Synthetic oligonucleotide
  misc_feature 1..20: note = Target: FXN; (+) strand; PAM type: NRG; PAM sequence: CAG
  source 1..20: mol_type = other DNA
cccggacagtggctgccgag

SEQ ID NO: 20466 - DNA, 20 bp, synthetic construct
  misc_feature 1..20: note = Description of Artificial Sequence: Synthetic oligonucleotide
  misc_feature 1..20: note = Target: FXN; (+) strand; PAM type: NRG; PAM sequence: TGG
  source 1..20: mol_type = other DNA
gacagtggctgccgagcagt

SEQ ID NO: 20467 - DNA, 20 bp, synthetic construct
  misc_feature 1..20: note = Description of Artificial Sequence: Synthetic oligonucleotide
  misc_feature 1..20: note = Target: FXN; (+) strand; PAM type: NRG; PAM sequence: GAG
  source 1..20: mol_type = other DNA
cagtggctgccgagcagttg

SEQ ID NO: 20468 - DNA, 20 bp, synthetic construct
  misc_feature 1..20: note = Description of Artificial Sequence: Synthetic oligonucleotide
  misc_feature 1..20: note = Target: FXN; (+) strand; PAM type: NRG; PAM sequence: TGG
  source 1..20: mol_type = other DNA
gagcctgcacccgcccaact

SEQ ID NO: 20469 - DNA, 20 bp, synthetic construct
  misc_feature 1..20: note = Description of Artificial Sequence: Synthetic oligonucleotide
  misc_feature 1..20: note = Target: FXN; (+) strand; PAM type: NRG; PAM sequence: AAG
  source 1..20: mol_type = other DNA
gcacccgcccaacttggcta

SEQ ID NO: 20470 - DNA, 20 bp, synthetic construct
  misc_feature 1..20: note = Description of Artificial Sequence: Synthetic oligonucleotide
  misc_feature 1..20: note = Target: FXN; (+) strand; PAM type: NRG; PAM sequence: AAG
  source 1..20: mol_type = other DNA
cccgcccaacttggctaaag

SEQ ID NO: 20471 - DNA, 20 bp, synthetic construct
  misc_feature 1..20: note = Description of Artificial Sequence: Synthetic oligonucleotide
  misc_feature 1..20: note = Target: FXN; (+) strand; PAM type: NRG; PAM sequence: TGG
  source 1..20: mol_type = other DNA
agaagtccccatactctctg

SEQ ID NO: 20472 - DNA, 20 bp, synthetic construct
  misc_feature 1..20: note = Description of Artificial Sequence: Synthetic oligonucleotide
  misc_feature 1..20: note = Target: FXN; (+) strand; PAM type: NRG; PAM sequence: AAG
  source 1..20: mol_type = other DNA
tccccatactctctgtggaa

SEQ ID NO: 20473 - DNA, 20 bp, synthetic construct
  misc_feature 1..20: note = Description of Artificial Sequence: Synthetic oligonucleotide
  misc_feature 1..20: note = Target: FXN; (+) strand; PAM type: NRG; PAM sequence: CAG
  source 1..20: mol_type = other DNA
ctctctgtggaaaagatttc

SEQ ID NO: 20474 - DNA, 20 bp, synthetic construct
  misc_feature 1..20: note = Description of Artificial Sequence: Synthetic oligonucleotide
  misc_feature 1..20: note = Target: FXN; (+) strand; PAM type: NRG; PAM sequence: AAG
  source 1..20: mol_type = other DNA
tctgtggaaaagatttccag

SEQ ID NO: 20475 - DNA, 20 bp, synthetic construct
  misc_feature 1..20: note = Description of Artificial Sequence: Synthetic oligonucleotide
  misc_feature 1..20: note = Target: FXN; (+) strand; PAM type: NRG; PAM sequence: AAG
  source 1..20: mol_type = other DNA
aagctgttgtgtcaatatca

SEQ ID NO: 20476 - DNA, 20 bp, synthetic construct
  misc_feature 1..20: note = Description of Artificial Sequence: Synthetic oligonucleotide
  misc_feature 1..20: note = Target: FXN; (+) strand; PAM type: NRG; PAM sequence: AAG
  source 1..20: mol_type = other DNA
acatgaaattatcaacaata

SEQ ID NO: 20477 - DNA, 20 bp, synthetic construct
  misc_feature 1..20: note = Description of Artificial Sequence: Synthetic oligonucleotide
  misc_feature 1..20: note = Target: FXN; (+) strand; PAM type: NRG; PAM sequence: GAG
  source 1..20: mol_type = other DNA
caacaataaagatcatcctt

SEQ ID NO: 20478 - DNA, 20 bp, synthetic construct
  misc_feature 1..20: note = Description of Artificial Sequence: Synthetic oligonucleotide
  misc_feature 1..20: note = Target: FXN; (+) strand; PAM type: NRG; PAM sequence: AAG
  source 1..20: mol_type = other DNA
atccttgagtctgctttgaa

SEQ ID NO: 20479 - DNA, 20 bp, synthetic construct
  misc_feature 1..20: note = Description of Artificial Sequence: Synthetic oligonucleotide
  misc_feature 1..20: note = Target: FXN; (+) strand; PAM type: NRG; PAM sequence: TAG
  source 1..20: mol_type = other DNA
cttgagtctgctttgaaaag

SEQ ID NO: 20480 - DNA, 20 bp, synthetic construct
  misc_feature 1..20: note = Description of Artificial Sequence: Synthetic oligonucleotide
  misc_feature 1..20: note = Target: FXN; (+) strand; PAM type: NRG; PAM sequence: AGG
  source 1..20: mol_type = other DNA
ttgagtctgctttgaaaagt

SEQ ID NO: 20481 - DNA, 20 bp, synthetic construct
  misc_feature 1..20: note = Description of Artificial Sequence: Synthetic oligonucleotide
  misc_feature 1..20: note = Target: FXN; (+) strand; PAM type: NRG; PAM sequence: GGG
  source 1..20: mol_type = other DNA
tgagtctgctttgaaaagta

SEQ ID NO: 20482 - DNA, 20 bp, synthetic construct
  misc_feature 1..20: note = Description of Artificial Sequence: Synthetic oligonucleotide
  misc_feature 1..20: note = Target: FXN; (+) strand; PAM type: NRG; PAM sequence: CAG
  source 1..20: mol_type = other DNA
aaaagtagggtgaaattctg

SEQ ID NO: 20483 - DNA, 20 bp, synthetic construct
  misc_feature 1..20: note = Description of Artificial Sequence: Synthetic oligonucleotide
  misc_feature 1..20: note = Target: FXN; (+) strand; PAM type: NRG; PAM sequence: GAG
  source 1..20: mol_type = other DNA
aagtagggtgaaattctgca

SEQ ID NO: 20484 - DNA, 20 bp, synthetic construct
  misc_feature 1..20: note = Description of Artificial Sequence: Synthetic oligonucleotide
  misc_feature 1..20: note = Target: FXN; (+) strand; PAM type: NRG; PAM sequence: AGG
  source 1..20: mol_type = other DNA
agtagggtgaaattctgcag

SEQ ID NO: 20485 - DNA, 20 bp, synthetic construct
  misc_feature 1..20: note = Description of Artificial Sequence: Synthetic oligonucleotide
  misc_feature 1..20: note = Target: FXN; (+) strand; PAM type: NRG; PAM sequence: TGG
  source 1..20: mol_type = other DNA
attctgcagaggcattcaac

SEQ ID NO: 20486 - DNA, 20 bp, synthetic construct
  misc_feature 1..20: note = Description of Artificial Sequence: Synthetic oligonucleotide
  misc_feature 1..20: note = Target: FXN; (+) strand; PAM type: NRG; PAM sequence: AAG
  source 1..20: mol_type = other DNA
tgcagaggcattcaactggc

SEQ ID NO: 20487 - DNA, 20 bp, synthetic construct
  misc_feature 1..20: note = Description of Artificial Sequence: Synthetic oligonucleotide
  misc_feature 1..20: note = Target: FXN; (+) strand; PAM type: NRG; PAM sequence: TAG
  source 1..20: mol_type = other DNA
ctggcaagataccaccctca

SEQ ID NO: 20488 - DNA, 20 bp, synthetic construct
  misc_feature 1..20: note = Description of Artificial Sequence: Synthetic oligonucleotide
  misc_feature 1..20: note = Target: FXN; (+) strand; PAM type: NRG; PAM sequence: CAG
  source 1..20: mol_type = other DNA
caagataccaccctcatagc

SEQ ID NO: 20489 - DNA, 20 bp, synthetic construct
  misc_feature 1..20: note = Description of Artificial Sequence: Synthetic oligonucleotide
  misc_feature 1..20: note = Target: FXN; (+) strand; PAM type: NRG; PAM sequence: CAG
  source 1..20: mol_type = other DNA
caccctcatagccagatctg

SEQ ID NO: 20490 - DNA, 20 bp, synthetic construct
  misc_feature 1..20: note = Description of Artificial Sequence: Synthetic oligonucleotide
  misc_feature 1..20: note = Target: FXN; (+) strand; PAM type: NRG; PAM sequence: AGG
  source 1..20: mol_type = other DNA
accctcatagccagatctgc

SEQ ID NO: 20491 - DNA, 20 bp, synthetic construct
  misc_feature 1..20: note = Description of Artificial Sequence: Synthetic oligonucleotide
  misc_feature 1..20: note = Target: FXN; (+) strand; PAM type: NRG; PAM sequence: CAG
  source 1..20: mol_type = other DNA
atagccagatctgcaggtct

SEQ ID NO: 20492 - DNA, 20 bp, synthetic construct
  misc_feature 1..20: note = Description of Artificial Sequence: Synthetic oligonucleotide
  misc_feature 1..20: note = Target: FXN; (+) strand; PAM type: NRG; PAM sequence: CAG
  source 1..20: mol_type = other DNA
gcaggtctcagccatcatgc

SEQ ID NO: 20493 - DNA, 20 bp, synthetic construct
  misc_feature 1..20: note = Description of Artificial Sequence: Synthetic oligonucleotide
  misc_feature 1..20: note = Target: FXN; (+) strand; PAM type: NRG; PAM sequence: AGG
  source 1..20: mol_type = other DNA
caggtctcagccatcatgcc

SEQ ID NO: 20494 - DNA, 20 bp, synthetic construct
  misc_feature 1..20: note = Description of Artificial Sequence: Synthetic oligonucleotide
  misc_feature 1..20: note = Target: FXN; (+) strand; PAM type: NRG; PAM sequence: GGG
  source 1..20: mol_type = other DNA
aggtctcagccatcatgcca

SEQ ID NO: 20495 - DNA, 20 bp, synthetic construct
  misc_feature 1..20: note = Description of Artificial Sequence: Synthetic oligonucleotide
  misc_feature 1..20: note = Target: FXN; (+) strand; PAM type: NRG; PAM sequence: CAG
  source 1..20: mol_type = other DNA
atgctccattcaccactcct

SEQ ID NO: 20496 - DNA, 20 bp, synthetic construct
  misc_feature 1..20: note = Description of Artificial Sequence: Synthetic oligonucleotide
  misc_feature 1..20: note = Target: FXN; (+) strand; PAM type: NRG; PAM sequence: TGG
  source 1..20: mol_type = other DNA
cactcctcagcttctgcttc

SEQ ID NO: 20497 - DNA, 20 bp, synthetic construct
  misc_feature 1..20: note = Description of Artificial Sequence: Synthetic oligonucleotide
  misc_feature 1..20: note = Target: FXN; (+) strand; PAM type: NRG; PAM sequence: CAG
  source 1..20: mol_type = other DNA
tcagcttctgcttctggttt

SEQ ID NO: 20498 - DNA, 20 bp, synthetic construct
  misc_feature 1..20: note = Description of Artificial Sequence: Synthetic oligonucleotide
  misc_feature 1..20: note = Target: FXN; (+) strand; PAM type: NRG; PAM sequence: GAG
  source 1..20: mol_type = other DNA
agcttctgcttctggtttca

SEQ ID NO: 20499 - DNA, 20 bp, synthetic construct
  misc_feature 1..20: note = Description of Artificial Sequence: Synthetic oligonucleotide
  misc_feature 1..20: note = Target: FXN; (+) strand; PAM type: NRG; PAM sequence: AGG
  source 1..20: mol_type = other DNA
gcttctgcttctggtttcag

SEQ ID NO: 20500 - DNA, 20 bp, synthetic construct
  misc_feature 1..20: note = Description of Artificial Sequence: Synthetic oligonucleotide
  misc_feature 1..20: note = Target: FXN; (+) strand; PAM type: NRG; PAM sequence: TGG
  source 1..20: mol_type = other DNA
ggtttcagaggtctctgtat

SEQ ID NO: 20501 - DNA, 20 bp, synthetic construct
  misc_feature 1..20: note = Description of Artificial Sequence: Synthetic oligonucleotide
  misc_feature 1..20: note = Target: FXN; (+) strand; PAM type: NRG; PAM sequence: GAG
  source 1..20: mol_type = other DNA
tttcagaggtctctgtattg

SEQ ID NO: 20502 - DNA, 20 bp, synthetic construct
  misc_feature 1..20: note = Description of Artificial Sequence: Synthetic oligonucleotide
  misc_feature 1..20: note = Target: FXN; (+) strand; PAM type: NRG; PAM sequence: AGG
  source 1..20: mol_type = other DNA
ttcagaggtctctgtattgg

SEQ ID NO: 20503 - DNA, 20 bp, synthetic construct
  misc_feature 1..20: note = Description of Artificial Sequence: Synthetic oligonucleotide
  misc_feature 1..20: note = Target: FXN; (+) strand; PAM type: NRG; PAM sequence: GGG
  source 1..20: mol_type = other DNA
tcagaggtctctgtattgga

SEQ ID NO: 20504 - DNA, 20 bp, synthetic construct
  misc_feature 1..20: note = Description of Artificial Sequence: Synthetic oligonucleotide
  misc_feature 1..20: note = Target: FXN; (+) strand; PAM type: NRG; PAM sequence: GGG
  source 1..20: mol_type = other DNA
cagaggtctctgtattggag

SEQ ID NO: 20505 - DNA, 20 bp, synthetic construct
  misc_feature 1..20: note = Description of Artificial Sequence: Synthetic oligonucleotide
  misc_feature 1..20: note = Target: FXN; (+) strand; PAM type: NRG; PAM sequence: AAG
  source 1..20: mol_type = other DNA
tctgtattggaggggcttta

SEQ ID NO: 20506 - DNA, 20 bp, synthetic construct
  misc_feature 1..20: note = Description of Artificial Sequence: Synthetic oligonucleotide
  misc_feature 1..20: note = Target: FXN; (+) strand; PAM type: NRG; PAM sequence: AAG
  source 1..20: mol_type = other DNA
tattggaggggctttaaagc

SEQ ID NO: 20507 - DNA, 20 bp, synthetic construct
  misc_feature 1..20: note = Description of Artificial Sequence: Synthetic oligonucleotide
  misc_feature 1..20: note = Target: FXN; (+) strand; PAM type: NRG; PAM sequence: AAG
  source 1..20: mol_type = other DNA
tggaggggctttaaagcaag

SEQ ID NO: 20508 - DNA, 20 bp, synthetic construct
  misc_feature 1..20: note = Description of Artificial Sequence: Synthetic oligonucleotide
  misc_feature 1..20: note = Target: FXN; (+) strand; PAM type: NRG; PAM sequence: AGG
  source 1..20: mol_type = other DNA
ggaggggctttaaagcaaga

SEQ ID NO: 20509 - DNA, 20 bp, synthetic construct
  misc_feature 1..20: note = Description of Artificial Sequence: Synthetic oligonucleotide
  misc_feature 1..20: note = Target: FXN; (+) strand; PAM type: NRG; PAM sequence: GGG
  source 1..20: mol_type = other DNA
gaggggctttaaagcaagaa

SEQ ID NO: 20510 - DNA, 20 bp, synthetic construct
  misc_feature 1..20: note = Description of Artificial Sequence: Synthetic oligonucleotide
  misc_feature 1..20: note = Target: FXN; (+) strand; PAM type: NRG; PAM sequence: CAG
  source 1..20: mol_type = other DNA
tacccacttactcttattca

SEQ ID NO: 20511 - DNA, 20 bp, synthetic construct
  misc_feature 1..20: note = Description of Artificial Sequence: Synthetic oligonucleotide
  misc_feature 1..20: note = Target: FXN; (+) strand; PAM type: NRG; PAM sequence: CAG
  source 1..20: mol_type = other DNA
tattcacagatgtgaatatg

SEQ ID NO: 20512 - DNA, 20 bp, synthetic construct
  misc_feature 1..20: note = Description of Artificial Sequence: Synthetic oligonucleotide
  misc_feature 1..20: note = Target: FXN; (+) strand; PAM type: NRG; PAM sequence: AGG
  source 1..20: mol_type = other DNA
attcacagatgtgaatatgc

SEQ ID NO: 20513 - DNA, 20 bp, synthetic construct
  misc_feature 1..20: note = Description of Artificial Sequence: Synthetic oligonucleotide
  misc_feature 1..20: note = Target: FXN; (+) strand; PAM type: NRG; PAM sequence: CAG
  source 1..20: mol_type = other DNA
cagatgtgaatatgcaggtc

SEQ ID NO: 20514 - DNA, 20 bp, synthetic construct
  misc_feature 1..20: note = Description of Artificial Sequence: Synthetic oligonucleotide
  misc_feature 1..20: note = Target: FXN; (+) strand; PAM type: NRG; PAM sequence: TGG
  source 1..20: mol_type = other DNA
atgtgaatatgcaggtccag

SEQ ID NO: 20515 - DNA, 20 bp, synthetic construct
  misc_feature 1..20: note = Description of Artificial Sequence: Synthetic oligonucleotide
  misc_feature 1..20: note = Target: FXN; (+) strand; PAM type: NRG; PAM sequence: GGG
  source 1..20: mol_type = other DNA
tgtgaatatgcaggtccagt

SEQ ID NO: 20516 - DNA, 20 bp, synthetic construct
  misc_feature 1..20: note = Description of Artificial Sequence: Synthetic oligonucleotide
  misc_feature 1..20: note = Target: FXN; (+) strand; PAM type: NRG; PAM sequence: GGG
  source 1..20: mol_type = other DNA
gtgaatatgcaggtccagtg

SEQ ID NO: 20517 - DNA, 20 bp, synthetic construct
  misc_feature 1..20: note = Description of Artificial Sequence: Synthetic oligonucleotide
  misc_feature 1..20: note = Target: FXN; (+) strand; PAM type: NRG; PAM sequence: AAG
  source 1..20: mol_type = other DNA
atatgcaggtccagtgggga

SEQ ID NO: 20518 - DNA, 20 bp, synthetic construct
  misc_feature 1..20: note = Description of Artificial Sequence: Synthetic oligonucleotide
  misc_feature 1..20: note = Target: FXN; (+) strand; PAM type: NRG; PAM sequence: AAG
  source 1..20: mol_type = other DNA
tggggaaagtgacatgtcct

SEQ ID NO: 20519 - DNA, 20 bp, synthetic construct
  misc_feature 1..20: note = Description of Artificial Sequence: Synthetic oligonucleotide
  misc_feature 1..20: note = Target: FXN; (+) strand; PAM type: NRG; PAM sequence: CAG
  source 1..20: mol_type = other DNA
gaaagtgacatgtcctaagt

SEQ ID NO: 20520 - DNA, 20 bp, synthetic construct
  misc_feature 1..20: note = Description of Artificial Sequence: Synthetic oligonucleotide
  misc_feature 1..20: note = Target: FXN; (+) strand; PAM type: NRG; PAM sequence: TAG
  source 1..20: mol_type = other DNA
tgacatgtcctaagtcagaa

SEQ ID NO: 20521 - DNA, 20 bp, synthetic construct
  misc_feature 1..20: note = Description of Artificial Sequence: Synthetic oligonucleotide
  misc_feature 1..20: note = Target: FXN; (+) strand; PAM type: NRG; PAM sequence: GAG
  source 1..20: mol_type = other DNA
acatgtcctaagtcagaata

SEQ ID NO: 20522 - DNA, 20 bp, synthetic construct
  misc_feature 1..20: note = Description of Artificial Sequence: Synthetic oligonucleotide
  misc_feature 1..20: note = Target: FXN; (+) strand; PAM type: NRG; PAM sequence: AAG
  source 1..20: mol_type = other DNA
taagtcagaatagagtcaac

SEQ ID NO: 20523 - DNA, 20 bp, synthetic construct
  misc_feature 1..20: note = Description of Artificial Sequence: Synthetic oligonucleotide
  misc_feature 1..20: note = Target: FXN; (+) strand; PAM type: NRG; PAM sequence: CAG
  source 1..20: mol_type = other DNA
gaatagagtcaacaagaaaa

SEQ ID NO: 20524 - DNA, 20 bp, synthetic construct
  misc_feature 1..20: note = Description of Artificial Sequence: Synthetic oligonucleotide
  misc_feature 1..20: note = Target: FXN; (+) strand; PAM type: NRG; PAM sequence: AGG
  source 1..20: mol_type = other DNA
aatagagtcaacaagaaaac

SEQ ID NO: 20525 - DNA, 20 bp, synthetic construct
  misc_feature 1..20: note = Description of Artificial Sequence: Synthetic oligonucleotide
  misc_feature 1..20: note = Target: FXN; (+) strand; PAM type: NRG; PAM sequence: GGG
  source 1..20: mol_type = other DNA
atagagtcaacaagaaaaca

SEQ ID NO: 20526 - DNA, 20 bp, synthetic construct
  misc_feature 1..20: note = Description of Artificial Sequence: Synthetic oligonucleotide
  misc_feature 1..20: note = Target: FXN; (+) strand; PAM type: NRG; PAM sequence: TAG
  source 1..20: mol_type = other DNA
aaacagggcccaaaatgact

SEQ ID NO: 20527 - DNA, 20 bp, synthetic construct
  misc_feature 1..20: note = Description of Artificial Sequence: Synthetic oligonucleotide
  misc_feature 1..20: note = Target: FXN; (+) strand; PAM type: NRG; PAM sequence: TAG
  source 1..20: mol_type = other DNA
gcccaaaatgacttagcctc

SEQ ID NO: 20528 - DNA, 20 bp, synthetic construct
  misc_feature 1..20: note = Description of Artificial Sequence: Synthetic oligonucleotide
  misc_feature 1..20: note = Target: FXN; (+) strand; PAM type: NRG; PAM sequence: TGG
  source 1..20: mol_type = other DNA
acttagcctctagtgtataa

SEQ ID NO: 20529 - DNA, 20 bp, synthetic construct
  misc_feature 1..20: note = Description of Artificial Sequence: Synthetic oligonucleotide
  misc_feature 1..20: note = Target: FXN; (+) strand; PAM type: NRG; PAM sequence: GGG
  source 1..20: mol_type = other DNA
cttagcctctagtgtataat

SEQ ID NO: 20530 - DNA, 20 bp, synthetic construct
  misc_feature 1..20: note = Description of Artificial Sequence: Synthetic oligonucleotide
  misc_feature 1..20: note = Target: FXN; (+) strand; PAM type: NRG; PAM sequence: GAG
  source 1..20: mol_type = other DNA
agtgtataatgggcattgat

SEQ ID NO: 20531 - DNA, 20 bp, synthetic construct
  misc_feature 1..20: note = Description of Artificial Sequence: Synthetic oligonucleotide
  misc_feature 1..20: note = Target: FXN; (+) strand; PAM type: NRG; PAM sequence: TGG
  source 1..20: mol_type = other DNA
aatgggcattgatgagctac

SEQ ID NO: 20532 - DNA, 20 bp, synthetic construct
  misc_feature 1..20: note = Description of Artificial Sequence: Synthetic oligonucleotide
  misc_feature 1..20: note = Target: FXN; (+) strand; PAM type: NRG; PAM sequence: CAG
  source 1..20: mol_type = other DNA
ttgatgagctactggaaata

SEQ ID NO: 20533 - DNA, 20 bp, synthetic construct
  misc_feature 1..20: note = Description of Artificial Sequence: Synthetic oligonucleotide
  misc_feature 1..20: note = Target: FXN; (+) strand; PAM type: NRG; PAM sequence: GAG
  source 1..20: mol_type = other DNA
gatgagctactggaaataca

SEQ ID NO: 20534 - DNA, 20 bp, synthetic construct
  misc_feature 1..20: note = Description of Artificial Sequence: Synthetic oligonucleotide
  misc_feature 1..20: note = Target: FXN; (+) strand; PAM type: NRG; PAM sequence: AAG
  source 1..20: mol_type = other DNA
ctactggaaatacagagatg

SEQ ID NO: 20535 - DNA, 20 bp, synthetic construct
  misc_feature 1..20: note = Description of Artificial Sequence: Synthetic oligonucleotide
  misc_feature 1..20: note = Target: FXN; (+) strand; PAM type: NRG; PAM sequence: CAG
  source 1..20: mol_type = other DNA
atacagagatgaagaaaaca

SEQ ID NO: 20536 - DNA, 20 bp, synthetic construct
  misc_feature 1..20: note = Description of Artificial Sequence: Synthetic oligonucleotide
  misc_feature 1..20: note = Target: FXN; (+) strand; PAM type: NRG; PAM sequence: AAG
  source 1..20: mol_type = other DNA
gaaaacacagtcccatcttc

SEQ ID NO: 20537 - DNA, 20 bp, synthetic construct
  misc_feature 1..20: note = Description of Artificial Sequence: Synthetic oligonucleotide
  misc_feature 1..20: note = Target: FXN; (+) strand; PAM type: NRG; PAM sequence: AGG
  source 1..20: mol_type = other DNA
aaaacacagtcccatcttca

SEQ ID NO: 20538 - DNA, 20 bp, synthetic construct
  misc_feature 1..20: note = Description of Artificial Sequence: Synthetic oligonucleotide
  misc_feature 1..20: note = Target: FXN; (+) strand; PAM type: NRG; PAM sequence: GAG
  source 1..20: mol_type = other DNA
aacacagtcccatcttcaag

SEQ ID NO: 20539 - DNA, 20 bp, synthetic construct
  misc_feature 1..20: note = Description of Artificial Sequence: Synthetic oligonucleotide
  misc_feature 1..20: note = Target: FXN; (+) strand; PAM type: NRG; PAM sequence: TAG
  source 1..20: mol_type = other DNA
catcttcaaggagctcaatc

SEQ ID NO: 20540 - DNA, 20 bp, synthetic construct
  misc_feature 1..20: note = Description of Artificial Sequence: Synthetic oligonucleotide
  misc_feature 1..20: note = Target: FXN; (+) strand; PAM type: NRG; PAM sequence: AAG
  source 1..20: mol_type = other DNA
ttcaaggagctcaatctagc

SEQ ID NO: 20541 - DNA, 20 bp, synthetic construct
  misc_feature 1..20: note = Description of Artificial Sequence: Synthetic oligonucleotide
  misc_feature 1..20: note = Target: FXN; (+) strand; PAM type: NRG; PAM sequence: AGG
  source 1..20: mol_type = other DNA
tcaaggagctcaatctagca

SEQ ID NO: 20542 - DNA, 20 bp, synthetic construct
  misc_feature 1..20: note = Description of Artificial Sequence: Synthetic oligonucleotide
  misc_feature 1..20: note = Target: FXN; (+) strand; PAM type: NRG; PAM sequence: GGG
  source 1..20: mol_type = other DNA
caaggagctcaatctagcaa

SEQ ID NO: 20543 - DNA, 20 bp, synthetic construct
  misc_feature 1..20: note = Description of Artificial Sequence: Synthetic oligonucleotide
  misc_feature 1..20: note = Target: FXN; (+) strand; PAM type: NRG; PAM sequence: GAG
  source 1..20: mol_type = other DNA
aggagctcaatctagcaagg

SEQ ID NO: 20544 - DNA, 20 bp, synthetic construct
  misc_feature 1..20: note = Description of Artificial Sequence: Synthetic oligonucleotide
  misc_feature 1..20: note = Target: FXN; (+) strand; PAM type: NRG; PAM sequence: CAG
  source 1..20: mol_type = other DNA
gctcaatctagcaagggaga

SEQ ID NO: 20545 - DNA, 20 bp, synthetic construct
  misc_feature 1..20: note = Description of Artificial Sequence: Synthetic oligonucleotide
  misc_feature 1..20: note = Target: FXN; (+) strand; PAM type: NRG; PAM sequence: TAG
  source 1..20: mol_type = other DNA
caagggagacagactctttg

SEQ ID NO: 20546 - DNA, 20 bp, synthetic construct
  misc_feature 1..20: note = Description of Artificial Sequence: Synthetic oligonucleotide
  misc_feature 1..20: note = Target: FXN; (+) strand; PAM type: NRG; PAM sequence: AGG
  source 1..20: mol_type = other DNA
aagggagacagactctttgt

SEQ ID NO: 20547 - DNA, 20 bp, synthetic construct
  misc_feature 1..20: note = Description of Artificial Sequence: Synthetic oligonucleotide
  misc_feature 1..20: note = Target: FXN; (+) strand; PAM type: NRG; PAM sequence: TGG
  source 1..20: mol_type = other DNA
ggagacagactctttgtagg

SEQ ID NO: 20548 - DNA, 20 bp, synthetic construct
  misc_feature 1..20: note = Description of Artificial Sequence: Synthetic oligonucleotide
  misc_feature 1..20: note = Target: FXN; (+) strand; PAM type: NRG; PAM sequence: GGG
  source 1..20: mol_type = other DNA
gagacagactctttgtaggt

SEQ ID NO: 20549 - DNA, 20 bp, synthetic construct
  misc_feature 1..20: note = Description of Artificial Sequence: Synthetic oligonucleotide
  misc_feature 1..20: note = Target: FXN; (+) strand; PAM type: NRG; PAM sequence: CGG
  source 1..20: mol_type = other DNA
agactctttgtaggtgggac

SEQ ID NO: 20550 - DNA, 20 bp, synthetic construct
  misc_feature 1..20: note = Description of Artificial Sequence: Synthetic oligonucleotide
  misc_feature 1..20: note = Target: FXN; (+) strand; PAM type: NRG; PAM sequence: GGG
  source 1..20: mol_type = other DNA
gactctttgtaggtgggacc

SEQ ID NO: 20551 - DNA, 20 bp, synthetic construct
  misc_feature 1..20: note = Description of Artificial Sequence: Synthetic oligonucleotide
  misc_feature 1..20: note = Target: FXN; (+) strand; PAM type: NRG; PAM sequence: CAG
  source 1..20: mol_type = other DNA
ggtgggaccgggcttccctg

SEQ ID NO: 20552 - DNA, 20 bp, synthetic construct
  misc_feature 1..20: note = Description of Artificial Sequence: Synthetic oligonucleotide
  misc_feature 1..20: note = Target: FXN; (+) strand; PAM type: NRG; PAM sequence: CAG
  source 1..20: mol_type = other DNA
gggaccgggcttccctgcag

SEQ ID NO: 20553 - DNA, 20 bp, synthetic construct
  misc_feature 1..20: note = Description of Artificial Sequence: Synthetic oligonucleotide
  misc_feature 1..20: note = Target: FXN; (+) strand; PAM type: NRG; PAM sequence: AAG
  source 1..20: mol_type = other DNA
accgggcttccctgcagcag

SEQ ID NO: 20554 - DNA, 20 bp, synthetic construct
  misc_feature 1..20: note = Description of Artificial Sequence: Synthetic oligonucleotide
  misc_feature 1..20: note = Target: FXN; (+) strand; PAM type: NRG; PAM sequence: AGG
  source 1..20: mol_type = other DNA
ccgggcttccctgcagcaga

SEQ ID NO: 20555 - DNA, 20 bp, synthetic construct
  misc_feature 1..20: note = Description of Artificial Sequence: Synthetic oligonucleotide
  misc_feature 1..20: note = Target: FXN; (+) strand; PAM type: NRG; PAM sequence: AAG
  source 1..20: mol_type = other DNA
ggcttccctgcagcagaagg

SEQ ID NO: 20556 - DNA, 20 bp, synthetic construct
  misc_feature 1..20: note = Description of Artificial Sequence: Synthetic oligonucleotide
  misc_feature 1..20: note = Target: FXN; (+) strand; PAM type: NRG; PAM sequence: TGG
  source 1..20: mol_type = other DNA
agcagaaggaagcttgaaat

SEQ ID NO: 20557 - DNA, 20 bp, synthetic construct
  misc_feature 1..20: note = Description of Artificial Sequence: Synthetic oligonucleotide
  misc_feature 1..20: note = Target: FXN; (+) strand; PAM type: NRG; PAM sequence: GAG
  source 1..20: mol_type = other DNA
ggaagcttgaaattggtaac

SEQ ID NO: 20558 - DNA, 20 bp, synthetic construct
  misc_feature 1..20: note = Description of Artificial Sequence: Synthetic oligonucleotide
  misc_feature 1..20: note = Target: FXN; (+) strand; PAM type: NRG; PAM sequence: CAG
  source 1..20: mol_type = other DNA
ttgaaattggtaacgagcct

SEQ ID NO: 20559 - DNA, 20 bp, synthetic construct
  misc_feature 1..20: note = Description of Artificial Sequence: Synthetic oligonucleotide
  misc_feature 1..20: note = Target: FXN; (+) strand; PAM type: NRG; PAM sequence: AAG
  source 1..20: mol_type = other DNA
aaattggtaacgagcctcag

SEQ ID NO: 20560 - DNA, 20 bp, synthetic construct
  misc_feature 1..20: note = Description of Artificial Sequence: Synthetic oligonucleotide
  misc_feature 1..20: note = Target: FXN; (+) strand; PAM type: NRG; PAM sequence: AGG
  source 1..20: mol_type = other DNA
aattggtaacgagcctcaga

SEQ ID NO: 20561 - DNA, 20 bp, synthetic construct
  misc_feature 1..20: note = Description of Artificial Sequence: Synthetic oligonucleotide
  misc_feature 1..20: note = Target: FXN; (+) strand; PAM type: NRG; PAM sequence: GGG
  source 1..20: mol_type = other DNA
attggtaacgagcctcagaa

SEQ ID NO: 20562 - DNA, 20 bp, synthetic construct
  misc_feature 1..20: note = Description of Artificial Sequence: Synthetic oligonucleotide
  misc_feature 1..20: note = Target: FXN; (+) strand; PAM type: NRG; PAM sequence: CAG
  source 1..20: mol_type = other DNA
gtaacgagcctcagaaggga

SEQ ID NO: 20563 - DNA, 20 bp, synthetic construct
  misc_feature 1..20: note = Description of Artificial Sequence: Synthetic oligonucleotide
  misc_feature 1..20: note = Target: FXN; (+) strand; PAM type: NRG; PAM sequence: GAG
  source 1..20: mol_type = other DNA
aacgagcctcagaagggaca

SEQ ID NO: 20564 - DNA, 20 bp, synthetic construct
  misc_feature 1..20: note = Description of Artificial Sequence: Synthetic oligonucleotide
  misc_feature 1..20: note = Target: FXN; (+) strand; PAM type: NRG; PAM sequence: AGG
  source 1..20: mol_type = other DNA
acgagcctcagaagggacag

SEQ ID NO: 20565 - DNA, 20 bp, synthetic construct
  misc_feature 1..20: note = Description of Artificial Sequence: Synthetic oligonucleotide
  misc_feature 1..20: note = Target: FXN; (+) strand; PAM type: NRG; PAM sequence: CAG
  source 1..20: mol_type = other DNA
agcctcagaagggacagagg

SEQ ID NO: 20566 - DNA, 20 bp, synthetic construct
  misc_feature 1..20: note = Description of Artificial Sequence: Synthetic oligonucleotide
  misc_feature 1..20: note = Target: FXN; (+) strand; PAM type: NRG; PAM sequence: AGG
  source 1..20: mol_type = other DNA
gcctcagaagggacagaggc

SEQ ID NO: 20567 - DNA, 20 bp, synthetic construct
  misc_feature 1..20: note = Description of Artificial Sequence: Synthetic oligonucleotide
  misc_feature 1..20: note = Target: FXN; (+) strand; PAM type: NRG; PAM sequence: GAG
  source 1..20: mol_type = other DNA
gcaggccaccatgctaccct

SEQ ID NO: 20568 - DNA, 20 bp, synthetic construct
  misc_feature 1..20: note = Description of Artificial Sequence: Synthetic oligonucleotide
  misc_feature 1..20: note = Target: FXN; (+) strand; PAM type: NRG; PAM sequence: GAG
  source 1..20: mol_type = other DNA
aggccaccatgctaccctga

SEQ ID NO: 20569 - DNA, 20 bp, synthetic construct
  misc_feature 1..20: note = Description of Artificial Sequence: Synthetic oligonucleotide
  misc_feature 1..20: note = Target: FXN; (+) strand; PAM type: NRG; PAM sequence: AGG
  source 1..20: mol_type = other DNA
ggccaccatgctaccctgag

SEQ ID NO: 20570 - DNA, 20 bp, synthetic construct
  misc_feature 1..20: note = Description of Artificial Sequence: Synthetic oligonucleotide
  misc_feature 1..20: note = Target: FXN; (+) strand; PAM type: NRG; PAM sequence: TGG
  source 1..20: mol_type = other DNA
taccctgagaggatcgcatg

SEQ ID NO: 20571 - DNA, 20 bp, synthetic construct
  misc_feature 1..20: note = Description of Artificial Sequence: Synthetic oligonucleotide
  misc_feature 1..20: note = Target: FXN; (+) strand; PAM type: NRG; PAM sequence: CGG
  source 1..20: mol_type = other DNA
gagaggatcgcatgtggaca

SEQ ID NO: 20572 - DNA, 20 bp, synthetic construct
  misc_feature 1..20: note = Description of Artificial Sequence: Synthetic oligonucleotide
  misc_feature 1..20: note = Target: FXN; (+) strand; PAM type: NRG; PAM sequence: GGG
  source 1..20: mol_type = other DNA
agaggatcgcatgtggacac

SEQ ID NO: 20573 - DNA, 20 bp, synthetic construct
  misc_feature 1..20: note = Description of Artificial Sequence: Synthetic oligonucleotide
  misc_feature 1..20: note = Target: FXN; (+) strand; PAM type: NRG; PAM sequence: GGG
  source 1..20: mol_type = other DNA
gaggatcgcatgtggacacg

SEQ ID NO: 20574 - DNA, 20 bp, synthetic construct
  misc_feature 1..20: note = Description of Artificial Sequence: Synthetic oligonucleotide
  misc_feature 1..20: note = Target: FXN; (+) strand; PAM type: NRG; PAM sequence: TGG
  source 1..20: mol_type = other DNA
gtggacacggggctatgacc

SEQ ID NO: 20575 - DNA, 20 bp, synthetic construct
  misc_feature 1..20: note = Description of Artificial Sequence: Synthetic oligonucleotide
  misc_feature 1..20: note = Target: FXN; (+) strand; PAM type: NRG; PAM sequence: TAG
  source 1..20: mol_type = other DNA
ctggccctgctttgacccac

SEQ ID NO: 20576 - DNA, 20 bp, synthetic construct
  misc_feature 1..20: note = Description of Artificial Sequence: Synthetic oligonucleotide
  misc_feature 1..20: note = Target: FXN; (+) strand; PAM type: NRG; PAM sequence: TAG
  source 1..20: mol_type = other DNA
ttgacccactagctgtgctg

SEQ ID NO: 20577 - DNA, 20 bp, synthetic construct
  misc_feature 1..20: note = Description of Artificial Sequence: Synthetic oligonucleotide
  misc_feature 1..20: note = Target: FXN; (+) strand; PAM type: NRG; PAM sequence: AGG
  source 1..20: mol_type = other DNA
tgacccactagctgtgctgt

SEQ ID NO: 20578 - DNA, 20 bp, synthetic construct
  misc_feature 1..20: note = Description of Artificial Sequence: Synthetic oligonucleotide
  misc_feature 1..20: note = Target: FXN; (+) strand; PAM type: NRG; PAM sequence: GGG
  source 1..20: mol_type = other DNA
gacccactagctgtgctgta

SEQ ID NO: 20579 - DNA, 20 bp, synthetic construct
  misc_feature 1..20: note = Description of Artificial Sequence: Synthetic oligonucleotide
  misc_feature 1..20: note = Target: FXN; (+) strand; PAM type: NRG; PAM sequence: CAG
  source 1..20: mol_type = other DNA
cactagctgtgctgtagggc

SEQ ID NO: 20580 - DNA, 20 bp, synthetic construct
  misc_feature 1..20: note = Description of Artificial Sequence: Synthetic oligonucleotide
  misc_feature 1..20: note = Target: FXN; (+) strand; PAM type: NRG; PAM sequence: AGG
  source 1..20: mol_type = other DNA
actagctgtgctgtagggcc

SEQ ID NO: 20581 - DNA, 20 bp, synthetic construct
  misc_feature 1..20: note = Description of Artificial Sequence: Synthetic oligonucleotide
  misc_feature 1..20: note = Target: FXN; (+) strand; PAM type: NRG; PAM sequence: TGG
  source 1..20: mol_type = other DNA
agctgtgctgtagggccagg

SEQ ID NO: 20582 - DNA, 20 bp, synthetic construct
  misc_feature 1..20: note = Description of Artificial Sequence: Synthetic oligonucleotide
  misc_feature 1..20: note = Target: FXN; (+) strand; PAM type: NRG; PAM sequence: GAG
  source 1..20: mol_type = other DNA
ctgtgctgtagggccaggtg

SEQ ID NO: 20583 - DNA, 20 bp, synthetic construct
  misc_feature 1..20: note = Description of Artificial Sequence: Synthetic oligonucleotide
  misc_feature 1..20: note = Target: FXN; (+) strand; PAM type: NRG; PAM sequence: TGG
  source 1..20: mol_type = other DNA
ctgtagggccaggtggagcc

SEQ ID NO: 20584 - DNA, 20 bp, synthetic construct
  misc_feature 1..20: note = Description of Artificial Sequence: Synthetic oligonucleotide
  misc_feature 1..20: note = Target: FXN; (+) strand; PAM type: NRG; PAM sequence: GAG
  source 1..20: mol_type = other DNA
gtagggccaggtggagcctg

SEQ ID NO: 20585 - DNA, 20 bp, synthetic construct
  misc_feature 1..20: note = Description of Artificial Sequence: Synthetic oligonucleotide
  misc_feature 1..20: note = Target: FXN; (+) strand; PAM type: NRG; PAM sequence: TGG
  source 1..20: mol_type = other DNA
gggccaggtggagcctggag

SEQ ID NO: 20586 - DNA, 20 bp, synthetic construct
  misc_feature 1..20: note = Description of Artificial Sequence: Synthetic oligonucleotide
  misc_feature 1..20: note = Target: FXN; (+) strand; PAM type: NRG; PAM sequence: AAG
  source 1..20: mol_type = other DNA
agcctggagtggcctgtgct

SEQ ID NO: 20587 - DNA, 20 bp, synthetic construct
  misc_feature 1..20: note = Description of Artificial Sequence: Synthetic oligonucleotide
  misc_feature 1..20: note = Target: FXN; (+) strand; PAM type: NRG; PAM sequence: AGG
  source 1..20: mol_type = other DNA
gcctggagtggcctgtgcta

SEQ ID NO: 20588 - DNA, 20 bp, synthetic construct
  misc_feature 1..20: note = Description of Artificial Sequence: Synthetic oligonucleotide
  misc_feature 1..20: note = Target: FXN; (+) strand; PAM type: NRG; PAM sequence: GGG
  source 1..20: mol_type = other DNA
cctggagtggcctgtgctaa

SEQ ID NO: 20589 - DNA, 20 bp, synthetic construct
  misc_feature 1..20: note = Description of Artificial Sequence: Synthetic oligonucleotide
  misc_feature 1..20: note = Target: FXN; (+) strand; PAM type: NRG; PAM sequence: GGG
  source 1..20: mol_type = other DNA
ctggagtggcctgtgctaag

SEQ ID NO: 20590 - DNA, 20 bp, synthetic construct
  misc_feature 1..20: note = Description of Artificial Sequence: Synthetic oligonucleotide
  misc_feature 1..20: note = Target: FXN; (+) strand; PAM type: NRG; PAM sequence: GAG
  source 1..20: mol_type = other DNA
ctgtgctaaggggctactat

SEQ ID NO: 20591 - DNA, 20 bp, synthetic construct
  misc_feature 1..20: note = Description of Artificial Sequence: Synthetic oligonucleotide
  misc_feature 1..20: note = Target: FXN; (+) strand; PAM type: NRG; PAM sequence: AAG
  source 1..20: mol_type = other DNA
tgagctctttccactccccc

SEQ ID NO: 20592 - DNA, 20 bp, synthetic construct
  misc_feature 1..20: note = Description of Artificial Sequence: Synthetic oligonucleotide
  misc_feature 1..20: note = Target: FXN; (+) strand; PAM type: NRG; PAM sequence: AGG
  source 1..20: mol_type = other DNA
gagctctttccactccccca

SEQ ID NO: 20593 - DNA, 20 bp, synthetic construct
  misc_feature 1..20: note = Description of Artificial Sequence: Synthetic oligonucleotide
  misc_feature 1..20: note = Target: FXN; (+) strand; PAM type: NRG; PAM sequence: CAG
  source 1..20: mol_type = other DNA
aatgtcactttctgtttgca

SEQ ID NO: 20594 - DNA, 20 bp, synthetic construct
  misc_feature 1..20: note = Description of Artificial Sequence: Synthetic oligonucleotide
  misc_feature 1..20: note = Target: FXN; (+) strand; PAM type: NRG; PAM sequence: CAG
  source 1..20: mol_type = other DNA
ttctgtttgcacagcaaaat

SEQ ID NO: 20595 - DNA, 20 bp, synthetic construct
  misc_feature 1..20: note = Description of Artificial Sequence: Synthetic oligonucleotide
  misc_feature 1..20: note = Target: FXN; (+) strand; PAM type: NRG; PAM sequence: AGG
  source 1..20: mol_type = other DNA
tctgtttgcacagcaaaatc

SEQ ID NO: 20596 - DNA, 20 bp, synthetic construct
  misc_feature 1..20: note = Description of Artificial Sequence: Synthetic oligonucleotide
  misc_feature 1..20: note = Target: FXN; (+) strand; PAM type: NRG; PAM sequence: GGG
  source 1..20: mol_type = other DNA
ctgtttgcacagcaaaatca

SEQ ID NO: 20597 - DNA, 20 bp, synthetic construct
  misc_feature 1..20: note = Description of Artificial Sequence: Synthetic oligonucleotide
  misc_feature 1..20: note = Target: FXN; (+) strand; PAM type: NRG; PAM sequence: TAG
  source 1..20: mol_type = other DNA
aaatcagggacacaattttc

SEQ ID NO: 20598 - DNA, 20 bp, synthetic construct
  misc_feature 1..20: note = Description of Artificial Sequence: Synthetic oligonucleotide
  misc_feature 1..20: note = Target: FXN; (+) strand; PAM type: NRG; PAM sequence: TGG
  source 1..20: mol_type = other DNA
ggacacaattttctagaaca

SEQ ID NO: 20599 - DNA, 20 bp, synthetic construct
  misc_feature 1..20: note = Description of Artificial Sequence: Synthetic oligonucleotide
  misc_feature 1..20: note = Target: FXN; (+) strand; PAM type: NRG; PAM sequence: GGG
  source 1..20: mol_type = other DNA
gacacaattttctagaacat

SEQ ID NO: 20600 - DNA, 20 bp, synthetic construct
  misc_feature 1..20: note = Description of Artificial Sequence: Synthetic oligonucleotide
  misc_feature 1..20: note = Target: FXN; (+) strand; PAM type: NRG; PAM sequence: GGG
  source 1..20: mol_type = other DNA
acacaattttctagaacatg

SEQ ID NO: 20601 - DNA, 20 bp, synthetic construct
  misc_feature 1..20: note = Description of Artificial Sequence: Synthetic oligonucleotide
  misc_feature 1..20: note = Target: FXN; (+) strand; PAM type: NRG; PAM sequence: CAG
  source 1..20: mol_type = other DNA
tggggtgcctcccctccccc

SEQ ID NO: 20602 - DNA, 20 bp, synthetic construct
  misc_feature 1..20: note = Description of Artificial Sequence: Synthetic oligonucleotide
  misc_feature 1..20: note = Target: FXN; (+) strand; PAM type: NRG; PAM sequence: CAG
  source 1..20: mol_type = other DNA
ctcccctccccccagcccaa

SEQ ID NO: 20603 - DNA, 20 bp, synthetic construct
  misc_feature 1..20: note = Description of Artificial Sequence: Synthetic oligonucleotide
  misc_feature 1..20: note = Target: FXN; (+) strand; PAM type: NRG; PAM sequence: AAG
  source 1..20: mol_type = other DNA
ccctccccccagcccaacag

SEQ ID NO: 20604 - DNA, 20 bp, synthetic construct
  misc_feature 1..20: note = Description of Artificial Sequence: Synthetic oligonucleotide
  misc_feature 1..20: note = Target: FXN; (+) strand; PAM type: NRG; PAM sequence: TGG
  source 1..20: mol_type = other DNA
agaagttctacaatgactga

SEQ ID NO: 20605 - DNA, 20 bp, synthetic construct
  misc_feature 1..20: note = Description of Artificial Sequence: Synthetic oligonucleotide
  misc_feature 1..20: note = Target: FXN; (+) strand; PAM type: NRG; PAM sequence: GGG
  source 1..20: mol_type = other DNA
gaagttctacaatgactgat

SEQ ID NO: 20606 - DNA, 20 bp, synthetic construct
  misc_feature 1..20: note = Description of Artificial Sequence: Synthetic oligonucleotide
  misc_feature 1..20: note = Target: FXN; (+) strand; PAM type: NRG; PAM sequence: GAG
  source 1..20: mol_type = other DNA
atgggcccttgtttttgttt

SEQ ID NO: 20607 - DNA, 20 bp, synthetic construct
  misc_feature 1..20: note = Description of Artificial Sequence: Synthetic oligonucleotide
  misc_feature 1..20: note = Target: FXN; (+) strand; PAM type: NRG; PAM sequence: CGG
  source 1..20: mol_type = other DNA
gcccttgtttttgtttgaga

SEQ ID NO: 20608 - DNA, 20 bp, synthetic construct
  misc_feature 1..20: note = Description of Artificial Sequence: Synthetic oligonucleotide
  misc_feature 1..20: note = Target: FXN; (+) strand; PAM type: NRG; PAM sequence: CAG
  source 1..20: mol_type = other DNA
gtttgagacggaacacccca

SEQ ID NO: 20609 - DNA, 20 bp, synthetic construct
  misc_feature 1..20: note = Description of Artificial Sequence: Synthetic oligonucleotide
  misc_feature 1..20: note = Target: FXN; (+) strand; PAM type: NRG; PAM sequence: AGG
  source 1..20: mol_type = other DNA
tttgagacggaacaccccac

SEQ ID NO: 20610 - DNA, 20 bp, synthetic construct
  misc_feature 1..20: note = Description of Artificial Sequence: Synthetic oligonucleotide
  misc_feature 1..20: note = Target: FXN; (+) strand; PAM type: NRG; PAM sequence: GGG
  source 1..20: mol_type = other DNA
ttgagacggaacaccccaca

SEQ ID NO: 20611 - DNA, 20 bp, synthetic construct
  misc_feature 1..20: note = Description of Artificial Sequence: Synthetic oligonucleotide
  misc_feature 1..20: note = Target: FXN; (+) strand; PAM type: NRG; PAM sequence: GAG
  source 1..20: mol_type = other DNA
ggaacaccccacagggttcc

SEQ ID NO: 20612 - DNA, 20 bp, synthetic construct
  misc_feature 1..20: note = Description of Artificial Sequence: Synthetic oligonucleotide
  misc_feature 1..20: note = Target: FXN; (+) strand; PAM type: NRG; PAM sequence: TGG
  source 1..20: mol_type = other DNA
acaccccacagggttccgag

SEQ ID NO: 20613 - DNA, 20 bp, synthetic construct
  misc_feature 1..20: note = Description of Artificial Sequence: Synthetic oligonucleotide
  misc_feature 1..20: note = Target: FXN; (+) strand; PAM type: NRG; PAM sequence: TGG
  source 1..20: mol_type = other DNA
gggttccgagtggtgatttg

SEQ ID NO: 20614 - DNA, 20 bp, synthetic construct
  misc_feature 1..20: note = Description of Artificial Sequence: Synthetic oligonucleotide
  misc_feature 1..20: note = Target: FXN; (+) strand; PAM type: NRG; PAM sequence: CAG
  source 1..20: mol_type = other DNA
gagtggtgatttgtggccca

SEQ ID NO: 20615 - DNA, 20 bp, synthetic construct
  misc_feature 1..20: note = Description of Artificial Sequence: Synthetic oligonucleotide
  misc_feature 1..20: note = Target: FXN; (+) strand; PAM type: NRG; PAM sequence: AGG
  source 1..20: mol_type = other DNA
agtggtgatttgtggcccac

SEQ ID NO: 20616 - DNA, 20 bp, synthetic construct
  misc_feature 1..20: note = Description of Artificial Sequence: Synthetic oligonucleotide
  misc_feature 1..20: note = Target: FXN; (+) strand; PAM type: NRG; PAM sequence: TGG
  source 1..20: mol_type = other DNA
atttgtggcccacaggccac

SEQ ID NO: 20617 - DNA, 20 bp, synthetic construct
  misc_feature 1..20: note = Description of Artificial Sequence: Synthetic oligonucleotide
  misc_feature 1..20: note = Target: FXN; (+) strand; PAM type: NRG; PAM sequence: AAG
  source 1..20: mol_type = other DNA
gtggcccacaggccactggc

SEQ ID NO: 20618 - DNA, 20 bp, synthetic construct
  misc_feature 1..20: note = Description of Artificial Sequence: Synthetic oligonucleotide
  misc_feature 1..20: note = Target: FXN; (+) strand; PAM type: NRG; PAM sequence: TGG
  source 1..20: mol_type = other DNA
gcccacaggccactggcaag

SEQ ID NO: 20619 - DNA, 20 bp, synthetic construct
  misc_feature 1..20: note = Description of Artificial Sequence: Synthetic oligonucleotide
  misc_feature 1..20: note = Target: FXN; (+) strand; PAM type: NRG; PAM sequence: GAG
  source 1..20: mol_type = other DNA
ccacaggccactggcaagtg

SEQ ID NO: 20620 - DNA, 20 bp, synthetic construct
  misc_feature 1..20: note = Description of Artificial Sequence: Synthetic oligonucleotide
  misc_feature 1..20: note = Target: FXN; (+) strand; PAM type: NRG; PAM sequence: AGG
  source 1..20: mol_type = other DNA
cacaggccactggcaagtgg

SEQ ID NO: 20621 - DNA, 20 bp, synthetic construct
  misc_feature 1..20: note = Description of Artificial Sequence: Synthetic oligonucleotide
  misc_feature 1..20: note = Target: FXN; (+) strand; PAM type: NRG; PAM sequence: CAG
  source 1..20: mol_type = other DNA
aggccactggcaagtggagg

SEQ ID NO: 20622 - DNA, 20 bp, synthetic construct
  misc_feature 1..20: note = Description of Artificial Sequence: Synthetic oligonucleotide
  misc_feature 1..20: note = Target: FXN; (+) strand; PAM type: NRG; PAM sequence: GAG
  source 1..20: mol_type = other DNA
gccactggcaagtggaggca

SEQ ID NO: 20623 - DNA, 20 bp, synthetic construct
  misc_feature 1..20: note = Description of Artificial Sequence: Synthetic oligonucleotide
  misc_feature 1..20: note = Target: FXN; (+) strand; PAM type: NRG; PAM sequence: CAG
  source 1..20: mol_type = other DNA
ggcaagtggaggcagagctg

SEQ ID NO: 20624 - DNA, 20 bp, synthetic construct
  misc_feature 1..20: note = Description of Artificial Sequence: Synthetic oligonucleotide
  misc_feature 1..20: note = Target: FXN; (+) strand; PAM type: NRG; PAM sequence: GAG
  source 1..20: mol_type = other DNA
caagtggaggcagagctgca

SEQ ID NO: 20625 - DNA, 20 bp, synthetic construct
  misc_feature 1..20: note = Description of Artificial Sequence: Synthetic oligonucleotide
  misc_feature 1..20: note = Target: FXN; (+) strand; PAM type: NRG; PAM sequence: CGG
  source 1..20: mol_type = other DNA
aggcagagctgcagagccct

SEQ ID NO: 20626 - DNA, 20 bp, synthetic construct
  misc_feature 1..20: note = Description of Artificial Sequence: Synthetic oligonucleotide
  misc_feature 1..20: note = Target: FXN; (+) strand; PAM type: NRG; PAM sequence: GGG
  source 1..20: mol_type = other DNA
ggcagagctgcagagccctc

SEQ ID NO: 20627 - DNA, 20 bp, synthetic construct
  misc_feature 1..20: note = Description of Artificial Sequence: Synthetic oligonucleotide
  misc_feature 1..20: note = Target: FXN; (+) strand; PAM type: NRG; PAM sequence: GAG
  source 1..20: mol_type = other DNA
cagagctgcagagccctcgg

SEQ ID NO: 20628 - DNA, 20 bp, synthetic construct
  misc_feature 1..20: note = Description of Artificial Sequence: Synthetic oligonucleotide
  misc_feature 1..20: note = Target: FXN; (+) strand; PAM type: NRG; PAM sequence: CAG
  source 1..20: mol_type = other DNA
tgcagagccctcgggagcca

SEQ ID NO: 20629 - DNA, 20 bp, synthetic construct
  misc_feature 1..20: note = Description of Artificial Sequence: Synthetic oligonucleotide
  misc_feature 1..20: note = Target: FXN; (+) strand; PAM type: NRG; PAM sequence: GAG
  source 1..20: mol_type = other DNA
cagagccctcgggagccaca

SEQ ID NO: 20630 - DNA, 20 bp, synthetic construct
  misc_feature 1..20: note = Description of Artificial Sequence: Synthetic oligonucleotide
  misc_feature 1..20: note = Target: FXN; (+) strand; PAM type: NRG; PAM sequence: AGG
  source 1..20: mol_type = other DNA
agagccctcgggagccacag

SEQ ID NO: 20631 - DNA, 20 bp, synthetic construct
  misc_feature 1..20: note = Description of Artificial Sequence: Synthetic oligonucleotide
  misc_feature 1..20: note = Target: FXN; (+) strand; PAM type: NRG; PAM sequence: GGG
  source 1..20: mol_type = other DNA
gagccctcgggagccacaga

SEQ ID NO: 20632 - DNA, 20 bp, synthetic construct
  misc_feature 1..20: note = Description of Artificial Sequence: Synthetic oligonucleotide
  misc_feature 1..20: note = Target: FXN; (+) strand; PAM type: NRG; PAM sequence: TGG
  source 1..20: mol_type = other DNA
gggagccacagagggcctgc

SEQ ID NO: 20633 - DNA, 20 bp, synthetic construct
  misc_feature 1..20: note = Description of Artificial Sequence: Synthetic oligonucleotide
  misc_feature 1..20: note = Target: FXN; (+) strand; PAM type: NRG; PAM sequence: CAG
  source 1..20: mol_type = other DNA
gccgccacgacatgccaact

SEQ ID NO: 20634 - DNA, 20 bp, synthetic construct
  misc_feature 1..20: note = Description of Artificial Sequence: Synthetic oligonucleotide
  misc_feature 1..20: note = Target: FXN; (+) strand; PAM type: NRG; PAM sequence: TGG
  source 1..20: mol_type = other DNA
catgccaactcagctgctgc

SEQ ID NO: 20635 - DNA, 20 bp, synthetic construct
  misc_feature 1..20: note = Description of Artificial Sequence: Synthetic oligonucleotide
  misc_feature 1..20: note = Target: FXN; (+) strand; PAM type: NRG; PAM sequence: TGG
  source 1..20: mol_type = other DNA
agctgctgctggccctcctg

SEQ ID NO: 20636 - DNA, 20 bp, synthetic construct
  misc_feature 1..20: note = Description of Artificial Sequence: Synthetic oligonucleotide
  misc_feature 1..20: note = Target: FXN; (+) strand; PAM type: NRG; PAM sequence: GGG
  source 1..20: mol_type = other DNA
gctgctgctggccctcctgt

SEQ ID NO: 20637 - DNA, 20 bp, synthetic construct
  misc_feature 1..20: note = Description of Artificial Sequence: Synthetic oligonucleotide
  misc_feature 1..20: note = Target: FXN; (+) strand; PAM type: NRG; PAM sequence: CGG
  source 1..20: mol_type = other DNA
gctgctggccctcctgtggg

SEQ ID NO: 20638 - DNA, 20 bp, synthetic construct
  misc_feature 1..20: note = Description of Artificial Sequence: Synthetic oligonucleotide
  misc_feature 1..20: note = Target: FXN; (+) strand; PAM type: NRG; PAM sequence: CAG
  source 1..20: mol_type = other DNA
gctggccctcctgtgggcgg

SEQ ID NO: 20639 - DNA, 20 bp, synthetic construct
  misc_feature 1..20: note = Description of Artificial Sequence: Synthetic oligonucleotide
  misc_feature 1..20: note = Target: FXN; (+) strand; PAM type: NRG; PAM sequence: TAG
  source 1..20: mol_type = other DNA
cctcctgtgggcggcagtgc

SEQ ID NO: 20640 - DNA, 20 bp, synthetic construct
  misc_feature 1..20: note = Description of Artificial Sequence: Synthetic oligonucleotide
  misc_feature 1..20: note = Target: FXN; (+) strand; PAM type: NRG; PAM sequence: CAG
  source 1..20: mol_type = other DNA
gcggcagtgctagtgatgtg

SEQ ID NO: 20641 - DNA, 20 bp, synthetic construct
  misc_feature 1..20: note = Description of Artificial Sequence: Synthetic oligonucleotide
  misc_feature 1..20: note = Target: FXN; (+) strand; PAM type: NRG; PAM sequence: TAG
  source 1..20: mol_type = other DNA
gctagtgatgtgcagaatct

SEQ ID NO: 20642 - DNA, 20 bp, synthetic construct
  misc_feature 1..20: note = Description of Artificial Sequence: Synthetic oligonucleotide
  misc_feature 1..20: note = Target: FXN; (+) strand; PAM type: NRG; PAM sequence: AGG
  source 1..20: mol_type = other DNA
ctagtgatgtgcagaatctt

SEQ ID NO: 20643 - DNA, 20 bp, synthetic construct
  misc_feature 1..20: note = Description of Artificial Sequence: Synthetic oligonucleotide
  misc_feature 1..20: note = Target: FXN; (+) strand; PAM type: NRG; PAM sequence: TAG
  source 1..20: mol_type = other DNA
gatgtgcagaatcttaggac

SEQ ID NO: 20644 - DNA, 20 bp, synthetic construct
  misc_feature 1..20: note = Description of Artificial Sequence: Synthetic oligonucleotide
  misc_feature 1..20: note = Target: FXN; (+) strand; PAM type: NRG; PAM sequence: AAG
  source 1..20: mol_type = other DNA
agaatcttaggactagtgcc

SEQ ID NO: 20645 - DNA, 20 bp, synthetic construct
  misc_feature 1..20: note = Description of Artificial Sequence: Synthetic oligonucleotide
  misc_feature 1..20: note = Target: FXN; (+) strand; PAM type: NRG; PAM sequence: AGG
  source 1..20: mol_type = other DNA
gaatcttaggactagtgcca

SEQ ID NO: 20646 - DNA, 20 bp, synthetic construct
  misc_feature 1..20: note = Description of Artificial Sequence: Synthetic oligonucleotide
  misc_feature 1..20: note = Target: FXN; (+) strand; PAM type: NRG; PAM sequence: TGG
  source 1..20: mol_type = other DNA
caaggaacctataaataccc

SEQ ID NO: 20647 - DNA, 20 bp, synthetic construct
  misc_feature 1..20: note = Description of Artificial Sequence: Synthetic oligonucleotide
  misc_feature 1..20: note = Target: FXN; (+) strand; PAM type: NRG; PAM sequence: GGG
  source 1..20: mol_type = other DNA
aaggaacctataaataccct

SEQ ID NO: 20648 - DNA, 20 bp, synthetic construct
  misc_feature 1..20: note = Description of Artificial Sequence: Synthetic oligonucleotide
  misc_feature 1..20: note = Target: FXN; (+) strand; PAM type: NRG; PAM sequence: CAG
  source 1..20: mol_type = other DNA
tataaataccctgggtgacc

SEQ ID NO: 20649 - DNA, 20 bp, synthetic construct
  misc_feature 1..20: note = Description of Artificial Sequence: Synthetic oligonucleotide
  misc_feature 1..20: note = Target: FXN; (+) strand; PAM type: NRG; PAM sequence: AGG
  source 1..20: mol_type = other DNA
ataaataccctgggtgaccc

SEQ ID NO: 20650 - DNA, 20 bp, synthetic construct
  misc_feature 1..20: note = Description of Artificial Sequence: Synthetic oligonucleotide
  misc_feature 1..20: note = Target: FXN; (+) strand; PAM type: NRG; PAM sequence: TGG
  source 1..20: mol_type = other DNA
gacccaggcgtgcactgctg

SEQ ID NO: 20651 - DNA, 20 bp, synthetic construct
  misc_feature 1..20: note = Description of Artificial Sequence: Synthetic oligonucleotide
  misc_feature 1..20: note = Target: FXN; (+) strand; PAM type: NRG; PAM sequence: TGG
  source 1..20: mol_type = other DNA
ccaggcgtgcactgctgtgg

SEQ ID NO: 20652 - DNA, 20 bp, synthetic construct
  misc_feature 1..20: note = Description of Artificial Sequence: Synthetic oligonucleotide
  misc_feature 1..20: note = Target: FXN; (+) strand; PAM type: NRG; PAM sequence: CAG
  source 1..20: mol_type = other DNA
cactgctgtggtggccttca

SEQ ID NO: 20653 - DNA, 20 bp, synthetic construct
  misc_feature 1..20: note = Description of Artificial Sequence: Synthetic oligonucleotide
  misc_feature 1..20: note = Target: FXN; (+) strand; PAM type: NRG; PAM sequence: CAG
  source 1..20: mol_type = other DNA
gctgtggtggccttcacagt

SEQ ID NO: 20654 - DNA, 20 bp, synthetic construct
  misc_feature 1..20: note = Description of Artificial Sequence: Synthetic oligonucleotide
  misc_feature 1..20: note = Target: FXN; (+) strand; PAM type: NRG; PAM sequence: AAG
  source 1..20: mol_type = other DNA
gtggtggccttcacagtcag

SEQ ID NO: 20655 - DNA, 20 bp, synthetic construct
  misc_feature 1..20: note = Description of Artificial Sequence: Synthetic oligonucleotide
  misc_feature 1..20: note = Target: FXN; (+) strand; PAM type: NRG; PAM sequence: AAG
  source 1..20: mol_type = other DNA
cttcacagtcagaagatgac

SEQ ID NO: 20656 - DNA, 20 bp, synthetic construct
  misc_feature 1..20: note = Description of Artificial Sequence: Synthetic oligonucleotide
  misc_feature 1..20: note = Target: FXN; (+) strand; PAM type: NRG; PAM sequence: GAG
  source 1..20: mol_type = other DNA
cagtcagaagatgacaagct

SEQ ID NO: 20657 - DNA, 20 bp, synthetic construct
  misc_feature 1..20: note = Description of Artificial Sequence: Synthetic oligonucleotide
  misc_feature 1..20: note = Target: FXN; (+) strand; PAM type: NRG; PAM sequence: AAG
  source 1..20: mol_type = other DNA
tcagaagatgacaagctgag

SEQ ID NO: 20658 - DNA, 20 bp, synthetic construct
  misc_feature 1..20: note = Description of Artificial Sequence: Synthetic oligonucleotide
  misc_feature 1..20: note = Target: FXN; (+) strand; PAM type: NRG; PAM sequence: AGG
  source 1..20: mol_type = other DNA
cagaagatgacaagctgaga

SEQ ID NO: 20659 - DNA, 20 bp, synthetic construct
  misc_feature 1..20: note = Description of Artificial Sequence: Synthetic oligonucleotide
  misc_feature 1..20: note = Target: FXN; (+) strand; PAM type: NRG; PAM sequence: GGG
  source 1..20: mol_type = other DNA
agaagatgacaagctgagaa

SEQ ID NO: 20660 - DNA, 20 bp, synthetic construct
  misc_feature 1..20: note = Description of Artificial Sequence: Synthetic oligonucleotide
  misc_feature 1..20: note = Target: FXN; (+) strand; PAM type: NRG; PAM sequence: GGG
  source 1..20: mol_type = other DNA
gaagatgacaagctgagaag

SEQ ID NO: 20661 - DNA, 20 bp, synthetic construct
  misc_feature 1..20: note = Description of Artificial Sequence: Synthetic oligonucleotide
  misc_feature 1..20: note = Target: FXN; (+) strand; PAM type: NRG; PAM sequence: GAG
  source 1..20: mol_type = other DNA
agatgacaagctgagaaggg

SEQ ID NO: 20662 - DNA, 20 bp, synthetic construct
  misc_feature 1..20: note = Description of Artificial Sequence: Synthetic oligonucleotide
  misc_feature 1..20: note = Target: FXN; (+) strand; PAM type: NRG; PAM sequence: CGG
  source 1..20: mol_type = other DNA
caagctgagaaggggagaat

SEQ ID NO: 20663 - DNA, 20 bp, synthetic construct
  misc_feature 1..20: note = Description of Artificial Sequence: Synthetic oligonucleotide
  misc_feature 1..20: note = Target: FXN; (+) strand; PAM type: NRG; PAM sequence: AAG
  source 1..20: mol_type = other DNA
gagaaggggagaatcggccc

SEQ ID NO: 20664 - DNA, 20 bp, synthetic construct
  misc_feature 1..20: note = Description of Artificial Sequence: Synthetic oligonucleotide
  misc_feature 1..20: note = Target: FXN; (+) strand; PAM type: NRG; PAM sequence: AGG
  source 1..20: mol_type = other DNA
agaaggggagaatcggccca

SEQ ID NO: 20665 - DNA, 20 bp, synthetic construct
  misc_feature 1..20: note = Description of Artificial Sequence: Synthetic oligonucleotide
  misc_feature 1..20: note = Target: FXN; (+) strand; PAM type: NRG; PAM sequence: GAG
  source 1..20: mol_type = other DNA
ggggagaatcggcccaaggt

SEQ ID NO: 20666 - DNA, 20 bp, synthetic construct
  misc_feature 1..20: note = Description of Artificial Sequence: Synthetic oligonucleotide
  misc_feature 1..20: note = Target: FXN; (+) strand; PAM type: NRG; PAM sequence: CAG
  source 1..20: mol_type = other DNA
tcggcccaaggtgagatcca

SEQ ID NO: 20667 - DNA, 20 bp, synthetic construct
  misc_feature 1..20: note = Description of Artificial Sequence: Synthetic oligonucleotide
  misc_feature 1..20: note = Target: FXN; (+) strand; PAM type: NRG; PAM sequence: AAG
  source 1..20: mol_type = other DNA
cccaaggtgagatccacaga

SEQ ID NO: 20668 - DNA, 20 bp, synthetic construct
  misc_feature 1..20: note = Description of Artificial Sequence: Synthetic oligonucleotide
  misc_feature 1..20: note = Target: FXN; (+) strand; PAM type: NRG; PAM sequence: AGG
  source 1..20: mol_type = other DNA
ccaaggtgagatccacagaa

SEQ ID NO: 20669 - DNA, 20 bp, synthetic construct
  misc_feature 1..20: note = Description of Artificial Sequence: Synthetic oligonucleotide
  misc_feature 1..20: note = Target: FXN; (+) strand; PAM type: NRG; PAM sequence: CAG
  source 1..20: mol_type = other DNA
ggtgagatccacagaaaggc

SEQ ID NO: 20670 - DNA, 20 bp, synthetic construct
  misc_feature 1..20: note = Description of Artificial Sequence: Synthetic oligonucleotide
  misc_feature 1..20: note = Target: FXN; (+) strand; PAM type: NRG; PAM sequence: AGG
  source 1..20: mol_type = other DNA
gtgagatccacagaaaggcc

SEQ ID NO: 20671 - DNA, 20 bp, synthetic construct
  misc_feature 1..20: note = Description of Artificial Sequence: Synthetic oligonucleotide
  misc_feature 1..20: note = Target: FXN; (+) strand; PAM type: NRG; PAM sequence: GGG
  source 1..20: mol_type = other DNA
tgagatccacagaaaggcca

SEQ ID NO: 20672 - DNA, 20 bp, synthetic construct
  misc_feature 1..20: note = Description of Artificial Sequence: Synthetic oligonucleotide
  misc_feature 1..20: note = Target: FXN; (+) strand; PAM type: NRG; PAM sequence: AAG
  source 1..20: mol_type = other DNA
tccacagaaaggccagggcc

SEQ ID NO: 20673 - DNA, 20 bp, synthetic construct
  misc_feature 1..20: note = Description of Artificial Sequence: Synthetic oligonucleotide
  misc_feature 1..20: note = Target: FXN; (+) strand; PAM type: NRG; PAM sequence: CGG
  source 1..20: mol_type = other DNA
gaaaggccagggccaagatg

SEQ ID NO: 20674 - DNA, 20 bp, synthetic construct
  misc_feature 1..20: note = Description of Artificial Sequence: Synthetic oligonucleotide
  misc_feature 1..20: note = Target: FXN; (+) strand; PAM type: NRG; PAM sequence: CAG
  source 1..20: mol_type = other DNA
ggccagggccaagatgcggc

SEQ ID NO: 20675 - DNA, 20 bp, synthetic construct
  misc_feature 1..20: note = Description of Artificial Sequence: Synthetic oligonucleotide
  misc_feature 1..20: note = Target: FXN; (+) strand; PAM type: NRG; PAM sequence: CAG
  source 1..20: mol_type = other DNA
ccaagatgcggccagcacct

SEQ ID NO: 20676 - DNA, 20 bp, synthetic construct
  misc_feature 1..20: note = Description of Artificial Sequence: Synthetic oligonucleotide
  misc_feature 1..20: note = Target: FXN; (+) strand; PAM type: NRG; PAM sequence: AGG
  source 1..20: mol_type = other DNA
caagatgcggccagcacctc

SEQ ID NO: 20677 - DNA, 20 bp, synthetic construct
  misc_feature 1..20: note = Description of Artificial Sequence: Synthetic oligonucleotide
  misc_feature 1..20: note = Target: FXN; (+) strand; PAM type: NRG; PAM sequence: TGG
  source 1..20: mol_type = other DNA
atgcggccagcacctcaggc

SEQ ID NO: 20678 - DNA, 20 bp, synthetic construct
  misc_feature 1..20: note = Description of Artificial Sequence: Synthetic oligonucleotide
  misc_feature 1..20: note = Target: FXN; (+) strand; PAM type: NRG; PAM sequence: TGG
  source 1..20: mol_type = other DNA
cggccagcacctcaggctgg

SEQ ID NO: 20679 - DNA, 20 bp, synthetic construct
  misc_feature 1..20: note = Description of Artificial Sequence: Synthetic oligonucleotide
  misc_feature 1..20: note = Target: FXN; (+) strand; PAM type: NRG; PAM sequence: TGG
  source 1..20: mol_type = other DNA
ccagcacctcaggctggtgg

SEQ ID NO: 20680 - DNA, 20 bp, synthetic construct
  misc_feature 1..20: note = Description of Artificial Sequence: Synthetic oligonucleotide
  misc_feature 1..20: note = Target: FXN; (+) strand; PAM type: NRG; PAM sequence: CAG
  source 1..20: mol_type = other DNA
tggtcttacgttgaccatgc

SEQ ID NO: 20681 - DNA, 20 bp, synthetic construct
  misc_feature 1..20: note = Description of Artificial Sequence: Synthetic oligonucleotide
  misc_feature 1..20: note = Target: FXN; (+) strand; PAM type: NRG; PAM sequence: GAG
  source 1..20: mol_type = other DNA
gtcttacgttgaccatgcca

SEQ ID NO: 20682 - DNA, 20 bp, synthetic construct
  misc_feature 1..20: note = Description of Artificial Sequence: Synthetic oligonucleotide
  misc_feature 1..20: note = Target: FXN; (+) strand; PAM type: NRG; PAM sequence: AGG
  source 1..20: mol_type = other DNA
tcttacgttgaccatgccag

SEQ ID NO: 20683 - DNA, 20 bp, synthetic construct
  misc_feature 1..20: note = Description of Artificial Sequence: Synthetic oligonucleotide
  misc_feature 1..20: note = Target: FXN; (+) strand; PAM type: NRG; PAM sequence: CAG
  source 1..20: mol_type = other DNA
acgttgaccatgccagaggc

SEQ ID NO: 20684 - DNA, 20 bp, synthetic construct
  misc_feature 1..20: note = Description of Artificial Sequence: Synthetic oligonucleotide
  misc_feature 1..20: note = Target: FXN; (+) strand; PAM type: NRG; PAM sequence: GAG
  source 1..20: mol_type = other DNA
ttgctccaaaccctctgttc

SEQ ID NO: 20685 - DNA, 20 bp, synthetic construct
  misc_feature 1..20: note = Description of Artificial Sequence: Synthetic oligonucleotide
  misc_feature 1..20: note = Target: FXN; (+) strand; PAM type: NRG; PAM sequence: AGG
  source 1..20: mol_type = other DNA
tgctccaaaccctctgttcg

SEQ ID NO: 20686 - DNA, 20 bp, synthetic construct
  misc_feature 1..20: note = Description of Artificial Sequence: Synthetic oligonucleotide
  misc_feature 1..20: note = Target: FXN; (+) strand; PAM type: NRG; PAM sequence: GGG
  source 1..20: mol_type = other DNA
gctccaaaccctctgttcga

SEQ ID NO: 20687 - DNA, 20 bp, synthetic construct
  misc_feature 1..20: note = Description of Artificial Sequence: Synthetic oligonucleotide
  misc_feature 1..20: note = Target: FXN; (+) strand; PAM type: NRG; PAM sequence: GAG
  source 1..20: mol_type = other DNA
tcgagggttccaaatgaaat

SEQ ID NO: 20688 - DNA, 20 bp, synthetic construct
  misc_feature 1..20: note = Description of Artificial Sequence: Synthetic oligonucleotide
  misc_feature 1..20: note = Target: FXN; (+) strand; PAM type: NRG; PAM sequence: CAG
  source 1..20: mol_type = other DNA
agggttccaaatgaaatgag

SEQ ID NO: 20689 - DNA, 20 bp, synthetic construct
  misc_feature 1..20: note = Description of Artificial Sequence: Synthetic oligonucleotide
  misc_feature 1..20: note = Target: FXN; (+) strand; PAM type: NRG; PAM sequence: AGG
  source 1..20: mol_type = other DNA
gggttccaaatgaaatgagc

SEQ ID NO: 20690 - DNA, 20 bp, synthetic construct
  misc_feature 1..20: note = Description of Artificial Sequence: Synthetic oligonucleotide
  misc_feature 1..20: note = Target: FXN; (+) strand; PAM type: NRG; PAM sequence: CAG
  source 1..20: mol_type = other DNA
aaatgagcaggtcctcgtgt

SEQ ID NO: 20691 - DNA, 20 bp, synthetic construct
  misc_feature 1..20: note = Description of Artificial Sequence: Synthetic oligonucleotide
  misc_feature 1..20: note = Target: FXN; (+) strand; PAM type: NRG; PAM sequence: AGG
  source 1..20: mol_type = other DNA
aatgagcaggtcctcgtgtc

SEQ ID NO: 20692 - DNA, 20 bp, synthetic construct
  misc_feature 1..20: note = Description of Artificial Sequence: Synthetic oligonucleotide
  misc_feature 1..20: note = Target: FXN; (+) strand; PAM type: NRG; PAM sequence: TAG
  source 1..20: mol_type = other DNA
caggtcctcgtgtcaggacc

SEQ ID NO: 20693 - DNA, 20 bp, synthetic construct
  misc_feature 1..20: note = Description of Artificial Sequence: Synthetic oligonucleotide
  misc_feature 1..20: note = Target: FXN; (+) strand; PAM type: NRG; PAM sequence: AGG
  source 1..20: mol_type = other DNA
aggtcctcgtgtcaggacct

SEQ ID NO: 20694 - DNA, 20 bp, synthetic construct
  misc_feature 1..20: note = Description of Artificial Sequence: Synthetic oligonucleotide
  misc_feature 1..20: note = Target: FXN; (+) strand; PAM type: NRG; PAM sequence: TAG
  source 1..20: mol_type = other DNA
cctcgtgtcaggacctaggt

SEQ ID NO: 20695 - DNA, 20 bp, synthetic construct
  misc_feature 1..20: note = Description of Artificial Sequence: Synthetic oligonucleotide
  misc_feature 1..20: note = Target: FXN; (+) strand; PAM type: NRG; PAM sequence: AAG
  source 1..20: mol_type = other DNA
acctaggttagtttctgaaa

SEQ ID NO: 20696 - DNA, 20 bp, synthetic construct
  misc_feature 1..20: note = Description of Artificial Sequence: Synthetic oligonucleotide
  misc_feature 1..20: note = Target: FXN; (+) strand; PAM type: NRG; PAM sequence: AAG
  source 1..20: mol_type = other DNA
agtttctgaaaaagcatgaa

SEQ ID NO: 20697 - DNA, 20 bp, synthetic construct
  misc_feature 1..20: note = Description of Artificial Sequence: Synthetic oligonucleotide
  misc_feature 1..20: note = Target: FXN; (+) strand; PAM type: NRG; PAM sequence: CAG
  source 1..20: mol_type = other DNA
ttctgaaaaagcatgaaaag

SEQ ID NO: 20698 - DNA, 20 bp, synthetic construct
  misc_feature 1..20: note = Description of Artificial Sequence: Synthetic oligonucleotide
  misc_feature 1..20: note = Target: FXN; (+) strand; PAM type: NRG; PAM sequence: AGG
  source 1..20: mol_type = other DNA
tctgaaaaagcatgaaaagc

SEQ ID NO: 20699 - DNA, 20 bp, synthetic construct
  misc_feature 1..20: note = Description of Artificial Sequence: Synthetic oligonucleotide
  misc_feature 1..20: note = Target: FXN; (+) strand; PAM type: NRG; PAM sequence: GAG
  source 1..20: mol_type = other DNA
caggcctcctgaacttcccc

SEQ ID NO: 20700 - DNA, 20 bp, synthetic construct
  misc_feature 1..20: note = Description of Artificial Sequence: Synthetic oligonucleotide
  misc_feature 1..20: note = Target: FXN; (+) strand; PAM type: NRG; PAM sequence: AAG
  source 1..20: mol_type = other DNA
ttccccgagtgactgatgca

SEQ ID NO: 20701 - DNA, 20 bp, synthetic construct
  misc_feature 1..20: note = Description of Artificial Sequence: Synthetic oligonucleotide
  misc_feature 1..20: note = Target: FXN; (+) strand; PAM type: NRG; PAM sequence: CAG
  source 1..20: mol_type = other DNA
agtgcgtcctgcatgcttca

SEQ ID NO: 20702 - DNA, 20 bp, synthetic construct
  misc_feature 1..20: note = Description of Artificial Sequence: Synthetic oligonucleotide
  misc_feature 1..20: note = Target: FXN; (+) strand; PAM type: NRG; PAM sequence: TGG
  source 1..20: mol_type = other DNA
ctgcatgcttcacagcacca

SEQ ID NO: 20703 - DNA, 20 bp, synthetic construct
  misc_feature 1..20: note = Description of Artificial Sequence: Synthetic oligonucleotide
  misc_feature 1..20: note = Target: FXN; (+) strand; PAM type: NRG; PAM sequence: GAG
  source 1..20: mol_type = other DNA
gcatgcttcacagcaccatg

SEQ ID NO: 20704 - DNA, 20 bp, synthetic construct
  misc_feature 1..20: note = Description of Artificial Sequence: Synthetic oligonucleotide
  misc_feature 1..20: note = Target: FXN; (+) strand; PAM type: NRG; PAM sequence: GAG
  source 1..20: mol_type = other DNA
atgcttcacagcaccatgga

SEQ ID NO: 20705 - DNA, 20 bp, synthetic construct
  misc_feature 1..20: note = Description of Artificial Sequence: Synthetic oligonucleotide
  misc_feature 1..20: note = Target: FXN; (+) strand; PAM type: NRG; PAM sequence: AGG
  source 1..20: mol_type = other DNA
tgcttcacagcaccatggag

SEQ ID NO: 20706 - DNA, 20 bp, synthetic construct
  misc_feature 1..20: note = Description of Artificial Sequence: Synthetic oligonucleotide
  misc_feature 1..20: note = Target: FXN; (+) strand; PAM type: NRG; PAM sequence: CAG
  source 1..20: mol_type = other DNA
agcaccatggagaggatctt

SEQ ID NO: 20707 - DNA, 20 bp, synthetic construct
  misc_feature 1..20: note = Description of Artificial Sequence: Synthetic oligonucleotide
  misc_feature 1..20: note = Target: FXN; (+) strand; PAM type: NRG; PAM sequence: AGG
  source 1..20: mol_type = other DNA
gcaccatggagaggatcttc

SEQ ID NO: 20708 - DNA, 20 bp, synthetic construct
  misc_feature 1..20: note = Description of Artificial Sequence: Synthetic oligonucleotide
  misc_feature 1..20: note = Target: FXN; (+) strand; PAM type: NRG; PAM sequence: GGG
  source 1..20: mol_type = other DNA
caccatggagaggatcttca

SEQ ID NO: 20709 - DNA, 20 bp, synthetic construct
  misc_feature 1..20: note = Description of Artificial Sequence: Synthetic oligonucleotide
  misc_feature 1..20: note = Target: FXN; (+) strand; PAM type: NRG; PAM sequence: GGG
  source 1..20: mol_type = other DNA
accatggagaggatcttcag

SEQ ID NO: 20710 - DNA, 20 bp, synthetic construct
  misc_feature 1..20: note = Description of Artificial Sequence: Synthetic oligonucleotide
  misc_feature 1..20: note = Target: FXN; (+) strand; PAM type: NRG; PAM sequence: CAG
  source 1..20: mol_type = other DNA
ggatcttcaggggcaaactg

SEQ ID NO: 20711 - DNA, 20 bp, synthetic construct
  misc_feature 1..20: note = Description of Artificial Sequence: Synthetic oligonucleotide
  misc_feature 1..20: note = Target: FXN; (+) strand; PAM type: NRG; PAM sequence: CGG
  source 1..20: mol_type = other DNA
actgcagactatctgaatga

SEQ ID NO: 20712 - DNA, 20 bp, synthetic construct
  misc_feature 1..20: note = Description of Artificial Sequence: Synthetic oligonucleotide
  misc_feature 1..20: note = Target: FXN; (+) strand; PAM type: NRG; PAM sequence: CAG
  source 1..20: mol_type = other DNA
tgaatgacggcactgaccat

SEQ ID NO: 20713 - DNA, 20 bp, synthetic construct
  misc_feature 1..20: note = Description of Artificial Sequence: Synthetic oligonucleotide
  misc_feature 1..20: note = Target: FXN; (+) strand; PAM type: NRG; PAM sequence: CAG
  source 1..20: mol_type = other DNA
cactgaccatcagcaaaccg

SEQ ID NO: 20714 - DNA, 20 bp, synthetic construct
  misc_feature 1..20: note = Description of Artificial Sequence: Synthetic oligonucleotide
  misc_feature 1..20: note = Target: FXN; (+) strand; PAM type: NRG; PAM sequence: GAG
  source 1..20: mol_type = other DNA
ctgaccatcagcaaaccgca

SEQ ID NO: 20715 - DNA, 20 bp, synthetic construct
  misc_feature 1..20: note = Description of Artificial Sequence: Synthetic oligonucleotide
  misc_feature 1..20: note = Target: FXN; (+) strand; PAM type: NRG; PAM sequence: AAG
  source 1..20: mol_type = other DNA
aaccgcagagctgcctgacc

SEQ ID NO: 20716 - DNA, 20 bp, synthetic construct
  misc_feature 1..20: note = Description of Artificial Sequence: Synthetic oligonucleotide
  misc_feature 1..20: note = Target: FXN; (+) strand; PAM type: NRG; PAM sequence: GAG
  source 1..20: mol_type = other DNA
ctgcctgaccaagaaattgc

SEQ ID NO: 20717 - DNA, 20 bp, synthetic construct
  misc_feature 1..20: note = Description of Artificial Sequence: Synthetic oligonucleotide
  misc_feature 1..20: note = Target: FXN; (+) strand; PAM type: NRG; PAM sequence: CAG
  source 1..20: mol_type = other DNA
ctgaccaagaaattgcgaga

SEQ ID NO: 20718 - DNA, 20 bp, synthetic construct
  misc_feature 1..20: note = Description of Artificial Sequence: Synthetic oligonucleotide
  misc_feature 1..20: note = Target: FXN; (+) strand; PAM type: NRG; PAM sequence: AAG
  source 1..20: mol_type = other DNA
accaagaaattgcgagacag

SEQ ID NO: 20719 - DNA, 20 bp, synthetic construct
  misc_feature 1..20: note = Description of Artificial Sequence: Synthetic oligonucleotide
  misc_feature 1..20: note = Target: FXN; (+) strand; PAM type: NRG; PAM sequence: CAG
  source 1..20: mol_type = other DNA
cgagacagaagcaatgcttg

SEQ ID NO: 20720 - DNA, 20 bp, synthetic construct
  misc_feature 1..20: note = Description of Artificial Sequence: Synthetic oligonucleotide
  misc_feature 1..20: note = Target: FXN; (+) strand; PAM type: NRG; PAM sequence: AGG
  source 1..20: mol_type = other DNA
gagacagaagcaatgcttgc

SEQ ID NO: 20721 - DNA, 20 bp, synthetic construct
  misc_feature 1..20: note = Description of Artificial Sequence: Synthetic oligonucleotide
  misc_feature 1..20: note = Target: FXN; (+) strand; PAM type: NRG; PAM sequence: AAG
  source 1..20: mol_type = other DNA
agaagcaatgcttgcaggcg

SEQ ID NO: 20722 - DNA, 20 bp, synthetic construct
  misc_feature 1..20: note = Description of Artificial Sequence: Synthetic oligonucleotide
  misc_feature 1..20: note = Target: FXN; (+) strand; PAM type: NRG; PAM sequence: AAG
  source 1..20: mol_type = other DNA
agcaatgcttgcaggcgaag

SEQ ID NO: 20723 - DNA, 20 bp, synthetic construct
  misc_feature 1..20: note = Description of Artificial Sequence: Synthetic oligonucleotide
  misc_feature 1..20: note = Target: FXN; (+) strand; PAM type: NRG; PAM sequence: AAG
  source 1..20: mol_type = other DNA
aatgcttgcaggcgaagaag

SEQ ID NO: 20724 - DNA, 20 bp, synthetic construct
  misc_feature 1..20: note = Description of Artificial Sequence: Synthetic oligonucleotide
  misc_feature 1..20: note = Target: FXN; (+) strand; PAM type: NRG; PAM sequence: AGG
  source 1..20: mol_type = other DNA
atgcttgcaggcgaagaaga

SEQ ID NO: 20725 - DNA, 20 bp, synthetic construct
  misc_feature 1..20: note = Description of Artificial Sequence: Synthetic oligonucleotide
  misc_feature 1..20: note = Target: FXN; (+) strand; PAM type: NRG; PAM sequence: GGG
  source 1..20: mol_type = other DNA
tgcttgcaggcgaagaagaa

SEQ ID NO: 20726 - DNA, 20 bp, synthetic construct
  misc_feature 1..20: note = Description of Artificial Sequence: Synthetic oligonucleotide
  misc_feature 1..20: note = Target: FXN; (+) strand; PAM type: NRG; PAM sequence: GGG
  source 1..20: mol_type = other DNA
gcttgcaggcgaagaagaag

SEQ ID NO: 20727 - DNA, 20 bp, synthetic construct
  misc_feature 1..20: note = Description of Artificial Sequence: Synthetic oligonucleotide
  misc_feature 1..20: note = Target: FXN; (+) strand; PAM type: NRG; PAM sequence: CAG
  source 1..20: mol_type = other DNA
gcaggcgaagaagaaggggc

SEQ ID NO: 20728 - DNA, 20 bp, synthetic construct
  misc_feature 1..20: note = Description of Artificial Sequence: Synthetic oligonucleotide
  misc_feature 1..20: note = Target: FXN; (+) strand; PAM type: NRG; PAM sequence: CAG
  source 1..20: mol_type = other DNA
gaagaagaaggggccagaca

SEQ ID NO: 20729 - DNA, 20 bp, synthetic construct
  misc_feature 1..20: note = Description of Artificial Sequence: Synthetic oligonucleotide
  misc_feature 1..20: note = Target: FXN; (+) strand; PAM type: NRG; PAM sequence: TGG
  source 1..20: mol_type = other DNA
gaagaaggggccagacacag

SEQ ID NO: 20730 - DNA, 20 bp, synthetic construct
  misc_feature 1..20: note = Description of Artificial Sequence: Synthetic oligonucleotide
  misc_feature 1..20: note = Target: FXN; (+) strand; PAM type: NRG; PAM sequence: CAG
  source 1..20: mol_type = other DNA
gtggctcacgcctgtaatcc

SEQ ID NO: 20731 - DNA, 20 bp, synthetic construct
  misc_feature 1..20: note = Description of Artificial Sequence: Synthetic oligonucleotide
  misc_feature 1..20: note = Target: FXN; (+) strand; PAM type: NRG; PAM sequence: TGG
  source 1..20: mol_type = other DNA
cgcctgtaatcccagcactt

SEQ ID NO: 20732 - DNA, 20 bp, synthetic construct
  misc_feature 1..20: note = Description of Artificial Sequence: Synthetic oligonucleotide
  misc_feature 1..20: note = Target: FXN; (+) strand; PAM type: NRG; PAM sequence: GGG
  source 1..20: mol_type = other DNA
gcctgtaatcccagcacttt

SEQ ID NO: 20733 - DNA, 20 bp, synthetic construct
  misc_feature 1..20: note = Description of Artificial Sequence: Synthetic oligonucleotide
  misc_feature 1..20: note = Target: FXN; (+) strand; PAM type: NRG; PAM sequence: GAG
  source 1..20: mol_type = other DNA
ctgtaatcccagcactttgg

SEQ ID NO: 20734 - DNA, 20 bp, synthetic construct
  misc_feature 1..20: note = Description of Artificial Sequence: Synthetic oligonucleotide
  misc_feature 1..20: note = Target: FXN; (+) strand; PAM type: NRG; PAM sequence: AGG
  source 1..20: mol_type = other DNA
tgtaatcccagcactttggg

SEQ ID NO: 20735 - DNA, 20 bp, synthetic construct
  misc_feature 1..20: note = Description of Artificial Sequence: Synthetic oligonucleotide
  misc_feature 1..20: note = Target: FXN; (+) strand; PAM type: NRG; PAM sequence: AAG
  source 1..20: mol_type = other DNA
tcccagcactttgggaggcc

SEQ ID NO: 20736 - DNA, 20 bp, synthetic construct
  misc_feature 1..20: note = Description of Artificial Sequence: Synthetic oligonucleotide
  misc_feature 1..20: note = Target: FXN; (+) strand; PAM type: NRG; PAM sequence: AGG
  source 1..20: mol_type = other DNA
cccagcactttgggaggcca

SEQ ID NO: 20737 - DNA, 20 bp, synthetic construct
  misc_feature 1..20: note = Description of Artificial Sequence: Synthetic oligonucleotide
  misc_feature 1..20: note = Target: FXN; (+) strand; PAM type: NRG; PAM sequence: CAG
  source 1..20: mol_type = other DNA
agcactttgggaggccaagg

SEQ ID NO: 20738 - DNA, 20 bp, synthetic construct
  misc_feature 1..20: note = Description of Artificial Sequence: Synthetic oligonucleotide
  misc_feature 1..20: note = Target: FXN; (+) strand; PAM type: NRG; PAM sequence: AGG
  source 1..20: mol_type = other DNA
gcactttgggaggccaaggc

SEQ ID NO: 20739 - DNA, 20 bp, synthetic construct
  misc_feature 1..20: note = Description of Artificial Sequence: Synthetic oligonucleotide
  misc_feature 1..20: note = Target: FXN; (+) strand; PAM type: NRG; PAM sequence: CGG
  source 1..20: mol_type = other DNA
ctttgggaggccaaggcagg

SEQ ID NO: 20740 - DNA, 20 bp, synthetic construct
  misc_feature 1..20: note = Description of Artificial Sequence: Synthetic oligonucleotide
  misc_feature 1..20: note = Target: FXN; (+) strand; PAM type: NRG; PAM sequence: GAG
  source 1..20: mol_type = other DNA
ccaaggcaggcggatcactt

SEQ ID NO: 20741 - DNA, 20 bp, synthetic construct
  misc_feature 1..20: note = Description of Artificial Sequence: Synthetic oligonucleotide
  misc_feature 1..20: note = Target: FXN; (+) strand; PAM type: NRG; PAM sequence: AGG
  source 1..20: mol_type = other DNA
caaggcaggcggatcacttg

SEQ ID NO: 20742 - DNA, 20 bp, synthetic construct
  misc_feature 1..20: note = Description of Artificial Sequence: Synthetic oligonucleotide
  misc_feature 1..20: note = Target: FXN; (+) strand; PAM type: NRG; PAM sequence: CAG
  source 1..20: mol_type = other DNA
gcaggcggatcacttgaggt

SEQ ID NO: 20743 - DNA, 20 bp, synthetic construct
  misc_feature 1..20: note = Description of Artificial Sequence: Synthetic oligonucleotide
  misc_feature 1..20: note = Target: FXN; (+) strand; PAM type: NRG; PAM sequence: AGG
  source 1..20: mol_type = other DNA
caggcggatcacttgaggtc

SEQ ID NO: 20744 - DNA, 20 bp, synthetic construct
  misc_feature 1..20: note = Description of Artificial Sequence: Synthetic oligonucleotide
  misc_feature 1..20: note = Target: FXN; (+) strand; PAM type: NRG; PAM sequence: GAG
  source 1..20: mol_type = other DNA
ggcggatcacttgaggtcag

SEQ ID NO: 20745 - DNA, 20 bp, synthetic construct
  misc_feature 1..20: note = Description of Artificial Sequence: Synthetic oligonucleotide
  misc_feature 1..20: note = Target: FXN; (+) strand; PAM type: NRG; PAM sequence: GAG
  source 1..20: mol_type = other DNA
tcacttgaggtcaggagttt

SEQ ID NO: 20746 - DNA, 20 bp, synthetic construct
  misc_feature 1..20: note = Description of Artificial Sequence: Synthetic oligonucleotide
  misc_feature 1..20: note = Target: FXN; (+) strand; PAM type: NRG; PAM sequence: CAG
  source 1..20: mol_type = other DNA
tgaggtcaggagtttgagac

SEQ ID NO: 20747 - DNA, 20 bp, synthetic construct
  misc_feature 1..20: note = Description of Artificial Sequence: Synthetic oligonucleotide
  misc_feature 1..20: note = Target: FXN; (+) strand; PAM type: NRG; PAM sequence: TGG
  source 1..20: mol_type = other DNA
tcaggagtttgagaccagcc

SEQ ID NO: 20748 - DNA, 20 bp, synthetic construct
  misc_feature 1..20: note = Description of Artificial Sequence: Synthetic oligonucleotide
  misc_feature 1..20: note = Target: FXN; (+) strand; PAM type: NRG; PAM sequence: GGG
  source 1..20: mol_type = other DNA
caggagtttgagaccagcct

SEQ ID NO: 20749 - DNA, 20 bp, synthetic construct
  misc_feature 1..20: note = Description of Artificial Sequence: Synthetic oligonucleotide
  misc_feature 1..20: note = Target: FXN; (+) strand; PAM type: NRG; PAM sequence: TAG
  source 1..20: mol_type = other DNA
tgagaccagcctgggcaaca

SEQ ID NO: 20750 - DNA, 20 bp, synthetic construct
  misc_feature 1..20: note = Description of Artificial Sequence: Synthetic oligonucleotide
  misc_feature 1..20: note = Target: FXN; (+) strand; PAM type: NRG; PAM sequence: CAG
  source 1..20: mol_type = other DNA
taaaaatacaaaaaattcgc

SEQ ID NO: 20751 - DNA, 20 bp, synthetic construct
  misc_feature 1..20: note = Description of Artificial Sequence: Synthetic oligonucleotide
  misc_feature 1..20: note = Target: FXN; (+) strand; PAM type: NRG; PAM sequence: AGG
  source 1..20: mol_type = other DNA
aaaaatacaaaaaattcgcc

SEQ ID NO: 20752 - DNA, 20 bp, synthetic construct
  misc_feature 1..20: note = Description of Artificial Sequence: Synthetic oligonucleotide
  misc_feature 1..20: note = Target: FXN; (+) strand; PAM type: NRG; PAM sequence: TGG
  source 1..20: mol_type = other DNA
tacaaaaaattcgccaggca

SEQ ID NO: 20753 - DNA, 20 bp, synthetic construct
  misc_feature 1..20: note = Description of Artificial Sequence: Synthetic oligonucleotide
  misc_feature 1..20: note = Target: FXN; (+) strand; PAM type: NRG; PAM sequence: TGG
  source 1..20: mol_type = other DNA
aaaaaattcgccaggcatgg

SEQ ID NO: 20754 - DNA, 20 bp, synthetic construct
  misc_feature 1..20: note = Description of Artificial Sequence: Synthetic oligonucleotide
  misc_feature 1..20: note = Target: FXN; (+) strand; PAM type: NRG; PAM sequence: CAG
  source 1..20: mol_type = other DNA
aaattcgccaggcatggtgg

SEQ ID NO: 20755 - DNA, 20 bp, synthetic construct
  misc_feature 1..20: note = Description of Artificial Sequence: Synthetic oligonucleotide
  misc_feature 1..20: note = Target: FXN; (+) strand; PAM type: NRG; PAM sequence: AGG
  source 1..20: mol_type = other DNA
aattcgccaggcatggtggc

SEQ ID NO: 20756 - DNA, 20 bp, synthetic construct
  misc_feature 1..20: note = Description of Artificial Sequence: Synthetic oligonucleotide
  misc_feature 1..20: note = Target: FXN; (+) strand; PAM type: NRG; PAM sequence: CAG
  source 1..20: mol_type = other DNA
gtggcaggcacctgtaatcc

SEQ ID NO: 20757 - DNA, 20 bp, synthetic construct
  misc_feature 1..20: note = Description of Artificial Sequence: Synthetic oligonucleotide
  misc_feature 1..20: note = Target: FXN; (+) strand; PAM type: NRG; PAM sequence: TGG
  source 1..20: mol_type = other DNA
cacctgtaatcccagctgct

SEQ ID NO: 20758 - DNA, 20 bp, synthetic construct
  misc_feature 1..20: note = Description of Artificial Sequence: Synthetic oligonucleotide
  misc_feature 1..20: note = Target: FXN; (+) strand; PAM type: NRG; PAM sequence: GGG
  source 1..20: mol_type = other DNA
acctgtaatcccagctgctt

SEQ ID NO: 20759 - DNA, 20 bp, synthetic construct
  misc_feature 1..20: note = Description of Artificial Sequence: Synthetic oligonucleotide
  misc_feature 1..20: note = Target: FXN; (+) strand; PAM type: NRG; PAM sequence: GAG
  source 1..20: mol_type = other DNA
ctgtaatcccagctgcttgg

SEQ ID NO: 20760 - DNA, 20 bp, synthetic construct
  misc_feature 1..20: note = Description of Artificial Sequence: Synthetic oligonucleotide
  misc_feature 1..20: note = Target: FXN; (+) strand; PAM type: NRG; PAM sequence: GAG
  source 1..20: mol_type = other DNA
tcccagctgcttgggagact

SEQ ID NO: 20761 - DNA, 20 bp, synthetic construct
  misc_feature 1..20: note = Description of Artificial Sequence: Synthetic oligonucleotide
  misc_feature 1..20: note = Target: FXN; (+) strand; PAM type: NRG; PAM sequence: CAG
  source 1..20: mol_type = other DNA
agctgcttgggagactgaga

SEQ ID NO: 20762 - DNA, 20 bp, synthetic construct
  misc_feature 1..20: note = Description of Artificial Sequence: Synthetic oligonucleotide
  misc_feature 1..20: note = Target: FXN; (+) strand; PAM type: NRG; PAM sequence: AGG
  source 1..20: mol_type = other DNA
gctgcttgggagactgagac

SEQ ID NO: 20763 - DNA, 20 bp, synthetic construct
  misc_feature 1..20: note = Description of Artificial Sequence: Synthetic oligonucleotide
  misc_feature 1..20: note = Target: FXN; (+) strand; PAM type: NRG; PAM sequence: GAG
  source 1..20: mol_type = other DNA
tgcttgggagactgagacag

SEQ ID NO: 20764 - DNA, 20 bp, synthetic construct
  misc_feature 1..20: note = Description of Artificial Sequence: Synthetic oligonucleotide
  misc_feature 1..20: note = Target: FXN; (+) strand; PAM type: NRG; PAM sequence: CAG
  source 1..20: mol_type = other DNA
acaggagaattgcttgaacc

SEQ ID NO: 20765 - DNA, 20 bp, synthetic construct
  misc_feature 1..20: note = Description of Artificial Sequence: Synthetic oligonucleotide
  misc_feature 1..20: note = Target: FXN; (+) strand; PAM type: NRG; PAM sequence: AGG
  source 1..20: mol_type = other DNA
caggagaattgcttgaaccc

SEQ ID NO: 20766 - DNA, 20 bp, synthetic construct
  misc_feature 1..20: note = Description of Artificial Sequence: Synthetic oligonucleotide
  misc_feature 1..20: note = Target: FXN; (+) strand; PAM type: NRG; PAM sequence: GAG
  source 1..20: mol_type = other DNA
ggagaattgcttgaacccag

SEQ ID NO: 20767 - DNA, 20 bp, synthetic construct
  misc_feature 1..20: note = Description of Artificial Sequence: Synthetic oligonucleotide
  misc_feature 1..20: note = Target: FXN; (+) strand; PAM type: NRG; PAM sequence: AGG
  source 1..20: mol_type = other DNA
gagaattgcttgaacccagg

SEQ ID NO: 20768 - DNA, 20 bp, synthetic construct
  misc_feature 1..20: note = Description of Artificial Sequence: Synthetic oligonucleotide
  misc_feature 1..20: note = Target: FXN; (+) strand; PAM type: NRG; PAM sequence: AAG
  source 1..20: mol_type = other DNA
ttgcttgaacccaggaggcg

SEQ ID NO: 20769 - DNA, 20 bp, synthetic construct
  misc_feature 1..20: note = Description of Artificial Sequence: Synthetic oligonucleotide
  misc_feature 1..20: note = Target: FXN; (+) strand; PAM type: NRG; PAM sequence: AGG
  source 1..20: mol_type = other DNA
tgcttgaacccaggaggcga

SEQ ID NO: 20770 - DNA, 20 bp, synthetic construct
  misc_feature 1..20: note = Description of Artificial Sequence: Synthetic oligonucleotide
  misc_feature 1..20: note = Target: FXN; (+) strand; PAM type: NRG; PAM sequence: CAG
  source 1..20: mol_type = other DNA
aacgaactgaaatcgtgcca

SEQ ID NO: 20771 - DNA, 20 bp, synthetic construct
  misc_feature 1..20: note = Description of Artificial Sequence: Synthetic oligonucleotide
  misc_feature 1..20: note = Target: FXN; (+) strand; PAM type: NRG; PAM sequence: TGG
  source 1..20: mol_type = other DNA
cgtgccacagcactccatcc

SEQ ID NO: 20772 - DNA, 20 bp, synthetic construct
  misc_feature 1..20: note = Description of Artificial Sequence: Synthetic oligonucleotide
  misc_feature 1..20: note = Target: FXN; (+) strand; PAM type: NRG; PAM sequence: GGG
  source 1..20: mol_type = other DNA
gtgccacagcactccatcct

SEQ ID NO: 20773 - DNA, 20 bp, synthetic construct
  misc_feature 1..20: note = Description of Artificial Sequence: Synthetic oligonucleotide
  misc_feature 1..20: note = Target: FXN; (+) strand; PAM type: NRG; PAM sequence: CAG
  source 1..20: mol_type = other DNA
cagcactccatcctgggcga

SEQ ID NO: 20774 - DNA, 20 bp, synthetic construct
  misc_feature 1..20: note = Description of Artificial Sequence: Synthetic oligonucleotide
  misc_feature 1..20: note = Target: FXN; (+) strand; PAM type: NRG; PAM sequence: GAG
  source 1..20: mol_type = other DNA
gcactccatcctgggcgaca

SEQ ID NO: 20775 - DNA, 20 bp, synthetic construct
  misc_feature 1..20: note = Description of Artificial Sequence: Synthetic oligonucleotide
  misc_feature 1..20: note = Target: FXN; (+) strand; PAM type: NRG; PAM sequence: GAG
  source 1..20: mol_type = other DNA
tccatcctgggcgacagagt

SEQ ID NO: 20776 - DNA, 20 bp, synthetic construct
  misc_feature 1..20: note = Description of Artificial Sequence: Synthetic oligonucleotide
  misc_feature 1..20: note = Target: FXN; (+) strand; PAM type: NRG; PAM sequence: AAG
  source 1..20: mol_type = other DNA
gagtgagactgtctcaaaaa

SEQ ID NO: 20777 - DNA, 20 bp, synthetic construct
  misc_feature 1..20: note = Description of Artificial Sequence: Synthetic oligonucleotide
  misc_feature 1..20: note = Target: FXN; (+) strand; PAM type: NRG; PAM sequence: AGG
  source 1..20: mol_type = other DNA
agtgagactgtctcaaaaaa

SEQ ID NO: 20778 - DNA, 20 bp, synthetic construct
  misc_feature 1..20: note = Description of Artificial Sequence: Synthetic oligonucleotide
  misc_feature 1..20: note = Target: FXN; (+) strand; PAM type: NRG; PAM sequence: GAG
  source 1..20: mol_type = other DNA
tgagactgtctcaaaaaaag

SEQ ID NO: 20779 - DNA, 20 bp, synthetic construct
  misc_feature 1..20: note = Description of Artificial Sequence: Synthetic oligonucleotide
  misc_feature 1..20: note = Target: FXN; (+) strand; PAM type: NRG; PAM sequence: AGG
  source 1..20: mol_type = other DNA
gagactgtctcaaaaaaagg

SEQ ID NO: 20780 - DNA, 20 bp, synthetic construct
  misc_feature 1..20: note = Description of Artificial Sequence: Synthetic oligonucleotide
  misc_feature 1..20: note = Target: FXN; (+) strand; PAM type: NRG; PAM sequence: GAG
  source 1..20: mol_type = other DNA
gactgtctcaaaaaaaggag

SEQ ID NO: 20781 - DNA, 20 bp, synthetic construct
  misc_feature 1..20: note = Description of Artificial Sequence: Synthetic oligonucleotide
  misc_feature 1..20: note = Target: FXN; (+) strand; PAM type: NRG; PAM sequence: AAG
  source 1..20: mol_type = other DNA
tgtctcaaaaaaaggaggag

SEQ ID NO: 20782 - DNA, 20 bp, synthetic construct
  misc_feature 1..20: note = Description of Artificial Sequence: Synthetic oligonucleotide
  misc_feature 1..20: note = Target: FXN; (+) strand; PAM type: NRG; PAM sequence: AAG
  source 1..20: mol_type = other DNA
ctcaaaaaaaggaggagaag

SEQ ID NO: 20783 - DNA, 20 bp, synthetic construct
  misc_feature 1..20: note = Description of Artificial Sequence: Synthetic oligonucleotide
  misc_feature 1..20: note = Target: FXN; (+) strand; PAM type: NRG; PAM sequence: AGG
  source 1..20: mol_type = other DNA
tcaaaaaaaggaggagaaga

SEQ ID NO: 20784 - DNA, 20 bp, synthetic construct
  misc_feature 1..20: note = Description of Artificial Sequence: Synthetic oligonucleotide
  misc_feature 1..20: note = Target: FXN; (+) strand; PAM type: NRG; PAM sequence: AAG
  source 1..20: mol_type = other DNA
aaaaaggaggagaagaagga

SEQ ID NO: 20785 - DNA, 20 bp, synthetic construct
  misc_feature 1..20: note = Description of Artificial Sequence: Synthetic oligonucleotide
  misc_feature 1..20: note = Target: FXN; (+) strand; PAM type: NRG; PAM sequence: AGG
  source 1..20: mol_type = other DNA
aaaaggaggagaagaaggaa

SEQ ID NO: 20786 - DNA, 20 bp, synthetic construct
  misc_feature 1..20: note = Description of Artificial Sequence: Synthetic oligonucleotide
  misc_feature 1..20: note = Target: FXN; (+) strand; PAM type: NRG; PAM sequence: AAG
  source 1..20: mol_type = other DNA
gaggagaagaaggaaaggcc

SEQ ID NO: 20787 - DNA, 20 bp, synthetic construct
  misc_feature 1..20: note = Description of Artificial Sequence: Synthetic oligonucleotide
  misc_feature 1..20: note = Target: FXN; (+) strand; PAM type: NRG; PAM sequence: AGG
  source 1..20: mol_type = other DNA
aggagaagaaggaaaggcca

SEQ ID NO: 20788 - DNA, 20 bp, synthetic construct
  misc_feature 1..20: note = Description of Artificial Sequence: Synthetic oligonucleotide
  misc_feature 1..20: note = Target: FXN; (+) strand; PAM type: NRG; PAM sequence: CAG
  source 1..20: mol_type = other DNA
agaagaaggaaaggccaagg

SEQ ID NO: 20789 - DNA, 20 bp, synthetic construct
  misc_feature 1..20: note = Description of Artificial Sequence: Synthetic oligonucleotide
  misc_feature 1..20: note = Target: FXN; (+) strand; PAM type: NRG; PAM sequence: AGG
  source 1..20: mol_type = other DNA
gaagaaggaaaggccaaggc

SEQ ID NO: 20790 - DNA, 20 bp, synthetic construct
  misc_feature 1..20: note = Description of Artificial Sequence: Synthetic oligonucleotide
  misc_feature 1..20: note = Target: FXN; (+) strand; PAM type: NRG; PAM sequence: CAG
  source 1..20: mol_type = other DNA
aggccaaggcaggaatgaaa

SEQ ID NO: 20791 - DNA, 20 bp, synthetic construct
  misc_feature 1..20: note = Description of Artificial Sequence: Synthetic oligonucleotide
  misc_feature 1..20: note = Target: FXN; (+) strand; PAM type: NRG; PAM sequence: AGG
  source 1..20: mol_type = other DNA
ggccaaggcaggaatgaaac

SEQ ID NO: 20792 - DNA, 20 bp, synthetic construct
  misc_feature 1..20: note = Description of Artificial Sequence: Synthetic oligonucleotide
  misc_feature 1..20: note = Target: FXN; (+) strand; PAM type: NRG; PAM sequence: TGG
  source 1..20: mol_type = other DNA
atgaaacaggccatgaatgt

SEQ ID NO: 20793 - DNA, 20 bp, synthetic construct
  misc_feature 1..20: note = Description of Artificial Sequence: Synthetic oligonucleotide
  misc_feature 1..20: note = Target: FXN; (+) strand; PAM type: NRG; PAM sequence: GAG
  source 1..20: mol_type = other DNA
gaaacaggccatgaatgttg

SEQ ID NO: 20794 - DNA, 20 bp, synthetic construct
  misc_feature 1..20: note = Description of Artificial Sequence: Synthetic oligonucleotide
  misc_feature 1..20: note = Target: FXN; (+) strand; PAM type: NRG; PAM sequence: AAG
  source 1..20: mol_type = other DNA
aggccatgaatgttggagtg

SEQ ID NO: 20795 - DNA, 20 bp, synthetic construct
  misc_feature 1..20: note = Description of Artificial Sequence: Synthetic oligonucleotide
  misc_feature 1..20: note = Target: FXN; (+) strand; PAM type: NRG; PAM sequence: TGG
  source 1..20: mol_type = other DNA
gaatgttggagtgaagcaac

SEQ ID NO: 20796 - DNA, 20 bp, synthetic construct
  misc_feature 1..20: note = Description of Artificial Sequence: Synthetic oligonucleotide
  misc_feature 1..20: note = Target: FXN; (+) strand; PAM type: NRG; PAM sequence: AAG
  source 1..20: mol_type = other DNA
gcaactggcctcctcgtgct

SEQ ID NO: 20797 - DNA, 20 bp, synthetic construct
  misc_feature 1..20: note = Description of Artificial Sequence: Synthetic oligonucleotide
  misc_feature 1..20: note = Target: FXN; (+) strand; PAM type: NRG; PAM sequence: CGG
  source 1..20: mol_type = other DNA
actggcctcctcgtgctaag

SEQ ID NO: 20798 - DNA, 20 bp, synthetic construct
  misc_feature 1..20: note = Description of Artificial Sequence: Synthetic oligonucleotide
  misc_feature 1..20: note = Target: FXN; (+) strand; PAM type: NRG; PAM sequence: GAG
  source 1..20: mol_type = other DNA
tcgtgctaagcggctactgt

SEQ ID NO: 20799 - DNA, 20 bp, synthetic construct
  misc_feature 1..20: note = Description of Artificial Sequence: Synthetic oligonucleotide
  misc_feature 1..20: note = Target: FXN; (+) strand; PAM type: NRG; PAM sequence: AAG
  source 1..20: mol_type = other DNA
tgagttctttccactccccc

SEQ ID NO: 20800 - DNA, 20 bp, synthetic construct
  misc_feature 1..20: note = Description of Artificial Sequence: Synthetic oligonucleotide
  misc_feature 1..20: note = Target: FXN; (+) strand; PAM type: NRG; PAM sequence: AAG
  source 1..20: mol_type = other DNA
tgaatgtcctgcctctgctc

SEQ ID NO: 20801 - DNA, 20 bp, synthetic construct
  misc_feature 1..20: note = Description of Artificial Sequence: Synthetic oligonucleotide
  misc_feature 1..20: note = Target: FXN; (+) strand; PAM type: NRG; PAM sequence: AGG
  source 1..20: mol_type = other DNA
gaatgtcctgcctctgctca

SEQ ID NO: 20802 - DNA, 20 bp, synthetic construct
  misc_feature 1..20: note = Description of Artificial Sequence: Synthetic oligonucleotide
  misc_feature 1..20: note = Target: FXN; (+) strand; PAM type: NRG; PAM sequence: GGG
  source 1..20: mol_type = other DNA
aatgtcctgcctctgctcaa

SEQ ID NO: 20803 - DNA, 20 bp, synthetic construct
  misc_feature 1..20: note = Description of Artificial Sequence: Synthetic oligonucleotide
  misc_feature 1..20: note = Target: FXN; (+) strand; PAM type: NRG; PAM sequence: TGG
  source 1..20: mol_type = other DNA
gtcctgcctctgctcaaggg

SEQ ID NO: 20804 - DNA, 20 bp, synthetic construct
  misc_feature 1..20: note = Description of Artificial Sequence: Synthetic oligonucleotide
  misc_feature 1..20: note = Target: FXN; (+) strand; PAM type: NRG; PAM sequence: TGG
  source 1..20: mol_type = other DNA
tctgctcaagggtggtatga

SEQ ID NO: 20805 - DNA, 20 bp, synthetic construct
  misc_feature 1..20: note = Description of Artificial Sequence: Synthetic oligonucleotide
  misc_feature 1..20: note = Target: FXN; (+) strand; PAM type: NRG; PAM sequence: GGG
  source 1..20: mol_type = other DNA
ctgctcaagggtggtatgat

SEQ ID NO: 20806 - DNA, 20 bp, synthetic construct
  misc_feature 1..20: note = Description of Artificial Sequence: Synthetic oligonucleotide
  misc_feature 1..20: note = Target: FXN; (+) strand; PAM type: NRG; PAM sequence: GGG
  source 1..20: mol_type = other DNA
tgctcaagggtggtatgatg

SEQ ID NO: 20807 - DNA, 20 bp, synthetic construct
  misc_feature 1..20: note = Description of Artificial Sequence: Synthetic oligonucleotide
  misc_feature 1..20: note = Target: FXN; (+) strand; PAM type: NRG; PAM sequence: TGG
  source 1..20: mol_type = other DNA
agggtggtatgatggggact

SEQ ID NO: 20808 - DNA, 20 bp, synthetic construct
  misc_feature 1..20: note = Description of Artificial Sequence: Synthetic oligonucleotide
  misc_feature 1..20: note = Target: FXN; (+) strand; PAM type: NRG; PAM sequence: CAG
  source 1..20: mol_type = other DNA
gtggtatgatggggacttgg

SEQ ID NO: 20809 - DNA, 20 bp, synthetic construct
  misc_feature 1..20: note = Description of Artificial Sequence: Synthetic oligonucleotide
  misc_feature 1..20: note = Target: FXN; (+) strand; PAM type: NRG; PAM sequence: TGG
  source 1..20: mol_type = other DNA
gtatgatggggacttggcag

SEQ ID NO: 20810 - DNA, 20 bp, synthetic construct
  misc_feature 1..20: note = Description of Artificial Sequence: Synthetic oligonucleotide
  misc_feature 1..20: note = Target: FXN; (+) strand; PAM type: NRG; PAM sequence: GAG
  source 1..20: mol_type = other DNA
atgatggggacttggcagtg

SEQ ID NO: 20811 - DNA, 20 bp, synthetic construct
  misc_feature 1..20: note = Description of Artificial Sequence: Synthetic oligonucleotide
  misc_feature 1..20: note = Target: FXN; (+) strand; PAM type: NRG; PAM sequence: AGG
  source 1..20: mol_type = other DNA
tgatggggacttggcagtgg

SEQ ID NO: 20812 - DNA, 20 bp, synthetic construct
  misc_feature 1..20: note = Description of Artificial Sequence: Synthetic oligonucleotide
  misc_feature 1..20: note = Target: FXN; (+) strand; PAM type: NRG; PAM sequence: GGG
  source 1..20: mol_type = other DNA
gatggggacttggcagtgga

SEQ ID NO: 20813 - DNA, 20 bp, synthetic construct
  misc_feature 1..20: note = Description of Artificial Sequence: Synthetic oligonucleotide
  misc_feature 1..20: note = Target: FXN; (+) strand; PAM type: NRG; PAM sequence: GGG
  source 1..20: mol_type = other DNA
atggggacttggcagtggag

SEQ ID NO: 20814 - DNA, 20 bp, synthetic construct
  misc_feature 1..20: note = Description of Artificial Sequence: Synthetic oligonucleotide
  misc_feature 1..20: note = Target: FXN; (+) strand; PAM type: NRG; PAM sequence: CAG
  source 1..20: mol_type = other DNA
gacttggcagtggaggggaa

SEQ ID NO: 20815 - DNA, 20 bp, synthetic construct
  misc_feature 1..20: note = Description of Artificial Sequence: Synthetic oligonucleotide
  misc_feature 1..20: note = Target: FXN; (+) strand; PAM type: NRG; PAM sequence: AGG
  source 1..20: mol_type = other DNA
acttggcagtggaggggaac

SEQ ID NO: 20816 - DNA, 20 bp, synthetic construct
  misc_feature 1..20: note = Description of Artificial Sequence: Synthetic oligonucleotide
  misc_feature 1..20: note = Target: FXN; (+) strand; PAM type: NRG; PAM sequence: GGG
  source 1..20: mol_type = other DNA
cttggcagtggaggggaaca

SEQ ID NO: 20817 - DNA, 20 bp, synthetic construct
  misc_feature 1..20: note = Description of Artificial Sequence: Synthetic oligonucleotide
  misc_feature 1..20: note = Target: FXN; (+) strand; PAM type: NRG; PAM sequence: CAG
  source 1..20: mol_type = other DNA
gtggaggggaacagggaaac

SEQ ID NO: 20818 - DNA, 20 bp, synthetic construct
  misc_feature 1..20: note = Description of Artificial Sequence: Synthetic oligonucleotide
  misc_feature 1..20: note = Target: FXN; (+) strand; PAM type: NRG; PAM sequence: TGG
  source 1..20: mol_type = other DNA
gggaacagggaaaccagaca

SEQ ID NO: 20819 - DNA, 20 bp, synthetic construct
  misc_feature 1..20: note = Description of Artificial Sequence: Synthetic oligonucleotide
  misc_feature 1..20: note = Target: FXN; (+) strand; PAM type: NRG; PAM sequence: TGG
  source 1..20: mol_type = other DNA
aacagggaaaccagacatgg

SEQ ID NO: 20820 - DNA, 20 bp, synthetic construct
  misc_feature 1..20: note = Description of Artificial Sequence: Synthetic oligonucleotide
  misc_feature 1..20: note = Target: FXN; (+) strand; PAM type: NRG; PAM sequence: TGG
  source 1..20: mol_type = other DNA
atggtggtctccccgcttcc

SEQ ID NO: 20821 - DNA, 20 bp, synthetic construct
  misc_feature 1..20: note = Description of Artificial Sequence: Synthetic oligonucleotide
  misc_feature 1..20: note = Target: FXN; (+) strand; PAM type: NRG; PAM sequence: AAG
  source 1..20: mol_type = other DNA
tctccccgcttcctggctac

SEQ ID NO: 20822 - DNA, 20 bp, synthetic construct
  misc_feature 1..20: note = Description of Artificial Sequence: Synthetic oligonucleotide
  misc_feature 1..20: note = Target: FXN; (+) strand; PAM type: NRG; PAM sequence: AAG
  source 1..20: mol_type = other DNA
cctggctacaagtccctctg

SEQ ID NO: 20823 - DNA, 20 bp, synthetic construct
  misc_feature 1..20: note = Description of Artificial Sequence: Synthetic oligonucleotide
  misc_feature 1..20: note = Target: FXN; (+) strand; PAM type: NRG; PAM sequence: AAG
  source 1..20: mol_type = other DNA
agtccctctgaagaaatcca

SEQ ID NO: 20824 - DNA, 20 bp, synthetic construct
  misc_feature 1..20: note = Description of Artificial Sequence: Synthetic oligonucleotide
  misc_feature 1..20: note = Target: FXN; (+) strand; PAM type: NRG; PAM sequence: AGG
  source 1..20: mol_type = other DNA
gtccctctgaagaaatccaa

SEQ ID NO: 20825 - DNA, 20 bp, synthetic construct
  misc_feature 1..20: note = Description of Artificial Sequence: Synthetic oligonucleotide
  misc_feature 1..20: note = Target: FXN; (+) strand; PAM type: NRG; PAM sequence: GAG
  source 1..20: mol_type = other DNA
ccctctgaagaaatccaaag

SEQ ID NO: 20826 - DNA, 20 bp, synthetic construct
  misc_feature 1..20: note = Description of Artificial Sequence: Synthetic oligonucleotide
  misc_feature 1..20: note = Target: FXN; (+) strand; PAM type: NRG; PAM sequence: AAG
  source 1..20: mol_type = other DNA
tgaagaaatccaaaggagta

SEQ ID NO: 20827 - DNA, 20 bp, synthetic construct
  misc_feature 1..20: note = Description of Artificial Sequence: Synthetic oligonucleotide
  misc_feature 1..20: note = Target: FXN; (+) strand; PAM type: NRG; PAM sequence: GAG
  source 1..20: mol_type = other DNA
aagaaatccaaaggagtaaa

SEQ ID NO: 20828 - DNA, 20 bp, synthetic construct
  misc_feature 1..20: note = Description of Artificial Sequence: Synthetic oligonucleotide
  misc_feature 1..20: note = Target: FXN; (+) strand; PAM type: NRG; PAM sequence: TGG
  source 1..20: mol_type = other DNA
atccaaaggagtaaagagct

SEQ ID NO: 20829 - DNA, 20 bp, synthetic construct
  misc_feature 1..20: note = Description of Artificial Sequence: Synthetic oligonucleotide
  misc_feature 1..20: note = Target: FXN; (+) strand; PAM type: NRG; PAM sequence: GAG
  source 1..20: mol_type = other DNA
ccaaaggagtaaagagcttg

SEQ ID NO: 20830 - DNA, 20 bp, synthetic construct
  misc_feature 1..20: note = Description of Artificial Sequence: Synthetic oligonucleotide
  misc_feature 1..20: note = Target: FXN; (+) strand; PAM type: NRG; PAM sequence: GAG
  source 1..20: mol_type = other DNA
aaaggagtaaagagcttgga

SEQ ID NO: 20831 - DNA, 20 bp, synthetic construct
  misc_feature 1..20: note = Description of Artificial Sequence: Synthetic oligonucleotide
  misc_feature 1..20: note = Target: FXN; (+) strand; PAM type: NRG; PAM sequence: TAG
  source 1..20: mol_type = other DNA
ggagtaaagagcttggagag

SEQ ID NO: 20832 - DNA, 20 bp, synthetic construct
  misc_feature 1..20: note = Description of Artificial Sequence: Synthetic oligonucleotide
  misc_feature 1..20: note = Target: FXN; (+) strand; PAM type: NRG; PAM sequence: AGG
  source 1..20: mol_type = other DNA
gagtaaagagcttggagagt

SEQ ID NO: 20833 - DNA, 20 bp, synthetic construct
  misc_feature 1..20: note = Description of Artificial Sequence: Synthetic oligonucleotide
  misc_feature 1..20: note = Target: FXN; (+) strand; PAM type: NRG; PAM sequence: TAG
  source 1..20: mol_type = other DNA
gcttggagagtaggcctctg

SEQ ID NO: 20834 - DNA, 20 bp, synthetic construct
  misc_feature 1..20: note = Description of Artificial Sequence: Synthetic oligonucleotide
  misc_feature 1..20: note = Target: FXN; (+) strand; PAM type: NRG; PAM sequence: AGG
  source 1..20: mol_type = other DNA
cttggagagtaggcctctgt

SEQ ID NO: 20835 - DNA, 20 bp, synthetic construct
  misc_feature 1..20: note = Description of Artificial Sequence: Synthetic oligonucleotide
  misc_feature 1..20: note = Target: FXN; (+) strand; PAM type: NRG; PAM sequence: GGG
  source 1..20: mol_type = other DNA
ttggagagtaggcctctgta

SEQ ID NO: 20836 - DNA, 20 bp, synthetic construct
  misc_feature 1..20: note = Description of Artificial Sequence: Synthetic oligonucleotide
  misc_feature 1..20: note = Target: FXN; (+) strand; PAM type: NRG; PAM sequence: AAG
  source 1..20: mol_type = other DNA
agtaggcctctgtagggtgc

SEQ ID NO: 20837 - DNA, 20 bp, synthetic construct
  misc_feature 1..20: note = Description of Artificial Sequence: Synthetic oligonucleotide
  misc_feature 1..20: note = Target: FXN; (+) strand; PAM type: NRG; PAM sequence: AGG
  source 1..20: mol_type = other DNA
gtaggcctctgtagggtgca

SEQ ID NO: 20838 - DNA, 20 bp, synthetic construct
  misc_feature 1..20: note = Description of Artificial Sequence: Synthetic oligonucleotide
  misc_feature 1..20: note = Target: FXN; (+) strand; PAM type: NRG; PAM sequence: GGG
  source 1..20: mol_type = other DNA
taggcctctgtagggtgcaa

SEQ ID NO: 20839 - DNA, 20 bp, synthetic construct
  misc_feature 1..20: note = Description of Artificial Sequence: Synthetic oligonucleotide
  misc_feature 1..20: note = Target: FXN; (+) strand; PAM type: NRG; PAM sequence: CAG
  source 1..20: mol_type = other DNA
ctctgtagggtgcaagggca

SEQ ID NO: 20840 - DNA, 20 bp, synthetic construct
  misc_feature 1..20: note = Description of Artificial Sequence: Synthetic oligonucleotide
  misc_feature 1..20: note = Target: FXN; (+) strand; PAM type: NRG; PAM sequence: TGG
  source 1..20: mol_type = other DNA
gtagggtgcaagggcacagc

SEQ ID NO: 20841 - DNA, 20 bp, synthetic construct
  misc_feature 1..20: note = Description of Artificial Sequence: Synthetic oligonucleotide
  misc_feature 1..20: note = Target: FXN; (+) strand; PAM type: NRG; PAM sequence: GAG
  source 1..20: mol_type = other DNA
agggtgcaagggcacagctg

SEQ ID NO: 20842 - DNA, 20 bp, synthetic construct
  misc_feature 1..20: note = Description of Artificial Sequence: Synthetic oligonucleotide
  misc_feature 1..20: note = Target: FXN; (+) strand; PAM type: NRG; PAM sequence: CGG
  source 1..20: mol_type = other DNA
tgcaagggcacagctggaga

SEQ ID NO: 20843 - DNA, 20 bp, synthetic construct
  misc_feature 1..20: note = Description of Artificial Sequence: Synthetic oligonucleotide
  misc_feature 1..20: note = Target: FXN; (+) strand; PAM type: NRG; PAM sequence: GAG
  source 1..20: mol_type = other DNA
caagggcacagctggagacg

SEQ ID NO: 20844 - DNA, 20 bp, synthetic construct
  misc_feature 1..20: note = Description of Artificial Sequence: Synthetic oligonucleotide
  misc_feature 1..20: note = Target: FXN; (+) strand; PAM type: NRG; PAM sequence: GAG
  source 1..20: mol_type = other DNA
cagctggagacggagctcct

SEQ ID NO: 20845 - DNA, 20 bp, synthetic construct
  misc_feature 1..20: note = Description of Artificial Sequence: Synthetic oligonucleotide
  misc_feature 1..20: note = Target: FXN; (+) strand; PAM type: NRG; PAM sequence: AGG
  source 1..20: mol_type = other DNA
agctggagacggagctcctg

SEQ ID NO: 20846 - DNA, 20 bp, synthetic construct
  misc_feature 1..20: note = Description of Artificial Sequence: Synthetic oligonucleotide
  misc_feature 1..20: note = Target: FXN; (+) strand; PAM type: NRG; PAM sequence: CAG
  source 1..20: mol_type = other DNA
agacggagctcctgaggctg

SEQ ID NO: 20847 - DNA, 20 bp, synthetic construct
  misc_feature 1..20: note = Description of Artificial Sequence: Synthetic oligonucleotide
  misc_feature 1..20: note = Target: FXN; (+) strand; PAM type: NRG; PAM sequence: GAG
  source 1..20: mol_type = other DNA
aactgcaccaaaaacgtgat

SEQ ID NO: 20848 - DNA, 20 bp, synthetic construct
  misc_feature 1..20: note = Description of Artificial Sequence: Synthetic oligonucleotide
  misc_feature 1..20: note = Target: FXN; (+) strand; PAM type: NRG; PAM sequence: AGG
  source 1..20: mol_type = other DNA
actgcaccaaaaacgtgatg

SEQ ID NO: 20849 - DNA, 20 bp, synthetic construct
  misc_feature 1..20: note = Description of Artificial Sequence: Synthetic oligonucleotide
  misc_feature 1..20: note = Target: FXN; (+) strand; PAM type: NRG; PAM sequence: TAG
  source 1..20: mol_type = other DNA
ccaaaaacgtgatgaggcca

SEQ ID NO: 20850 - DNA, 20 bp, synthetic construct
  misc_feature 1..20: note = Description of Artificial Sequence: Synthetic oligonucleotide
  misc_feature 1..20: note = Target: FXN; (+) strand; PAM type: NRG; PAM sequence: CGG
  source 1..20: mol_type = other DNA
aaaacgtgatgaggccatag

SEQ ID NO: 20851 - DNA, 20 bp, synthetic construct
  misc_feature 1..20: note = Description of Artificial Sequence: Synthetic oligonucleotide
  misc_feature 1..20: note = Target: FXN; (+) strand; PAM type: NRG; PAM sequence: GGG
  source 1..20: mol_type = other DNA
aaacgtgatgaggccatagc

SEQ ID NO: 20852 - DNA, 20 bp, synthetic construct
  misc_feature 1..20: note = Description of Artificial Sequence: Synthetic oligonucleotide
  misc_feature 1..20: note = Target: FXN; (+) strand; PAM type: NRG; PAM sequence: GAG
  source 1..20: mol_type = other DNA
acgtgatgaggccatagcgg

SEQ ID NO: 20853 - DNA, 20 bp, synthetic construct
  misc_feature 1..20: note = Description of Artificial Sequence: Synthetic oligonucleotide
  misc_feature 1..20: note = Target: FXN; (+) strand; PAM type: NRG; PAM sequence: CGG
  source 1..20: mol_type = other DNA
gaggccatagcgggagtcca

SEQ ID NO: 20854 - DNA, 20 bp, synthetic construct
  misc_feature 1..20: note = Description of Artificial Sequence: Synthetic oligonucleotide
  misc_feature 1..20: note = Target: FXN; (+) strand; PAM type: NRG; PAM sequence: GAG
  source 1..20: mol_type = other DNA
ggccatagcgggagtccacg

SEQ ID NO: 20855 - DNA, 20 bp, synthetic construct
  misc_feature 1..20: note = Description of Artificial Sequence: Synthetic oligonucleotide
  misc_feature 1..20: note = Target: FXN; (+) strand; PAM type: NRG; PAM sequence: AGG
  source 1..20: mol_type = other DNA
gccatagcgggagtccacgg

SEQ ID NO: 20856 - DNA, 20 bp, synthetic construct
  misc_feature 1..20: note = Description of Artificial Sequence: Synthetic oligonucleotide
  misc_feature 1..20: note = Target: FXN; (+) strand; PAM type: NRG; PAM sequence: GAG
  source 1..20: mol_type = other DNA
catagcgggagtccacggag

SEQ ID NO: 20857 - DNA, 20 bp, synthetic construct
  misc_feature 1..20: note = Description of Artificial Sequence: Synthetic oligonucleotide
  misc_feature 1..20: note = Target: FXN; (+) strand; PAM type: NRG; PAM sequence: AGG
  source 1..20: mol_type = other DNA
atagcgggagtccacggagg

SEQ ID NO: 20858 - DNA, 20 bp, synthetic construct
  misc_feature 1..20: note = Description of Artificial Sequence: Synthetic oligonucleotide
  misc_feature 1..20: note = Target: FXN; (+) strand; PAM type: NRG; PAM sequence: TAG
  source 1..20: mol_type = other DNA
gatgcctactgcccgacctc

SEQ ID NO: 20859 - DNA, 20 bp, synthetic construct
  misc_feature 1..20: note = Description of Artificial Sequence: Synthetic oligonucleotide
  misc_feature 1..20: note = Target: FXN; (+) strand; PAM type: NRG; PAM sequence: CAG
  source 1..20: mol_type = other DNA
gcctactgcccgacctctag

SEQ ID NO: 20860 - DNA, 20 bp, synthetic construct
  misc_feature 1..20: note = Description of Artificial Sequence: Synthetic oligonucleotide
  misc_feature 1..20: note = Target: FXN; (+) strand; PAM type: NRG; PAM sequence: GAG
  source 1..20: mol_type = other DNA
ctactgcccgacctctagca

SEQ ID NO: 20861 - DNA, 20 bp, synthetic construct
  misc_feature 1..20: note = Description of Artificial Sequence: Synthetic oligonucleotide
  misc_feature 1..20: note = Target: FXN; (+) strand; PAM type: NRG; PAM sequence: AAG
  source 1..20: mol_type = other DNA
cccgacctctagcagagact

SEQ ID NO: 20862 - DNA, 20 bp, synthetic construct
  misc_feature 1..20: note = Description of Artificial Sequence: Synthetic oligonucleotide
  misc_feature 1..20: note = Target: FXN; (+) strand; PAM type: NRG; PAM sequence: AAG
  source 1..20: mol_type = other DNA
acctctagcagagactaagc

SEQ ID NO: 20863 - DNA, 20 bp, synthetic construct
  misc_feature 1..20: note = Description of Artificial Sequence: Synthetic oligonucleotide
  misc_feature 1..20: note = Target: FXN; (+) strand; PAM type: NRG; PAM sequence: AGG
  source 1..20: mol_type = other DNA
cctctagcagagactaagca

SEQ ID NO: 20864 - DNA, 20 bp, synthetic construct
  misc_feature 1..20: note = Description of Artificial Sequence: Synthetic oligonucleotide
  misc_feature 1..20: note = Target: FXN; (+) strand; PAM type: NRG; PAM sequence: AAG
  source 1..20: mol_type = other DNA
acacccatgaccactacatg

SEQ ID NO: 20865 - DNA, 20 bp, synthetic construct
  misc_feature 1..20: note = Description of Artificial Sequence: Synthetic oligonucleotide
  misc_feature 1..20: note = Target: FXN; (+) strand; PAM type: NRG; PAM sequence: TGG
  source 1..20: mol_type = other DNA
ccatgaccactacatgaaga

SEQ ID NO: 20866 - DNA, 20 bp, synthetic construct
  misc_feature 1..20: note = Description of Artificial Sequence: Synthetic oligonucleotide
  misc_feature 1..20: note = Target: FXN; (+) strand; PAM type: NRG; PAM sequence: TGG
  source 1..20: mol_type = other DNA
catgaagatggcccaaaacc

SEQ ID NO: 20867 - DNA, 20 bp, synthetic construct
  misc_feature 1..20: note = Description of Artificial Sequence: Synthetic oligonucleotide
  misc_feature 1..20: note = Target: FXN; (+) strand; PAM type: NRG; PAM sequence: CAG
  source 1..20: mol_type = other DNA
agatggcccaaaacctggcc

SEQ ID NO: 20868 - DNA, 20 bp, synthetic construct
  misc_feature 1..20: note = Description of Artificial Sequence: Synthetic oligonucleotide
  misc_feature 1..20: note = Target: FXN; (+) strand; PAM type: NRG; PAM sequence: AGG
  source 1..20: mol_type = other DNA
gatggcccaaaacctggccc

SEQ ID NO: 20869 - DNA, 20 bp, synthetic construct
  misc_feature 1..20: note = Description of Artificial Sequence: Synthetic oligonucleotide
  misc_feature 1..20: note = Target: FXN; (+) strand; PAM type: NRG; PAM sequence: AAG
  source 1..20: mol_type = other DNA
aaaacctggcccaggaattg

SEQ ID NO: 20870 - DNA, 20 bp, synthetic construct
  misc_feature 1..20: note = Description of Artificial Sequence: Synthetic oligonucleotide
  misc_feature 1..20: note = Target: FXN; (+) strand; PAM type: NRG; PAM sequence: AAG
  source 1..20: mol_type = other DNA
cctggcccaggaattgaaga

SEQ ID NO: 20871 - DNA, 20 bp, synthetic construct
  misc_feature 1..20: note = Description of Artificial Sequence: Synthetic oligonucleotide
  misc_feature 1..20: note = Target: FXN; (+) strand; PAM type: NRG; PAM sequence: AAG
  source 1..20: mol_type = other DNA
agactcttccaatttgctgt

SEQ ID NO: 20872 - DNA, 20 bp, synthetic construct
  misc_feature 1..20: note = Description of Artificial Sequence: Synthetic oligonucleotide
  misc_feature 1..20: note = Target: FXN; (+) strand; PAM type: NRG; PAM sequence: TGG
  source 1..20: mol_type = other DNA
tccaatttgctgtaagaaaa

SEQ ID NO: 20873 - DNA, 20 bp, synthetic construct
  misc_feature 1..20: note = Description of Artificial Sequence: Synthetic oligonucleotide
  misc_feature 1..20: note = Target: FXN; (+) strand; PAM type: NRG; PAM sequence: CAG
  source 1..20: mol_type = other DNA
tttgctgtaagaaaatggcc

SEQ ID NO: 20874 - DNA, 20 bp, synthetic construct
  misc_feature 1..20: note = Description of Artificial Sequence: Synthetic oligonucleotide
  misc_feature 1..20: note = Target: FXN; (+) strand; PAM type: NRG; PAM sequence: AGG
  source 1..20: mol_type = other DNA
ttgctgtaagaaaatggccc

SEQ ID NO: 20875 - DNA, 20 bp, synthetic construct
  misc_feature 1..20: note = Description of Artificial Sequence: Synthetic oligonucleotide
  misc_feature 1..20: note = Target: FXN; (+) strand; PAM type: NRG; PAM sequence: GGG
  source 1..20: mol_type = other DNA
tgctgtaagaaaatggccca

SEQ ID NO: 20876 - DNA, 20 bp, synthetic construct
  misc_feature 1..20: note = Description of Artificial Sequence: Synthetic oligonucleotide
  misc_feature 1..20: note = Target: FXN; (+) strand; PAM type: NRG; PAM sequence: GGG
  source 1..20: mol_type = other DNA
gctgtaagaaaatggcccag

SEQ ID NO: 20877 - DNA, 20 bp, synthetic construct
  misc_feature 1..20: note = Description of Artificial Sequence: Synthetic oligonucleotide
  misc_feature 1..20: note = Target: FXN; (+) strand; PAM type: NRG; PAM sequence: GGG
  source 1..20: mol_type = other DNA
ctgtaagaaaatggcccagg

SEQ ID NO: 20878 - DNA, 20 bp, synthetic construct
  misc_feature 1..20: note = Description of Artificial Sequence: Synthetic oligonucleotide
  misc_feature 1..20: note = Target: FXN; (+) strand; PAM type: NRG; PAM sequence: AAG
  source 1..20: mol_type = other DNA
aagaaaatggcccagggggc

SEQ ID NO: 20879 - DNA, 20 bp, synthetic construct
  misc_feature 1..20: note = Description of Artificial Sequence: Synthetic oligonucleotide
  misc_feature 1..20: note = Target: FXN; (+) strand; PAM type: NRG; PAM sequence: CGG
  source 1..20: mol_type = other DNA
aatggcccagggggcaagca

SEQ ID NO: 20880 - DNA, 20 bp, synthetic construct
  misc_feature 1..20: note = Description of Artificial Sequence: Synthetic oligonucleotide
  misc_feature 1..20: note = Target: FXN; (+) strand; PAM type: NRG; PAM sequence: TAG
  source 1..20: mol_type = other DNA
ggcccagggggcaagcacgg

SEQ ID NO: 20881 - DNA, 20 bp, synthetic construct
  misc_feature 1..20: note = Description of Artificial Sequence: Synthetic oligonucleotide
  misc_feature 1..20: note = Target: FXN; (+) strand; PAM type: NRG; PAM sequence: TAG
  source 1..20: mol_type = other DNA
gtagctcacacctgtaatcc

SEQ ID NO: 20882 - DNA, 20 bp, synthetic construct
  misc_feature 1..20: note = Description of Artificial Sequence: Synthetic oligonucleotide
  misc_feature 1..20: note = Target: FXN; (+) strand; PAM type: NRG; PAM sequence: TGG
  source 1..20: mol_type = other DNA
cacctgtaatcctagcactt

SEQ ID NO: 20883 - DNA, 20 bp, synthetic construct
  misc_feature 1..20: note = Description of Artificial Sequence: Synthetic oligonucleotide
  misc_feature 1..20: note = Target: FXN; (+) strand; PAM type: NRG; PAM sequence: GGG
  source 1..20: mol_type = other DNA
acctgtaatcctagcacttt

SEQ ID NO: 20884 - DNA, 20 bp, synthetic construct
  misc_feature 1..20: note = Description of Artificial Sequence: Synthetic oligonucleotide
  misc_feature 1..20: note = Target: FXN; (+) strand; PAM type: NRG; PAM sequence: AAG
  source 1..20: mol_type = other DNA
tgtaatcctagcactttggg

SEQ ID NO: 20885 - DNA, 20 bp, synthetic construct
  misc_feature 1..20: note = Description of Artificial Sequence: Synthetic oligonucleotide
  misc_feature 1..20: note = Target: FXN; (+) strand; PAM type: NRG; PAM sequence: CAG
  source 1..20: mol_type = other DNA
agcactttgggaagctgacg

SEQ ID NO: 20886 - DNA, 20 bp, synthetic construct
  misc_feature 1..20: note = Description of Artificial Sequence: Synthetic oligonucleotide
  misc_feature 1..20: note = Target: FXN; (+) strand; PAM type: NRG; PAM sequence: AGG
  source 1..20: mol_type = other DNA
gcactttgggaagctgacgc

SEQ ID NO: 20887 - DNA, 20 bp, synthetic construct
  misc_feature 1..20: note = Description of Artificial Sequence: Synthetic oligonucleotide
  misc_feature 1..20: note = Target: FXN; (+) strand; PAM type: NRG; PAM sequence: CAG
  source 1..20: mol_type = other DNA
ctttgggaagctgacgcagg

SEQ ID NO: 20888 - DNA, 20 bp, synthetic construct
  misc_feature 1..20: note = Description of Artificial Sequence: Synthetic oligonucleotide
  misc_feature 1..20: note = Target: FXN; (+) strand; PAM type: NRG; PAM sequence: TGG
  source 1..20: mol_type = other DNA
gggaagctgacgcaggcaga

SEQ ID NO: 20889 - DNA, 20 bp, synthetic construct
  misc_feature 1..20: note = Description of Artificial Sequence: Synthetic oligonucleotide
  misc_feature 1..20: note = Target: FXN; (+) strand; PAM type: NRG; PAM sequence: GAG
  source 1..20: mol_type = other DNA
ctgacgcaggcagatggctt

SEQ ID NO: 20890 - DNA, 20 bp, synthetic construct
  misc_feature 1..20: note = Description of Artificial Sequence: Synthetic oligonucleotide
  misc_feature 1..20: note = Target: FXN; (+) strand; PAM type: NRG; PAM sequence: CAG
  source 1..20: mol_type = other DNA
gcaggcagatggcttgagct

SEQ ID NO: 20891 - DNA, 20 bp, synthetic construct
  misc_feature 1..20: note = Description of Artificial Sequence: Synthetic oligonucleotide
  misc_feature 1..20: note = Target: FXN; (+) strand; PAM type: NRG; PAM sequence: AGG
  source 1..20: mol_type = other DNA
caggcagatggcttgagctc

SEQ ID NO: 20892 - DNA, 20 bp, synthetic construct
  misc_feature 1..20: note = Description of Artificial Sequence: Synthetic oligonucleotide
  misc_feature 1..20: note = Target: FXN; (+) strand; PAM type: NRG; PAM sequence: GAG
  source 1..20: mol_type = other DNA
ggcagatggcttgagctcag

SEQ ID NO: 20893 - DNA, 20 bp, synthetic construct
  misc_feature 1..20: note = Description of Artificial Sequence: Synthetic oligonucleotide
  misc_feature 1..20: note = Target: FXN; (+) strand; PAM type: NRG; PAM sequence: CAG
  source 1..20: mol_type = other DNA
tggcttgagctcaggagttc

SEQ ID NO: 20894 - DNA, 20 bp, synthetic construct
  misc_feature 1..20: note = Description of Artificial Sequence: Synthetic oligonucleotide
  misc_feature 1..20: note = Target: FXN; (+) strand; PAM type: NRG; PAM sequence: CAG
  source 1..20: mol_type = other DNA
tgagctcaggagttccagac

SEQ ID NO: 20895 - DNA, 20 bp, synthetic construct
  misc_feature 1..20: note = Description of Artificial Sequence: Synthetic oligonucleotide
  misc_feature 1..20: note = Target: FXN; (+) strand; PAM type: NRG; PAM sequence: TGG
  source 1..20: mol_type = other DNA
tcaggagttccagaccagcc

SEQ ID NO: 20896 - DNA, 20 bp, synthetic construct
  misc_feature 1..20: note = Description of Artificial Sequence: Synthetic oligonucleotide
  misc_feature 1..20: note = Target: FXN; (+) strand; PAM type: NRG; PAM sequence: GGG
  source 1..20: mol_type = other DNA
caggagttccagaccagcct

SEQ ID NO: 20897 - DNA, 20 bp, synthetic construct
  misc_feature 1..20: note = Description of Artificial Sequence: Synthetic oligonucleotide
  misc_feature 1..20: note = Target: FXN; (+) strand; PAM type: NRG; PAM sequence: TGG
  source 1..20: mol_type = other DNA
ccagaccagcctgggcaaca

SEQ ID NO: 20898 - DNA, 20 bp, synthetic construct
  misc_feature 1..20: note = Description of Artificial Sequence: Synthetic oligonucleotide
  misc_feature 1..20: note = Target: FXN; (+) strand; PAM type: NRG; PAM sequence: TAG
  source 1..20: mol_type = other DNA
tctaccaaaaatacaaaaat

SEQ ID NO: 20899 - DNA, 20 bp, synthetic construct
  misc_feature 1..20: note = Description of Artificial Sequence: Synthetic oligonucleotide
  misc_feature 1..20: note = Target: FXN; (+) strand; PAM type: NRG; PAM sequence: CGG
  source 1..20: mol_type = other DNA
ccaaaaatacaaaaattagc

SEQ ID NO: 20900 - DNA, 20 bp, synthetic construct
  misc_feature 1..20: note = Description of Artificial Sequence: Synthetic oligonucleotide
  misc_feature 1..20: note = Target: FXN; (+) strand; PAM type: NRG; PAM sequence: GGG
  source 1..20: mol_type = other DNA
caaaaatacaaaaattagcc

SEQ ID NO: 20901 - DNA, 20 bp, synthetic construct
  misc_feature 1..20: note = Description of Artificial Sequence: Synthetic oligonucleotide
  misc_feature 1..20: note = Target: FXN; (+) strand; PAM type: NRG; PAM sequence: TGG
  source 1..20: mol_type = other DNA
atacaaaaattagccgggtg

SEQ ID NO: 20902 - DNA, 20 bp, synthetic construct
  misc_feature 1..20: note = Description of Artificial Sequence: Synthetic oligonucleotide
  misc_feature 1..20: note = Target: FXN; (+) strand; PAM type: NRG; PAM sequence: TGG
  source 1..20: mol_type = other DNA
ggtgtggtgatgcatgcctg

SEQ ID NO: 20903 - DNA, 20 bp, synthetic construct
  misc_feature 1..20: note = Description of Artificial Sequence: Synthetic oligonucleotide
  misc_feature 1..20: note = Target: FXN; (+) strand; PAM type: NRG; PAM sequence: CAG
  source 1..20: mol_type = other DNA
gtgatgcatgcctgtggtcc

SEQ ID NO: 20904 - DNA, 20 bp, synthetic construct
  misc_feature 1..20: note = Description of Artificial Sequence: Synthetic oligonucleotide
  misc_feature 1..20: note = Target: FXN; (+) strand; PAM type: NRG; PAM sequence: CAG
  source 1..20: mol_type = other DNA
tgcctgtggtcccagctact

SEQ ID NO: 20905 - DNA, 20 bp, synthetic construct
  misc_feature 1..20: note = Description of Artificial Sequence: Synthetic oligonucleotide
  misc_feature 1..20: note = Target: FXN; (+) strand; PAM type: NRG; PAM sequence: AGG
  source 1..20: mol_type = other DNA
gcctgtggtcccagctactc

SEQ ID NO: 20906 - DNA, 20 bp, synthetic construct
  misc_feature 1..20: note = Description of Artificial Sequence: Synthetic oligonucleotide
  misc_feature 1..20: note = Target: FXN; (+) strand; PAM type: NRG; PAM sequence: GAG
  source 1..20: mol_type = other DNA
ctgtggtcccagctactcag

SEQ ID NO: 20907 - DNA, 20 bp, synthetic construct
  misc_feature 1..20: note = Description of Artificial Sequence: Synthetic oligonucleotide
  misc_feature 1..20: note = Target: FXN; (+) strand; PAM type: NRG; PAM sequence: AGG
  source 1..20: mol_type = other DNA
tgtggtcccagctactcagg

SEQ ID NO: 20908 - DNA, 20 bp, synthetic construct
  misc_feature 1..20: note = Description of Artificial Sequence: Synthetic oligonucleotide
  misc_feature 1..20: note = Target: FXN; (+) strand; PAM type: NRG; PAM sequence: GAG
  source 1..20: mol_type = other DNA
tcccagctactcaggaggct

SEQ ID NO: 20909 - DNA, 20 bp, synthetic construct
  misc_feature 1..20: note = Description of Artificial Sequence: Synthetic oligonucleotide
  misc_feature 1..20: note = Target: FXN; (+) strand; PAM type: NRG; PAM sequence: AGG
  source 1..20: mol_type = other DNA
cccagctactcaggaggctg

SEQ ID NO: 20910 - DNA, 20 bp, synthetic construct
  misc_feature 1..20: note = Description of Artificial Sequence: Synthetic oligonucleotide
  misc_feature 1..20: note = Target: FXN; (+) strand; PAM type: NRG; PAM sequence: TGG
  source 1..20: mol_type = other DNA
agctactcaggaggctgagg

SEQ ID NO: 20911 - DNA, 20 bp, synthetic construct
  misc_feature 1..20: note = Description of Artificial Sequence: Synthetic oligonucleotide
  misc_feature 1..20: note = Target: FXN; (+) strand; PAM type: NRG; PAM sequence: AAG
  source 1..20: mol_type = other DNA
tactcaggaggctgaggtgg

SEQ ID NO: 20912 - DNA, 20 bp, synthetic construct
  misc_feature 1..20: note = Description of Artificial Sequence: Synthetic oligonucleotide
  misc_feature 1..20: note = Target: FXN; (+) strand; PAM type: NRG; PAM sequence: AGG
  source 1..20: mol_type = other DNA
actcaggaggctgaggtgga

SEQ ID NO: 20913 - DNA, 20 bp, synthetic construct
  misc_feature 1..20: note = Description of Artificial Sequence: Synthetic oligonucleotide
  misc_feature 1..20: note = Target: FXN; (+) strand; PAM type: NRG; PAM sequence: GAG
  source 1..20: mol_type = other DNA
ctgaggtggaaggattgcct

SEQ ID NO: 20914 - DNA, 20 bp, synthetic construct
  misc_feature 1..20: note = Description of Artificial Sequence: Synthetic oligonucleotide
  misc_feature 1..20: note = Target: FXN; (+) strand; PAM type: NRG; PAM sequence: TGG
  source 1..20: mol_type = other DNA
ggaaggattgcctgagtctg

SEQ ID NO: 20915 - DNA, 20 bp, synthetic construct
  misc_feature 1..20: note = Description of Artificial Sequence: Synthetic oligonucleotide
  misc_feature 1..20: note = Target: FXN; (+) strand; PAM type: NRG; PAM sequence: GGG
  source 1..20: mol_type = other DNA
gaaggattgcctgagtctgt

SEQ ID NO: 20916 - DNA, 20 bp, synthetic construct
  misc_feature 1..20: note = Description of Artificial Sequence: Synthetic oligonucleotide
  misc_feature 1..20: note = Target: FXN; (+) strand; PAM type: NRG; PAM sequence: GGG
  source 1..20: mol_type = other DNA
aaggattgcctgagtctgtg

SEQ ID NO: 20917 - DNA, 20 bp, synthetic construct
  misc_feature 1..20: note = Description of Artificial Sequence: Synthetic oligonucleotide
  misc_feature 1..20: note = Target: FXN; (+) strand; PAM type: NRG; PAM sequence: CAG
  source 1..20: mol_type = other DNA
gattgcctgagtctgtgggg

SEQ ID NO: 20918 - DNA, 20 bp, synthetic construct
  misc_feature 1..20: note = Description of Artificial Sequence: Synthetic oligonucleotide
  misc_feature 1..20: note = Target: FXN; (+) strand; PAM type: NRG; PAM sequence: GAG
  source 1..20: mol_type = other DNA
ttgcctgagtctgtggggca

SEQ ID NO: 20919 - DNA, 20 bp, synthetic construct
  misc_feature 1..20: note = Description of Artificial Sequence: Synthetic oligonucleotide
  misc_feature 1..20: note = Target: FXN; (+) strand; PAM type: NRG; PAM sequence: AGG
  source 1..20: mol_type = other DNA
tgcctgagtctgtggggcag

SEQ ID NO: 20920 - DNA, 20 bp, synthetic construct
  misc_feature 1..20: note = Description of Artificial Sequence: Synthetic oligonucleotide
  misc_feature 1..20: note = Target: FXN; (+) strand; PAM type: NRG; PAM sequence: CAG
  source 1..20: mol_type = other DNA
agtctgtggggcagaggttg

SEQ ID NO: 20921 - DNA, 20 bp, synthetic construct
  misc_feature 1..20: note = Description of Artificial Sequence: Synthetic oligonucleotide
  misc_feature 1..20: note = Target: FXN; (+) strand; PAM type: NRG; PAM sequence: GAG
  source 1..20: mol_type = other DNA
tgtggggcagaggttgcagt

SEQ ID NO: 20922 - DNA, 20 bp, synthetic construct
  misc_feature 1..20: note = Description of Artificial Sequence: Synthetic oligonucleotide
  misc_feature 1..20: note = Target: FXN; (+) strand; PAM type: NRG; PAM sequence: GAG
  source 1..20: mol_type = other DNA
ggcagaggttgcagtgagct

SEQ ID NO: 20923 - DNA, 20 bp, synthetic construct
  misc_feature 1..20: note = Description of Artificial Sequence: Synthetic oligonucleotide
  misc_feature 1..20: note = Target: FXN; (+) strand; PAM type: NRG; PAM sequence: CAG
  source 1..20: mol_type = other DNA
gagatcacaccactgcactc

SEQ ID NO: 20924 - DNA, 20 bp, synthetic construct
  misc_feature 1..20: note = Description of Artificial Sequence: Synthetic oligonucleotide
  misc_feature 1..20: note = Target: FXN; (+) strand; PAM type: NRG; PAM sequence: TGG
  source 1..20: mol_type = other DNA
cacaccactgcactccagcc

SEQ ID NO: 20925 - DNA, 20 bp, synthetic construct
  misc_feature 1..20: note = Description of Artificial Sequence: Synthetic oligonucleotide
  misc_feature 1..20: note = Target: FXN; (+) strand; PAM type: NRG; PAM sequence: GGG
  source 1..20: mol_type = other DNA
acaccactgcactccagcct

SEQ ID NO: 20926 - DNA, 20 bp, synthetic construct
  misc_feature 1..20: note = Description of Artificial Sequence: Synthetic oligonucleotide
  misc_feature 1..20: note = Target: FXN; (+) strand; PAM type: NRG; PAM sequence: CAG
  source 1..20: mol_type = other DNA
gcactccagcctgggtgaca

SEQ ID NO: 20927 - DNA, 20 bp, synthetic construct
  misc_feature 1..20: note = Description of Artificial Sequence: Synthetic oligonucleotide
  misc_feature 1..20: note = Target: FXN; (+) strand; PAM type: NRG; PAM sequence: GAG
  source 1..20: mol_type = other DNA
tccagcctgggtgacacagt

SEQ ID NO: 20928 - DNA, 20 bp, synthetic construct
  misc_feature 1..20: note = Description of Artificial Sequence: Synthetic oligonucleotide
  misc_feature 1..20: note = Target: FXN; (+) strand; PAM type: NRG; PAM sequence: AAG
  source 1..20: mol_type = other DNA
cccatctcaaaaaaaaaaaa

SEQ ID NO: 20929 - DNA, 20 bp, synthetic construct
  misc_feature 1..20: note = Description of Artificial Sequence: Synthetic oligonucleotide
  misc_feature 1..20: note = Target: FXN; (+) strand; PAM type: NRG; PAM sequence: AAG
  source 1..20: mol_type = other DNA
tctcaaaaaaaaaaaaaaga

SEQ ID NO: 20930 - DNA, 20 bp, synthetic construct
  misc_feature 1..20: note = Description of Artificial Sequence: Synthetic oligonucleotide
  misc_feature 1..20: note = Target: FXN; (+) strand; PAM type: NRG; PAM sequence: CGG
  source 1..20: mol_type = other DNA
aaaaaaaaaaagaaagaaaa

SEQ ID NO: 20931 - DNA, 20 bp, synthetic construct
  misc_feature 1..20: note = Description of Artificial Sequence: Synthetic oligonucleotide
  misc_feature 1..20: note = Target: FXN; (+) strand; PAM type: NRG; PAM sequence: CAG
  source 1..20: mol_type = other DNA
aaaaaagaaagaaaacggcc

SEQ ID NO: 20932 - DNA, 20 bp, synthetic construct
  misc_feature 1..20: note = Description of Artificial Sequence: Synthetic oligonucleotide
  misc_feature 1..20: note = Target: FXN; (+) strand; PAM type: NRG; PAM sequence: AGG
  source 1..20: mol_type = other DNA
aaaaagaaagaaaacggccc

SEQ ID NO: 20933 - DNA, 20 bp, synthetic construct
  misc_feature 1..20: note = Description of Artificial Sequence: Synthetic oligonucleotide
  misc_feature 1..20: note = Target: FXN; (+) strand; PAM type: NRG; PAM sequence: AAG
  source 1..20: mol_type = other DNA
aagaaagaaaacggcccagg

SEQ ID NO: 20934 - DNA, 20 bp, synthetic construct
  misc_feature 1..20: note = Description of Artificial Sequence: Synthetic oligonucleotide
  misc_feature 1..20: note = Target: FXN; (+) strand; PAM type: NRG; PAM sequence: AGG
  source 1..20: mol_type = other DNA
agaaagaaaacggcccagga

SEQ ID NO: 20935 - DNA, 20 bp, synthetic construct
  misc_feature 1..20: note = Description of Artificial Sequence: Synthetic oligonucleotide
  misc_feature 1..20: note = Target: FXN; (+) strand; PAM type: NRG; PAM sequence: TGG
  source 1..20: mol_type = other DNA
agaaaacggcccaggaaggc

SEQ ID NO: 20936 - DNA, 20 bp, synthetic construct
  misc_feature 1..20: note = Description of Artificial Sequence: Synthetic oligonucleotide
  misc_feature 1..20: note = Target: FXN; (+) strand; PAM type: NRG; PAM sequence: GAG
  source 1..20: mol_type = other DNA
aaaacggcccaggaaggctg

SEQ ID NO: 20937 - DNA, 20 bp, synthetic construct
  misc_feature 1..20: note = Description of Artificial Sequence: Synthetic oligonucleotide
  misc_feature 1..20: note = Target: FXN; (+) strand; PAM type: NRG; PAM sequence: AGG
  source 1..20: mol_type = other DNA
aaacggcccaggaaggctgg

SEQ ID NO: 20938 - DNA, 20 bp, synthetic construct
  misc_feature 1..20: note = Description of Artificial Sequence: Synthetic oligonucleotide
  misc_feature 1..20: note = Target: FXN; (+) strand; PAM type: NRG; PAM sequence: GGG
  source 1..20: mol_type = other DNA
aacggcccaggaaggctgga

SEQ ID NO: 20939 - DNA, 20 bp, synthetic construct
  misc_feature 1..20: note = Description of Artificial Sequence: Synthetic oligonucleotide
  misc_feature 1..20: note = Target: FXN; (+) strand; PAM type: NRG; PAM sequence: GAG
  source 1..20: mol_type = other DNA
ggagggccgccgtgtccatt

SEQ ID NO: 20940 - DNA, 20 bp, synthetic construct
  misc_feature 1..20: note = Description of Artificial Sequence: Synthetic oligonucleotide
  misc_feature 1..20: note = Target: FXN; (+) strand; PAM type: NRG; PAM sequence: GAG
  source 1..20: mol_type = other DNA
agggccgccgtgtccattga

SEQ ID NO: 20941 - DNA, 20 bp, synthetic construct
  misc_feature 1..20: note = Description of Artificial Sequence: Synthetic oligonucleotide
  misc_feature 1..20: note = Target: FXN; (+) strand; PAM type: NRG; PAM sequence: GAG
  source 1..20: mol_type = other DNA
ggccgccgtgtccattgaga

SEQ ID NO: 20942 - DNA, 20 bp, synthetic construct
  misc_feature 1..20: note = Description of Artificial Sequence: Synthetic oligonucleotide
  misc_feature 1..20: note = Target: FXN; (+) strand; PAM type: NRG; PAM sequence: CAG
  source 1..20: mol_type = other DNA
tgtccattgagagagtgctc

SEQ ID NO: 20943 - DNA, 20 bp, synthetic construct
  misc_feature 1..20: note = Description of Artificial Sequence: Synthetic oligonucleotide
  misc_feature 1..20: note = Target: FXN; (+) strand; PAM type: NRG; PAM sequence: AGG
  source 1..20: mol_type = other DNA
gtccattgagagagtgctcc

SEQ ID NO: 20944 - DNA, 20 bp, synthetic construct
  misc_feature 1..20: note = Description of Artificial Sequence: Synthetic oligonucleotide
  misc_feature 1..20: note = Target: FXN; (+) strand; PAM type: NRG; PAM sequence: AAG
  source 1..20: mol_type = other DNA
agtgctccaggcactccaaa

SEQ ID NO: 20945 - DNA, 20 bp, synthetic construct
  misc_feature 1..20: note = Description of Artificial Sequence: Synthetic oligonucleotide
  misc_feature 1..20: note = Target: FXN; (+) strand; PAM type: NRG; PAM sequence: TGG
  source 1..20: mol_type = other DNA
caaaaagaaaatgaccacaa

SEQ ID NO: 20946 - DNA, 20 bp, synthetic construct
  misc_feature 1..20: note = Description of Artificial Sequence: Synthetic oligonucleotide
  misc_feature 1..20: note = Target: FXN; (+) strand; PAM type: NRG; PAM sequence: GGG
  source 1..20: mol_type = other DNA
aaaaagaaaatgaccacaat

SEQ ID NO: 20947 - DNA, 20 bp, synthetic construct
  misc_feature 1..20: note = Description of Artificial Sequence: Synthetic oligonucleotide
  misc_feature 1..20: note = Target: FXN; (+) strand; PAM type: NRG; PAM sequence: AAG
  source 1..20: mol_type = other DNA
aagaaaatgaccacaatggg

SEQ ID NO: 20948 - DNA, 20 bp, synthetic construct
  misc_feature 1..20: note = Description of Artificial Sequence: Synthetic oligonucleotide
  misc_feature 1..20: note = Target: FXN; (+) strand; PAM type: NRG; PAM sequence: CAG
  source 1..20: mol_type = other DNA
tgaccacaatgggaagaaac

SEQ ID NO: 20949 - DNA, 20 bp, synthetic construct
  misc_feature 1..20: note = Description of Artificial Sequence: Synthetic oligonucleotide
  misc_feature 1..20: note = Target: FXN; (+) strand; PAM type: NRG; PAM sequence: GAG
  source 1..20: mol_type = other DNA
ggaagaaaccagctgaccat

SEQ ID NO: 20950 - DNA, 20 bp, synthetic construct
  misc_feature 1..20: note = Description of Artificial Sequence: Synthetic oligonucleotide
  misc_feature 1..20: note = Target: FXN; (+) strand; PAM type: NRG; PAM sequence: AAG
  source 1..20: mol_type = other DNA
aaccagctgaccatgagacc

SEQ ID NO: 20951 - DNA, 20 bp, synthetic construct
  misc_feature 1..20: note = Description of Artificial Sequence: Synthetic oligonucleotide
  misc_feature 1..20: note = Target: FXN; (+) strand; PAM type: NRG; PAM sequence: AAG
  source 1..20: mol_type = other DNA
accaagttccaaccttttac

SEQ ID NO: 20952 - DNA, 20 bp, synthetic construct
  misc_feature 1..20: note = Description of Artificial Sequence: Synthetic oligonucleotide
  misc_feature 1..20: note = Target: FXN; (+) strand; PAM type: NRG; PAM sequence: TGG
  source 1..20: mol_type = other DNA
aagttccaaccttttacaag

SEQ ID NO: 20953 - DNA, 20 bp, synthetic construct
  misc_feature 1..20: note = Description of Artificial Sequence: Synthetic oligonucleotide
  misc_feature 1..20: note = Target: FXN; (+) strand; PAM type: NRG; PAM sequence: TGG
  source 1..20: mol_type = other DNA
aaccttttacaagtggcctg

SEQ ID NO: 20954 - DNA, 20 bp, synthetic construct
  misc_feature 1..20: note = Description of Artificial Sequence: Synthetic oligonucleotide
  misc_feature 1..20: note = Target: FXN; (+) strand; PAM type: NRG; PAM sequence: TGG
  source 1..20: mol_type = other DNA
tacaagtggcctgtggctcc

SEQ ID NO: 20955 - DNA, 20 bp, synthetic construct
  misc_feature 1..20: note = Description of Artificial Sequence: Synthetic oligonucleotide
  misc_feature 1..20: note = Target: FXN; (+) strand; PAM type: NRG; PAM sequence: CAG
  source 1..20: mol_type = other DNA
ggctcctggcgccccgccca

SEQ ID NO: 20956 - DNA, 20 bp, synthetic construct
  misc_feature 1..20: note = Description of Artificial Sequence: Synthetic oligonucleotide
  misc_feature 1..20: note = Target: FXN; (+) strand; PAM type: NRG; PAM sequence: CAG
  source 1..20: mol_type = other DNA
ggcgccccgcccacagctga

SEQ ID NO: 20957 - DNA, 20 bp, synthetic construct
  misc_feature 1..20: note = Description of Artificial Sequence: Synthetic oligonucleotide
  misc_feature 1..20: note = Target: FXN; (+) strand; PAM type: NRG; PAM sequence: AGG
  source 1..20: mol_type = other DNA
gcgccccgcccacagctgac

SEQ ID NO: 20958 - DNA, 20 bp, synthetic construct
  misc_feature 1..20: note = Description of Artificial Sequence: Synthetic oligonucleotide
  misc_feature 1..20: note = Target: FXN; (+) strand; PAM type: NRG; PAM sequence: GGG
  source 1..20: mol_type = other DNA
cgccccgcccacagctgaca

SEQ ID NO: 20959 - DNA, 20 bp, synthetic construct
  misc_feature 1..20: note = Description of Artificial Sequence: Synthetic oligonucleotide
  misc_feature 1..20: note = Target: FXN; (+) strand; PAM type: NRG; PAM sequence: GGG
  source 1..20: mol_type = other DNA
gccccgcccacagctgacag

SEQ ID NO: 20960 - DNA, 20 bp, synthetic construct
  misc_feature 1..20: note = Description of Artificial Sequence: Synthetic oligonucleotide
  misc_feature 1..20: note = Target: FXN; (+) strand; PAM type: NRG; PAM sequence: CAG
  source 1..20: mol_type = other DNA
gcccacagctgacaggggct

SEQ ID NO: 20961 - DNA, 20 bp, synthetic construct
  misc_feature 1..20: note = Description of Artificial Sequence: Synthetic oligonucleotide
  misc_feature 1..20: note = Target: FXN; (+) strand; PAM type: NRG; PAM sequence: AAG
  source 1..20: mol_type = other DNA
cacagctgacaggggctcag

SEQ ID NO: 20962 - DNA, 20 bp, synthetic construct
  misc_feature 1..20: note = Description of Artificial Sequence: Synthetic oligonucleotide
  misc_feature 1..20: note = Target: FXN; (+) strand; PAM type: NRG; PAM sequence: TAG
  source 1..20: mol_type = other DNA
tgacaggggctcagaagtgc

SEQ ID NO: 20963 - DNA, 20 bp, synthetic construct
  misc_feature 1..20: note = Description of Artificial Sequence: Synthetic oligonucleotide
  misc_feature 1..20: note = Target: FXN; (+) strand; PAM type: NRG; PAM sequence: AGG
  source 1..20: mol_type = other DNA
gacaggggctcagaagtgct

SEQ ID NO: 20964 - DNA, 20 bp, synthetic construct
  misc_feature 1..20: note = Description of Artificial Sequence: Synthetic oligonucleotide
  misc_feature 1..20: note = Target: FXN; (+) strand; PAM type: NRG; PAM sequence: GGG
  source 1..20: mol_type = other DNA
acaggggctcagaagtgcta

SEQ ID NO: 20965 - DNA, 20 bp, synthetic construct
  misc_feature 1..20: note = Description of Artificial Sequence: Synthetic oligonucleotide
  misc_feature 1..20: note = Target: FXN; (+) strand; PAM type: NRG; PAM sequence: GGG
  source 1..20: mol_type = other DNA
caggggctcagaagtgctag

SEQ ID NO: 20966 - DNA, 20 bp, synthetic construct
  misc_feature 1..20: note = Description of Artificial Sequence: Synthetic oligonucleotide
  misc_feature 1..20: note = Target: FXN; (+) strand; PAM type: NRG; PAM sequence: GGG
  source 1..20: mol_type = other DNA
aggggctcagaagtgctagg

SEQ ID NO: 20967 - DNA, 20 bp, synthetic construct
  misc_feature 1..20: note = Description of Artificial Sequence: Synthetic oligonucleotide
  misc_feature 1..20: note = Target: FXN; (+) strand; PAM type: NRG; PAM sequence: TGG
  source 1..20: mol_type = other DNA
cagaagtgctagggggacca

SEQ ID NO: 20968 - DNA, 20 bp, synthetic construct
  misc_feature 1..20: note = Description of Artificial Sequence: Synthetic oligonucleotide
  misc_feature 1..20: note = Target: FXN; (+) strand; PAM type: NRG; PAM sequence: GGG
  source 1..20: mol_type = other DNA
agaagtgctagggggaccat

SEQ ID NO: 20969 - DNA, 20 bp, synthetic construct
  misc_feature 1..20: note = Description of Artificial Sequence: Synthetic oligonucleotide
  misc_feature 1..20: note = Target: FXN; (+) strand; PAM type: NRG; PAM sequence: CAG
  source 1..20: mol_type = other DNA
ctagggggaccatgggccac

SEQ ID NO: 20970 - DNA, 20 bp, synthetic construct
  misc_feature 1..20: note = Description of Artificial Sequence: Synthetic oligonucleotide
  misc_feature 1..20: note = Target: FXN; (+) strand; PAM type: NRG; PAM sequence: AGG
  source 1..20: mol_type = other DNA
tagggggaccatgggccacc

SEQ ID NO: 20971 - DNA, 20 bp, synthetic construct
  misc_feature 1..20: note = Description of Artificial Sequence: Synthetic oligonucleotide
  misc_feature 1..20: note = Target: FXN; (+) strand; PAM type: NRG; PAM sequence: GGG
  source 1..20: mol_type = other DNA
agggggaccatgggccacca

SEQ ID NO: 20972 - DNA, 20 bp, synthetic construct
  misc_feature 1..20: note = Description of Artificial Sequence: Synthetic oligonucleotide
  misc_feature 1..20: note = Target: FXN; (+) strand; PAM type: NRG; PAM sequence: CAG
  source 1..20: mol_type = other DNA
ccatgggccaccagggccac

SEQ ID NO: 20973 - DNA, 20 bp, synthetic construct
  misc_feature 1..20: note = Description of Artificial Sequence: Synthetic oligonucleotide
  misc_feature 1..20: note = Target: FXN; (+) strand; PAM type: NRG; PAM sequence: AGG
  source 1..20: mol_type = other DNA
catgggccaccagggccacc

SEQ ID NO: 20974 - DNA, 20 bp, synthetic construct
  misc_feature 1..20: note = Description of Artificial Sequence: Synthetic oligonucleotide
  misc_feature 1..20: note = Target: FXN; (+) strand; PAM type: NRG; PAM sequence: GAG
  source 1..20: mol_type = other DNA
tgggccaccagggccaccag

SEQ ID NO: 20975 - DNA, 20 bp, synthetic construct
  misc_feature 1..20: note = Description of Artificial Sequence: Synthetic oligonucleotide
  misc_feature 1..20: note = Target: FXN; (+) strand; PAM type: NRG; PAM sequence: AGG
  source 1..20: mol_type = other DNA
gggccaccagggccaccagg

SEQ ID NO: 20976 - DNA, 20 bp, synthetic construct
  misc_feature 1..20: note = Description of Artificial Sequence: Synthetic oligonucleotide
  misc_feature 1..20: note = Target: FXN; (+) strand; PAM type: NRG; PAM sequence: GGG
  source 1..20: mol_type = other DNA
ggccaccagggccaccagga

SEQ ID NO: 20977 - DNA, 20 bp, synthetic construct
  misc_feature 1..20: note = Description of Artificial Sequence: Synthetic oligonucleotide
  misc_feature 1..20: note = Target: FXN; (+) strand; PAM type: NRG; PAM sequence: GAG
  source 1..20: mol_type = other DNA
ccaccagggccaccaggagg

SEQ ID NO: 20978 - DNA, 20 bp, synthetic construct
  misc_feature 1..20: note = Description of Artificial Sequence: Synthetic oligonucleotide
  misc_feature 1..20: note = Target: FXN; (+) strand; PAM type: NRG; PAM sequence: AGG
  source 1..20: mol_type = other DNA
caccagggccaccaggaggg

SEQ ID NO: 20979 - DNA, 20 bp, synthetic construct
  misc_feature 1..20: note = Description of Artificial Sequence: Synthetic oligonucleotide
  misc_feature 1..20: note = Target: FXN; (+) strand; PAM type: NRG; PAM sequence: CAG
  source 1..20: mol_type = other DNA
cagggccaccaggagggagg

SEQ ID NO: 20980 - DNA, 20 bp, synthetic construct
  misc_feature 1..20: note = Description of Artificial Sequence: Synthetic oligonucleotide
  misc_feature 1..20: note = Target: FXN; (+) strand; PAM type: NRG; PAM sequence: AGG
  source 1..20: mol_type = other DNA
agggccaccaggagggaggc

SEQ ID NO: 20981 - DNA, 20 bp, synthetic construct
  misc_feature 1..20: note = Description of Artificial Sequence: Synthetic oligonucleotide
  misc_feature 1..20: note = Target: FXN; (+) strand; PAM type: NRG; PAM sequence: GAG
  source 1..20: mol_type = other DNA
agggaggcaggtaacgatgc

SEQ ID NO: 20982 - DNA, 20 bp, synthetic construct
  misc_feature 1..20: note = Description of Artificial Sequence: Synthetic oligonucleotide
  misc_feature 1..20: note = Target: FXN; (+) strand; PAM type: NRG; PAM sequence: AGG
  source 1..20: mol_type = other DNA
gggaggcaggtaacgatgcg

SEQ ID NO: 20983 - DNA, 20 bp, synthetic construct
  misc_feature 1..20: note = Description of Artificial Sequence: Synthetic oligonucleotide
  misc_feature 1..20: note = Target: FXN; (+) strand; PAM type: NRG; PAM sequence: GGG
  source 1..20: mol_type = other DNA
ggaggcaggtaacgatgcga

SEQ ID NO: 20984 - DNA, 20 bp, synthetic construct
  misc_feature 1..20: note = Description of Artificial Sequence: Synthetic oligonucleotide
  misc_feature 1..20: note = Target: FXN; (+) strand; PAM type: NRG; PAM sequence: TGG
  source 1..20: mol_type = other DNA
caggtaacgatgcgagggct

SEQ ID NO: 20985 - DNA, 20 bp, synthetic construct
  misc_feature 1..20: note = Description of Artificial Sequence: Synthetic oligonucleotide
  misc_feature 1..20: note = Target: FXN; (+) strand; PAM type: NRG; PAM sequence: CAG
  source 1..20: mol_type = other DNA
acgatgcgagggcttggatg

SEQ ID NO: 20986 - DNA, 20 bp, synthetic construct
  misc_feature 1..20: note = Description of Artificial Sequence: Synthetic oligonucleotide
  misc_feature 1..20: note = Target: FXN; (+) strand; PAM type: NRG; PAM sequence: CAG
  source 1..20: mol_type = other DNA
agggcttggatgcagaacac

SEQ ID NO: 20987 - DNA, 20 bp, synthetic construct
  misc_feature 1..20: note = Description of Artificial Sequence: Synthetic oligonucleotide
  misc_feature 1..20: note = Target: FXN; (+) strand; PAM type: NRG; PAM sequence: TGG
  source 1..20: mol_type = other DNA
cttggatgcagaacaccagc

SEQ ID NO: 20988 - DNA, 20 bp, synthetic construct
  misc_feature 1..20: note = Description of Artificial Sequence: Synthetic oligonucleotide
  misc_feature 1..20: note = Target: FXN; (+) strand; PAM type: NRG; PAM sequence: TGG
  source 1..20: mol_type = other DNA
gattctgttttccctgtacc

SEQ ID NO: 20989 - DNA, 20 bp, synthetic construct
  misc_feature 1..20: note = Description of Artificial Sequence: Synthetic oligonucleotide
  misc_feature 1..20: note = Target: FXN; (+) strand; PAM type: NRG; PAM sequence: GGG
  source 1..20: mol_type = other DNA
attctgttttccctgtacct

SEQ ID NO: 20990 - DNA, 20 bp, synthetic construct
  misc_feature 1..20: note = Description of Artificial Sequence: Synthetic oligonucleotide
  misc_feature 1..20: note = Target: FXN; (+) strand; PAM type: NRG; PAM sequence: CAG
  source 1..20: mol_type = other DNA
gtacctgggtcctgaatgcc

SEQ ID NO: 20991 - DNA, 20 bp, synthetic construct
  misc_feature 1..20: note = Description of Artificial Sequence: Synthetic oligonucleotide
  misc_feature 1..20: note = Target: FXN; (+) strand; PAM type: NRG; PAM sequence: GAG
  source 1..20: mol_type = other DNA
acctgggtcctgaatgccca

SEQ ID NO: 20992 - DNA, 20 bp, synthetic construct
  misc_feature 1..20: note = Description of Artificial Sequence: Synthetic oligonucleotide
  misc_feature 1..20: note = Target: FXN; (+) strand; PAM type: NRG; PAM sequence: AGG
  source 1..20: mol_type = other DNA
cctgggtcctgaatgcccag

SEQ ID NO: 20993 - DNA, 20 bp, synthetic construct
  misc_feature 1..20: note = Description of Artificial Sequence: Synthetic oligonucleotide
  misc_feature 1..20: note = Target: FXN; (+) strand; PAM type: NRG; PAM sequence: CAG
  source 1..20: mol_type = other DNA
gtcctgaatgcccagaggct

SEQ ID NO: 20994 - DNA, 20 bp, synthetic construct
  misc_feature 1..20: note = Description of Artificial Sequence: Synthetic oligonucleotide
  misc_feature 1..20: note = Target: FXN; (+) strand; PAM type: NRG; PAM sequence: AGG
  source 1..20: mol_type = other DNA
tcctgaatgcccagaggctc

SEQ ID NO: 20995 - DNA, 20 bp, synthetic construct
  misc_feature 1..20: note = Description of Artificial Sequence: Synthetic oligonucleotide
  misc_feature 1..20: note = Target: FXN; (+) strand; PAM type: NRG; PAM sequence: GGG
  source 1..20: mol_type = other DNA
cctgaatgcccagaggctca

SEQ ID NO: 20996 - DNA, 20 bp, synthetic construct
  misc_feature 1..20: note = Description of Artificial Sequence: Synthetic oligonucleotide
  misc_feature 1..20: note = Target: FXN; (+) strand; PAM type: NRG; PAM sequence: CAG
  source 1..20: mol_type = other DNA
ccagaggctcagggaaacac

SEQ ID NO: 20997 - DNA, 20 bp, synthetic construct
  misc_feature 1..20: note = Description of Artificial Sequence: Synthetic oligonucleotide
  misc_feature 1..20: note = Target: FXN; (+) strand; PAM type: NRG; PAM sequence: CAG
  source 1..20: mol_type = other DNA
aggctcagggaaacaccagc

SEQ ID NO: 20998 - DNA, 20 bp, synthetic construct
  misc_feature 1..20: note = Description of Artificial Sequence: Synthetic oligonucleotide
  misc_feature 1..20: note = Target: FXN; (+) strand; PAM type: NRG; PAM sequence: AAG
  source 1..20: mol_type = other DNA
agccagtgctgctgccttta

SEQ ID NO: 20999 - DNA, 20 bp, synthetic construct
  misc_feature 1..20: note = Description of Artificial Sequence: Synthetic oligonucleotide
  misc_feature 1..20: note = Target: FXN; (+) strand; PAM type: NRG; PAM sequence: TAG
  source 1..20: mol_type = other DNA
tgactgatctcttgttaatt

SEQ ID NO: 21000 - DNA, 20 bp, synthetic construct
  misc_feature 1..20: note = Description of Artificial Sequence: Synthetic oligonucleotide
  misc_feature 1..20: note = Target: FXN; (+) strand; PAM type: NRG; PAM sequence: TGG
  source 1..20: mol_type = other DNA
gttaatttagcaactgttat

SEQ ID NO: 21001 - DNA, 20 bp, synthetic construct
  misc_feature 1..20: note = Description of Artificial Sequence: Synthetic oligonucleotide
  misc_feature 1..20: note = Target: FXN; (+) strand; PAM type: NRG; PAM sequence: CAG
  source 1..20: mol_type = other DNA
actgttattggttgatgctg

SEQ ID NO: 21002 - DNA, 20 bp, synthetic construct
  misc_feature 1..20: note = Description of Artificial Sequence: Synthetic oligonucleotide
  misc_feature 1..20: note = Target: FXN; (+) strand; PAM type: NRG; PAM sequence: AAG
  source 1..20: mol_type = other DNA
tgctgcagttgctcttattg

SEQ ID NO: 21003 - DNA, 20 bp, synthetic construct
  misc_feature 1..20: note = Description of Artificial Sequence: Synthetic oligonucleotide
  misc_feature 1..20: note = Target: FXN; (+) strand; PAM type: NRG; PAM sequence: TAG
  source 1..20: mol_type = other DNA
tcttattgaagtttgattga

SEQ ID NO: 21004 - DNA, 20 bp, synthetic construct
  misc_feature 1..20: note = Description of Artificial Sequence: Synthetic oligonucleotide
  misc_feature 1..20: note = Target: FXN; (+) strand; PAM type: NRG; PAM sequence: TAG
  source 1..20: mol_type = other DNA
tgaagtttgattgatagcat

SEQ ID NO: 21005 - DNA, 20 bp, synthetic construct
  misc_feature 1..20: note = Description of Artificial Sequence: Synthetic oligonucleotide
  misc_feature 1..20: note = Target: FXN; (+) strand; PAM type: NRG; PAM sequence: AGG
  source 1..20: mol_type = other DNA
gaagtttgattgatagcatt

SEQ ID NO: 21006 - DNA, 20 bp, synthetic construct
  misc_feature 1..20: note = Description of Artificial Sequence: Synthetic oligonucleotide
  misc_feature 1..20: note = Target: FXN; (+) strand; PAM type: NRG; PAM sequence: TGG
  source 1..20: mol_type = other DNA
tttgattgatagcattagga

SEQ ID NO: 21007 - DNA, 20 bp, synthetic construct
  misc_feature 1..20: note = Description of Artificial Sequence: Synthetic oligonucleotide
  misc_feature 1..20: note = Target: FXN; (+) strand; PAM type: NRG; PAM sequence: AAG
  source 1..20: mol_type = other DNA
attgatagcattaggatggt

SEQ ID NO: 21008 - DNA, 20 bp, synthetic construct
  misc_feature 1..20: note = Description of Artificial Sequence: Synthetic oligonucleotide
  misc_feature 1..20: note = Target: FXN; (+) strand; PAM type: NRG; PAM sequence: AGG
  source 1..20: mol_type = other DNA
ttgatagcattaggatggta

SEQ ID NO: 21009 - DNA, 20 bp, synthetic construct
  misc_feature 1..20: note = Description of Artificial Sequence: Synthetic oligonucleotide
  misc_feature 1..20: note = Target: FXN; (+) strand; PAM type: NRG; PAM sequence: AAG
  source 1..20: mol_type = other DNA
aaggcactatttttcaaata

SEQ ID NO: 21010 - DNA, 20 bp, synthetic construct
  misc_feature 1..20: note = Description of Artificial Sequence: Synthetic oligonucleotide
  misc_feature 1..20: note = Target: FXN; (+) strand; PAM type: NRG; PAM sequence: AGG
  source 1..20: mol_type = other DNA
aggcactatttttcaaataa

SEQ ID NO: 21011 - DNA, 20 bp, synthetic construct
  misc_feature 1..20: note = Description of Artificial Sequence: Synthetic oligonucleotide
  misc_feature 1..20: note = Target: FXN; (+) strand; PAM type: NRG; PAM sequence: CAG
  source 1..20: mol_type = other DNA
aattttgtttttttttctct

SEQ ID NO: 21012 - DNA, 20 bp, synthetic construct
  misc_feature 1..20: note = Description of Artificial Sequence: Synthetic oligonucleotide
  misc_feature 1..20: note = Target: FXN; (+) strand; PAM type: NRG; PAM sequence: TGG
  source 1..20: mol_type = other DNA
tttctctcagcctttcacat

SEQ ID NO: 21013 - DNA, 20 bp, synthetic construct
  misc_feature 1..20: note = Description of Artificial Sequence: Synthetic oligonucleotide
  misc_feature 1..20: note = Target: FXN; (+) strand; PAM type: NRG; PAM sequence: TGG
  source 1..20: mol_type = other DNA
ggttcaaaatatctttcatc

SEQ ID NO: 21014 - DNA, 20 bp, synthetic construct
  misc_feature 1..20: note = Description of Artificial Sequence: Synthetic oligonucleotide
  misc_feature 1..20: note = Target: FXN; (+) strand; PAM type: NRG; PAM sequence: TGG
  source 1..20: mol_type = other DNA
aataattttttttgtcaaca

SEQ ID NO: 21015 - DNA, 20 bp, synthetic construct
  misc_feature 1..20: note = Description of Artificial Sequence: Synthetic oligonucleotide
  misc_feature 1..20: note = Target: FXN; (+) strand; PAM type: NRG; PAM sequence: GGG
  source 1..20: mol_type = other DNA
ataattttttttgtcaacat

SEQ ID NO: 21016 - DNA, 20 bp, synthetic construct
  misc_feature 1..20: note = Description of Artificial Sequence: Synthetic oligonucleotide
  misc_feature 1..20: note = Target: FXN; (+) strand; PAM type: NRG; PAM sequence: GGG
  source 1..20: mol_type = other DNA
taattttttttgtcaacatg

SEQ ID NO: 21017 - DNA, 20 bp, synthetic construct
  misc_feature 1..20: note = Description of Artificial Sequence: Synthetic oligonucleotide
  misc_feature 1..20: note = Target: FXN; (+) strand; PAM type: NRG; PAM sequence: TAG
  source 1..20: mol_type = other DNA
tggggtctcactttgttgcc

SEQ ID NO: 21018 - DNA, 20 bp, synthetic construct
  misc_feature 1..20: note = Description of Artificial Sequence: Synthetic oligonucleotide
  misc_feature 1..20: note = Target: FXN; (+) strand; PAM type: NRG; PAM sequence: AGG
  source 1..20: mol_type = other DNA
ggggtctcactttgttgcct

SEQ ID NO: 21019 - DNA, 20 bp, synthetic construct
  misc_feature 1..20: note = Description of Artificial Sequence: Synthetic oligonucleotide
  misc_feature 1..20: note = Target: FXN; (+) strand; PAM type: NRG; PAM sequence: TGG
  source 1..20: mol_type = other DNA
tctcactttgttgcctaggt

SEQ ID NO: 21020 - DNA, 20 bp, synthetic construct
  misc_feature 1..20: note = Description of Artificial Sequence: Synthetic oligonucleotide
  misc_feature 1..20: note = Target: FXN; (+) strand; PAM type: NRG; PAM sequence: TGG
  source 1..20: mol_type = other DNA
ctaggttggtctgaaactcg

SEQ ID NO: 21021 - DNA, 20 bp, synthetic construct
  misc_feature 1..20: note = Description of Artificial Sequence: Synthetic oligonucleotide
  misc_feature 1..20: note = Target: FXN; (+) strand; PAM type: NRG; PAM sequence: AAG
  source 1..20: mol_type = other DNA
ggtctgaaactcgtggcttc

SEQ ID NO: 21022 - DNA, 20 bp, synthetic construct
  misc_feature 1..20: note = Description of Artificial Sequence: Synthetic oligonucleotide
  misc_feature 1..20: note = Target: FXN; (+) strand; PAM type: NRG; PAM sequence: CAG
  source 1..20: mol_type = other DNA
ttcaagcaatcctcccacat

SEQ ID NO: 21023 - DNA, 20 bp, synthetic construct
  misc_feature 1..20: note = Description of Artificial Sequence: Synthetic oligonucleotide
  misc_feature 1..20: note = Target: FXN; (+) strand; PAM type: NRG; PAM sequence: AAG
  source 1..20: mol_type = other DNA
cctcccacatcagcctccca

SEQ ID NO: 21024 - DNA, 20 bp, synthetic construct
  misc_feature 1..20: note = Description of Artificial Sequence: Synthetic oligonucleotide
  misc_feature 1..20: note = Target: FXN; (+) strand; PAM type: NRG; PAM sequence: TGG
  source 1..20: mol_type = other DNA
acatcagcctcccaaagtgc

SEQ ID NO: 21025 - DNA, 20 bp, synthetic construct
  misc_feature 1..20: note = Description of Artificial Sequence: Synthetic oligonucleotide
  misc_feature 1..20: note = Target: FXN; (+) strand; PAM type: NRG; PAM sequence: GGG
  source 1..20: mol_type = other DNA
catcagcctcccaaagtgct

SEQ ID NO: 21026 - DNA, 20 bp, synthetic construct
  misc_feature 1..20: note = Description of Artificial Sequence: Synthetic oligonucleotide
  misc_feature 1..20: note = Target: FXN; (+) strand; PAM type: NRG; PAM sequence: GGG
  source 1..20: mol_type = other DNA
atcagcctcccaaagtgctg

SEQ ID NO: 21027 - DNA, 20 bp, synthetic construct
  misc_feature 1..20: note = Description of Artificial Sequence: Synthetic oligonucleotide
  misc_feature 1..20: note = Target: FXN; (+) strand; PAM type: NRG; PAM sequence: TGG
  source 1..20: mol_type = other DNA
ctcccaaagtgctggggtta

SEQ ID NO: 21028 - DNA, 20 bp, synthetic construct
  misc_feature 1..20: note = Description of Artificial Sequence: Synthetic oligonucleotide
  misc_feature 1..20: note = Target: FXN; (+) strand; PAM type: NRG; PAM sequence: GGG
  source 1..20: mol_type = other DNA
tcccaaagtgctggggttat

SEQ ID NO: 21029 - DNA, 20 bp, synthetic construct
  misc_feature 1..20: note = Description of Artificial Sequence: Synthetic oligonucleotide
  misc_feature 1..20: note = Target: FXN; (+) strand; PAM type: NRG; PAM sequence: GAG
  source 1..20: mol_type = other DNA
agtgctggggttatgggtgt

SEQ ID NO: 21030 - DNA, 20 bp, synthetic construct
  misc_feature 1..20: note = Description of Artificial Sequence: Synthetic oligonucleotide
  misc_feature 1..20: note = Target: FXN; (+) strand; PAM type: NRG; PAM sequence: CAG
  source 1..20: mol_type = other DNA
gttatgggtgtgagccactg

SEQ ID NO: 21031 - DNA, 20 bp, synthetic construct
  misc_feature 1..20: note = Description of Artificial Sequence: Synthetic oligonucleotide
  misc_feature 1..20: note = Target: FXN; (+) strand; PAM type: NRG; PAM sequence: CAG
  source 1..20: mol_type = other DNA
atgggtgtgagccactgcag

SEQ ID NO: 21032 - DNA, 20 bp, synthetic construct
  misc_feature 1..20: note = Description of Artificial Sequence: Synthetic oligonucleotide
  misc_feature 1..20: note = Target: FXN; (+) strand; PAM type: NRG; PAM sequence: AAG
  source 1..20: mol_type = other DNA
tttgttttttttaatttgac

SEQ ID NO: 21033 - DNA, 20 bp, synthetic construct
  misc_feature 1..20: note = Description of Artificial Sequence: Synthetic oligonucleotide
  misc_feature 1..20: note = Target: FXN; (+) strand; PAM type: NRG; PAM sequence: CAG
  source 1..20: mol_type = other DNA
tttttaatttgacaagtttt

SEQ ID NO: 21034 - DNA, 20 bp, synthetic construct
  misc_feature 1..20: note = Description of Artificial Sequence: Synthetic oligonucleotide
  misc_feature 1..20: note = Target: FXN; (+) strand; PAM type: NRG; PAM sequence: AGG
  source 1..20: mol_type = other DNA
ttttaatttgacaagttttc

SEQ ID NO: 21035 - DNA, 20 bp, synthetic construct
  misc_feature 1..20: note = Description of Artificial Sequence: Synthetic oligonucleotide
  misc_feature 1..20: note = Target: FXN; (+) strand; PAM type: NRG; PAM sequence: CAG
  source 1..20: mol_type = other DNA
gttttcaggtcctgtgaaat

SEQ ID NO: 21036 - DNA, 20 bp, synthetic construct
  misc_feature 1..20: note = Description of Artificial Sequence: Synthetic oligonucleotide
  misc_feature 1..20: note = Target: FXN; (+) strand; PAM type: NRG; PAM sequence: CAG
  source 1..20: mol_type = other DNA
ttcaggtcctgtgaaatcag

SEQ ID NO: 21037 - DNA, 20 bp, synthetic construct
  misc_feature 1..20: note = Description of Artificial Sequence: Synthetic oligonucleotide
  misc_feature 1..20: note = Target: FXN; (+) strand; PAM type: NRG; PAM sequence: GAG
  source 1..20: mol_type = other DNA
cctcccaccttgcgcaccct

SEQ ID NO: 21038 - DNA, 20 bp, synthetic construct
  misc_feature 1..20: note = Description of Artificial Sequence: Synthetic oligonucleotide
  misc_feature 1..20: note = Target: FXN; (+) strand; PAM type: NRG; PAM sequence: AGG
  source 1..20: mol_type = other DNA
ctcccaccttgcgcaccctg

SEQ ID NO: 21039 - DNA, 20 bp, synthetic construct
  misc_feature 1..20: note = Description of Artificial Sequence: Synthetic oligonucleotide
  misc_feature 1..20: note = Target: FXN; (+) strand; PAM type: NRG; PAM sequence: GAG
  source 1..20: mol_type = other DNA
cccaccttgcgcaccctgag

SEQ ID NO: 21040 - DNA, 20 bp, synthetic construct
  misc_feature 1..20: note = Description of Artificial Sequence: Synthetic oligonucleotide
  misc_feature 1..20: note = Target: FXN; (+) strand; PAM type: NRG; PAM sequence: AGG
  source 1..20: mol_type = other DNA
ccaccttgcgcaccctgagg

SEQ ID NO: 21041 - DNA, 20 bp, synthetic construct
  misc_feature 1..20: note = Description of Artificial Sequence: Synthetic oligonucleotide
  misc_feature 1..20: note = Target: FXN; (+) strand; PAM type: NRG; PAM sequence: CAG
  source 1..20: mol_type = other DNA
tgcgcaccctgaggaggttg

SEQ ID NO: 21042 - DNA, 20 bp, synthetic construct
  misc_feature 1..20: note = Description of Artificial Sequence: Synthetic oligonucleotide
  misc_feature 1..20: note = Target: FXN; (+) strand; PAM type: NRG; PAM sequence: AAG
  source 1..20: mol_type = other DNA
cctgaggaggttgcagaata

SEQ ID NO: 21043 - DNA, 20 bp, synthetic construct
  misc_feature 1..20: note = Description of Artificial Sequence: Synthetic oligonucleotide
  misc_feature 1..20: note = Target: FXN; (+) strand; PAM type: NRG; PAM sequence: AGG
  source 1..20: mol_type = other DNA
ctgaggaggttgcagaataa

SEQ ID NO: 21044 - DNA, 20 bp, synthetic construct
  misc_feature 1..20: note = Description of Artificial Sequence: Synthetic oligonucleotide
  misc_feature 1..20: note = Target: FXN; (+) strand; PAM type: NRG; PAM sequence: GAG
  source 1..20: mol_type = other DNA
gaggaggttgcagaataaag

SEQ ID NO: 21045 - DNA, 20 bp, synthetic construct
  misc_feature 1..20: note = Description of Artificial Sequence: Synthetic oligonucleotide
  misc_feature 1..20: note = Target: FXN; (+) strand; PAM type: NRG; PAM sequence: TAG
  source 1..20: mol_type = other DNA
tgcagaataaaggagaattc

SEQ ID NO: 21046 - DNA, 20 bp, synthetic construct
  misc_feature 1..20: note = Description of Artificial Sequence: Synthetic oligonucleotide
  misc_feature 1..20: note = Target: FXN; (+) strand; PAM type: NRG; PAM sequence: AGG
  source 1..20: mol_type = other DNA
gcagaataaaggagaattct

SEQ ID NO: 21047 - DNA, 20 bp, synthetic construct
  misc_feature 1..20: note = Description of Artificial Sequence: Synthetic oligonucleotide
  misc_feature 1..20: note = Target: FXN; (+) strand; PAM type: NRG; PAM sequence: GGG
  source 1..20: mol_type = other DNA
cagaataaaggagaattcta

SEQ ID NO: 21048 - DNA, 20 bp, synthetic construct
  misc_feature 1..20: note = Description of Artificial Sequence: Synthetic oligonucleotide
  misc_feature 1..20: note = Target: FXN; (+) strand; PAM type: NRG; PAM sequence: TGG
  source 1..20: mol_type = other DNA
aggagaattctagggacacg

SEQ ID NO: 21049 - DNA, 20 bp, synthetic construct
  misc_feature 1..20: note = Description of Artificial Sequence: Synthetic oligonucleotide
  misc_feature 1..20: note = Target: FXN; (+) strand; PAM type: NRG; PAM sequence: GGG
  source 1..20: mol_type = other DNA
ggagaattctagggacacgt

SEQ ID NO: 21050 - DNA, 20 bp, synthetic construct
  misc_feature 1..20: note = Description of Artificial Sequence: Synthetic oligonucleotide
  misc_feature 1..20: note = Target: FXN; (+) strand; PAM type: NRG; PAM sequence: CAG
  source 1..20: mol_type = other DNA
ttctagggacacgtgggcat

SEQ ID NO: 21051 - DNA, 20 bp, synthetic construct
  misc_feature 1..20: note = Description of Artificial Sequence: Synthetic oligonucleotide
  misc_feature 1..20: note = Target: FXN; (+) strand; PAM type: NRG; PAM sequence: CAG
  source 1..20: mol_type = other DNA
tgggcatcagtgcctgtgct

SEQ ID NO: 21052 - DNA, 20 bp, synthetic construct
  misc_feature 1..20: note = Description of Artificial Sequence: Synthetic oligonucleotide
  misc_feature 1..20: note = Target: FXN; (+) strand; PAM type: NRG; PAM sequence: GAG
  source 1..20: mol_type = other DNA
ggcatcagtgcctgtgctca

SEQ ID NO: 21053 - DNA, 20 bp, synthetic construct
  misc_feature 1..20: note = Description of Artificial Sequence: Synthetic oligonucleotide
  misc_feature 1..20: note = Target: FXN; (+) strand; PAM type: NRG; PAM sequence: CAG
  source 1..20: mol_type = other DNA
tgcctgtgctcagagcacct

SEQ ID NO: 21054 - DNA, 20 bp, synthetic construct
  misc_feature 1..20: note = Description of Artificial Sequence: Synthetic oligonucleotide
  misc_feature 1..20: note = Target: FXN; (+) strand; PAM type: NRG; PAM sequence: AGG
  source 1..20: mol_type = other DNA
gcctgtgctcagagcacctc

SEQ ID NO: 21055 - DNA, 20 bp, synthetic construct
  misc_feature 1..20: note = Description of Artificial Sequence: Synthetic oligonucleotide
  misc_feature 1..20: note = Target: FXN; (+) strand; PAM type: NRG; PAM sequence: CAG
  source 1..20: mol_type = other DNA
tgtgctcagagcacctcagg

SEQ ID NO: 21056 - DNA, 20 bp, synthetic construct
  misc_feature 1..20: note = Description of Artificial Sequence: Synthetic oligonucleotide
  misc_feature 1..20: note = Target: FXN; (+) strand; PAM type: NRG; PAM sequence: TGG
  source 1..20: mol_type = other DNA
tcagagcacctcaggcagtg

SEQ ID NO: 21057 - DNA, 20 bp, synthetic construct
  misc_feature 1..20: note = Description of Artificial Sequence: Synthetic oligonucleotide
  misc_feature 1..20: note = Target: FXN; (+) strand; PAM type: NRG; PAM sequence: GAG
  source 1..20: mol_type = other DNA
agagcacctcaggcagtgtg

SEQ ID NO: 21058 - DNA, 20 bp, synthetic construct
  misc_feature 1..20: note = Description of Artificial Sequence: Synthetic oligonucleotide
  misc_feature 1..20: note = Target: FXN; (+) strand; PAM type: NRG; PAM sequence: AGG
  source 1..20: mol_type = other DNA
gagcacctcaggcagtgtgg

SEQ ID NO: 21059 - DNA, 20 bp, synthetic construct
  misc_feature 1..20: note = Description of Artificial Sequence: Synthetic oligonucleotide
  misc_feature 1..20: note = Target: FXN; (+) strand; PAM type: NRG; PAM sequence: GGG
  source 1..20: mol_type = other DNA
agcacctcaggcagtgtgga

SEQ ID NO: 21060 - DNA, 20 bp, synthetic construct
  misc_feature 1..20: note = Description of Artificial Sequence: Synthetic oligonucleotide
  misc_feature 1..20: note = Target: FXN; (+) strand; PAM type: NRG; PAM sequence: GGG
  source 1..20: mol_type = other DNA
gcacctcaggcagtgtggag

SEQ ID NO: 21061 - DNA, 20 bp, synthetic construct
  misc_feature 1..20: note = Description of Artificial Sequence: Synthetic oligonucleotide
  misc_feature 1..20: note = Target: FXN; (+) strand; PAM type: NRG; PAM sequence: TAG
  source 1..20: mol_type = other DNA
tcaggcagtgtggaggggtc

SEQ ID NO: 21062 - DNA, 20 bp, synthetic construct
  misc_feature 1..20: note = Description of Artificial Sequence: Synthetic oligonucleotide
  misc_feature 1..20: note = Target: FXN; (+) strand; PAM type: NRG; PAM sequence: GAG
  source 1..20: mol_type = other DNA
aggcagtgtggaggggtcta

SEQ ID NO: 21063 - DNA, 20 bp, synthetic construct
  misc_feature 1..20: note = Description of Artificial Sequence: Synthetic oligonucleotide
  misc_feature 1..20: note = Target: FXN; (+) strand; PAM type: NRG; PAM sequence: AGG
  source 1..20: mol_type = other DNA
ggcagtgtggaggggtctag

SEQ ID NO: 21064 - DNA, 20 bp, synthetic construct
  misc_feature 1..20: note = Description of Artificial Sequence: Synthetic oligonucleotide
  misc_feature 1..20: note = Target: FXN; (+) strand; PAM type: NRG; PAM sequence: CAG
  source 1..20: mol_type = other DNA
ggaggggtctagaggttact

SEQ ID NO: 21065 - DNA, 20 bp, synthetic construct
  misc_feature 1..20: note = Description of Artificial Sequence: Synthetic oligonucleotide
  misc_feature 1..20: note = Target: FXN; (+) strand; PAM type: NRG; PAM sequence: AGG
  source 1..20: mol_type = other DNA
gaggggtctagaggttactc

SEQ ID NO: 21066 - DNA, 20 bp, synthetic construct
  misc_feature 1..20: note = Description of Artificial Sequence: Synthetic oligonucleotide
  misc_feature 1..20: note = Target: FXN; (+) strand; PAM type: NRG; PAM sequence: TGG
  source 1..20: mol_type = other DNA
gaggttactcaggctctgcc

SEQ ID NO: 21067 - DNA, 20 bp, synthetic construct
  misc_feature 1..20: note = Description of Artificial Sequence: Synthetic oligonucleotide
  misc_feature 1..20: note = Target: FXN; (+) strand; PAM type: NRG; PAM sequence: TAG
  source 1..20: mol_type = other DNA
ggctctgcctggcaacccga

SEQ ID NO: 21068 - DNA, 20 bp, synthetic construct
  misc_feature 1..20: note = Description of Artificial Sequence: Synthetic oligonucleotide
  misc_feature 1..20: note = Target: FXN; (+) strand; PAM type: NRG; PAM sequence: CAG
  source 1..20: mol_type = other DNA
tctgcctggcaacccgatag

SEQ ID NO: 21069 - DNA, 20 bp, synthetic construct
  misc_feature 1..20: note = Description of Artificial Sequence: Synthetic oligonucleotide
  misc_feature 1..20: note = Target: FXN; (+) strand; PAM type: NRG; PAM sequence: CAG
  source 1..20: mol_type = other DNA
tggcaacccgatagcagtat

SEQ ID NO: 21070 - DNA, 20 bp, synthetic construct
  misc_feature 1..20: note = Description of Artificial Sequence: Synthetic oligonucleotide
  misc_feature 1..20: note = Target: FXN; (+) strand; PAM type: NRG; PAM sequence: GAG
  source 1..20: mol_type = other DNA
gcaacccgatagcagtatca

SEQ ID NO: 21071 - DNA, 20 bp, synthetic construct
  misc_feature 1..20: note = Description of Artificial Sequence: Synthetic oligonucleotide
  misc_feature 1..20: note = Target: FXN; (+) strand; PAM type: NRG; PAM sequence: TAG
  source 1..20: mol_type = other DNA
ccgatagcagtatcagagta

SEQ ID NO: 21072 - DNA, 20 bp, synthetic construct
  misc_feature 1..20: note = Description of Artificial Sequence: Synthetic oligonucleotide
  misc_feature 1..20: note = Target: FXN; (+) strand; PAM type: NRG; PAM sequence: AGG
  source 1..20: mol_type = other DNA
cgatagcagtatcagagtat

SEQ ID NO: 21073 - DNA, 20 bp, synthetic construct
  misc_feature 1..20: note = Description of Artificial Sequence: Synthetic oligonucleotide
  misc_feature 1..20: note = Target: FXN; (+) strand; PAM type: NRG; PAM sequence: GGG
  source 1..20: mol_type = other DNA
gatagcagtatcagagtata

SEQ ID NO: 21074 - DNA, 20 bp, synthetic construct
  misc_feature 1..20: note = Description of Artificial Sequence: Synthetic oligonucleotide
  misc_feature 1..20: note = Target: FXN; (+) strand; PAM type: NRG; PAM sequence: AAG
  source 1..20: mol_type = other DNA
cagtatcagagtatagggcc

SEQ ID NO: 21075 - DNA, 20 bp, synthetic construct
  misc_feature 1..20: note = Description of Artificial Sequence: Synthetic oligonucleotide
  misc_feature 1..20: note = Target: FXN; (+) strand; PAM type: NRG; PAM sequence: AGG
  source 1..20: mol_type = other DNA
agtatcagagtatagggcca

SEQ ID NO: 21076 - DNA, 20 bp, synthetic construct
  misc_feature 1..20: note = Description of Artificial Sequence: Synthetic oligonucleotide
  misc_feature 1..20: note = Target: FXN; (+) strand; PAM type: NRG; PAM sequence: GGG
  source 1..20: mol_type = other DNA
gtatcagagtatagggccaa

SEQ ID NO: 21077 - DNA, 20 bp, synthetic construct
  misc_feature 1..20: note = Description of Artificial Sequence: Synthetic oligonucleotide
  misc_feature 1..20: note = Target: FXN; (+) strand; PAM type: NRG; PAM sequence: GGG
  source 1..20: mol_type = other DNA
tatcagagtatagggccaag

SEQ ID NO: 21078 - DNA, 20 bp, synthetic construct
  misc_feature 1..20: note = Description of Artificial Sequence: Synthetic oligonucleotide
  misc_feature 1..20: note = Target: FXN; (+) strand; PAM type: NRG; PAM sequence: CGG
  source 1..20: mol_type = other DNA
agagtatagggccaagggga

SEQ ID NO: 21079 - DNA, 20 bp, synthetic construct
  misc_feature 1..20: note = Description of Artificial Sequence: Synthetic oligonucleotide
  misc_feature 1..20: note = Target: FXN; (+) strand; PAM type: NRG; PAM sequence: TGG
  source 1..20: mol_type = other DNA
agggccaaggggacggtcct

SEQ ID NO: 21080 - DNA, 20 bp, synthetic construct
  misc_feature 1..20: note = Description of Artificial Sequence: Synthetic oligonucleotide
  misc_feature 1..20: note = Target: FXN; (+) strand; PAM type: NRG; PAM sequence: GGG
  source 1..20: mol_type = other DNA
gggccaaggggacggtcctt

SEQ ID NO: 21081 - DNA, 20 bp, synthetic construct
  misc_feature 1..20: note = Description of Artificial Sequence: Synthetic oligonucleotide
  misc_feature 1..20: note = Target: FXN; (+) strand; PAM type: NRG; PAM sequence: TGG
  source 1..20: mol_type = other DNA
aaggggacggtccttgggct

SEQ ID NO: 21082 - DNA, 20 bp, synthetic construct
  misc_feature 1..20: note = Description of Artificial Sequence: Synthetic oligonucleotide
  misc_feature 1..20: note = Target: FXN; (+) strand; PAM type: NRG; PAM sequence: TGG
  source 1..20: mol_type = other DNA
gacggtccttgggcttggtg

SEQ ID NO: 21083 - DNA, 20 bp, synthetic construct
  misc_feature 1..20: note = Description of Artificial Sequence: Synthetic oligonucleotide
  misc_feature 1..20: note = Target: FXN; (+) strand; PAM type: NRG; PAM sequence: TAG
  source 1..20: mol_type = other DNA
ttgggcttggtgtggtttat

SEQ ID NO: 21084 - DNA, 20 bp, synthetic construct
  misc_feature 1..20: note = Description of Artificial Sequence: Synthetic oligonucleotide
  misc_feature 1..20: note = Target: FXN; (+) strand; PAM type: NRG; PAM sequence: TGG
  source 1..20: mol_type = other DNA
tccttttcctgtgaccctga

SEQ ID NO: 21085 - DNA, 20 bp, synthetic construct
  misc_feature 1..20: note = Description of Artificial Sequence: Synthetic oligonucleotide
  misc_feature 1..20: note = Target: FXN; (+) strand; PAM type: NRG; PAM sequence: TGG
  source 1..20: mol_type = other DNA
ttcctgtgaccctgatggtt

SEQ ID NO: 21086 - DNA, 20 bp, synthetic construct
  misc_feature 1..20: note = Description of Artificial Sequence: Synthetic oligonucleotide
  misc_feature 1..20: note = Target: FXN; (+) strand; PAM type: NRG; PAM sequence: TGG
  source 1..20: mol_type = other DNA
actcatttttatctccatac

SEQ ID NO: 21087 - DNA, 20 bp, synthetic construct
  misc_feature 1..20: note = Description of Artificial Sequence: Synthetic oligonucleotide
  misc_feature 1..20: note = Target: FXN; (+) strand; PAM type: NRG; PAM sequence: GGG
  source 1..20: mol_type = other DNA
ctcatttttatctccatact

SEQ ID NO: 21088 - DNA, 20 bp, synthetic construct
  misc_feature 1..20: note = Description of Artificial Sequence: Synthetic oligonucleotide
  misc_feature 1..20: note = Target: FXN; (+) strand; PAM type: NRG; PAM sequence: CAG
  source 1..20: mol_type = other DNA
ttttatctccatactgggaa

SEQ ID NO: 21089 - DNA, 20 bp, synthetic construct
  misc_feature 1..20: note = Description of Artificial Sequence: Synthetic oligonucleotide
  misc_feature 1..20: note = Target: FXN; (+) strand; PAM type: NRG; PAM sequence: AGG
  source 1..20: mol_type = other DNA
tttatctccatactgggaac

SEQ ID NO: 21090 - DNA, 20 bp, synthetic construct
  misc_feature 1..20: note = Description of Artificial Sequence: Synthetic oligonucleotide
  misc_feature 1..20: note = Target: FXN; (+) strand; PAM type: NRG; PAM sequence: AAG
  source 1..20: mol_type = other DNA
tccatactgggaacaggttc

SEQ ID NO: 21091 - DNA, 20 bp, synthetic construct
  misc_feature 1..20: note = Description of Artificial Sequence: Synthetic oligonucleotide
  misc_feature 1..20: note = Target: FXN; (+) strand; PAM type: NRG; PAM sequence: CAG
  source 1..20: mol_type = other DNA
ctgggaacaggttcaagccc

SEQ ID NO: 21092 - DNA, 20 bp, synthetic construct
  misc_feature 1..20: note = Description of Artificial Sequence: Synthetic oligonucleotide
  misc_feature 1..20: note = Target: FXN; (+) strand; PAM type: NRG; PAM sequence: TGG
  source 1..20: mol_type = other DNA
caggttcaagccccagcatt

SEQ ID NO: 21093 - DNA, 20 bp, synthetic construct
  misc_feature 1..20: note = Description of Artificial Sequence: Synthetic oligonucleotide
  misc_feature 1..20: note = Target: FXN; (+) strand; PAM type: NRG; PAM sequence: CAG
  source 1..20: mol_type = other DNA
ccagcatttggttgataatg

SEQ ID NO: 21094 - DNA, 20 bp, synthetic construct
  misc_feature 1..20: note = Description of Artificial Sequence: Synthetic oligonucleotide
  misc_feature 1..20: note = Target: FXN; (+) strand; PAM type: NRG; PAM sequence: AGG
  source 1..20: mol_type = other DNA
cagcatttggttgataatgc

SEQ ID NO: 21095 - DNA, 20 bp, synthetic construct
  misc_feature 1..20: note = Description of Artificial Sequence: Synthetic oligonucleotide
  misc_feature 1..20: note = Target: FXN; (+) strand; PAM type: NRG; PAM sequence: AAG
  source 1..20: mol_type = other DNA
ccttgatacttttattgccc

SEQ ID NO: 21096 - DNA, 20 bp, synthetic construct
  misc_feature 1..20: note = Description of Artificial Sequence: Synthetic oligonucleotide
  misc_feature 1..20: note = Target: FXN; (+) strand; PAM type: NRG; PAM sequence: TGG
  source 1..20: mol_type = other DNA
attgcccaagcttcccttcc

SEQ ID NO: 21097 - DNA, 20 bp, synthetic construct
  misc_feature 1..20: note = Description of Artificial Sequence: Synthetic oligonucleotide
  misc_feature 1..20: note = Target: FXN; (+) strand; PAM type: NRG; PAM sequence: TAG
  source 1..20: mol_type = other DNA
ccttcctggtgacctcatcc

SEQ ID NO: 21098 - DNA, 20 bp, synthetic construct
  misc_feature 1..20: note = Description of Artificial Sequence: Synthetic oligonucleotide
  misc_feature 1..20: note = Target: FXN; (+) strand; PAM type: NRG; PAM sequence: CAG
  source 1..20: mol_type = other DNA
tggtgacctcatcctagcct

SEQ ID NO: 21099 - DNA, 20 bp, synthetic construct
  misc_feature 1..20: note = Description of Artificial Sequence: Synthetic oligonucleotide
  misc_feature 1..20: note = Target: FXN; (+) strand; PAM type: NRG; PAM sequence: TGG
  source 1..20: mol_type = other DNA
ctcatcctagcctcagtctt

SEQ ID NO: 21100 - DNA, 20 bp, synthetic construct
  misc_feature 1..20: note = Description of Artificial Sequence: Synthetic oligonucleotide
  misc_feature 1..20: note = Target: FXN; (+) strand; PAM type: NRG; PAM sequence: AAG
  source 1..20: mol_type = other DNA
cctagcctcagtctttggaa

SEQ ID NO: 21101 - DNA, 20 bp, synthetic construct
  misc_feature 1..20: note = Description of Artificial Sequence: Synthetic oligonucleotide
  misc_feature 1..20: note = Target: FXN; (+) strand; PAM type: NRG; PAM sequence: GAG
  source 1..20: mol_type = other DNA
tctttggaaaagccctcctt

SEQ ID NO: 21102 - DNA, 20 bp, synthetic construct
  misc_feature 1..20: note = Description of Artificial Sequence: Synthetic oligonucleotide
  misc_feature 1..20: note = Target: FXN; (+) strand; PAM type: NRG; PAM sequence: CAG
  source 1..20: mol_type = other DNA
aaaagccctccttgagtgct

SEQ ID NO: 21103 - DNA, 20 bp, synthetic construct
  misc_feature 1..20: note = Description of Artificial Sequence: Synthetic oligonucleotide
  misc_feature 1..20: note = Target: FXN; (+) strand; PAM type: NRG; PAM sequence: AGG
  source 1..20: mol_type = other DNA
aaagccctccttgagtgctc

SEQ ID NO: 21104 - DNA, 20 bp, synthetic construct
  misc_feature 1..20: note = Description of Artificial Sequence: Synthetic oligonucleotide
  misc_feature 1..20: note = Target: FXN; (+) strand; PAM type: NRG; PAM sequence: CAG
  source 1..20: mol_type = other DNA
gccctccttgagtgctcagg

SEQ ID NO: 21105 - DNA, 20 bp, synthetic construct
  misc_feature 1..20: note = Description of Artificial Sequence: Synthetic oligonucleotide
  misc_feature 1..20: note = Target: FXN; (+) strand; PAM type: NRG; PAM sequence: CAG
  source 1..20: mol_type = other DNA
cttgagtgctcaggcagact

SEQ ID NO: 21106 - DNA, 20 bp, synthetic construct
  misc_feature 1..20: note = Description of Artificial Sequence: Synthetic oligonucleotide
  misc_feature 1..20: note = Target: FXN; (+) strand; PAM type: NRG; PAM sequence: AGG
  source 1..20: mol_type = other DNA
ttgagtgctcaggcagactc

SEQ ID NO: 21107 - DNA, 20 bp, synthetic construct
  misc_feature 1..20: note = Description of Artificial Sequence: Synthetic oligonucleotide
  misc_feature 1..20: note = Target: FXN; (+) strand; PAM type: NRG; PAM sequence: TGG
  source 1..20: mol_type = other DNA
gactcaggtgccctttcttc

SEQ ID NO: 21108 - DNA, 20 bp, synthetic construct
  misc_feature 1..20: note = Description of Artificial Sequence: Synthetic oligonucleotide
  misc_feature 1..20: note = Target: FXN; (+) strand; PAM type: NRG; PAM sequence: GGG
  source 1..20: mol_type = other DNA
actcaggtgccctttcttct

SEQ ID NO: 21109 - DNA, 20 bp, synthetic construct
  misc_feature 1..20: note = Description of Artificial Sequence: Synthetic oligonucleotide
  misc_feature 1..20: note = Target: FXN; (+) strand; PAM type: NRG; PAM sequence: CAG
  source 1..20: mol_type = other DNA
cactctgttcttacctccat

SEQ ID NO: 21110 - DNA, 20 bp, synthetic construct
  misc_feature 1..20: note = Description of Artificial Sequence: Synthetic oligonucleotide
  misc_feature 1..20: note = Target: FXN; (+) strand; PAM type: NRG; PAM sequence: AGG
  source 1..20: mol_type = other DNA
actctgttcttacctccatc

SEQ ID NO: 21111 - DNA, 20 bp, synthetic construct
  misc_feature 1..20: note = Description of Artificial Sequence: Synthetic oligonucleotide
  misc_feature 1..20: note = Target: FXN; (+) strand; PAM type: NRG; PAM sequence: GGG
  source 1..20: mol_type = other DNA
ctctgttcttacctccatca

SEQ ID NO: 21112 - DNA, 20 bp, synthetic construct
  misc_feature 1..20: note = Description of Artificial Sequence: Synthetic oligonucleotide
  misc_feature 1..20: note = Target: FXN; (+) strand; PAM type: NRG; PAM sequence: TAG
  source 1..20: mol_type = other DNA
catcagggtgccacatgcac

SEQ ID NO: 21113 - DNA, 20 bp, synthetic construct
  misc_feature 1..20: note = Description of Artificial Sequence: Synthetic oligonucleotide
  misc_feature 1..20: note = Target: FXN; (+) strand; PAM type: NRG; PAM sequence: TGG
  source 1..20: mol_type = other DNA
actagtgttatctgctgccg

SEQ ID NO: 21114 - DNA, 20 bp, synthetic construct
  misc_feature 1..20: note = Description of Artificial Sequence: Synthetic oligonucleotide
  misc_feature 1..20: note = Target: FXN; (+) strand; PAM type: NRG; PAM sequence: GAG
  source 1..20: mol_type = other DNA
tgccgtggccaatcatccat

SEQ ID NO: 21115 - DNA, 20 bp, synthetic construct
  misc_feature 1..20: note = Description of Artificial Sequence: Synthetic oligonucleotide
  misc_feature 1..20: note = Target: FXN; (+) strand; PAM type: NRG; PAM sequence: AGG
  source 1..20: mol_type = other DNA
gccgtggccaatcatccatg

SEQ ID NO: 21116 - DNA, 20 bp, synthetic construct
  misc_feature 1..20: note = Description of Artificial Sequence: Synthetic oligonucleotide
  misc_feature 1..20: note = Target: FXN; (+) strand; PAM type: NRG; PAM sequence: GAG
  source 1..20: mol_type = other DNA
ccaatcatccatgaggccat

SEQ ID NO: 21117 - DNA, 20 bp, synthetic construct
  misc_feature 1..20: note = Description of Artificial Sequence: Synthetic oligonucleotide
  misc_feature 1..20: note = Target: FXN; (+) strand; PAM type: NRG; PAM sequence: AGG
  source 1..20: mol_type = other DNA
caatcatccatgaggccatg

SEQ ID NO: 21118 - DNA, 20 bp, synthetic construct
  misc_feature 1..20: note = Description of Artificial Sequence: Synthetic oligonucleotide
  misc_feature 1..20: note = Target: FXN; (+) strand; PAM type: NRG; PAM sequence: AAG
  source 1..20: mol_type = other DNA
tcatccatgaggccatgagg

SEQ ID NO: 21119 - DNA, 20 bp, synthetic construct
  misc_feature 1..20: note = Description of Artificial Sequence: Synthetic oligonucleotide
  misc_feature 1..20: note = Target: FXN; (+) strand; PAM type: NRG; PAM sequence: TGG
  source 1..20: mol_type = other DNA
tccatgaggccatgaggaag

SEQ ID NO: 21120 - DNA, 20 bp, synthetic construct
  misc_feature 1..20: note = Description of Artificial Sequence: Synthetic oligonucleotide
  misc_feature 1..20: note = Target: FXN; (+) strand; PAM type: NRG; PAM sequence: TGG
  source 1..20: mol_type = other DNA
gaggaagtggaatgtacatc

SEQ ID NO: 21121 - DNA, 20 bp, synthetic construct
  misc_feature 1..20: note = Description of Artificial Sequence: Synthetic oligonucleotide
  misc_feature 1..20: note = Target: FXN; (+) strand; PAM type: NRG; PAM sequence: AAG
  source 1..20: mol_type = other DNA
gtggaatgtacatctggtat

SEQ ID NO: 21122 - DNA, 20 bp, synthetic construct
  misc_feature 1..20: note = Description of Artificial Sequence: Synthetic oligonucleotide
  misc_feature 1..20: note = Target: FXN; (+) strand; PAM type: NRG; PAM sequence: AAG
  source 1..20: mol_type = other DNA
gaatgtacatctggtataag

SEQ ID NO: 21123 - DNA, 20 bp, synthetic construct
  misc_feature 1..20: note = Description of Artificial Sequence: Synthetic oligonucleotide
  misc_feature 1..20: note = Target: FXN; (+) strand; PAM type: NRG; PAM sequence: TGG
  source 1..20: mol_type = other DNA
acatctggtataagaagaca

SEQ ID NO: 21124 - DNA, 20 bp, synthetic construct
  misc_feature 1..20: note = Description of Artificial Sequence: Synthetic oligonucleotide
  misc_feature 1..20: note = Target: FXN; (+) strand; PAM type: NRG; PAM sequence: CAG
  source 1..20: mol_type = other DNA
tctggtataagaagacatgg

SEQ ID NO: 21125 - DNA, 20 bp, synthetic construct
  misc_feature 1..20: note = Description of Artificial Sequence: Synthetic oligonucleotide
  misc_feature 1..20: note = Target: FXN; (+) strand; PAM type: NRG; PAM sequence: AAG
  source 1..20: mol_type = other DNA
ggtataagaagacatggcag

SEQ ID NO: 21126 - DNA, 20 bp, synthetic construct
  misc_feature 1..20: note = Description of Artificial Sequence: Synthetic oligonucleotide
  misc_feature 1..20: note = Target: FXN; (+) strand; PAM type: NRG; PAM sequence: CAG
  source 1..20: mol_type = other DNA
taagaagacatggcagaagc

SEQ ID NO: 21127 - DNA, 20 bp, synthetic construct
  misc_feature 1..20: note = Description of Artificial Sequence: Synthetic oligonucleotide
  misc_feature 1..20: note = Target: FXN; (+) strand; PAM type: NRG; PAM sequence: CAG
  source 1..20: mol_type = other DNA
ccgatctgtccacacgaata

SEQ ID NO: 21128 - DNA, 20 bp, synthetic construct
  misc_feature 1..20: note = Description of Artificial Sequence: Synthetic oligonucleotide
  misc_feature 1..20: note = Target: FXN; (+) strand; PAM type: NRG; PAM sequence: AAG
  source 1..20: mol_type = other DNA
acacgaatacagcattccca

SEQ ID NO: 21129 - DNA, 20 bp, synthetic construct
  misc_feature 1..20: note = Description of Artificial Sequence: Synthetic oligonucleotide
  misc_feature 1..20: note = Target: FXN; (+) strand; PAM type: NRG; PAM sequence: TGG
  source 1..20: mol_type = other DNA
gtgcatgtgccattattcac

SEQ ID NO: 21130 - DNA, 20 bp, synthetic construct
  misc_feature 1..20: note = Description of Artificial Sequence: Synthetic oligonucleotide
  misc_feature 1..20: note = Target: FXN; (+) strand; PAM type: NRG; PAM sequence: GAG
  source 1..20: mol_type = other DNA
tgtgccattattcactggat

SEQ ID NO: 21131 - DNA, 20 bp, synthetic construct
  misc_feature 1..20: note = Description of Artificial Sequence: Synthetic oligonucleotide
  misc_feature 1..20: note = Target: FXN; (+) strand; PAM type: NRG; PAM sequence: GAG
  source 1..20: mol_type = other DNA
attattcactggatgagctt

SEQ ID NO: 21132 - DNA, 20 bp, synthetic construct
  misc_feature 1..20: note = Description of Artificial Sequence: Synthetic oligonucleotide
  misc_feature 1..20: note = Target: FXN; (+) strand; PAM type: NRG; PAM sequence: AGG
  source 1..20: mol_type = other DNA
ttattcactggatgagcttg

SEQ ID NO: 21133 - DNA, 20 bp, synthetic construct
  misc_feature 1..20: note = Description of Artificial Sequence: Synthetic oligonucleotide
  misc_feature 1..20: note = Target: FXN; (+) strand; PAM type: NRG; PAM sequence: TGG
  source 1..20: mol_type = other DNA
ttcactggatgagcttgagg

SEQ ID NO: 21134 - DNA, 20 bp, synthetic construct
  misc_feature 1..20: note = Description of Artificial Sequence: Synthetic oligonucleotide
  misc_feature 1..20: note = Target: FXN; (+) strand; PAM type: NRG; PAM sequence: TAG
  source 1..20: mol_type = other DNA
tgagcttgaggtggatgaac

SEQ ID NO: 21135 - DNA, 20 bp, synthetic construct
  misc_feature 1..20: note = Description of Artificial Sequence: Synthetic oligonucleotide
  misc_feature 1..20: note = Target: FXN; (+) strand; PAM type: NRG; PAM sequence: CAG
  source 1..20: mol_type = other DNA
aggtggatgaactagcccac

SEQ ID NO: 21136 - DNA, 20 bp, synthetic construct
  misc_feature 1..20: note = Description of Artificial Sequence: Synthetic oligonucleotide
  misc_feature 1..20: note = Target: FXN; (+) strand; PAM type: NRG; PAM sequence: AGG
  source 1..20: mol_type = other DNA
ggtggatgaactagcccacc

SEQ ID NO: 21137 - DNA, 20 bp, synthetic construct
  misc_feature 1..20: note = Description of Artificial Sequence: Synthetic oligonucleotide
  misc_feature 1..20: note = Target: FXN; (+) strand; PAM type: NRG; PAM sequence: AAG
  source 1..20: mol_type = other DNA
catgaatttaacactgaatt

SEQ ID NO: 21138 - DNA, 20 bp, synthetic construct
  misc_feature 1..20: note = Description of Artificial Sequence: Synthetic oligonucleotide
  misc_feature 1..20: note = Target: FXN; (+) strand; PAM type: NRG; PAM sequence: TAG
  source 1..20: mol_type = other DNA
aaaatatgttttaaaaataa

SEQ ID NO: 21139 - DNA, 20 bp, synthetic construct
  misc_feature 1..20: note = Description of Artificial Sequence: Synthetic oligonucleotide
  misc_feature 1..20: note = Target: FXN; (+) strand; PAM type: NRG; PAM sequence: TAG
  source 1..20: mol_type = other DNA
atgttttaaaaataatagtt

SEQ ID NO: 21140 - DNA, 20 bp, synthetic construct
  misc_feature 1..20: note = Description of Artificial Sequence: Synthetic oligonucleotide
  misc_feature 1..20: note = Target: FXN; (+) strand; PAM type: NRG; PAM sequence: AGG
  source 1..20: mol_type = other DNA
tgttttaaaaataatagttt

SEQ ID NO: 21141 - DNA, 20 bp, synthetic construct
  misc_feature 1..20: note = Description of Artificial Sequence: Synthetic oligonucleotide
  misc_feature 1..20: note = Target: FXN; (+) strand; PAM type: NRG; PAM sequence: TGG
  source 1..20: mol_type = other DNA
ataatagtttaggtgattgc

SEQ ID NO: 21142 - DNA, 20 bp, synthetic construct
  misc_feature 1..20: note = Description of Artificial Sequence: Synthetic oligonucleotide
  misc_feature 1..20: note = Target: FXN; (+) strand; PAM type: NRG; PAM sequence: GGG
  source 1..20: mol_type = other DNA
taatagtttaggtgattgct

SEQ ID NO: 21143 - DNA, 20 bp, synthetic construct
  misc_feature 1..20: note = Description of Artificial Sequence: Synthetic oligonucleotide
  misc_feature 1..20: note = Target: FXN; (+) strand; PAM type: NRG; PAM sequence: GGG
  source 1..20: mol_type = other DNA
aatagtttaggtgattgctg

SEQ ID NO: 21144 - DNA, 20 bp, synthetic construct
  misc_feature 1..20: note = Description of Artificial Sequence: Synthetic oligonucleotide
  misc_feature 1..20: note = Target: FXN; (+) strand; PAM type: NRG; PAM sequence: TAG
  source 1..20: mol_type = other DNA
ttaggtgattgctggggtgc

SEQ ID NO: 21145 - DNA, 20 bp, synthetic construct
  misc_feature 1..20: note = Description of Artificial Sequence: Synthetic oligonucleotide
  misc_feature 1..20: note = Target: FXN; (+) strand; PAM type: NRG; PAM sequence: AGG
  source 1..20: mol_type = other DNA
taggtgattgctggggtgct

SEQ ID NO: 21146 - DNA, 20 bp, synthetic construct
  misc_feature 1..20: note = Description of Artificial Sequence: Synthetic oligonucleotide
  misc_feature 1..20: note = Target: FXN; (+) strand; PAM type: NRG; PAM sequence: GAG
  source 1..20: mol_type = other DNA
ggtgattgctggggtgctag

SEQ ID NO: 21147 - DNA, 20 bp, synthetic construct
  misc_feature 1..20: note = Description of Artificial Sequence: Synthetic oligonucleotide
  misc_feature 1..20: note = Target: FXN; (+) strand; PAM type: NRG; PAM sequence: GAG
  source 1..20: mol_type = other DNA
tgattgctggggtgctagga

SEQ ID NO: 21148 - DNA, 20 bp, synthetic construct
  misc_feature 1..20: note = Description of Artificial Sequence: Synthetic oligonucleotide
  misc_feature 1..20: note = Target: FXN; (+) strand; PAM type: NRG; PAM sequence: AGG
  source 1..20: mol_type = other DNA
gattgctggggtgctaggag

SEQ ID NO: 21149 - DNA, 20 bp, synthetic construct
  misc_feature 1..20: note = Description of Artificial Sequence: Synthetic oligonucleotide
  misc_feature 1..20: note = Target: FXN; (+) strand; PAM type: NRG; PAM sequence: AAG
  source 1..20: mol_type = other DNA
tgctggggtgctaggagagg

SEQ ID NO: 21150 - DNA, 20 bp, synthetic construct
  misc_feature 1..20: note = Description of Artificial Sequence: Synthetic oligonucleotide
  misc_feature 1..20: note = Target: FXN; (+) strand; PAM type: NRG; PAM sequence: AGG
  source 1..20: mol_type = other DNA
gctggggtgctaggagagga

SEQ ID NO: 21151 - DNA, 20 bp, synthetic construct
  misc_feature 1..20: note = Description of Artificial Sequence: Synthetic oligonucleotide
  misc_feature 1..20: note = Target: FXN; (+) strand; PAM type: NRG; PAM sequence: TGG
  source 1..20: mol_type = other DNA
ggtgctaggagaggaaggaa

SEQ ID NO: 21152 - DNA, 20 bp, synthetic construct
  misc_feature 1..20: note = Description of Artificial Sequence: Synthetic oligonucleotide
  misc_feature 1..20: note = Target: FXN; (+) strand; PAM type: NRG; PAM sequence: GGG
  source 1..20: mol_type = other DNA
gtgctaggagaggaaggaat

SEQ ID NO: 21153 - DNA, 20 bp, synthetic construct
  misc_feature 1..20: note = Description of Artificial Sequence: Synthetic oligonucleotide
  misc_feature 1..20: note = Target: FXN; (+) strand; PAM type: NRG; PAM sequence: GGG
  source 1..20: mol_type = other DNA
tgctaggagaggaaggaatg

SEQ ID NO: 21154 - DNA, 20 bp, synthetic construct
  misc_feature 1..20: note = Description of Artificial Sequence: Synthetic oligonucleotide
  misc_feature 1..20: note = Target: FXN; (+) strand; PAM type: NRG; PAM sequence: TGG
  source 1..20: mol_type = other DNA
aatggggaataactgtttaa

SEQ ID NO: 21155 - DNA, 20 bp, synthetic construct
  misc_feature 1..20: note = Description of Artificial Sequence: Synthetic oligonucleotide
  misc_feature 1..20: note = Target: FXN; (+) strand; PAM type: NRG; PAM sequence: GGG
  source 1..20: mol_type = other DNA
atggggaataactgtttaat

SEQ ID NO: 21156 - DNA, 20 bp, synthetic construct
  misc_feature 1..20: note = Description of Artificial Sequence: Synthetic oligonucleotide
  misc_feature 1..20: note = Target: FXN; (+) strand; PAM type: NRG; PAM sequence: TAG
  source 1..20: mol_type = other DNA
gaataactgtttaatgggta

SEQ ID NO: 21157 - DNA, 20 bp, synthetic construct
  misc_feature 1..20: note = Description of Artificial Sequence: Synthetic oligonucleotide
  misc_feature 1..20: note = Target: FXN; (+) strand; PAM type: NRG; PAM sequence: TGG
  source 1..20: mol_type = other DNA
aactgtttaatgggtatagt

SEQ ID NO: 21158 - DNA, 20 bp, synthetic construct
  misc_feature 1..20: note = Description of Artificial Sequence: Synthetic oligonucleotide
  misc_feature 1..20: note = Target: FXN; (+) strand; PAM type: NRG; PAM sequence: TGG
  source 1..20: mol_type = other DNA
tagttggccttgtgtatctg

SEQ ID NO: 21159 - DNA, 20 bp, synthetic construct
  misc_feature 1..20: note = Description of Artificial Sequence: Synthetic oligonucleotide
  misc_feature 1..20: note = Target: FXN; (+) strand; PAM type: NRG; PAM sequence: GGG
  source 1..20: mol_type = other DNA
agttggccttgtgtatctgt

SEQ ID NO: 21160 - DNA, 20 bp, synthetic construct
  misc_feature 1..20: note = Description of Artificial Sequence: Synthetic oligonucleotide
  misc_feature 1..20: note = Target: FXN; (+) strand; PAM type: NRG; PAM sequence: TGG
  source 1..20: mol_type = other DNA
acatctgattcaaccaaccg

SEQ ID NO: 21161 - DNA, 20 bp, synthetic construct
  misc_feature 1..20: note = Description of Artificial Sequence: Synthetic oligonucleotide
  misc_feature 1..20: note = Target: FXN; (+) strand; PAM type: NRG; PAM sequence: CAG
  source 1..20: mol_type = other DNA
accaatataacaactattaa

SEQ ID NO: 21162 - DNA, 20 bp, synthetic construct
  misc_feature 1..20: note = Description of Artificial Sequence: Synthetic oligonucleotide
  misc_feature 1..20: note = Target: FXN; (+) strand; PAM type: NRG; PAM sequence: TAG
  source 1..20: mol_type = other DNA
taacagcatttacattgtac

SEQ ID NO: 21163 - DNA, 20 bp, synthetic construct
  misc_feature 1..20: note = Description of Artificial Sequence: Synthetic oligonucleotide
  misc_feature 1..20: note = Target: FXN; (+) strand; PAM type: NRG; PAM sequence: AGG
  source 1..20: mol_type = other DNA
aacagcatttacattgtact

SEQ ID NO: 21164 - DNA, 20 bp, synthetic construct
  misc_feature 1..20: note = Description of Artificial Sequence: Synthetic oligonucleotide
  misc_feature 1..20: note = Target: FXN; (+) strand; PAM type: NRG; PAM sequence: AAG
  source 1..20: mol_type = other DNA
tacattgtactaggcattat

SEQ ID NO: 21165 - DNA, 20 bp, synthetic construct
  misc_feature 1..20: note = Description of Artificial Sequence: Synthetic oligonucleotide
  misc_feature 1..20: note = Target: FXN; (+) strand; PAM type: NRG; PAM sequence: TGG
  source 1..20: mol_type = other DNA
actaggcattataagtaatc

SEQ ID NO: 21166 - DNA, 20 bp, synthetic construct
  misc_feature 1..20: note = Description of Artificial Sequence: Synthetic oligonucleotide
  misc_feature 1..20: note = Target: FXN; (+) strand; PAM type: NRG; PAM sequence: GAG
  source 1..20: mol_type = other DNA
taggcattataagtaatctg

SEQ ID NO: 21167 - DNA, 20 bp, synthetic construct
  misc_feature 1..20: note = Description of Artificial Sequence: Synthetic oligonucleotide
  misc_feature 1..20: note = Target: FXN; (+) strand; PAM type: NRG; PAM sequence: AAG
  source 1..20: mol_type = other DNA
agtaatctggagatgactta

SEQ ID NO: 21168 - DNA, 20 bp, synthetic construct
  misc_feature 1..20: note = Description of Artificial Sequence: Synthetic oligonucleotide
  misc_feature 1..20: note = Target: FXN; (+) strand; PAM type: NRG; PAM sequence: CAG
  source 1..20: mol_type = other DNA
tggagatgacttaaagcata

SEQ ID NO: 21169 - DNA, 20 bp, synthetic construct
  misc_feature 1..20: note = Description of Artificial Sequence: Synthetic oligonucleotide
  misc_feature 1..20: note = Target: FXN; (+) strand; PAM type: NRG; PAM sequence: AAG
  source 1..20: mol_type = other DNA
agatgacttaaagcatacag

SEQ ID NO: 21170 - DNA, 20 bp, synthetic construct
  misc_feature 1..20: note = Description of Artificial Sequence: Synthetic oligonucleotide
  misc_feature 1..20: note = Target: FXN; (+) strand; PAM type: NRG; PAM sequence: AGG
  source 1..20: mol_type = other DNA
gatgacttaaagcatacaga

SEQ ID NO: 21171 - DNA, 20 bp, synthetic construct
  misc_feature 1..20: note = Description of Artificial Sequence: Synthetic oligonucleotide
  misc_feature 1..20: note = Target: FXN; (+) strand; PAM type: NRG; PAM sequence: TAG
  source 1..20: mol_type = other DNA
agcatacagaaggatgtgcc

SEQ ID NO: 21172 - DNA, 20 bp, synthetic construct
  misc_feature 1..20: note = Description of Artificial Sequence: Synthetic oligonucleotide
  misc_feature 1..20: note = Target: FXN; (+) strand; PAM type: NRG; PAM sequence: AGG
  source 1..20: mol_type = other DNA
gcatacagaaggatgtgcct

SEQ ID NO: 21173 - DNA, 20 bp, synthetic construct
  misc_feature 1..20: note = Description of Artificial Sequence: Synthetic oligonucleotide
  misc_feature 1..20: note = Target: FXN; (+) strand; PAM type: NRG; PAM sequence: TAG
  source 1..20: mol_type = other DNA
acagaaggatgtgcctaggt

SEQ ID NO: 21174 - DNA, 20 bp, synthetic construct
  misc_feature 1..20: note = Description of Artificial Sequence: Synthetic oligonucleotide
  misc_feature 1..20: note = Target: FXN; (+) strand; PAM type: NRG; PAM sequence: CAG
  source 1..20: mol_type = other DNA
tgtatcgtaccatttcatat

SEQ ID NO: 21175 - DNA, 20 bp, synthetic construct
  misc_feature 1..20: note = Description of Artificial Sequence: Synthetic oligonucleotide
  misc_feature 1..20: note = Target: FXN; (+) strand; PAM type: NRG; PAM sequence: AGG
  source 1..20: mol_type = other DNA
gtatcgtaccatttcatatc

SEQ ID NO: 21176 - DNA, 20 bp, synthetic construct
  misc_feature 1..20: note = Description of Artificial Sequence: Synthetic oligonucleotide
  misc_feature 1..20: note = Target: FXN; (+) strand; PAM type: NRG; PAM sequence: GGG
  source 1..20: mol_type = other DNA
tatcgtaccatttcatatca

SEQ ID NO: 21177 - DNA, 20 bp, synthetic construct
  misc_feature 1..20: note = Description of Artificial Sequence: Synthetic oligonucleotide
  misc_feature 1..20: note = Target: FXN; (+) strand; PAM type: NRG; PAM sequence: GAG
  source 1..20: mol_type = other DNA
ccatttcatatcagggactt

SEQ ID NO: 21178 - DNA, 20 bp, synthetic construct
  misc_feature 1..20: note = Description of Artificial Sequence: Synthetic oligonucleotide
  misc_feature 1..20: note = Target: FXN; (+) strand; PAM type: NRG; PAM sequence: CGG
  source 1..20: mol_type = other DNA
atcagggacttgagtaccca

SEQ ID NO: 21179 - DNA, 20 bp, synthetic construct
  misc_feature 1..20: note = Description of Artificial Sequence: Synthetic oligonucleotide
  misc_feature 1..20: note = Target: FXN; (+) strand; PAM type: NRG; PAM sequence: TGG
  source 1..20: mol_type = other DNA
acttgagtacccacggattt

SEQ ID NO: 21180 - DNA, 20 bp, synthetic construct
  misc_feature 1..20: note = Description of Artificial Sequence: Synthetic oligonucleotide
  misc_feature 1..20: note = Target: FXN; (+) strand; PAM type: NRG; PAM sequence: CAG
  source 1..20: mol_type = other DNA
cccacggattttggtatctg

SEQ ID NO: 21181 - DNA, 20 bp, synthetic construct
  misc_feature 1..20: note = Description of Artificial Sequence: Synthetic oligonucleotide
  misc_feature 1..20: note = Target: FXN; (+) strand; PAM type: NRG; PAM sequence: TGG
  source 1..20: mol_type = other DNA
attttggtatctgcagatcc

SEQ ID NO: 21182 - DNA, 20 bp, synthetic construct
  misc_feature 1..20: note = Description of Artificial Sequence: Synthetic oligonucleotide
  misc_feature 1..20: note = Target: FXN; (+) strand; PAM type: NRG; PAM sequence: TGG
  source 1..20: mol_type = other DNA
atcctggaaccccttcccta

SEQ ID NO: 21183 - DNA, 20 bp, synthetic construct
  misc_feature 1..20: note = Description of Artificial Sequence: Synthetic oligonucleotide
  misc_feature 1..20: note = Target: FXN; (+) strand; PAM type: NRG; PAM sequence: AAG
  source 1..20: mol_type = other DNA
accccttccctatggatacc

SEQ ID NO: 21184 - DNA, 20 bp, synthetic construct
  misc_feature 1..20: note = Description of Artificial Sequence: Synthetic oligonucleotide
  misc_feature 1..20: note = Target: FXN; (+) strand; PAM type: NRG; PAM sequence: AGG
  source 1..20: mol_type = other DNA
ccccttccctatggatacca

SEQ ID NO: 21185 - DNA, 20 bp, synthetic construct
  misc_feature 1..20: note = Description of Artificial Sequence: Synthetic oligonucleotide
  misc_feature 1..20: note = Target: FXN; (+) strand; PAM type: NRG; PAM sequence: CAG
  source 1..20: mol_type = other DNA
ctatggataccaaggaacaa

SEQ ID NO: 21186 - DNA, 20 bp, synthetic construct
  misc_feature 1..20: note = Description of Artificial Sequence: Synthetic oligonucleotide
  misc_feature 1..20: note = Target: FXN; (+) strand; PAM type: NRG; PAM sequence: TGG
  source 1..20: mol_type = other DNA
ataccaaggaacaacagcac

SEQ ID NO: 21187 - DNA, 20 bp, synthetic construct
  misc_feature 1..20: note = Description of Artificial Sequence: Synthetic oligonucleotide
  misc_feature 1..20: note = Target: FXN; (+) strand; PAM type: NRG; PAM sequence: GGG
  source 1..20: mol_type = other DNA
taccaaggaacaacagcact

SEQ ID NO: 21188 - DNA, 20 bp, synthetic construct
  misc_feature 1..20: note = Description of Artificial Sequence: Synthetic oligonucleotide
  misc_feature 1..20: note = Target: FXN; (+) strand; PAM type: NRG; PAM sequence: TGG
  source 1..20: mol_type = other DNA
aacagcactgggtctccttt

SEQ ID NO: 21189 - DNA, 20 bp, synthetic construct
  misc_feature 1..20: note = Description of Artificial Sequence: Synthetic oligonucleotide
  misc_feature 1..20: note = Target: FXN; (+) strand; PAM type: NRG; PAM sequence: GGG
  source 1..20: mol_type = other DNA
acagcactgggtctcctttt

SEQ ID NO: 21190 - DNA, 20 bp, synthetic construct
  misc_feature 1..20: note = Description of Artificial Sequence: Synthetic oligonucleotide
  misc_feature 1..20: note = Target: FXN; (+) strand; PAM type: NRG; PAM sequence: GGG
  source 1..20: mol_type = other DNA
cagcactgggtctccttttg

SEQ ID NO: 21191 - DNA, 20 bp, synthetic construct
  misc_feature 1..20: note = Description of Artificial Sequence: Synthetic oligonucleotide
  misc_feature 1..20: note = Target: FXN; (+) strand; PAM type: NRG; PAM sequence: CAG
  source 1..20: mol_type = other DNA
ggtctccttttggggtgatg

SEQ ID NO: 21192 - DNA, 20 bp, synthetic construct
  misc_feature 1..20: note = Description of Artificial Sequence: Synthetic oligonucleotide
  misc_feature 1..20: note = Target: FXN; (+) strand; PAM type: NRG; PAM sequence: AAG
  source 1..20: mol_type = other DNA
ggggtgatgcagatgttttg

SEQ ID NO: 21193 - DNA, 20 bp, synthetic construct
  misc_feature 1..20: note = Description of Artificial Sequence: Synthetic oligonucleotide
  misc_feature 1..20: note = Target: FXN; (+) strand; PAM type: NRG; PAM sequence: TAG
  source 1..20: mol_type = other DNA
tgatgcagatgttttgaagc

SEQ ID NO: 21194 - DNA, 20 bp, synthetic construct
  misc_feature 1..20: note = Description of Artificial Sequence: Synthetic oligonucleotide
  misc_feature 1..20: note = Target: FXN; (+) strand; PAM type: NRG; PAM sequence: AGG
  source 1..20: mol_type = other DNA
gatgcagatgttttgaagct

SEQ ID NO: 21195 - DNA, 20 bp, synthetic construct
  misc_feature 1..20: note = Description of Artificial Sequence: Synthetic oligonucleotide
  misc_feature 1..20: note = Target: FXN; (+) strand; PAM type: NRG; PAM sequence: CAG
  source 1..20: mol_type = other DNA
gcagatgttttgaagctagg

SEQ ID NO: 21196 - DNA, 20 bp, synthetic construct
  misc_feature 1..20: note = Description of Artificial Sequence: Synthetic oligonucleotide
  misc_feature 1..20: note = Target: FXN; (+) strand; PAM type: NRG; PAM sequence: GAG
  source 1..20: mol_type = other DNA
agatgttttgaagctaggca

SEQ ID NO: 21197 - DNA, 20 bp, synthetic construct
  misc_feature 1..20: note = Description of Artificial Sequence: Synthetic oligonucleotide
  misc_feature 1..20: note = Target: FXN; (+) strand; PAM type: NRG; PAM sequence: AGG
  source 1..20: mol_type = other DNA
gatgttttgaagctaggcag

SEQ ID NO: 21198 - DNA, 20 bp, synthetic construct
  misc_feature 1..20: note = Description of Artificial Sequence: Synthetic oligonucleotide
  misc_feature 1..20: note = Target: FXN; (+) strand; PAM type: NRG; PAM sequence: TAG
  source 1..20: mol_type = other DNA
gttttgaagctaggcagagg

SEQ ID NO: 21199 - DNA, 20 bp, synthetic construct
  misc_feature 1..20: note = Description of Artificial Sequence: Synthetic oligonucleotide
  misc_feature 1..20: note = Target: FXN; (+) strand; PAM type: NRG; PAM sequence: TGG
  source 1..20: mol_type = other DNA
ttgaagctaggcagaggtag

SEQ ID NO: 21200 - DNA, 20 bp, synthetic construct
  misc_feature 1..20: note = Description of Artificial Sequence: Synthetic oligonucleotide
  misc_feature 1..20: note = Target: FXN; (+) strand; PAM type: NRG; PAM sequence: TGG
  source 1..20: mol_type = other DNA
ccaaattattcatttttaaa

SEQ ID NO: 21201 - DNA, 20 bp, synthetic construct
  misc_feature 1..20: note = Description of Artificial Sequence: Synthetic oligonucleotide
  misc_feature 1..20: note = Target: FXN; (+) strand; PAM type: NRG; PAM sequence: TAG
  source 1..20: mol_type = other DNA
cttaacaactaataatatta

SEQ ID NO: 21202 - DNA, 20 bp, synthetic construct
  misc_feature 1..20: note = Description of Artificial Sequence: Synthetic oligonucleotide
  misc_feature 1..20: note = Target: FXN; (+) strand; PAM type: NRG; PAM sequence: AGG
  source 1..20: mol_type = other DNA
ttaacaactaataatattat

SEQ ID NO: 21203 - DNA, 20 bp, synthetic construct
  misc_feature 1..20: note = Description of Artificial Sequence: Synthetic oligonucleotide
  misc_feature 1..20: note = Target: FXN; (+) strand; PAM type: NRG; PAM sequence: AAG
  source 1..20: mol_type = other DNA
caactaataatattataggt

SEQ ID NO: 21204 - DNA, 20 bp, synthetic construct
  misc_feature 1..20: note = Description of Artificial Sequence: Synthetic oligonucleotide
  misc_feature 1..20: note = Target: FXN; (+) strand; PAM type: NRG; PAM sequence: AGG
  source 1..20: mol_type = other DNA
aactaataatattataggta

SEQ ID NO: 21205 - DNA, 20 bp, synthetic construct
  misc_feature 1..20: note = Description of Artificial Sequence: Synthetic oligonucleotide
  misc_feature 1..20: note = Target: FXN; (+) strand; PAM type: NRG; PAM sequence: AAG
  source 1..20: mol_type = other DNA
taatattataggtaaggcac

SEQ ID NO: 21206 - DNA, 20 bp, synthetic construct
  misc_feature 1..20: note = Description of Artificial Sequence: Synthetic oligonucleotide
  misc_feature 1..20: note = Target: FXN; (+) strand; PAM type: NRG; PAM sequence: TAG
  source 1..20: mol_type = other DNA
taaggcacaagttacatctg

SEQ ID NO: 21207 - DNA, 20 bp, synthetic construct
  misc_feature 1..20: note = Description of Artificial Sequence: Synthetic oligonucleotide
  misc_feature 1..20: note = Target: FXN; (+) strand; PAM type: NRG; PAM sequence: TGG
  source 1..20: mol_type = other DNA
ttacatctgtagcacaaaaa

SEQ ID NO: 21208 - DNA, 20 bp, synthetic construct
  misc_feature 1..20: note = Description of Artificial Sequence: Synthetic oligonucleotide
  misc_feature 1..20: note = Target: FXN; (+) strand; PAM type: NRG; PAM sequence: CAG
  source 1..20: mol_type = other DNA
taatttttaaaacactgctc

SEQ ID NO: 21209 - DNA, 20 bp, synthetic construct
  misc_feature 1..20: note = Description of Artificial Sequence: Synthetic oligonucleotide
  misc_feature 1..20: note = Target: FXN; (+) strand; PAM type: NRG; PAM sequence: TAG
  source 1..20: mol_type = other DNA
tttaaaacactgctccagca

SEQ ID NO: 21210 - DNA, 20 bp, synthetic construct
  misc_feature 1..20: note = Description of Artificial Sequence: Synthetic oligonucleotide
  misc_feature 1..20: note = Target: FXN; (+) strand; PAM type: NRG; PAM sequence: CAG
  source 1..20: mol_type = other DNA
aaaacactgctccagcatag

SEQ ID NO: 21211 - DNA, 20 bp, synthetic construct
  misc_feature 1..20: note = Description of Artificial Sequence: Synthetic oligonucleotide
  misc_feature 1..20: note = Target: FXN; (+) strand; PAM type: NRG; PAM sequence: AGG
  source 1..20: mol_type = other DNA
aaacactgctccagcatagc

SEQ ID NO: 21212 - DNA, 20 bp, synthetic construct
  misc_feature 1..20: note = Description of Artificial Sequence: Synthetic oligonucleotide
  misc_feature 1..20: note = Target: FXN; (+) strand; PAM type: NRG; PAM sequence: GAG
  source 1..20: mol_type = other DNA
gcatagcaggtatcacatgt

SEQ ID NO: 21213 - DNA, 20 bp, synthetic construct
  misc_feature 1..20: note = Description of Artificial Sequence: Synthetic oligonucleotide
  misc_feature 1..20: note = Target: FXN; (+) strand; PAM type: NRG; PAM sequence: AGG
  source 1..20: mol_type = other DNA
catagcaggtatcacatgtg

SEQ ID NO: 21214 - DNA, 20 bp, synthetic construct
  misc_feature 1..20: note = Description of Artificial Sequence: Synthetic oligonucleotide
  misc_feature 1..20: note = Target: FXN; (+) strand; PAM type: NRG; PAM sequence: TAG
  source 1..20: mol_type = other DNA
agcaggtatcacatgtgagg

SEQ ID NO: 21215 - DNA, 20 bp, synthetic construct
  misc_feature 1..20: note = Description of Artificial Sequence: Synthetic oligonucleotide
  misc_feature 1..20: note = Target: FXN; (+) strand; PAM type: NRG; PAM sequence: AAG
  source 1..20: mol_type = other DNA
tatcacatgtgaggtagcaa

SEQ ID NO: 21216 - DNA, 20 bp, synthetic construct
  misc_feature 1..20: note = Description of Artificial Sequence: Synthetic oligonucleotide
  misc_feature 1..20: note = Target: FXN; (+) strand; PAM type: NRG; PAM sequence: TGG
  source 1..20: mol_type = other DNA
acatgtgaggtagcaaaagc

SEQ ID NO: 21217 - DNA, 20 bp, synthetic construct
  misc_feature 1..20: note = Description of Artificial Sequence: Synthetic oligonucleotide
  misc_feature 1..20: note = Target: FXN; (+) strand; PAM type: NRG; PAM sequence: GAG
  source 1..20: mol_type = other DNA
atgtgaggtagcaaaagctg

SEQ ID NO: 21218 - DNA, 20 bp, synthetic construct
  misc_feature 1..20: note = Description of Artificial Sequence: Synthetic oligonucleotide
  misc_feature 1..20: note = Target: FXN; (+) strand; PAM type: NRG; PAM sequence: AAG
  source 1..20: mol_type = other DNA
gtagcaaaagctggagatca

SEQ ID NO: 21219 - DNA, 20 bp, synthetic construct
  misc_feature 1..20: note = Description of Artificial Sequence: Synthetic oligonucleotide
  misc_feature 1..20: note = Target: FXN; (+) strand; PAM type: NRG; PAM sequence: TGG
  source 1..20: mol_type = other DNA
ggagatcaaagtgtgatacc

SEQ ID NO: 21220 - DNA, 20 bp, synthetic construct
  misc_feature 1..20: note = Description of Artificial Sequence: Synthetic oligonucleotide
  misc_feature 1..20: note = Target: FXN; (+) strand; PAM type: NRG; PAM sequence: GAG
  source 1..20: mol_type = other DNA
agatcaaagtgtgatacctg

SEQ ID NO: 21221 - DNA, 20 bp, synthetic construct
  misc_feature 1..20: note = Description of Artificial Sequence: Synthetic oligonucleotide
  misc_feature 1..20: note = Target: FXN; (+) strand; PAM type: NRG; PAM sequence: CAG
  source 1..20: mol_type = other DNA
tgtgatacctggagacttat

SEQ ID NO: 21222 - DNA, 20 bp, synthetic construct
  misc_feature 1..20: note = Description of Artificial Sequence: Synthetic oligonucleotide
  misc_feature 1..20: note = Target: FXN; (+) strand; PAM type: NRG; PAM sequence: AAG
  source 1..20: mol_type = other DNA
atacctggagacttatcagt

SEQ ID NO: 21223 - DNA, 20 bp, synthetic construct
  misc_feature 1..20: note = Description of Artificial Sequence: Synthetic oligonucleotide
  misc_feature 1..20: note = Target: FXN; (+) strand; PAM type: NRG; PAM sequence: AGG
  source 1..20: mol_type = other DNA
tacctggagacttatcagta

SEQ ID NO: 21224 - DNA, 20 bp, synthetic construct
  misc_feature 1..20: note = Description of Artificial Sequence: Synthetic oligonucleotide
  misc_feature 1..20: note = Target: FXN; (+) strand; PAM type: NRG; PAM sequence: GGG
  source 1..20: mol_type = other DNA
acctggagacttatcagtaa

SEQ ID NO: 21225 - DNA, 20 bp, synthetic construct
  misc_feature 1..20: note = Description of Artificial Sequence: Synthetic oligonucleotide
  misc_feature 1..20: note = Target: FXN; (+) strand; PAM type: NRG; PAM sequence: CAG
  source 1..20: mol_type = other DNA
gtaagggtcaaatgtttttt

SEQ ID NO: 21226 - DNA, 20 bp, synthetic construct
  misc_feature 1..20: note = Description of Artificial Sequence: Synthetic oligonucleotide
  misc_feature 1..20: note = Target: FXN; (+) strand; PAM type: NRG; PAM sequence: AGG
  source 1..20: mol_type = other DNA
taagggtcaaatgttttttc

SEQ ID NO: 21227 - DNA, 20 bp, synthetic construct
  misc_feature 1..20: note = Description of Artificial Sequence: Synthetic oligonucleotide
  misc_feature 1..20: note = Target: FXN; (+) strand; PAM type: NRG; PAM sequence: GAG
  source 1..20: mol_type = other DNA
caaatgttttttcaggtttt

SEQ ID NO: 21228 - DNA, 20 bp, synthetic construct
  misc_feature 1..20: note = Description of Artificial Sequence: Synthetic oligonucleotide
  misc_feature 1..20: note = Target: FXN; (+) strand; PAM type: NRG; PAM sequence: TGG
  source 1..20: mol_type = other DNA
caggttttgagaatcattct

SEQ ID NO: 21229 - DNA, 20 bp, synthetic construct
  misc_feature 1..20: note = Description of Artificial Sequence: Synthetic oligonucleotide
  misc_feature 1..20: note = Target: FXN; (+) strand; PAM type: NRG; PAM sequence: CAG
  source 1..20: mol_type = other DNA
aatcattcttggaattgttc

SEQ ID NO: 21230 - DNA, 20 bp, synthetic construct
  misc_feature 1..20: note = Description of Artificial Sequence: Synthetic oligonucleotide
  misc_feature 1..20: note = Target: FXN; (+) strand; PAM type: NRG; PAM sequence: AAG
  source 1..20: mol_type = other DNA
cattcttggaattgttccag

SEQ ID NO: 21231 - DNA, 20 bp, synthetic construct
  misc_feature 1..20: note = Description of Artificial Sequence: Synthetic oligonucleotide
  misc_feature 1..20: note = Target: FXN; (+) strand; PAM type: NRG; PAM sequence: TAG
  source 1..20: mol_type = other DNA
atatatcgtataactcttct

SEQ ID NO: 21232 - DNA, 20 bp, synthetic construct
  misc_feature 1..20: note = Description of Artificial Sequence: Synthetic oligonucleotide
  misc_feature 1..20: note = Target: FXN; (+) strand; PAM type: NRG; PAM sequence: AAG
  source 1..20: mol_type = other DNA
tataactcttcttagatgct

SEQ ID NO: 21233 - DNA, 20 bp, synthetic construct
  misc_feature 1..20: note = Description of Artificial Sequence: Synthetic oligonucleotide
  misc_feature 1..20: note = Target: FXN; (+) strand; PAM type: NRG; PAM sequence: AAG
  source 1..20: mol_type = other DNA
ctcttcttagatgctaagat

SEQ ID NO: 21234 - DNA, 20 bp, synthetic construct
  misc_feature 1..20: note = Description of Artificial Sequence: Synthetic oligonucleotide
  misc_feature 1..20: note = Target: FXN; (+) strand; PAM type: NRG; PAM sequence: AAG
  source 1..20: mol_type = other DNA
ttcttagatgctaagataag

SEQ ID NO: 21235 - DNA, 20 bp, synthetic construct
  misc_feature 1..20: note = Description of Artificial Sequence: Synthetic oligonucleotide
  misc_feature 1..20: note = Target: FXN; (+) strand; PAM type: NRG; PAM sequence: AGG
  source 1..20: mol_type = other DNA
tcttagatgctaagataaga

SEQ ID NO: 21236 - DNA, 20 bp, synthetic construct
  misc_feature 1..20: note = Description of Artificial Sequence: Synthetic oligonucleotide
  misc_feature 1..20: note = Target: FXN; (+) strand; PAM type: NRG; PAM sequence: CAG
  source 1..20: mol_type = other DNA
tagatgctaagataagaagg

SEQ ID NO: 21237 - DNA, 20 bp, synthetic construct
  misc_feature 1..20: note = Description of Artificial Sequence: Synthetic oligonucleotide
  misc_feature 1..20: note = Target: FXN; (+) strand; PAM type: NRG; PAM sequence: TAG
  source 1..20: mol_type = other DNA
ataagaaggcagatatacac

SEQ ID NO: 21238 - DNA, 20 bp, synthetic construct
  misc_feature 1..20: note = Description of Artificial Sequence: Synthetic oligonucleotide
  misc_feature 1..20: note = Target: FXN; (+) strand; PAM type: NRG; PAM sequence: TAG
  source 1..20: mol_type = other DNA
gctcattttgtgttattttc

SEQ ID NO: 21239 - DNA, 20 bp, synthetic construct
  misc_feature 1..20: note = Description of Artificial Sequence: Synthetic oligonucleotide
  misc_feature 1..20: note = Target: FXN; (+) strand; PAM type: NRG; PAM sequence: GAG
  source 1..20: mol_type = other DNA
tcattttgtgttattttcta

SEQ ID NO: 21240 - DNA, 20 bp, synthetic construct
  misc_feature 1..20: note = Description of Artificial Sequence: Synthetic oligonucleotide
  misc_feature 1..20: note = Target: FXN; (+) strand; PAM type: NRG; PAM sequence: CAG
  source 1..20: mol_type = other DNA
tattttctagagctttactc

SEQ ID NO: 21241 - DNA, 20 bp, synthetic construct
  misc_feature 1..20: note = Description of Artificial Sequence: Synthetic oligonucleotide
  misc_feature 1..20: note = Target: FXN; (+) strand; PAM type: NRG; PAM sequence: TGG
  source 1..20: mol_type = other DNA
ctttactccagtcaatttct

SEQ ID NO: 21242 - DNA, 20 bp, synthetic construct
  misc_feature 1..20: note = Description of Artificial Sequence: Synthetic oligonucleotide
  misc_feature 1..20: note = Target: FXN; (+) strand; PAM type: NRG; PAM sequence: GGG
  source 1..20: mol_type = other DNA
tttactccagtcaatttctt

SEQ ID NO: 21243 - DNA, 20 bp, synthetic construct
  misc_feature 1..20: note = Description of Artificial Sequence: Synthetic oligonucleotide
  misc_feature 1..20: note = Target: FXN; (+) strand; PAM type: NRG; PAM sequence: GGG
  source 1..20: mol_type = other DNA
ttactccagtcaatttcttg

SEQ ID NO: 21244 - DNA, 20 bp, synthetic construct
  misc_feature 1..20: note = Description of Artificial Sequence: Synthetic oligonucleotide
  misc_feature 1..20: note = Target: FXN; (+) strand; PAM type: NRG; PAM sequence: GGG
  source 1..20: mol_type = other DNA
tactccagtcaatttcttgg

SEQ ID NO: 21245 - DNA, 20 bp, synthetic construct
  misc_feature 1..20: note = Description of Artificial Sequence: Synthetic oligonucleotide
  misc_feature 1..20: note = Target: FXN; (+) strand; PAM type: NRG; PAM sequence: CAG
  source 1..20: mol_type = other DNA
tccagtcaatttcttggggg

SEQ ID NO: 21246 - DNA, 20 bp, synthetic construct
  misc_feature 1..20: note = Description of Artificial Sequence: Synthetic oligonucleotide
  misc_feature 1..20: note = Target: FXN; (+) strand; PAM type: NRG; PAM sequence: TGG
  source 1..20: mol_type = other DNA
tttcttgggggcagcatttg

SEQ ID NO: 21247 - DNA, 20 bp, synthetic construct
  misc_feature 1..20: note = Description of Artificial Sequence: Synthetic oligonucleotide
  misc_feature 1..20: note = Target: FXN; (+) strand; PAM type: NRG; PAM sequence: CAG
  source 1..20: mol_type = other DNA
gggggcagcatttgtggaat

SEQ ID NO: 21248 - DNA, 20 bp, synthetic construct
  misc_feature 1..20: note = Description of Artificial Sequence: Synthetic oligonucleotide
  misc_feature 1..20: note = Target: FXN; (+) strand; PAM type: NRG; PAM sequence: TGG
  source 1..20: mol_type = other DNA
ggcagcatttgtggaatcag

SEQ ID NO: 21249 - DNA, 20 bp, synthetic construct
  misc_feature 1..20: note = Description of Artificial Sequence: Synthetic oligonucleotide
  misc_feature 1..20: note = Target: FXN; (+) strand; PAM type: NRG; PAM sequence: AAG
  source 1..20: mol_type = other DNA
tggaatcagtggttcatctg

SEQ ID NO: 21250 - DNA, 20 bp, synthetic construct
  misc_feature 1..20: note = Description of Artificial Sequence: Synthetic oligonucleotide
  misc_feature 1..20: note = Target: FXN; (+) strand; PAM type: NRG; PAM sequence: AGG
  source 1..20: mol_type = other DNA
ggaatcagtggttcatctga

SEQ ID NO: 21251 - DNA, 20 bp, synthetic construct
  misc_feature 1..20: note = Description of Artificial Sequence: Synthetic oligonucleotide
  misc_feature 1..20: note = Target: FXN; (+) strand; PAM type: NRG; PAM sequence: GGG
  source 1..20: mol_type = other DNA
gaatcagtggttcatctgaa

SEQ ID NO: 21252 - DNA, 20 bp, synthetic construct
  misc_feature 1..20: note = Description of Artificial Sequence: Synthetic oligonucleotide
  misc_feature 1..20: note = Target: FXN; (+) strand; PAM type: NRG; PAM sequence: TGG
  source 1..20: mol_type = other DNA
tcatctgaagggctgtgctg

SEQ ID NO: 21253 - DNA, 20 bp, synthetic construct
  misc_feature 1..20: note = Description of Artificial Sequence: Synthetic oligonucleotide
  misc_feature 1..20: note = Target: FXN; (+) strand; PAM type: NRG; PAM sequence: CAG
  source 1..20: mol_type = other DNA
tatgcatttgttttgtcttc

SEQ ID NO: 21254 - DNA, 20 bp, synthetic construct
  misc_feature 1..20: note = Description of Artificial Sequence: Synthetic oligonucleotide
  misc_feature 1..20: note = Target: FXN; (+) strand; PAM type: NRG; PAM sequence: TGG
  source 1..20: mol_type = other DNA
gcatttgttttgtcttccag

SEQ ID NO: 21255 - DNA, 20 bp, synthetic construct
  misc_feature 1..20: note = Description of Artificial Sequence: Synthetic oligonucleotide
  misc_feature 1..20: note = Target: FXN; (+) strand; PAM type: NRG; PAM sequence: AAG
  source 1..20: mol_type = other DNA
ttttgtcttccagtggacct

SEQ ID NO: 21256 - DNA, 20 bp, synthetic construct
  misc_feature 1..20: note = Description of Artificial Sequence: Synthetic oligonucleotide
  misc_feature 1..20: note = Target: FXN; (+) strand; PAM type: NRG; PAM sequence: TGG
  source 1..20: mol_type = other DNA
gtggacctaagcgttatgac

SEQ ID NO: 21257 - DNA, 20 bp, synthetic construct
  misc_feature 1..20: note = Description of Artificial Sequence: Synthetic oligonucleotide
  misc_feature 1..20: note = Target: FXN; (+) strand; PAM type: NRG; PAM sequence: TGG
  source 1..20: mol_type = other DNA
cctaagcgttatgactggac

SEQ ID NO: 21258 - DNA, 20 bp, synthetic construct
  misc_feature 1..20: note = Description of Artificial Sequence: Synthetic oligonucleotide
  misc_feature 1..20: note = Target: FXN; (+) strand; PAM type: NRG; PAM sequence: GGG
  source 1..20: mol_type = other DNA
ctaagcgttatgactggact

SEQ ID NO: 21259 - DNA, 20 bp, synthetic construct
  misc_feature 1..20: note = Description of Artificial Sequence: Synthetic oligonucleotide
  misc_feature 1..20: note = Target: FXN; (+) strand; PAM type: NRG; PAM sequence: TGG
  source 1..20: mol_type = other DNA
atgactggactgggaaaaac

SEQ ID NO: 21260 - DNA, 20 bp, synthetic construct
  misc_feature 1..20: note = Description of Artificial Sequence: Synthetic oligonucleotide
  misc_feature 1..20: note = Target: FXN; (+) strand; PAM type: NRG; PAM sequence: GGG
  source 1..20: mol_type = other DNA
tgactggactgggaaaaact

SEQ ID NO: 21261 - DNA, 20 bp, synthetic construct
  misc_feature 1..20: note = Description of Artificial Sequence: Synthetic oligonucleotide
  misc_feature 1..20: note = Target: FXN; (+) strand; PAM type: NRG; PAM sequence: CGG
  source 1..20: mol_type = other DNA
aactgggtgtactcccacga

SEQ ID NO: 21262 - DNA, 20 bp, synthetic construct
  misc_feature 1..20: note = Description of Artificial Sequence: Synthetic oligonucleotide
  misc_feature 1..20: note = Target: FXN; (+) strand; PAM type: NRG; PAM sequence: GAG
  source 1..20: mol_type = other DNA
acgacggcgtgtccctccat

SEQ ID NO: 21263 - DNA, 20 bp, synthetic construct
  misc_feature 1..20: note = Description of Artificial Sequence: Synthetic oligonucleotide
  misc_feature 1..20: note = Target: FXN; (+) strand; PAM type: NRG; PAM sequence: TGG
  source 1..20: mol_type = other DNA
cgtgtccctccatgagctgc

SEQ ID NO: 21264 - DNA, 20 bp, synthetic construct
  misc_feature 1..20: note = Description of Artificial Sequence: Synthetic oligonucleotide
  misc_feature 1..20: note = Target: FXN; (+) strand; PAM type: NRG; PAM sequence: CAG
  source 1..20: mol_type = other DNA
cctccatgagctgctggccg

SEQ ID NO: 21265 - DNA, 20 bp, synthetic construct
  misc_feature 1..20: note = Description of Artificial Sequence: Synthetic oligonucleotide
  misc_feature 1..20: note = Target: FXN; (+) strand; PAM type: NRG; PAM sequence: GAG
  source 1..20: mol_type = other DNA
tccatgagctgctggccgca

SEQ ID NO: 21266 - DNA, 20 bp, synthetic construct
  misc_feature 1..20: note = Description of Artificial Sequence: Synthetic oligonucleotide
  misc_feature 1..20: note = Target: FXN; (+) strand; PAM type: NRG; PAM sequence: AAG
  source 1..20: mol_type = other DNA
gctggccgcagagctcacta

SEQ ID NO: 21267 - DNA, 20 bp, synthetic construct
  misc_feature 1..20: note = Description of Artificial Sequence: Synthetic oligonucleotide
  misc_feature 1..20: note = Target: FXN; (+) strand; PAM type: NRG; PAM sequence: TGG
  source 1..20: mol_type = other DNA
taaagccttaaaaaccaaac

SEQ ID NO: 21268 - DNA, 20 bp, synthetic construct
  misc_feature 1..20: note = Description of Artificial Sequence: Synthetic oligonucleotide
  misc_feature 1..20: note = Target: FXN; (+) strand; PAM type: NRG; PAM sequence: TGG
  source 1..20: mol_type = other DNA
caaactggacttgtcttcct

SEQ ID NO: 21269 - DNA, 20 bp, synthetic construct
  misc_feature 1..20: note = Description of Artificial Sequence: Synthetic oligonucleotide
  misc_feature 1..20: note = Target: FXN; (+) strand; PAM type: NRG; PAM sequence: CGG
  source 1..20: mol_type = other DNA
ttgtcttccttggcctattc

SEQ ID NO: 21270 - DNA, 20 bp, synthetic construct
  misc_feature 1..20: note = Description of Artificial Sequence: Synthetic oligonucleotide
  misc_feature 1..20: note = Target: FXN; (+) strand; PAM type: NRG; PAM sequence: AAG
  source 1..20: mol_type = other DNA
ttccttggcctattccggaa

SEQ ID NO: 21271 - DNA, 20 bp, synthetic construct
  misc_feature 1..20: note = Description of Artificial Sequence: Synthetic oligonucleotide
  misc_feature 1..20: note = Target: FXN; (+) strand; PAM type: NRG; PAM sequence: CAG
  source 1..20: mol_type = other DNA
cggaaaagatgcttgatgcc

SEQ ID NO: 21272 - DNA, 20 bp, synthetic construct
  misc_feature 1..20: note = Description of Artificial Sequence: Synthetic oligonucleotide
  misc_feature 1..20: note = Target: FXN; (+) strand; PAM type: NRG; PAM sequence: AAG
  source 1..20: mol_type = other DNA
ttgatgcccagccccgtttt

SEQ ID NO: 21273 - DNA, 20 bp, synthetic construct
  misc_feature 1..20: note = Description of Artificial Sequence: Synthetic oligonucleotide
  misc_feature 1..20: note = Target: FXN; (+) strand; PAM type: NRG; PAM sequence: AGG
  source 1..20: mol_type = other DNA
tgatgcccagccccgtttta

SEQ ID NO: 21274 - DNA, 20 bp, synthetic construct
  misc_feature 1..20: note = Description of Artificial Sequence: Synthetic oligonucleotide
  misc_feature 1..20: note = Target: FXN; (+) strand; PAM type: NRG; PAM sequence: AAG
  source 1..20: mol_type = other DNA
ccccgttttaaggacattaa

SEQ ID NO: 21275 - DNA, 20 bp, synthetic construct
  misc_feature 1..20: note = Description of Artificial Sequence: Synthetic oligonucleotide
  misc_feature 1..20: note = Target: FXN; (+) strand; PAM type: NRG; PAM sequence: CAG
  source 1..20: mol_type = other DNA
ttaaggacattaaaagctat

SEQ ID NO: 21276 - DNA, 20 bp, synthetic construct
  misc_feature 1..20: note = Description of Artificial Sequence: Synthetic oligonucleotide
  misc_feature 1..20: note = Target: FXN; (+) strand; PAM type: NRG; PAM sequence: AGG
  source 1..20: mol_type = other DNA
taaggacattaaaagctatc

SEQ ID NO: 21277 - DNA, 20 bp, synthetic construct
  misc_feature 1..20: note = Description of Artificial Sequence: Synthetic oligonucleotide
  misc_feature 1..20: note = Target: FXN; (+) strand; PAM type: NRG; PAM sequence: AAG
  source 1..20: mol_type = other DNA
acattaaaagctatcaggcc

SEQ ID NO: 21278 - DNA, 20 bp, synthetic construct
  misc_feature 1..20: note = Description of Artificial Sequence: Synthetic oligonucleotide
  misc_feature 1..20: note = Target: FXN; (+) strand; PAM type: NRG; PAM sequence: CAG
  source 1..20: mol_type = other DNA
aagctatcaggccaagaccc

SEQ ID NO: 21279 - DNA, 20 bp, synthetic construct
  misc_feature 1..20: note = Description of Artificial Sequence: Synthetic oligonucleotide
  misc_feature 1..20: note = Target: FXN; (+) strand; PAM type: NRG; PAM sequence: CAG
  source 1..20: mol_type = other DNA
aagaccccagcttcattatg

SEQ ID NO: 21280 - DNA, 20 bp, synthetic construct
  misc_feature 1..20: note = Description of Artificial Sequence: Synthetic oligonucleotide
  misc_feature 1..20: note = Target: FXN; (+) strand; PAM type: NRG; PAM sequence: GAG
  source 1..20: mol_type = other DNA
cccagcttcattatgcagct

SEQ ID NO: 21281 - DNA, 20 bp, synthetic construct
  misc_feature 1..20: note = Description of Artificial Sequence: Synthetic oligonucleotide
  misc_feature 1..20: note = Target: FXN; (+) strand; PAM type: NRG; PAM sequence: AGG
  source 1..20: mol_type = other DNA
ccagcttcattatgcagctg

SEQ ID NO: 21282 - DNA, 20 bp, synthetic construct
  misc_feature 1..20: note = Description of Artificial Sequence: Synthetic oligonucleotide
  misc_feature 1..20: note = Target: FXN; (+) strand; PAM type: NRG; PAM sequence: GAG
  source 1..20: mol_type = other DNA
ttttttttattcctgctttt

SEQ ID NO: 21283 - DNA, 20 bp, synthetic construct
  misc_feature 1..20: note = Description of Artificial Sequence: Synthetic oligonucleotide
  misc_feature 1..20: note = Target: FXN; (+) strand; PAM type: NRG; PAM sequence: AGG
  source 1..20: mol_type = other DNA
tttttttattcctgcttttg

SEQ ID NO: 21284 - DNA, 20 bp, synthetic construct
  misc_feature 1..20: note = Description of Artificial Sequence: Synthetic oligonucleotide
  misc_feature 1..20: note = Target: FXN; (+) strand; PAM type: NRG; PAM sequence: CAG
  source 1..20: mol_type = other DNA
tttattcctgcttttgagga

SEQ ID NO: 21285 - DNA, 20 bp, synthetic construct
  misc_feature 1..20: note = Description of Artificial Sequence: Synthetic oligonucleotide
  misc_feature 1..20: note = Target: FXN; (+) strand; PAM type: NRG; PAM sequence: TGG
  source 1..20: mol_type = other DNA
ttcctgcttttgaggacagt

SEQ ID NO: 21286 - DNA, 20 bp, synthetic construct
  misc_feature 1..20: note = Description of Artificial Sequence: Synthetic oligonucleotide
  misc_feature 1..20: note = Target: FXN; (+) strand; PAM type: NRG; PAM sequence: GGG
  source 1..20: mol_type = other DNA
tcctgcttttgaggacagtt

SEQ ID NO: 21287 - DNA, 20 bp, synthetic construct
  misc_feature 1..20: note = Description of Artificial Sequence: Synthetic oligonucleotide
  misc_feature 1..20: note = Target: FXN; (+) strand; PAM type: NRG; PAM sequence: CAG
  source 1..20: mol_type = other DNA
gacagttgggctatgtgtca

SEQ ID NO: 21288 - DNA, 20 bp, synthetic construct
  misc_feature 1..20: note = Description of Artificial Sequence: Synthetic oligonucleotide
  misc_feature 1..20: note = Target: FXN; (+) strand; PAM type: NRG; PAM sequence: TAG
  source 1..20: mol_type = other DNA
ggctatgtgtcacagctctg

SEQ ID NO: 21289 - DNA, 20 bp, synthetic construct
  misc_feature 1..20: note = Description of Artificial Sequence: Synthetic oligonucleotide
  misc_feature 1..20: note = Target: FXN; (+) strand; PAM type: NRG; PAM sequence: AAG
  source 1..20: mol_type = other DNA
atgtgtcacagctctgtaga

SEQ ID NO: 21290 - DNA, 20 bp, synthetic construct
  misc_feature 1..20: note = Description of Artificial Sequence: Synthetic oligonucleotide
  misc_feature 1..20: note = Target: FXN; (+) strand; PAM type: NRG; PAM sequence: AAG
  source 1..20: mol_type = other DNA
ttgcctcctaccttgccccc

SEQ ID NO: 21291 - DNA, 20 bp, synthetic construct
  misc_feature 1..20: note = Description of Artificial Sequence: Synthetic oligonucleotide
  misc_feature 1..20: note = Target: FXN; (+) strand; PAM type: NRG; PAM sequence: TGG
  source 1..20: mol_type = other DNA
gttctgatttttaatttcta

SEQ ID NO: 21292 - DNA, 20 bp, synthetic construct
  misc_feature 1..20: note = Description of Artificial Sequence: Synthetic oligonucleotide
  misc_feature 1..20: note = Target: FXN; (+) strand; PAM type: NRG; PAM sequence: AAG
  source 1..20: mol_type = other DNA
ctgatttttaatttctatgg

SEQ ID NO: 21293 - DNA, 20 bp, synthetic construct
  misc_feature 1..20: note = Description of Artificial Sequence: Synthetic oligonucleotide
  misc_feature 1..20: note = Target: FXN; (+) strand; PAM type: NRG; PAM sequence: TGG
  source 1..20: mol_type = other DNA
aatttctatggaagattttt

SEQ ID NO: 21294 - DNA, 20 bp, synthetic construct
  misc_feature 1..20: note = Description of Artificial Sequence: Synthetic oligonucleotide
  misc_feature 1..20: note = Target: FXN; (+) strand; PAM type: NRG; PAM sequence: CGG
  source 1..20: mol_type = other DNA
tggaagattttttggattgt

SEQ ID NO: 21295 - DNA, 20 bp, synthetic construct
  misc_feature 1..20: note = Description of Artificial Sequence: Synthetic oligonucleotide
  misc_feature 1..20: note = Target: FXN; (+) strand; PAM type: NRG; PAM sequence: AAG
  source 1..20: mol_type = other DNA
gaatataacaacctttaaaa

SEQ ID NO: 21296 - DNA, 20 bp, synthetic construct
  misc_feature 1..20: note = Description of Artificial Sequence: Synthetic oligonucleotide
  misc_feature 1..20: note = Target: FXN; (+) strand; PAM type: NRG; PAM sequence: AAG
  source 1..20: mol_type = other DNA
ctttaaaaaagcaaaataat

SEQ ID NO: 21297 - DNA, 20 bp, synthetic construct
  misc_feature 1..20: note = Description of Artificial Sequence: Synthetic oligonucleotide
  misc_feature 1..20: note = Target: FXN; (+) strand; PAM type: NRG; PAM sequence: AAG
  source 1..20: mol_type = other DNA
taaaaaagcaaaataataag

SEQ ID NO: 21298 - DNA, 20 bp, synthetic construct
  misc_feature 1..20: note = Description of Artificial Sequence: Synthetic oligonucleotide
  misc_feature 1..20: note = Target: FXN; (+) strand; PAM type: NRG; PAM sequence: AGG
  source 1..20: mol_type = other DNA
aaaaaagcaaaataataaga

SEQ ID NO: 21299 - DNA, 20 bp, synthetic construct
  misc_feature 1..20: note = Description of Artificial Sequence: Synthetic oligonucleotide
  misc_feature 1..20: note = Target: FXN; (+) strand; PAM type: NRG; PAM sequence: CAG
  source 1..20: mol_type = other DNA
ataataagaaggaaaaattc

SEQ ID NO: 21300 - DNA, 20 bp, synthetic construct
  misc_feature 1..20: note = Description of Artificial Sequence: Synthetic oligonucleotide
  misc_feature 1..20: note = Target: FXN; (+) strand; PAM type: NRG; PAM sequence: AGG
  source 1..20: mol_type = other DNA
taataagaaggaaaaattcc

SEQ ID NO: 21301 - DNA, 20 bp, synthetic construct
  misc_feature 1..20: note = Description of Artificial Sequence: Synthetic oligonucleotide
  misc_feature 1..20: note = Target: FXN; (+) strand; PAM type: NRG; PAM sequence: GAG
  source 1..20: mol_type = other DNA
ataagaaggaaaaattccag

SEQ ID NO: 21302 - DNA, 20 bp, synthetic construct
  misc_feature 1..20: note = Description of Artificial Sequence: Synthetic oligonucleotide
  misc_feature 1..20: note = Target: FXN; (+) strand; PAM type: NRG; PAM sequence: AGG
  source 1..20: mol_type = other DNA
taagaaggaaaaattccagg

SEQ ID NO: 21303 - DNA, 20 bp, synthetic construct
  misc_feature 1..20: note = Description of Artificial Sequence: Synthetic oligonucleotide
  misc_feature 1..20: note = Target: FXN; (+) strand; PAM type: NRG; PAM sequence: GGG
  source 1..20: mol_type = other DNA
aagaaggaaaaattccagga

SEQ ID NO: 21304 - DNA, 20 bp, synthetic construct
  misc_feature 1..20: note = Description of Artificial Sequence: Synthetic oligonucleotide
  misc_feature 1..20: note = Target: FXN; (+) strand; PAM type: NRG; PAM sequence: AAG
  source 1..20: mol_type = other DNA
tcttcactcttcattctttg

SEQ ID NO: 21305 - DNA, 20 bp, synthetic construct
  misc_feature 1..20: note = Description of Artificial Sequence: Synthetic oligonucleotide
  misc_feature 1..20: note = Target: FXN; (+) strand; PAM type: NRG; PAM sequence: AGG
  source 1..20: mol_type = other DNA
cttcactcttcattctttga

SEQ ID NO: 21306 - DNA, 20 bp, synthetic construct
  misc_feature 1..20: note = Description of Artificial Sequence: Synthetic oligonucleotide
  misc_feature 1..20: note = Target: FXN; (+) strand; PAM type: NRG; PAM sequence: AAG
  source 1..20: mol_type = other DNA
ttctttgaaggatttactgc

SEQ ID NO: 21307 - DNA, 20 bp, synthetic construct
  misc_feature 1..20: note = Description of Artificial Sequence: Synthetic oligonucleotide
  misc_feature 1..20: note = Target: FXN; (+) strand; PAM type: NRG; PAM sequence: AAG
  source 1..20: mol_type = other DNA
tttgaaggatttactgcaag

SEQ ID NO: 21308 - DNA, 20 bp, synthetic construct
  misc_feature 1..20: note = Description of Artificial Sequence: Synthetic oligonucleotide
  misc_feature 1..20: note = Target: FXN; (+) strand; PAM type: NRG; PAM sequence: AAG
  source 1..20: mol_type = other DNA
tttactgcaagaagtacatg

SEQ ID NO: 21309 - DNA, 20 bp, synthetic construct
  misc_feature 1..20: note = Description of Artificial Sequence: Synthetic oligonucleotide
  misc_feature 1..20: note = Target: FXN; (+) strand; PAM type: NRG; PAM sequence: GAG
  source 1..20: mol_type = other DNA
tactgcaagaagtacatgaa

SEQ ID NO: 21310 - DNA, 20 bp, synthetic construct
  misc_feature 1..20: note = Description of Artificial Sequence: Synthetic oligonucleotide
  misc_feature 1..20: note = Target: FXN; (+) strand; PAM type: NRG; PAM sequence: CAG
  source 1..20: mol_type = other DNA
tgcaagaagtacatgaagag

SEQ ID NO: 21311 - DNA, 20 bp, synthetic construct
  misc_feature 1..20: note = Description of Artificial Sequence: Synthetic oligonucleotide
  misc_feature 1..20: note = Target: FXN; (+) strand; PAM type: NRG; PAM sequence: TGG
  source 1..20: mol_type = other DNA
agaagtacatgaagagcagc

SEQ ID NO: 21312 - DNA, 20 bp, synthetic construct
  misc_feature 1..20: note = Description of Artificial Sequence: Synthetic oligonucleotide
  misc_feature 1..20: note = Target: FXN; (+) strand; PAM type: NRG; PAM sequence: GAG
  source 1..20: mol_type = other DNA
tcactgttctatctccaaat

SEQ ID NO: 21313 - DNA, 20 bp, synthetic construct
  misc_feature 1..20: note = Description of Artificial Sequence: Synthetic oligonucleotide
  misc_feature 1..20: note = Target: FXN; (+) strand; PAM type: NRG; PAM sequence: AAG
  source 1..20: mol_type = other DNA
tctccaaatgagacacatta

SEQ ID NO: 21314 - DNA, 20 bp, synthetic construct
  misc_feature 1..20: note = Description of Artificial Sequence: Synthetic oligonucleotide
  misc_feature 1..20: note = Target: FXN; (+) strand; PAM type: NRG; PAM sequence: AGG
  source 1..20: mol_type = other DNA
ctccaaatgagacacattaa

SEQ ID NO: 21315 - DNA, 20 bp, synthetic construct
  misc_feature 1..20: note = Description of Artificial Sequence: Synthetic oligonucleotide
  misc_feature 1..20: note = Target: FXN; (+) strand; PAM type: NRG; PAM sequence: GGG
  source 1..20: mol_type = other DNA
tccaaatgagacacattaaa

SEQ ID NO: 21316 - DNA, 20 bp, synthetic construct
  misc_feature 1..20: note = Description of Artificial Sequence: Synthetic oligonucleotide
  misc_feature 1..20: note = Target: FXN; (+) strand; PAM type: NRG; PAM sequence: TAG
  source 1..20: mol_type = other DNA
aaatgagacacattaaaggg

SEQ ID NO: 21317 - DNA, 20 bp, synthetic construct
  misc_feature 1..20: note = Description of Artificial Sequence: Synthetic oligonucleotide
  misc_feature 1..20: note = Target: FXN; (+) strand; PAM type: NRG; PAM sequence: CAG
  source 1..20: mol_type = other DNA
gggtagcctacaaatgtttt

SEQ ID NO: 21318 - DNA, 20 bp, synthetic construct
  misc_feature 1..20: note = Description of Artificial Sequence: Synthetic oligonucleotide
  misc_feature 1..20: note = Target: FXN; (+) strand; PAM type: NRG; PAM sequence: AGG
  source 1..20: mol_type = other DNA
ggtagcctacaaatgttttc

SEQ ID NO: 21319 - DNA, 20 bp, synthetic construct
  misc_feature 1..20: note = Description of Artificial Sequence: Synthetic oligonucleotide
  misc_feature 1..20: note = Target: FXN; (+) strand; PAM type: NRG; PAM sequence: AAG
  source 1..20: mol_type = other DNA
atgttttcaggcttctttca

SEQ ID NO: 21320 - DNA, 20 bp, synthetic construct
  misc_feature 1..20: note = Description of Artificial Sequence: Synthetic oligonucleotide
  misc_feature 1..20: note = Target: FXN; (+) strand; PAM type: NRG; PAM sequence: AAG
  source 1..20: mol_type = other DNA
tcaggcttctttcaaagtgt

SEQ ID NO: 21321 - DNA, 20 bp, synthetic construct
  misc_feature 1..20: note = Description of Artificial Sequence: Synthetic oligonucleotide
  misc_feature 1..20: note = Target: FXN; (+) strand; PAM type: NRG; PAM sequence: GAG
  source 1..20: mol_type = other DNA
ttcaaagtgtaagcacttct

SEQ ID NO: 21322 - DNA, 20 bp, synthetic construct
  misc_feature 1..20: note = Description of Artificial Sequence: Synthetic oligonucleotide
  misc_feature 1..20: note = Target: FXN; (+) strand; PAM type: NRG; PAM sequence: TAG
  source 1..20: mol_type = other DNA
gtaagcacttctgagctctt

SEQ ID NO: 21323 - DNA, 20 bp, synthetic construct
  misc_feature 1..20: note = Description of Artificial Sequence: Synthetic oligonucleotide
  misc_feature 1..20: note = Target: FXN; (+) strand; PAM type: NRG; PAM sequence: AAG
  source 1..20: mol_type = other DNA
ttctgagctctttagcattg

SEQ ID NO: 21324 - DNA, 20 bp, synthetic construct
  misc_feature 1..20: note = Description of Artificial Sequence: Synthetic oligonucleotide
  misc_feature 1..20: note = Target: FXN; (+) strand; PAM type: NRG; PAM sequence: AAG
  source 1..20: mol_type = other DNA
ctttagcattgaagtgtcga

SEQ ID NO: 21325 - DNA, 20 bp, synthetic construct
  misc_feature 1..20: note = Description of Artificial Sequence: Synthetic oligonucleotide
  misc_feature 1..20: note = Target: FXN; (+) strand; PAM type: NRG; PAM sequence: CGG
  source 1..20: mol_type = other DNA
agtgtcgaaagcaactcaca

SEQ ID NO: 21326 - DNA, 20 bp, synthetic construct
  misc_feature 1..20: note = Description of Artificial Sequence: Synthetic oligonucleotide
  misc_feature 1..20: note = Target: FXN; (+) strand; PAM type: NRG; PAM sequence: GGG
  source 1..20: mol_type = other DNA
gtgtcgaaagcaactcacac

SEQ ID NO: 21327 - DNA, 20 bp, synthetic construct
  misc_feature 1..20: note = Description of Artificial Sequence: Synthetic oligonucleotide
  misc_feature 1..20: note = Target: FXN; (+) strand; PAM type: NRG; PAM sequence: AAG
  source 1..20: mol_type = other DNA
tcgaaagcaactcacacggg

SEQ ID NO: 21328 - DNA, 20 bp, synthetic construct
  misc_feature 1..20: note = Description of Artificial Sequence: Synthetic oligonucleotide
  misc_feature 1..20: note = Target: FXN; (+) strand; PAM type: NRG; PAM sequence: AAG
  source 1..20: mol_type = other DNA
atttgtgctctgtgactgcc

SEQ ID NO: 21329 - DNA, 20 bp, synthetic construct
  misc_feature 1..20: note = Description of Artificial Sequence: Synthetic oligonucleotide
  misc_feature 1..20: note = Target: FXN; (+) strand; PAM type: NRG; PAM sequence: AGG
  source 1..20: mol_type = other DNA
tttgtgctctgtgactgcca

SEQ ID NO: 21330 - DNA, 20 bp, synthetic construct
  misc_feature 1..20: note = Description of Artificial Sequence: Synthetic oligonucleotide
  misc_feature 1..20: note = Target: FXN; (+) strand; PAM type: NRG; PAM sequence: TGG
  source 1..20: mol_type = other DNA
gctctgtgactgccaaggtg

SEQ ID NO: 21331 - DNA, 20 bp, synthetic construct
  misc_feature 1..20: note = Description of Artificial Sequence: Synthetic oligonucleotide
  misc_feature 1..20: note = Target: FXN; (+) strand; PAM type: NRG; PAM sequence: TGG
  source 1..20: mol_type = other DNA
tgccaaggtgtggcctgcac

SEQ ID NO: 21332 - DNA, 20 bp, synthetic construct
  misc_feature 1..20: note = Description of Artificial Sequence: Synthetic oligonucleotide
  misc_feature 1..20: note = Target: FXN; (+) strand; PAM type: NRG; PAM sequence: GGG
  source 1..20: mol_type = other DNA
gccaaggtgtggcctgcact

SEQ ID NO: 21333 - DNA, 20 bp, synthetic construct
  misc_feature 1..20: note = Description of Artificial Sequence: Synthetic oligonucleotide
  misc_feature 1..20: note = Target: FXN; (+) strand; PAM type: NRG; PAM sequence: CAG
  source 1..20: mol_type = other DNA
gtggcctgcactgggttgtc

SEQ ID NO: 21334 - DNA, 20 bp, synthetic construct
  misc_feature 1..20: note = Description of Artificial Sequence: Synthetic oligonucleotide
  misc_feature 1..20: note = Target: FXN; (+) strand; PAM type: NRG; PAM sequence: AGG
  source 1..20: mol_type = other DNA
tggcctgcactgggttgtcc

SEQ ID NO: 21335 - DNA, 20 bp, synthetic construct
  misc_feature 1..20: note = Description of Artificial Sequence: Synthetic oligonucleotide
  misc_feature 1..20: note = Target: FXN; (+) strand; PAM type: NRG; PAM sequence: GGG
  source 1..20: mol_type = other DNA
ggcctgcactgggttgtcca

SEQ ID NO: 21336 - DNA, 20 bp, synthetic construct
  misc_feature 1..20: note = Description of Artificial Sequence: Synthetic oligonucleotide
  misc_feature 1..20: note = Target: FXN; (+) strand; PAM type: NRG; PAM sequence: GAG
  source 1..20: mol_type = other DNA
cctgcactgggttgtccagg

SEQ ID NO: 21337 - DNA, 20 bp, synthetic construct
  misc_feature 1..20: note = Description of Artificial Sequence: Synthetic oligonucleotide
  misc_feature 1..20: note = Target: FXN; (+) strand; PAM type: NRG; PAM sequence: TAG
  source 1..20: mol_type = other DNA
ctgggttgtccagggagacc

SEQ ID NO: 21338 - DNA, 20 bp, synthetic construct
  misc_feature 1..20: note = Description of Artificial Sequence: Synthetic oligonucleotide
  misc_feature 1..20: note = Target: FXN; (+) strand; PAM type: NRG; PAM sequence: AAG
  source 1..20: mol_type = other DNA
atatatattttttcaattta

SEQ ID NO: 21339 - DNA, 20 bp, synthetic construct
  misc_feature 1..20: note = Description of Artificial Sequence: Synthetic oligonucleotide
  misc_feature 1..20: note = Target: FXN; (+) strand; PAM type: NRG; PAM sequence: AGG
  source 1..20: mol_type = other DNA
tatatattttttcaatttaa

SEQ ID NO: 21340 - DNA, 20 bp, synthetic construct
  misc_feature 1..20: note = Description of Artificial Sequence: Synthetic oligonucleotide
  misc_feature 1..20: note = Target: FXN; (+) strand; PAM type: NRG; PAM sequence: TAG
  source 1..20: mol_type = other DNA
tattttttcaatttaaaggt

SEQ ID NO: 21341 - DNA, 20 bp, synthetic construct
  misc_feature 1..20: note = Description of Artificial Sequence: Synthetic oligonucleotide
  misc_feature 1..20: note = Target: FXN; (+) strand; PAM type: NRG; PAM sequence: TGG
  source 1..20: mol_type = other DNA
tttcaatttaaaggttagta

SEQ ID NO: 21342 - DNA, 20 bp, synthetic construct
  misc_feature 1..20: note = Description of Artificial Sequence: Synthetic oligonucleotide
  misc_feature 1..20: note = Target: FXN; (+) strand; PAM type: NRG; PAM sequence: CAG
  source 1..20: mol_type = other DNA
tttaaaggttagtatggaat

SEQ ID NO: 21343 - DNA, 20 bp, synthetic construct
  misc_feature 1..20: note = Description of Artificial Sequence: Synthetic oligonucleotide
  misc_feature 1..20: note = Target: FXN; (+) strand; PAM type: NRG; PAM sequence: AAG
  source 1..20: mol_type = other DNA
agtatggaatcagctgctac

SEQ ID NO: 21344 - DNA, 20 bp, synthetic construct
  misc_feature 1..20: note = Description of Artificial Sequence: Synthetic oligonucleotide
  misc_feature 1..20: note = Target: FXN; (+) strand; PAM type: NRG; PAM sequence: AAG
  source 1..20: mol_type = other DNA
agaatgcaaaaaatcttcca

SEQ ID NO: 21345 - DNA, 20 bp, synthetic construct
  misc_feature 1..20: note = Description of Artificial Sequence: Synthetic oligonucleotide
  misc_feature 1..20: note = Target: FXN; (+) strand; PAM type: NRG; PAM sequence: AAG
  source 1..20: mol_type = other DNA
gcaaaaaatcttccaaagac

SEQ ID NO: 21346 - DNA, 20 bp, synthetic construct
  misc_feature 1..20: note = Description of Artificial Sequence: Synthetic oligonucleotide
  misc_feature 1..20: note = Target: FXN; (+) strand; PAM type: NRG; PAM sequence: AAG
  source 1..20: mol_type = other DNA
aaatcttccaaagacaagaa

SEQ ID NO: 21347 - DNA, 20 bp, synthetic construct
  misc_feature 1..20: note = Description of Artificial Sequence: Synthetic oligonucleotide
  misc_feature 1..20: note = Target: FXN; (+) strand; PAM type: NRG; PAM sequence: GAG
  source 1..20: mol_type = other DNA
atcttccaaagacaagaaaa

SEQ ID NO: 21348 - DNA, 20 bp, synthetic construct
  misc_feature 1..20: note = Description of Artificial Sequence: Synthetic oligonucleotide
  misc_feature 1..20: note = Target: FXN; (+) strand; PAM type: NRG; PAM sequence: AGG
  source 1..20: mol_type = other DNA
tcttccaaagacaagaaaag

SEQ ID NO: 21349 - DNA, 20 bp, synthetic construct
  misc_feature 1..20: note = Description of Artificial Sequence: Synthetic oligonucleotide
  misc_feature 1..20: note = Target: FXN; (+) strand; PAM type: NRG; PAM sequence: AAG
  source 1..20: mol_type = other DNA
agacaagaaaagaggaaaaa

SEQ ID NO: 21350 - DNA, 20 bp, synthetic construct
  misc_feature 1..20: note = Description of Artificial Sequence: Synthetic oligonucleotide
  misc_feature 1..20: note = Target: FXN; (+) strand; PAM type: NRG; PAM sequence: GAG
  source 1..20: mol_type = other DNA
ggaaaaaaagccgttttcat

SEQ ID NO: 21351 - DNA, 20 bp, synthetic construct
  misc_feature 1..20: note = Description of Artificial Sequence: Synthetic oligonucleotide
  misc_feature 1..20: note = Target: FXN; (+) strand; PAM type: NRG; PAM sequence: GAG
  source 1..20: mol_type = other DNA
aaaagccgttttcatgagct

SEQ ID NO: 21352 - DNA, 20 bp, synthetic construct
  misc_feature 1..20: note = Description of Artificial Sequence: Synthetic oligonucleotide
  misc_feature 1..20: note = Target: FXN; (+) strand; PAM type: NRG; PAM sequence: TAG
  source 1..20: mol_type = other DNA
ttttcatgagctgagtgatg

SEQ ID NO: 21353 - DNA, 20 bp, synthetic construct
  misc_feature 1..20: note = Description of Artificial Sequence: Synthetic oligonucleotide
  misc_feature 1..20: note = Target: FXN; (+) strand; PAM type: NRG; PAM sequence: TGG
  source 1..20: mol_type = other DNA
tagcgtaacaaacaaaatca

SEQ ID NO: 21354 - DNA, 20 bp, synthetic construct
  misc_feature 1..20: note = Description of Artificial Sequence: Synthetic oligonucleotide
  misc_feature 1..20: note = Target: FXN; (+) strand; PAM type: NRG; PAM sequence: GAG
  source 1..20: mol_type = other DNA
gcgtaacaaacaaaatcatg

SEQ ID NO: 21355 - DNA, 20 bp, synthetic construct
  misc_feature 1..20: note = Description of Artificial Sequence: Synthetic oligonucleotide
  misc_feature 1..20: note = Target: FXN; (+) strand; PAM type: NRG; PAM sequence: GAG
  source 1..20: mol_type = other DNA
acaaacaaaatcatggagct

SEQ ID NO: 21356 - DNA, 20 bp, synthetic construct
  misc_feature 1..20: note = Description of Artificial Sequence: Synthetic oligonucleotide
  misc_feature 1..20: note = Target: FXN; (+) strand; PAM type: NRG; PAM sequence: AGG
  source 1..20: mol_type = other DNA
caaacaaaatcatggagctg

SEQ ID NO: 21357 - DNA, 20 bp, synthetic construct
  misc_feature 1..20: note = Description of Artificial Sequence: Synthetic oligonucleotide
  misc_feature 1..20: note = Target: FXN; (+) strand; PAM type: NRG; PAM sequence: GAG
  source 1..20: mol_type = other DNA
aacaaaatcatggagctgag

SEQ ID NO: 21358 - DNA, 20 bp, synthetic construct
  misc_feature 1..20: note = Description of Artificial Sequence: Synthetic oligonucleotide
  misc_feature 1..20: note = Target: FXN; (+) strand; PAM type: NRG; PAM sequence: AGG
  source 1..20: mol_type = other DNA
acaaaatcatggagctgagg

SEQ ID NO: 21359 - DNA, 20 bp, synthetic construct
  misc_feature 1..20: note = Description of Artificial Sequence: Synthetic oligonucleotide
  misc_feature 1..20: note = Target: FXN; (+) strand; PAM type: NRG; PAM sequence: AAG
  source 1..20: mol_type = other DNA
ggaggtgccttgtaaacatg

SEQ ID NO: 21360 - DNA, 20 bp, synthetic construct
  misc_feature 1..20: note = Description of Artificial Sequence: Synthetic oligonucleotide
  misc_feature 1..20: note = Target: FXN; (+) strand; PAM type: NRG; PAM sequence: AGG
  source 1..20: mol_type = other DNA
gaggtgccttgtaaacatga

SEQ ID NO: 21361 - DNA, 20 bp, synthetic construct
  misc_feature 1..20: note = Description of Artificial Sequence: Synthetic oligonucleotide
  misc_feature 1..20: note = Target: FXN; (+) strand; PAM type: NRG; PAM sequence: GGG
  source 1..20: mol_type = other DNA
aggtgccttgtaaacatgaa

SEQ ID NO: 21362 - DNA, 20 bp, synthetic construct
  misc_feature 1..20: note = Description of Artificial Sequence: Synthetic oligonucleotide
  misc_feature 1..20: note = Target: FXN; (+) strand; PAM type: NRG; PAM sequence: GGG
  source 1..20: mol_type = other DNA
ggtgccttgtaaacatgaag

SEQ ID NO: 21363 - DNA, 20 bp, synthetic construct
  misc_feature 1..20: note = Description of Artificial Sequence: Synthetic oligonucleotide
  misc_feature 1..20: note = Target: FXN; (+) strand; PAM type: NRG; PAM sequence: CAG
  source 1..20: mol_type = other DNA
gccttgtaaacatgaagggg

SEQ ID NO: 21364 - DNA, 20 bp, synthetic construct
  misc_feature 1..20: note = Description of Artificial Sequence: Synthetic oligonucleotide
  misc_feature 1..20: note = Target: FXN; (+) strand; PAM type: NRG; PAM sequence: AAG
  source 1..20: mol_type = other DNA
taaacatgaaggggcagata

SEQ ID NO: 21365 - DNA, 20 bp, synthetic construct
  misc_feature 1..20: note = Description of Artificial Sequence: Synthetic oligonucleotide
  misc_feature 1..20: note = Target: FXN; (+) strand; PAM type: NRG; PAM sequence: AGG
  source 1..20: mol_type = other DNA
aaacatgaaggggcagataa

SEQ ID NO: 21366 - DNA, 20 bp, synthetic construct
  misc_feature 1..20: note = Description of Artificial Sequence: Synthetic oligonucleotide
  misc_feature 1..20: note = Target: FXN; (+) strand; PAM type: NRG; PAM sequence: AAG
  source 1..20: mol_type = other DNA
catgaaggggcagataaagg

SEQ ID NO: 21367 - DNA, 20 bp, synthetic construct
  misc_feature 1..20: note = Description of Artificial Sequence: Synthetic oligonucleotide
  misc_feature 1..20: note = Target: FXN; (+) strand; PAM type: NRG; PAM sequence: AGG
  source 1..20: mol_type = other DNA
atgaaggggcagataaagga

SEQ ID NO: 21368 - DNA, 20 bp, synthetic construct
  misc_feature 1..20: note = Description of Artificial Sequence: Synthetic oligonucleotide
  misc_feature 1..20: note = Target: FXN; (+) strand; PAM type: NRG; PAM sequence: GAG
  source 1..20: mol_type = other DNA
gaaggggcagataaaggaag

SEQ ID NO: 21369 - DNA, 20 bp, synthetic construct
  misc_feature 1..20: note = Description of Artificial Sequence: Synthetic oligonucleotide
  misc_feature 1..20: note = Target: FXN; (+) strand; PAM type: NRG; PAM sequence: AAG
  source 1..20: mol_type = other DNA
aggagatactcatgttgata

SEQ ID NO: 21370 - DNA, 20 bp, synthetic construct
  misc_feature 1..20: note = Description of Artificial Sequence: Synthetic oligonucleotide
  misc_feature 1..20: note = Target: FXN; (+) strand; PAM type: NRG; PAM sequence: GAG
  source 1..20: mol_type = other DNA
gagatactcatgttgataaa

SEQ ID NO: 21371 - DNA, 20 bp, synthetic construct
  misc_feature 1..20: note = Description of Artificial Sequence: Synthetic oligonucleotide
  misc_feature 1..20: note = Target: FXN; (+) strand; PAM type: NRG; PAM sequence: GAG
  source 1..20: mol_type = other DNA
gatactcatgttgataaaga

SEQ ID NO: 21372 - DNA, 20 bp, synthetic construct
  misc_feature 1..20: note = Description of Artificial Sequence: Synthetic oligonucleotide
  misc_feature 1..20: note = Target: FXN; (+) strand; PAM type: NRG; PAM sequence: TGG
  source 1..20: mol_type = other DNA
catgttgataaagagagccc

SEQ ID NO: 21373 - DNA, 20 bp, synthetic construct
  misc_feature 1..20: note = Description of Artificial Sequence: Synthetic oligonucleotide
  misc_feature 1..20: note = Target: FXN; (+) strand; PAM type: NRG; PAM sequence: TAG
  source 1..20: mol_type = other DNA
gataaagagagccctggtcc

SEQ ID NO: 21374 - DNA, 20 bp, synthetic construct
  misc_feature 1..20: note = Description of Artificial Sequence: Synthetic oligonucleotide
  misc_feature 1..20: note = Target: FXN; (+) strand; PAM type: NRG; PAM sequence: TAG
  source 1..20: mol_type = other DNA
gagagccctggtcctagaca

SEQ ID NO: 21375 - DNA, 20 bp, synthetic construct
  misc_feature 1..20: note = Description of Artificial Sequence: Synthetic oligonucleotide
  misc_feature 1..20: note = Target: FXN; (+) strand; PAM type: NRG; PAM sequence: CAG
  source 1..20: mol_type = other DNA
ccctggtcctagacatagtt

SEQ ID NO: 21376 - DNA, 20 bp, synthetic construct
  misc_feature 1..20: note = Description of Artificial Sequence: Synthetic oligonucleotide
  misc_feature 1..20: note = Target: FXN; (+) strand; PAM type: NRG; PAM sequence: AAG
  source 1..20: mol_type = other DNA
ctagacatagttcagccaca

SEQ ID NO: 21377 - DNA, 20 bp, synthetic construct
  misc_feature 1..20: note = Description of Artificial Sequence: Synthetic oligonucleotide
  misc_feature 1..20: note = Target: FXN; (+) strand; PAM type: NRG; PAM sequence: TAG
  source 1..20: mol_type = other DNA
gacatagttcagccacaaag

SEQ ID NO: 21378 - DNA, 20 bp, synthetic construct
  misc_feature 1..20: note = Description of Artificial Sequence: Synthetic oligonucleotide
  misc_feature 1..20: note = Target: FXN; (+) strand; PAM type: NRG; PAM sequence: TGG
  source 1..20: mol_type = other DNA
acaaagtagttgtccctttg

SEQ ID NO: 21379 - DNA, 20 bp, synthetic construct
  misc_feature 1..20: note = Description of Artificial Sequence: Synthetic oligonucleotide
  misc_feature 1..20: note = Target: FXN; (+) strand; PAM type: NRG; PAM sequence: AAG
  source 1..20: mol_type = other DNA
gtagttgtccctttgtggac

SEQ ID NO: 21380 - DNA, 20 bp, synthetic construct
  misc_feature 1..20: note = Description of Artificial Sequence: Synthetic oligonucleotide
  misc_feature 1..20: note = Target: FXN; (+) strand; PAM type: NRG; PAM sequence: TGG
  source 1..20: mol_type = other DNA
gacaagtttcccaaattccc

SEQ ID NO: 21381 - DNA, 20 bp, synthetic construct
  misc_feature 1..20: note = Description of Artificial Sequence: Synthetic oligonucleotide
  misc_feature 1..20: note = Target: FXN; (+) strand; PAM type: NRG; PAM sequence: GAG
  source 1..20: mol_type = other DNA
tgcttccccatctgttaaat

SEQ ID NO: 21382 - DNA, 20 bp, synthetic construct
  misc_feature 1..20: note = Description of Artificial Sequence: Synthetic oligonucleotide
  misc_feature 1..20: note = Target: FXN; (+) strand; PAM type: NRG; PAM sequence: GAG
  source 1..20: mol_type = other DNA
cttccccatctgttaaatga

SEQ ID NO: 21383 - DNA, 20 bp, synthetic construct
  misc_feature 1..20: note = Description of Artificial Sequence: Synthetic oligonucleotide
  misc_feature 1..20: note = Target: FXN; (+) strand; PAM type: NRG; PAM sequence: TAG
  source 1..20: mol_type = other DNA
ccatctgttaaatgagagaa

SEQ ID NO: 21384 - DNA, 20 bp, synthetic construct
  misc_feature 1..20: note = Description of Artificial Sequence: Synthetic oligonucleotide
  misc_feature 1..20: note = Target: FXN; (+) strand; PAM type: NRG; PAM sequence: GAG
  source 1..20: mol_type = other DNA
atctgttaaatgagagaata

SEQ ID NO: 21385 - DNA, 20 bp, synthetic construct
  misc_feature 1..20: note = Description of Artificial Sequence: Synthetic oligonucleotide
  misc_feature 1..20: note = Target: FXN; (+) strand; PAM type: NRG; PAM sequence: TGG
  source 1..20: mol_type = other DNA
ttaaatgagagaatagagta

SEQ ID NO: 21386 - DNA, 20 bp, synthetic construct
  misc_feature 1..20: note = Description of Artificial Sequence: Synthetic oligonucleotide
  misc_feature 1..20: note = Target: FXN; (+) strand; PAM type: NRG; PAM sequence: CAG
  source 1..20: mol_type = other DNA
aatagagtatggttgattcc

SEQ ID NO: 21387 - DNA, 20 bp, synthetic construct
  misc_feature 1..20: note = Description of Artificial Sequence: Synthetic oligonucleotide
  misc_feature 1..20: note = Target: FXN; (+) strand; PAM type: NRG; PAM sequence: CAG
  source 1..20: mol_type = other DNA
tatggttgattcccagcatt

SEQ ID NO: 21388 - DNA, 20 bp, synthetic construct
  misc_feature 1..20: note = Description of Artificial Sequence: Synthetic oligonucleotide
  misc_feature 1..20: note = Target: FXN; (+) strand; PAM type: NRG; PAM sequence: TGG
  source 1..20: mol_type = other DNA
ggttgattcccagcattcag

SEQ ID NO: 21389 - DNA, 20 bp, synthetic construct
  misc_feature 1..20: note = Description of Artificial Sequence: Synthetic oligonucleotide
  misc_feature 1..20: note = Target: FXN; (+) strand; PAM type: NRG; PAM sequence: AAG
  source 1..20: mol_type = other DNA
cagcattcagtggtcctgtc

SEQ ID NO: 21390 - DNA, 20 bp, synthetic construct
  misc_feature 1..20: note = Description of Artificial Sequence: Synthetic oligonucleotide
  misc_feature 1..20: note = Target: FXN; (+) strand; PAM type: NRG; PAM sequence: CAG
  source 1..20: mol_type = other DNA
ggtcctgtcaagcaacctaa

SEQ ID NO: 21391 - DNA, 20 bp, synthetic construct
  misc_feature 1..20: note = Description of Artificial Sequence: Synthetic oligonucleotide
  misc_feature 1..20: note = Target: FXN; (+) strand; PAM type: NRG; PAM sequence: AGG
  source 1..20: mol_type = other DNA
gtcctgtcaagcaacctaac

SEQ ID NO: 21392 - DNA, 20 bp, synthetic construct
  misc_feature 1..20: note = Description of Artificial Sequence: Synthetic oligonucleotide
  misc_feature 1..20: note = Target: FXN; (+) strand; PAM type: NRG; PAM sequence: TAG
  source 1..20: mol_type = other DNA
tgtcaagcaacctaacaggc

SEQ ID NO: 21393 - DNA, 20 bp, synthetic construct
  misc_feature 1..20: note = Description of Artificial Sequence: Synthetic oligonucleotide
  misc_feature 1..20: note = Target: FXN; (+) strand; PAM type: NRG; PAM sequence: TGG
  source 1..20: mol_type = other DNA
ggctagttctaattccctat

SEQ ID NO: 21394 - DNA, 20 bp, synthetic construct
  misc_feature 1..20: note = Description of Artificial Sequence: Synthetic oligonucleotide
  misc_feature 1..20: note = Target: FXN; (+) strand; PAM type: NRG; PAM sequence: GGG
  source 1..20: mol_type = other DNA
gctagttctaattccctatt

SEQ ID NO: 21395 - DNA, 20 bp, synthetic construct
  misc_feature 1..20: note = Description of Artificial Sequence: Synthetic oligonucleotide
  misc_feature 1..20: note = Target: FXN; (+) strand; PAM type: NRG; PAM sequence: TAG
  source 1..20: mol_type = other DNA
agttctaattccctattggg

SEQ ID NO: 21396 - DNA, 20 bp, synthetic construct
  misc_feature 1..20: note = Description of Artificial Sequence: Synthetic oligonucleotide
  misc_feature 1..20: note = Target: FXN; (+) strand; PAM type: NRG; PAM sequence: GAG
  source 1..20: mol_type = other DNA
taattccctattgggtagat

SEQ ID NO: 21397 - DNA, 20 bp, synthetic construct
  misc_feature 1..20: note = Description of Artificial Sequence: Synthetic oligonucleotide
  misc_feature 1..20: note = Target: FXN; (+) strand; PAM type: NRG; PAM sequence: AGG
  source 1..20: mol_type = other DNA
aattccctattgggtagatg

SEQ ID NO: 21398 - DNA, 20 bp, synthetic construct
  misc_feature 1..20: note = Description of Artificial Sequence: Synthetic oligonucleotide
  misc_feature 1..20: note = Target: FXN; (+) strand; PAM type: NRG; PAM sequence: GGG
  source 1..20: mol_type = other DNA
attccctattgggtagatga

SEQ ID NO: 21399 - DNA, 20 bp, synthetic construct
  misc_feature 1..20: note = Description of Artificial Sequence: Synthetic oligonucleotide
  misc_feature 1..20: note = Target: FXN; (+) strand; PAM type: NRG; PAM sequence: GGG
  source 1..20: mol_type = other DNA
ttccctattgggtagatgag

SEQ ID NO: 21400 - DNA, 20 bp, synthetic construct
  misc_feature 1..20: note = Description of Artificial Sequence: Synthetic oligonucleotide
  misc_feature 1..20: note = Target: FXN; (+) strand; PAM type: NRG; PAM sequence: AAG
  source 1..20: mol_type = other DNA
gggtagatgaggggatgaca

SEQ ID NO: 21401 - DNA, 20 bp, synthetic construct
  misc_feature 1..20: note = Description of Artificial Sequence: Synthetic oligonucleotide
  misc_feature 1..20: note = Target: FXN; (+) strand; PAM type: NRG; PAM sequence: CAG
  source 1..20: mol_type = other DNA
gatgaggggatgacaaagaa

SEQ ID NO: 21402 - DNA, 20 bp, synthetic construct
  misc_feature 1..20: note = Description of Artificial Sequence: Synthetic oligonucleotide
  misc_feature 1..20: note = Target: FXN; (+) strand; PAM type: NRG; PAM sequence: AAG
  source 1..20: mol_type = other DNA
gatgacaaagaacagttttt

SEQ ID NO: 21403 - DNA, 20 bp, synthetic construct
  misc_feature 1..20: note = Description of Artificial Sequence: Synthetic oligonucleotide
  misc_feature 1..20: note = Target: FXN; (+) strand; PAM type: NRG; PAM sequence: TAG
  source 1..20: mol_type = other DNA
agaacagtttttaagctata

SEQ ID NO: 21404 - DNA, 20 bp, synthetic construct
  misc_feature 1..20: note = Description of Artificial Sequence: Synthetic oligonucleotide
  misc_feature 1..20: note = Target: FXN; (+) strand; PAM type: NRG; PAM sequence: AGG
  source 1..20: mol_type = other DNA
gaacagtttttaagctatat

SEQ ID NO: 21405 - DNA, 20 bp, synthetic construct
  misc_feature 1..20: note = Description of Artificial Sequence: Synthetic oligonucleotide
  misc_feature 1..20: note = Target: FXN; (+) strand; PAM type: NRG; PAM sequence: TGG
  source 1..20: mol_type = other DNA
tatataggaaacattgttat

SEQ ID NO: 21406 - DNA, 20 bp, synthetic construct
  misc_feature 1..20: note = Description of Artificial Sequence: Synthetic oligonucleotide
  misc_feature 1..20: note = Target: FXN; (+) strand; PAM type: NRG; PAM sequence: CAG
  source 1..20: mol_type = other DNA
gtgttgccctatcgtgattt

SEQ ID NO: 21407 - DNA, 20 bp, synthetic construct
  misc_feature 1..20: note = Description of Artificial Sequence: Synthetic oligonucleotide
  misc_feature 1..20: note = Target: FXN; (+) strand; PAM type: NRG; PAM sequence: TAG
  source 1..20: mol_type = other DNA
ttgaattcatgtgaaaataa

SEQ ID NO: 21408 - DNA, 20 bp, synthetic construct
  misc_feature 1..20: note = Description of Artificial Sequence: Synthetic oligonucleotide
  misc_feature 1..20: note = Target: FXN; (+) strand; PAM type: NRG; PAM sequence: TGG
  source 1..20: mol_type = other DNA
gtgaaaataatagccatcct

SEQ ID NO: 21409 - DNA, 20 bp, synthetic construct
  misc_feature 1..20: note = Description of Artificial Sequence: Synthetic oligonucleotide
  misc_feature 1..20: note = Target: FXN; (+) strand; PAM type: NRG; PAM sequence: TGG
  source 1..20: mol_type = other DNA
aataatagccatccttggcc

SEQ ID NO: 21410 - DNA, 20 bp, synthetic construct
  misc_feature 1..20: note = Description of Artificial Sequence: Synthetic oligonucleotide
  misc_feature 1..20: note = Target: FXN; (+) strand; PAM type: NRG; PAM sequence: CGG
  source 1..20: mol_type = other DNA
tagccatccttggcctggcg

SEQ ID NO: 21411 - DNA, 20 bp, synthetic construct
  misc_feature 1..20: note = Description of Artificial Sequence: Synthetic oligonucleotide
  misc_feature 1..20: note = Target: FXN; (+) strand; PAM type: NRG; PAM sequence: TGG
  source 1..20: mol_type = other DNA
ccatccttggcctggcgcgg

SEQ ID NO: 21412 - DNA, 20 bp, synthetic construct
  misc_feature 1..20: note = Description of Artificial Sequence: Synthetic oligonucleotide
  misc_feature 1..20: note = Target: FXN; (+) strand; PAM type: NRG; PAM sequence: CAG
  source 1..20: mol_type = other DNA
gtggctcacacctgtaatcc

SEQ ID NO: 21413 - DNA, 20 bp, synthetic construct
  misc_feature 1..20: note = Description of Artificial Sequence: Synthetic oligonucleotide
  misc_feature 1..20: note = Target: FXN; (+) strand; PAM type: NRG; PAM sequence: TGG
  source 1..20: mol_type = other DNA
acctgtaatcccagcacttt

SEQ ID NO: 21414 - DNA, 20 bp, synthetic construct
  misc_feature 1..20: note = Description of Artificial Sequence: Synthetic oligonucleotide
  misc_feature 1..20: note = Target: FXN; (+) strand; PAM type: NRG; PAM sequence: GAG
  source 1..20: mol_type = other DNA
ctgtaatcccagcacttttg

SEQ ID NO: 21415 - DNA, 20 bp, synthetic construct
  misc_feature 1..20: note = Description of Artificial Sequence: Synthetic oligonucleotide
  misc_feature 1..20: note = Target: FXN; (+) strand; PAM type: NRG; PAM sequence: AGG
  source 1..20: mol_type = other DNA
tgtaatcccagcacttttgg

SEQ ID NO: 21416 - DNA, 20 bp, synthetic construct
  misc_feature 1..20: note = Description of Artificial Sequence: Synthetic oligonucleotide
  misc_feature 1..20: note = Target: FXN; (+) strand; PAM type: NRG; PAM sequence: AAG
  source 1..20: mol_type = other DNA
tcccagcacttttggaggcc

SEQ ID NO: 21417 - DNA, 20 bp, synthetic construct
  misc_feature 1..20: note = Description of Artificial Sequence: Synthetic oligonucleotide
  misc_feature 1..20: note = Target: FXN; (+) strand; PAM type: NRG; PAM sequence: AGG
  source 1..20: mol_type = other DNA
cccagcacttttggaggcca

SEQ ID NO: 21418 - DNA, 20 bp, synthetic construct
  misc_feature 1..20: note = Description of Artificial Sequence: Synthetic oligonucleotide
  misc_feature 1..20: note = Target: FXN; (+) strand; PAM type: NRG; PAM sequence: TGG
  source 1..20: mol_type = other DNA
agcacttttggaggccaagg

SEQ ID NO: 21419 - DNA, 20 bp, synthetic construct
  misc_feature 1..20: note = Description of Artificial Sequence: Synthetic oligonucleotide
  misc_feature 1..20: note = Target: FXN; (+) strand; PAM type: NRG; PAM sequence: GGG
  source 1..20: mol_type = other DNA
gcacttttggaggccaaggt

SEQ ID NO: 21420 - DNA, 20 bp, synthetic construct
  misc_feature 1..20: note = Description of Artificial Sequence: Synthetic oligonucleotide
  misc_feature 1..20: note = Target: FXN; (+) strand; PAM type: NRG; PAM sequence: TGG
  source 1..20: mol_type = other DNA
cttttggaggccaaggtggg

SEQ ID NO: 21421 - DNA, 20 bp, synthetic construct
  misc_feature 1..20: note = Description of Artificial Sequence: Synthetic oligonucleotide
  misc_feature 1..20: note = Target: FXN; (+) strand; PAM type: NRG; PAM sequence: GAG
  source 1..20: mol_type = other DNA
ccaaggtgggtggatcacct

SEQ ID NO: 21422 - DNA, 20 bp, synthetic construct
  misc_feature 1..20: note = Description of Artificial Sequence: Synthetic oligonucleotide
  misc_feature 1..20: note = Target: FXN; (+) strand; PAM type: NRG; PAM sequence: AGG
  source 1..20: mol_type = other DNA
caaggtgggtggatcacctg

SEQ ID NO: 21423 - DNA, 20 bp, synthetic construct
  misc_feature 1..20: note = Description of Artificial Sequence: Synthetic oligonucleotide
  misc_feature 1..20: note = Target: FXN; (+) strand; PAM type: NRG; PAM sequence: CAG
  source 1..20: mol_type = other DNA
gtgggtggatcacctgaggt

SEQ ID NO: 21424 - DNA, 20 bp, synthetic construct
  misc_feature 1..20: note = Description of Artificial Sequence: Synthetic oligonucleotide
  misc_feature 1..20: note = Target: FXN; (+) strand; PAM type: NRG; PAM sequence: AGG
  source 1..20: mol_type = other DNA
tgggtggatcacctgaggtc

SEQ ID NO: 21425 - DNA, 20 bp, synthetic construct
  misc_feature 1..20: note = Description of Artificial Sequence: Synthetic oligonucleotide
  misc_feature 1..20: note = Target: FXN; (+) strand; PAM type: NRG; PAM sequence: GAG
  source 1..20: mol_type = other DNA
ggtggatcacctgaggtcag

SEQ ID NO: 21426 - DNA, 20 bp, synthetic construct
  misc_feature 1..20: note = Description of Artificial Sequence: Synthetic oligonucleotide
  misc_feature 1..20: note = Target: FXN; (+) strand; PAM type: NRG; PAM sequence: AAG
  source 1..20: mol_type = other DNA
tcacctgaggtcaggagttc

SEQ ID NO: 21427 - DNA, 20 bp, synthetic construct
  misc_feature 1..20: note = Description of Artificial Sequence: Synthetic oligonucleotide
  misc_feature 1..20: note = Target: FXN; (+) strand; PAM type: NRG; PAM sequence: CAG
  source 1..20: mol_type = other DNA
tgaggtcaggagttcaagac

SEQ ID NO: 21428 - DNA, 20 bp, synthetic construct
  misc_feature 1..20: note = Description of Artificial Sequence: Synthetic oligonucleotide
  misc_feature 1..20: note = Target: FXN; (+) strand; PAM type: NRG; PAM sequence: TGG
  source 1..20: mol_type = other DNA
tcaggagttcaagaccagcc

SEQ ID NO: 21429 - DNA, 20 bp, synthetic construct
  misc_feature 1..20: note = Description of Artificial Sequence: Synthetic oligonucleotide
  misc_feature 1..20: note = Target: FXN; (+) strand; PAM type: NRG; PAM sequence: TAG
  source 1..20: mol_type = other DNA
ctactaaaaatacaaaaaat

SEQ ID NO: 21430 - DNA, 20 bp, synthetic construct
  misc_feature 1..20: note = Description of Artificial Sequence: Synthetic oligonucleotide
  misc_feature 1..20: note = Target: FXN; (+) strand; PAM type: NRG; PAM sequence: CGG
  source 1..20: mol_type = other DNA
taaaaatacaaaaaattagc

SEQ ID NO: 21431 - DNA, 20 bp, synthetic construct
  misc_feature 1..20: note = Description of Artificial Sequence: Synthetic oligonucleotide
  misc_feature 1..20: note = Target: FXN; (+) strand; PAM type: NRG; PAM sequence: GGG
  source 1..20: mol_type = other DNA
aaaaatacaaaaaattagcc

SEQ ID NO: 21432 - DNA, 20 bp, synthetic construct
  misc_feature 1..20: note = Description of Artificial Sequence: Synthetic oligonucleotide
  misc_feature 1..20: note = Target: FXN; (+) strand; PAM type: NRG; PAM sequence: TGG
  source 1..20: mol_type = other DNA
aaaaaattagccgggcatga

SEQ ID NO: 21433 - DNA, 20 bp, synthetic construct
  misc_feature 1..20: note = Description of Artificial Sequence: Synthetic oligonucleotide
  misc_feature 1..20: note = Target: FXN; (+) strand; PAM type: NRG; PAM sequence: CAG
  source 1..20: mol_type = other DNA
aaattagccgggcatgatgg

SEQ ID NO: 21434 - DNA, 20 bp, synthetic construct
  misc_feature 1..20: note = Description of Artificial Sequence: Synthetic oligonucleotide
  misc_feature 1..20: note = Target: FXN; (+) strand; PAM type: NRG; PAM sequence: AGG
  source 1..20: mol_type = other DNA
aattagccgggcatgatggc

SEQ ID NO: 21435 - DNA, 20 bp, synthetic construct
  misc_feature 1..20: note = Description of Artificial Sequence: Synthetic oligonucleotide
  misc_feature 1..20: note = Target: FXN; (+) strand; PAM type: NRG; PAM sequence: CAG
  source 1..20: mol_type = other DNA
atggcaggtgcctgtaatcc

SEQ ID NO: 21436 - DNA, 20 bp, synthetic construct
  misc_feature 1..20: note = Description of Artificial Sequence: Synthetic oligonucleotide
  misc_feature 1..20: note = Target: FXN; (+) strand; PAM type: NRG; PAM sequence: TGG
  source 1..20: mol_type = other DNA
tgcctgtaatcccagctact

SEQ ID NO: 21437 - DNA, 20 bp, synthetic construct
  misc_feature 1..20: note = Description of Artificial Sequence: Synthetic oligonucleotide
  misc_feature 1..20: note = Target: FXN; (+) strand; PAM type: NRG; PAM sequence: GGG
  source 1..20: mol_type = other DNA
gcctgtaatcccagctactt

SEQ ID NO: 21438 - DNA, 20 bp, synthetic construct
  misc_feature 1..20: note = Description of Artificial Sequence: Synthetic oligonucleotide
  misc_feature 1..20: note = Target: FXN; (+) strand; PAM type: NRG; PAM sequence: GAG
  source 1..20: mol_type = other DNA
ctgtaatcccagctacttgg

SEQ ID NO: 21439 - DNA, 20 bp, synthetic construct
  misc_feature 1..20: note = Description of Artificial Sequence: Synthetic oligonucleotide
  misc_feature 1..20: note = Target: FXN; (+) strand; PAM type: NRG; PAM sequence: AGG
  source 1..20: mol_type = other DNA
tgtaatcccagctacttggg

SEQ ID NO: 21440 - DNA, 20 bp, synthetic construct
  misc_feature 1..20: note = Description of Artificial Sequence: Synthetic oligonucleotide
  misc_feature 1..20: note = Target: FXN; (+) strand; PAM type: NRG; PAM sequence: AAG
  source 1..20: mol_type = other DNA
cccagctacttgggaggctg

SEQ ID NO: 21441 - DNA, 20 bp, synthetic construct
  misc_feature 1..20: note = Description of Artificial Sequence: Synthetic oligonucleotide
  misc_feature 1..20: note = Target: FXN; (+) strand; PAM type: NRG; PAM sequence: CGG
  source 1..20: mol_type = other DNA
agctacttgggaggctgaag

SEQ ID NO: 21442 - DNA, 20 bp, synthetic construct
  misc_feature 1..20: note = Description of Artificial Sequence: Synthetic oligonucleotide
  misc_feature 1..20: note = Target: FXN; (+) strand; PAM type: NRG; PAM sequence: AAG
  source 1..20: mol_type = other DNA
tacttgggaggctgaagcgg

SEQ ID NO: 21443 - DNA, 20 bp, synthetic construct
  misc_feature 1..20: note = Description of Artificial Sequence: Synthetic oligonucleotide
  misc_feature 1..20: note = Target: FXN; (+) strand; PAM type: NRG; PAM sequence: CAG
  source 1..20: mol_type = other DNA
gcggaagaatcgcttgaacc

SEQ ID NO: 21444 - DNA, 20 bp, synthetic construct
  misc_feature 1..20: note = Description of Artificial Sequence: Synthetic oligonucleotide
  misc_feature 1..20: note = Target: FXN; (+) strand; PAM type: NRG; PAM sequence: GAG
  source 1..20: mol_type = other DNA
ggaagaatcgcttgaaccca

SEQ ID NO: 21445 - DNA, 20 bp, synthetic construct
  misc_feature 1..20: note = Description of Artificial Sequence: Synthetic oligonucleotide
  misc_feature 1..20: note = Target: FXN; (+) strand; PAM type: NRG; PAM sequence: AGG
  source 1..20: mol_type = other DNA
gaagaatcgcttgaacccag

SEQ ID NO: 21446 - DNA, 20 bp, synthetic construct
  misc_feature 1..20: note = Description of Artificial Sequence: Synthetic oligonucleotide
  misc_feature 1..20: note = Target: FXN; (+) strand; PAM type: NRG; PAM sequence: TGG
  source 1..20: mol_type = other DNA
gaatcgcttgaacccagagg

SEQ ID NO: 21447 - DNA, 20 bp, synthetic construct
  misc_feature 1..20: note = Description of Artificial Sequence: Synthetic oligonucleotide
  misc_feature 1..20: note = Target: FXN; (+) strand; PAM type: NRG; PAM sequence: GAG
  source 1..20: mol_type = other DNA
atcgcttgaacccagaggtg

SEQ ID NO: 21448 - DNA, 20 bp, synthetic construct
  misc_feature 1..20: note = Description of Artificial Sequence: Synthetic oligonucleotide
  misc_feature 1..20: note = Target: FXN; (+) strand; PAM type: NRG; PAM sequence: AGG
  source 1..20: mol_type = other DNA
tcgcttgaacccagaggtgg

SEQ ID NO: 21449 - DNA, 20 bp, synthetic construct
  misc_feature 1..20: note = Description of Artificial Sequence: Synthetic oligonucleotide
  misc_feature 1..20: note = Target: FXN; (+) strand; PAM type: NRG; PAM sequence: CAG
  source 1..20: mol_type = other DNA
gaacccagaggtggaggttg

SEQ ID NO: 21450 - DNA, 20 bp, synthetic construct
  misc_feature 1..20: note = Description of Artificial Sequence: Synthetic oligonucleotide
  misc_feature 1..20: note = Target: FXN; (+) strand; PAM type: NRG; PAM sequence: GAG
  source 1..20: mol_type = other DNA
ccagaggtggaggttgcagt

SEQ ID NO: 21451 - DNA, 20 bp, synthetic construct
  misc_feature 1..20: note = Description of Artificial Sequence: Synthetic oligonucleotide
  misc_feature 1..20: note = Target: FXN; (+) strand; PAM type: NRG; PAM sequence: GAG
  source 1..20: mol_type = other DNA
ggtggaggttgcagtgagcc

SEQ ID NO: 21452 - DNA, 20 bp, synthetic construct
  misc_feature 1..20: note = Description of Artificial Sequence: Synthetic oligonucleotide
  misc_feature 1..20: note = Target: FXN; (+) strand; PAM type: NRG; PAM sequence: TGG
  source 1..20: mol_type = other DNA
cgtgccattgcactgtaacc

SEQ ID NO: 21453 - DNA, 20 bp, synthetic construct
  misc_feature 1..20: note = Description of Artificial Sequence: Synthetic oligonucleotide
  misc_feature 1..20: note = Target: FXN; (+) strand; PAM type: NRG; PAM sequence: GGG
  source 1..20: mol_type = other DNA
gtgccattgcactgtaacct

SEQ ID NO: 21454 - DNA, 20 bp, synthetic construct
  misc_feature 1..20: note = Description of Artificial Sequence: Synthetic oligonucleotide
  misc_feature 1..20: note = Target: FXN; (+) strand; PAM type: NRG; PAM sequence: GAG
  source 1..20: mol_type = other DNA
gcactgtaacctgggtgact

SEQ ID NO: 21455 - DNA, 20 bp, synthetic construct
  misc_feature 1..20: note = Description of Artificial Sequence: Synthetic oligonucleotide
  misc_feature 1..20: note = Target: FXN; (+) strand; PAM type: NRG; PAM sequence: TAG
  source 1..20: mol_type = other DNA
taacaatataataataataa

SEQ ID NO: 21456 - DNA, 20 bp, synthetic construct
  misc_feature 1..20: note = Description of Artificial Sequence: Synthetic oligonucleotide
  misc_feature 1..20: note = Target: FXN; (+) strand; PAM type: NRG; PAM sequence: TGG
  source 1..20: mol_type = other DNA
atcctttattgtacccttac

SEQ ID NO: 21457 - DNA, 20 bp, synthetic construct
  misc_feature 1..20: note = Description of Artificial Sequence: Synthetic oligonucleotide
  misc_feature 1..20: note = Target: FXN; (+) strand; PAM type: NRG; PAM sequence: GGG
  source 1..20: mol_type = other DNA
tcctttattgtacccttact

SEQ ID NO: 21458 - DNA, 20 bp, synthetic construct
  misc_feature 1..20: note = Description of Artificial Sequence: Synthetic oligonucleotide
  misc_feature 1..20: note = Target: FXN; (+) strand; PAM type: NRG; PAM sequence: AAG
  source 1..20: mol_type = other DNA
actgacctgcactttataca

SEQ ID NO: 21459 - DNA, 20 bp, synthetic construct
  misc_feature 1..20: note = Description of Artificial Sequence: Synthetic oligonucleotide
  misc_feature 1..20: note = Target: FXN; (+) strand; PAM type: NRG; PAM sequence: AAG
  source 1..20: mol_type = other DNA
tgcactttatacaaagcaac

SEQ ID NO: 21460 - DNA, 20 bp, synthetic construct
  misc_feature 1..20: note = Description of Artificial Sequence: Synthetic oligonucleotide
  misc_feature 1..20: note = Target: FXN; (+) strand; PAM type: NRG; PAM sequence: CAG
  source 1..20: mol_type = other DNA
tatacaaagcaacaagcctc

SEQ ID NO: 21461 - DNA, 20 bp, synthetic construct
  misc_feature 1..20: note = Description of Artificial Sequence: Synthetic oligonucleotide
  misc_feature 1..20: note = Target: FXN; (+) strand; PAM type: NRG; PAM sequence: AGG
  source 1..20: mol_type = other DNA
atacaaagcaacaagcctcc

SEQ ID NO: 21462 - DNA, 20 bp, synthetic construct
  misc_feature 1..20: note = Description of Artificial Sequence: Synthetic oligonucleotide
  misc_feature 1..20: note = Target: FXN; (+) strand; PAM type: NRG; PAM sequence: AAG
  source 1..20: mol_type = other DNA
aggacattaaaattcatgca

SEQ ID NO: 21463 - DNA, 20 bp, synthetic construct
  misc_feature 1..20: note = Description of Artificial Sequence: Synthetic oligonucleotide
  misc_feature 1..20: note = Target: FXN; (+) strand; PAM type: NRG; PAM sequence: AAG
  source 1..20: mol_type = other DNA
ttatattattttcttactta

SEQ ID NO: 21464 - DNA, 20 bp, synthetic construct
  misc_feature 1..20: note = Description of Artificial Sequence: Synthetic oligonucleotide
  misc_feature 1..20: note = Target: FXN; (+) strand; PAM type: NRG; PAM sequence: AAG
  source 1..20: mol_type = other DNA
tattattttcttacttaaag

SEQ ID NO: 21465 - DNA, 20 bp, synthetic construct
  misc_feature 1..20: note = Description of Artificial Sequence: Synthetic oligonucleotide
  misc_feature 1..20: note = Target: FXN; (+) strand; PAM type: NRG; PAM sequence: AGG
  source 1..20: mol_type = other DNA
attattttcttacttaaaga

SEQ ID NO: 21466 - DNA, 20 bp, synthetic construct
  misc_feature 1..20: note = Description of Artificial Sequence: Synthetic oligonucleotide
  misc_feature 1..20: note = Target: FXN; (+) strand; PAM type: NRG; PAM sequence: TAG
  source 1..20: mol_type = other DNA
ttacttaaagaaggatttat

SEQ ID NO: 21467 - DNA, 20 bp, synthetic construct
  misc_feature 1..20: note = Description of Artificial Sequence: Synthetic oligonucleotide
  misc_feature 1..20: note = Target: FXN; (+) strand; PAM type: NRG; PAM sequence: TGG
  source 1..20: mol_type = other DNA
cttaaagaaggatttattag

SEQ ID NO: 21468 - DNA, 20 bp, synthetic construct
  misc_feature 1..20: note = Description of Artificial Sequence: Synthetic oligonucleotide
  misc_feature 1..20: note = Target: FXN; (+) strand; PAM type: NRG; PAM sequence: TGG
  source 1..20: mol_type = other DNA
aagaaggatttattagtggc

SEQ ID NO: 21469 - DNA, 20 bp, synthetic construct
  misc_feature 1..20: note = Description of Artificial Sequence: Synthetic oligonucleotide
  misc_feature 1..20: note = Target: FXN; (+) strand; PAM type: NRG; PAM sequence: GGG
  source 1..20: mol_type = other DNA
agaaggatttattagtggct

SEQ ID NO: 21470 - DNA, 20 bp, synthetic construct
  misc_feature 1..20: note = Description of Artificial Sequence: Synthetic oligonucleotide
  misc_feature 1..20: note = Target: FXN; (+) strand; PAM type: NRG; PAM sequence: TGG
  source 1..20: mol_type = other DNA
gatttattagtggctgggca

SEQ ID NO: 21471 - DNA, 20 bp, synthetic construct
  misc_feature 1..20: note = Description of Artificial Sequence: Synthetic oligonucleotide
  misc_feature 1..20: note = Target: FXN; (+) strand; PAM type: NRG; PAM sequence: TGG
  source 1..20: mol_type = other DNA
ttattagtggctgggcatgg

SEQ ID NO: 21472 - DNA, 20 bp, synthetic construct
  misc_feature 1..20: note = Description of Artificial Sequence: Synthetic oligonucleotide
  misc_feature 1..20: note = Target: FXN; (+) strand; PAM type: NRG; PAM sequence: CAG
  source 1..20: mol_type = other DNA
gtggcgtgcacctgtaatcc

SEQ ID NO: 21473 - DNA, 20 bp, synthetic construct
  misc_feature 1..20: note = Description of Artificial Sequence: Synthetic oligonucleotide
  misc_feature 1..20: note = Target: FXN; (+) strand; PAM type: NRG; PAM sequence: AGG
  source 1..20: mol_type = other DNA
tggcgtgcacctgtaatccc

SEQ ID NO: 21474 - DNA, 20 bp, synthetic construct
  misc_feature 1..20: note = Description of Artificial Sequence: Synthetic oligonucleotide
  misc_feature 1..20: note = Target: FXN; (+) strand; PAM type: NRG; PAM sequence: CAG
  source 1..20: mol_type = other DNA
cacctgtaatcccaggtact

SEQ ID NO: 21475 - DNA, 20 bp, synthetic construct
  misc_feature 1..20: note = Description of Artificial Sequence: Synthetic oligonucleotide
  misc_feature 1..20: note = Target: FXN; (+) strand; PAM type: NRG; PAM sequence: AGG
  source 1..20: mol_type = other DNA
acctgtaatcccaggtactc

SEQ ID NO: 21476 - DNA, 20 bp, synthetic construct
  misc_feature 1..20: note = Description of Artificial Sequence: Synthetic oligonucleotide
  misc_feature 1..20: note = Target: FXN; (+) strand; PAM type: NRG; PAM sequence: GAG
  source 1..20: mol_type = other DNA
ctgtaatcccaggtactcag

SEQ ID NO: 21477 - DNA, 20 bp, synthetic construct
  misc_feature 1..20: note = Description of Artificial Sequence: Synthetic oligonucleotide
  misc_feature 1..20: note = Target: FXN; (+) strand; PAM type: NRG; PAM sequence: AGG
  source 1..20: mol_type = other DNA
tgtaatcccaggtactcagg

SEQ ID NO: 21478 - DNA, 20 bp, synthetic construct
  misc_feature 1..20: note = Description of Artificial Sequence: Synthetic oligonucleotide
  misc_feature 1..20: note = Target: FXN; (+) strand; PAM type: NRG; PAM sequence: GAG
  source 1..20: mol_type = other DNA
tcccaggtactcaggaggct

SEQ ID NO: 21479 - DNA, 20 bp, synthetic construct
  misc_feature 1..20: note = Description of Artificial Sequence: Synthetic oligonucleotide
  misc_feature 1..20: note = Target: FXN; (+) strand; PAM type: NRG; PAM sequence: CGG
  source 1..20: mol_type = other DNA
aggtactcaggaggctgaga

SEQ ID NO: 21480 - DNA, 20 bp, synthetic construct
  misc_feature 1..20: note = Description of Artificial Sequence: Synthetic oligonucleotide
  misc_feature 1..20: note = Target: FXN; (+) strand; PAM type: NRG; PAM sequence: GGG
  source 1..20: mol_type = other DNA
ggtactcaggaggctgagac

SEQ ID NO: 21481 - DNA, 20 bp, synthetic construct
  misc_feature 1..20: note = Description of Artificial Sequence: Synthetic oligonucleotide
  misc_feature 1..20: note = Target: FXN; (+) strand; PAM type: NRG; PAM sequence: GAG
  source 1..20: mol_type = other DNA
tactcaggaggctgagacgg

SEQ ID NO: 21482 - DNA, 20 bp, synthetic construct
  misc_feature 1..20: note = Description of Artificial Sequence: Synthetic oligonucleotide
  misc_feature 1..20: note = Target: FXN; (+) strand; PAM type: NRG; PAM sequence: CAG
  source 1..20: mol_type = other DNA
acgggagaattgcttgaccc

SEQ ID NO: 21483 - DNA, 20 bp, synthetic construct
  misc_feature 1..20: note = Description of Artificial Sequence: Synthetic oligonucleotide
  misc_feature 1..20: note = Target: FXN; (+) strand; PAM type: NRG; PAM sequence: AGG
  source 1..20: mol_type = other DNA
cgggagaattgcttgacccc

SEQ ID NO: 21484 - DNA, 20 bp, synthetic construct
  misc_feature 1..20: note = Description of Artificial Sequence: Synthetic oligonucleotide
  misc_feature 1..20: note = Target: FXN; (+) strand; PAM type: NRG; PAM sequence: CGG
  source 1..20: mol_type = other DNA
gagaattgcttgaccccagg

SEQ ID NO: 21485 - DNA, 20 bp, synthetic construct
  misc_feature 1..20: note = Description of Artificial Sequence: Synthetic oligonucleotide
  misc_feature 1..20: note = Target: FXN; (+) strand; PAM type: NRG; PAM sequence: GAG
  source 1..20: mol_type = other DNA
gaattgcttgaccccaggcg

SEQ ID NO: 21486 - DNA, 20 bp, synthetic construct
  misc_feature 1..20: note = Description of Artificial Sequence: Synthetic oligonucleotide
  misc_feature 1..20: note = Target: FXN; (+) strand; PAM type: NRG; PAM sequence: AGG
  source 1..20: mol_type = other DNA
aattgcttgaccccaggcgg

SEQ ID NO: 21487 - DNA, 20 bp, synthetic construct
  misc_feature 1..20: note = Description of Artificial Sequence: Synthetic oligonucleotide
  misc_feature 1..20: note = Target: FXN; (+) strand; PAM type: NRG; PAM sequence: GAG
  source 1..20: mol_type = other DNA
ttgcttgaccccaggcggag

SEQ ID NO: 21488 - DNA, 20 bp, synthetic construct
  misc_feature 1..20: note = Description of Artificial Sequence: Synthetic oligonucleotide
  misc_feature 1..20: note = Target: FXN; (+) strand; PAM type: NRG; PAM sequence: AGG
  source 1..20: mol_type = other DNA
tgcttgaccccaggcggagg

SEQ ID NO: 21489 - DNA, 20 bp, synthetic construct
  misc_feature 1..20: note = Description of Artificial Sequence: Synthetic oligonucleotide
  misc_feature 1..20: note = Target: FXN; (+) strand; PAM type: NRG; PAM sequence: CAG
  source 1..20: mol_type = other DNA
accccaggcggaggaggtta

SEQ ID NO: 21490 - DNA, 20 bp, synthetic construct
  misc_feature 1..20: note = Description of Artificial Sequence: Synthetic oligonucleotide
  misc_feature 1..20: note = Target: FXN; (+) strand; PAM type: NRG; PAM sequence: GAG
  source 1..20: mol_type = other DNA
caggcggaggaggttacagt

SEQ ID NO: 21491 - DNA, 20 bp, synthetic construct
  misc_feature 1..20: note = Description of Artificial Sequence: Synthetic oligonucleotide
  misc_feature 1..20: note = Target: FXN; (+) strand; PAM type: NRG; PAM sequence: GAG
  source 1..20: mol_type = other DNA
ggaggaggttacagtgagtc

SEQ ID NO: 21492 - DNA, 20 bp, synthetic construct
  misc_feature 1..20: note = Description of Artificial Sequence: Synthetic oligonucleotide
  misc_feature 1..20: note = Target: FXN; (+) strand; PAM type: NRG; PAM sequence: GAG
  source 1..20: mol_type = other DNA
agtgagtcgagatcgtacct

SEQ ID NO: 21493 - DNA, 20 bp, synthetic construct
  misc_feature 1..20: note = Description of Artificial Sequence: Synthetic oligonucleotide
  misc_feature 1..20: note = Target: FXN; (+) strand; PAM type: NRG; PAM sequence: CAG
  source 1..20: mol_type = other DNA
tcgagatcgtacctgagcga

SEQ ID NO: 21494 - DNA, 20 bp, synthetic construct
  misc_feature 1..20: note = Description of Artificial Sequence: Synthetic oligonucleotide
  misc_feature 1..20: note = Target: FXN; (+) strand; PAM type: NRG; PAM sequence: GAG
  source 1..20: mol_type = other DNA
gagatcgtacctgagcgaca

SEQ ID NO: 21495 - DNA, 20 bp, synthetic construct
  misc_feature 1..20: note = Description of Artificial Sequence: Synthetic oligonucleotide
  misc_feature 1..20: note = Target: FXN; (+) strand; PAM type: NRG; PAM sequence: GAG
  source 1..20: mol_type = other DNA
tcgtacctgagcgacagagc

SEQ ID NO: 21496 - DNA, 20 bp, synthetic construct
  misc_feature 1..20: note = Description of Artificial Sequence: Synthetic oligonucleotide
  misc_feature 1..20: note = Target: FXN; (+) strand; PAM type: NRG; PAM sequence: AAG
  source 1..20: mol_type = other DNA
tccgtctcaaaaaaaaaaaa

SEQ ID NO: 21497 - DNA, 20 bp, synthetic construct
  misc_feature 1..20: note = Description of Artificial Sequence: Synthetic oligonucleotide
  misc_feature 1..20: note = Target: FXN; (+) strand; PAM type: NRG; PAM sequence: AGG
  source 1..20: mol_type = other DNA
ccgtctcaaaaaaaaaaaaa

SEQ ID NO: 21498 - DNA, 20 bp, synthetic construct
  misc_feature 1..20: note = Description of Artificial Sequence: Synthetic oligonucleotide
  misc_feature 1..20: note = Target: FXN; (+) strand; PAM type: NRG; PAM sequence: GAG
  source 1..20: mol_type = other DNA
gtctcaaaaaaaaaaaaaag

SEQ ID NO: 21499 - DNA, 20 bp, synthetic construct
  misc_feature 1..20: note = Description of Artificial Sequence: Synthetic oligonucleotide
  misc_feature 1..20: note = Target: FXN; (+) strand; PAM type: NRG; PAM sequence: AGG
  source 1..20: mol_type = other DNA
tctcaaaaaaaaaaaaaagg

SEQ ID NO: 21500 - DNA, 20 bp, synthetic construct
  misc_feature 1..20: note = Description of Artificial Sequence: Synthetic oligonucleotide
  misc_feature 1..20: note = Target: FXN; (+) strand; PAM type: NRG; PAM sequence: GGG
  source 1..20: mol_type = other DNA
ctcaaaaaaaaaaaaaagga

SEQ ID NO: 21501 - DNA, 20 bp, synthetic construct
  misc_feature 1..20: note = Description of Artificial Sequence: Synthetic oligonucleotide
  misc_feature 1..20: note = Target: FXN; (+) strand; PAM type: NRG; PAM sequence: GAG
  source 1..20: mol_type = other DNA
aaaaaggagggtttattaat

SEQ ID NO: 21502 - DNA, 20 bp, synthetic construct
  misc_feature 1..20: note = Description of Artificial Sequence: Synthetic oligonucleotide
  misc_feature 1..20: note = Target: FXN; (+) strand; PAM type: NRG; PAM sequence: AAG
  source 1..20: mol_type = other DNA
aaggagggtttattaatgag

SEQ ID NO: 21503 - DNA, 20 bp, synthetic construct
  misc_feature 1..20: note = Description of Artificial Sequence: Synthetic oligonucleotide
  misc_feature 1..20: note = Target: FXN; (+) strand; PAM type: NRG; PAM sequence: TAG
  source 1..20: mol_type = other DNA
gagaagtttgtattaatatg

SEQ ID NO: 21504 - DNA, 20 bp, synthetic construct
  misc_feature 1..20: note = Description of Artificial Sequence: Synthetic oligonucleotide
  misc_feature 1..20: note = Target: FXN; (+) strand; PAM type: NRG; PAM sequence: AAG
  source 1..20: mol_type = other DNA
gtttgtattaatatgtagca

SEQ ID NO: 21505 - DNA, 20 bp, synthetic construct
  misc_feature 1..20: note = Description of Artificial Sequence: Synthetic oligonucleotide
  misc_feature 1..20: note = Target: FXN; (+) strand; PAM type: NRG; PAM sequence: AGG
  source 1..20: mol_type = other DNA
tttgtattaatatgtagcaa

SEQ ID NO: 21506 - DNA, 20 bp, synthetic construct
  misc_feature 1..20: note = Description of Artificial Sequence: Synthetic oligonucleotide
  misc_feature 1..20: note = Target: FXN; (+) strand; PAM type: NRG; PAM sequence: TGG
  source 1..20: mol_type = other DNA
tgtagcaaaggcttttccaa

SEQ ID NO: 21507 - DNA, 20 bp, synthetic construct
  misc_feature 1..20: note = Description of Artificial Sequence: Synthetic oligonucleotide
  misc_feature 1..20: note = Target: FXN; (+) strand; PAM type: NRG; PAM sequence: GGG
  source 1..20: mol_type = other DNA
gtagcaaaggcttttccaat

SEQ ID NO: 21508 - DNA, 20 bp, synthetic construct
  misc_feature 1..20: note = Description of Artificial Sequence: Synthetic oligonucleotide
  misc_feature 1..20: note = Target: FXN; (+) strand; PAM type: NRG; PAM sequence: AAG
  source 1..20: mol_type = other DNA
gaataaaaacacattccatt

SEQ ID NO: 21509 - DNA, 20 bp, synthetic construct
  misc_feature 1..20: note = Description of Artificial Sequence: Synthetic oligonucleotide
  misc_feature 1..20: note = Target: FXN; (+) strand; PAM type: NRG; PAM sequence: AAG
  source 1..20: mol_type = other DNA
aaaacacattccattaagtc

SEQ ID NO: 21510 - DNA, 20 bp, synthetic construct
  misc_feature 1..20: note = Description of Artificial Sequence: Synthetic oligonucleotide
  misc_feature 1..20: note = Target: FXN; (+) strand; PAM type: NRG; PAM sequence: TGG
  source 1..20: mol_type = other DNA
cacattccattaagtcaagc

SEQ ID NO: 21511 - DNA, 20 bp, synthetic construct
  misc_feature 1..20: note = Description of Artificial Sequence: Synthetic oligonucleotide
  misc_feature 1..20: note = Target: FXN; (+) strand; PAM type: NRG; PAM sequence: GGG
  source 1..20: mol_type = other DNA
acattccattaagtcaagct

SEQ ID NO: 21512 - DNA, 20 bp, synthetic construct
  misc_feature 1..20: note = Description of Artificial Sequence: Synthetic oligonucleotide
  misc_feature 1..20: note = Target: FXN; (+) strand; PAM type: NRG; PAM sequence: GAG
  source 1..20: mol_type = other DNA
attccattaagtcaagctgg

SEQ ID NO: 21513 - DNA, 20 bp, synthetic construct
  misc_feature 1..20: note = Description of Artificial Sequence: Synthetic oligonucleotide
  misc_feature 1..20: note = Target: FXN; (+) strand; PAM type: NRG; PAM sequence: CAG
  source 1..20: mol_type = other DNA
ccattaagtcaagctgggag

SEQ ID NO: 21514 - DNA, 20 bp, synthetic construct
  misc_feature 1..20: note = Description of Artificial Sequence: Synthetic oligonucleotide
  misc_feature 1..20: note = Target: FXN; (+) strand; PAM type: NRG; PAM sequence: TGG
  source 1..20: mol_type = other DNA
ttaagtcaagctgggagcag

SEQ ID NO: 21515 - DNA, 20 bp, synthetic construct
  misc_feature 1..20: note = Description of Artificial Sequence: Synthetic oligonucleotide
  misc_feature 1..20: note = Target: FXN; (+) strand; PAM type: NRG; PAM sequence: TAG
  source 1..20: mol_type = other DNA
ggagcagtggcatataccta

SEQ ID NO: 21516 - DNA, 20 bp, synthetic construct
  misc_feature 1..20: note = Description of Artificial Sequence: Synthetic oligonucleotide
  misc_feature 1..20: note = Target: FXN; (+) strand; PAM type: NRG; PAM sequence: CAG
  source 1..20: mol_type = other DNA
gtggcatatacctatagtcc

SEQ ID NO: 21517 - DNA, 20 bp, synthetic construct
  misc_feature 1..20: note = Description of Artificial Sequence: Synthetic oligonucleotide
  misc_feature 1..20: note = Target: FXN; (+) strand; PAM type: NRG; PAM sequence: CAG
  source 1..20: mol_type = other DNA
tacctatagtcccagctgca

SEQ ID NO: 21518 - DNA, 20 bp, synthetic construct
  misc_feature 1..20: note = Description of Artificial Sequence: Synthetic oligonucleotide
  misc_feature 1..20: note = Target: FXN; (+) strand; PAM type: NRG; PAM sequence: AGG
  source 1..20: mol_type = other DNA
acctatagtcccagctgcac

SEQ ID NO: 21519 - DNA, 20 bp, synthetic construct
  misc_feature 1..20: note = Description of Artificial Sequence: Synthetic oligonucleotide
  misc_feature 1..20: note = Target: FXN; (+) strand; PAM type: NRG; PAM sequence: GAG
  source 1..20: mol_type = other DNA
ctatagtcccagctgcacag

SEQ ID NO: 21520 - DNA, 20 bp, synthetic construct
  misc_feature 1..20: note = Description of Artificial Sequence: Synthetic oligonucleotide
  misc_feature 1..20: note = Target: FXN; (+) strand; PAM type: NRG; PAM sequence: AGG
  source 1..20: mol_type = other DNA
tatagtcccagctgcacagg

SEQ ID NO: 21521 - DNA, 20 bp, synthetic construct
  misc_feature 1..20: note = Description of Artificial Sequence: Synthetic oligonucleotide
  misc_feature 1..20: note = Target: FXN; (+) strand; PAM type: NRG; PAM sequence: GAG
  source 1..20: mol_type = other DNA
tcccagctgcacaggaggct

SEQ ID NO: 21522 - DNA, 20 bp, synthetic construct
  misc_feature 1..20: note = Description of Artificial Sequence: Synthetic oligonucleotide
  misc_feature 1..20: note = Target: FXN; (+) strand; PAM type: NRG; PAM sequence: CAG
  source 1..20: mol_type = other DNA
agctgcacaggaggctgaga

SEQ ID NO: 21523 - DNA, 20 bp, synthetic construct
  misc_feature 1..20: note = Description of Artificial Sequence: Synthetic oligonucleotide
  misc_feature 1..20: note = Target: FXN; (+) strand; PAM type: NRG; PAM sequence: AGG
  source 1..20: mol_type = other DNA
gctgcacaggaggctgagac

SEQ ID NO: 21524 - DNA, 20 bp, synthetic construct
  misc_feature 1..20: note = Description of Artificial Sequence: Synthetic oligonucleotide
  misc_feature 1..20: note = Target: FXN; (+) strand; PAM type: NRG; PAM sequence: GAG
  source 1..20: mol_type = other DNA
tgcacaggaggctgagacag

SEQ ID NO: 21525 - DNA, 20 bp, synthetic construct
  misc_feature 1..20: note = Description of Artificial Sequence: Synthetic oligonucleotide
  misc_feature 1..20: note = Target: FXN; (+) strand; PAM type: NRG; PAM sequence: AGG
  source 1..20: mol_type = other DNA
gcacaggaggctgagacagg

SEQ ID NO: 21526 - DNA, 20 bp, synthetic construct
  misc_feature 1..20: note = Description of Artificial Sequence: Synthetic oligonucleotide
  misc_feature 1..20: note = Target: FXN; (+) strand; PAM type: NRG; PAM sequence: AAG
  source 1..20: mol_type = other DNA
tgagacaggaggattgcttg

SEQ ID NO: 21527 - DNA, 20 bp, synthetic construct
  misc_feature 1..20: note = Description of Artificial Sequence: Synthetic oligonucleotide
  misc_feature 1..20: note = Target: FXN; (+) strand; PAM type: NRG; PAM sequence: CAG
  source 1..20: mol_type = other DNA
acaggaggattgcttgaagc

SEQ ID NO: 21528 - DNA, 20 bp, synthetic construct
  misc_feature 1..20: note = Description of Artificial Sequence: Synthetic oligonucleotide
  misc_feature 1..20: note = Target: FXN; (+) strand; PAM type: NRG; PAM sequence: AGG
  source 1..20: mol_type = other DNA
caggaggattgcttgaagcc

SEQ ID NO: 21529 - DNA, 20 bp, synthetic construct
  misc_feature 1..20: note = Description of Artificial Sequence: Synthetic oligonucleotide
  misc_feature 1..20: note = Target: FXN; (+) strand; PAM type: NRG; PAM sequence: TGG
  source 1..20: mol_type = other DNA
gattgcttgaagccaggaat

SEQ ID NO: 21530 - DNA, 20 bp, synthetic construct
  misc_feature 1..20: note = Description of Artificial Sequence: Synthetic oligonucleotide
  misc_feature 1..20: note = Target: FXN; (+) strand; PAM type: NRG; PAM sequence: GAG
  source 1..20: mol_type = other DNA
ttgcttgaagccaggaattg

SEQ ID NO: 21531 - DNA, 20 bp, synthetic construct
  misc_feature 1..20: note = Description of Artificial Sequence: Synthetic oligonucleotide
  misc_feature 1..20: note = Target: FXN; (+) strand; PAM type: NRG; PAM sequence: CAG
  source 1..20: mol_type = other DNA
tgaagccaggaattggagat

SEQ ID NO: 21532 - DNA, 20 bp, synthetic construct
  misc_feature 1..20: note = Description of Artificial Sequence: Synthetic oligonucleotide
  misc_feature 1..20: note = Target: FXN; (+) strand; PAM type: NRG; PAM sequence: TGG
  source 1..20: mol_type = other DNA
ccaggaattggagatcagcc

SEQ ID NO: 21533 - DNA, 20 bp, synthetic construct
  misc_feature 1..20: note = Description of Artificial Sequence: Synthetic oligonucleotide
  misc_feature 1..20: note = Target: FXN; (+) strand; PAM type: NRG; PAM sequence: GGG
  source 1..20: mol_type = other DNA
caggaattggagatcagcct

SEQ ID NO: 21534 - DNA, 20 bp, synthetic construct
  misc_feature 1..20: note = Description of Artificial Sequence: Synthetic oligonucleotide
  misc_feature 1..20: note = Target: FXN; (+) strand; PAM type: NRG; PAM sequence: CAG
  source 1..20: mol_type = other DNA
ggagatcagcctgggcaaca

SEQ ID NO: 21535 - DNA, 20 bp, synthetic construct
  misc_feature 1..20: note = Description of Artificial Sequence: Synthetic oligonucleotide
  misc_feature 1..20: note = Target: FXN; (+) strand; PAM type: NRG; PAM sequence: AAG
  source 1..20: mol_type = other DNA
atcagcctgggcaacacagc

SEQ ID NO: 21536 - DNA, 20 bp, synthetic construct
  misc_feature 1..20: note = Description of Artificial Sequence: Synthetic oligonucleotide
  misc_feature 1..20: note = Target: FXN; (+) strand; PAM type: NRG; PAM sequence: AAG
  source 1..20: mol_type = other DNA
aagatcctatctcttaaaaa

SEQ ID NO: 21537 - DNA, 20 bp, synthetic construct
  misc_feature 1..20: note = Description of Artificial Sequence: Synthetic oligonucleotide
  misc_feature 1..20: note = Target: FXN; (+) strand; PAM type: NRG; PAM sequence: CAG
  source 1..20: mol_type = other DNA
aaaacctattaataataaaa

SEQ ID NO: 21538 - DNA, 20 bp, synthetic construct
  misc_feature 1..20: note = Description of Artificial Sequence: Synthetic oligonucleotide
  misc_feature 1..20: note = Target: FXN; (+) strand; PAM type: NRG; PAM sequence: AAG
  source 1..20: mol_type = other DNA
taataaaacagtataaacaa

SEQ ID NO: 21539 - DNA, 20 bp, synthetic construct
  misc_feature 1..20: note = Description of Artificial Sequence: Synthetic oligonucleotide
  misc_feature 1..20: note = Target: FXN; (+) strand; PAM type: NRG; PAM sequence: TAG
  source 1..20: mol_type = other DNA
cagtataaacaaaagctaaa

SEQ ID NO: 21540 - DNA, 20 bp, synthetic construct
  misc_feature 1..20: note = Description of Artificial Sequence: Synthetic oligonucleotide
  misc_feature 1..20: note = Target: FXN; (+) strand; PAM type: NRG; PAM sequence: AGG
  source 1..20: mol_type = other DNA
agtataaacaaaagctaaat

SEQ ID NO: 21541 - DNA, 20 bp, synthetic construct
  misc_feature 1..20: note = Description of Artificial Sequence: Synthetic oligonucleotide
  misc_feature 1..20: note = Target: FXN; (+) strand; PAM type: NRG; PAM sequence: GAG
  source 1..20: mol_type = other DNA
ctgaaataaaattatttttt

SEQ ID NO: 21542 - DNA, 20 bp, synthetic construct
  misc_feature 1..20: note = Description of Artificial Sequence: Synthetic oligonucleotide
  misc_feature 1..20: note = Target: FXN; (+) strand; PAM type: NRG; PAM sequence: TGG
  source 1..20: mol_type = other DNA
aaattattttttgagtctga

SEQ ID NO: 21543 - DNA, 20 bp, synthetic construct
  misc_feature 1..20: note = Description of Artificial Sequence: Synthetic oligonucleotide
  misc_feature 1..20: note = Target: FXN; (+) strand; PAM type: NRG; PAM sequence: AAG
  source 1..20: mol_type = other DNA
tgagtctgatggaaatgttt

SEQ ID NO: 21544 - DNA, 20 bp, synthetic construct
  misc_feature 1..20: note = Description of Artificial Sequence: Synthetic oligonucleotide
  misc_feature 1..20: note = Target: FXN; (+) strand; PAM type: NRG; PAM sequence: CAG
  source 1..20: mol_type = other DNA
ctgatggaaatgtttaagtg

SEQ ID NO: 21545 - DNA, 20 bp, synthetic construct
  misc_feature 1..20: note = Description of Artificial Sequence: Synthetic oligonucleotide
  misc_feature 1..20: note = Target: FXN; (+) strand; PAM type: NRG; PAM sequence: TAG
  source 1..20: mol_type = other DNA
atggaaatgtttaagtgcag

SEQ ID NO: 21546 - DNA, 20 bp, synthetic construct
  misc_feature 1..20: note = Description of Artificial Sequence: Synthetic oligonucleotide
  misc_feature 1..20: note = Target: FXN; (+) strand; PAM type: NRG; PAM sequence: AGG
  source 1..20: mol_type = other DNA
tggaaatgtttaagtgcagt

SEQ ID NO: 21547 - DNA, 20 bp, synthetic construct
  misc_feature 1..20: note = Description of Artificial Sequence: Synthetic oligonucleotide
  misc_feature 1..20: note = Target: FXN; (+) strand; PAM type: NRG; PAM sequence: CAG
  source 1..20: mol_type = other DNA
aatgtttaagtgcagtaggc

SEQ ID NO: 21548 - DNA, 20 bp, synthetic construct
  misc_feature 1..20: note = Description of Artificial Sequence: Synthetic oligonucleotide
  misc_feature 1..20: note = Target: FXN; (+) strand; PAM type: NRG; PAM sequence: CAG
  source 1..20: mol_type = other DNA
taagtgcagtaggccagtgc

SEQ ID NO: 21549 - DNA, 20 bp, synthetic construct
  misc_feature 1..20: note = Description of Artificial Sequence: Synthetic oligonucleotide
  misc_feature 1..20: note = Target: FXN; (+) strand; PAM type: NRG; PAM sequence: GAG
  source 1..20: mol_type = other DNA
tgcagtaggccagtgccagt

SEQ ID NO: 21550 - DNA, 20 bp, synthetic construct
  misc_feature 1..20: note = Description of Artificial Sequence: Synthetic oligonucleotide
  misc_feature 1..20: note = Target: FXN; (+) strand; PAM type: NRG; PAM sequence: AAG
  source 1..20: mol_type = other DNA
ttgcatcttgcttctactga

SEQ ID NO: 21551 - DNA, 20 bp, synthetic construct
  misc_feature 1..20: note = Description of Artificial Sequence: Synthetic oligonucleotide
  misc_feature 1..20: note = Target: FXN; (+) strand; PAM type: NRG; PAM sequence: CAG
  source 1..20: mol_type = other DNA
cttgcttctactgaaagttt

SEQ ID NO: 21552 - DNA, 20 bp, synthetic construct
  misc_feature 1..20: note = Description of Artificial Sequence: Synthetic oligonucleotide
  misc_feature 1..20: note = Target: FXN; (+) strand; PAM type: NRG; PAM sequence: TAG
  source 1..20: mol_type = other DNA
ttcagtgcaccccacttact

SEQ ID NO: 21553 - DNA, 20 bp, synthetic construct
  misc_feature 1..20: note = Description of Artificial Sequence: Synthetic oligonucleotide
  misc_feature 1..20: note = Target: FXN; (+) strand; PAM type: NRG; PAM sequence: CGG
  source 1..20: mol_type = other DNA
caccccacttacttagaact

SEQ ID NO: 21554 - DNA, 20 bp, synthetic construct
  misc_feature 1..20: note = Description of Artificial Sequence: Synthetic oligonucleotide
  misc_feature 1..20: note = Target: FXN; (+) strand; PAM type: NRG; PAM sequence: TGG
  source 1..20: mol_type = other DNA
acatgatgtactcctttatc

SEQ ID NO: 21555 - DNA, 20 bp, synthetic construct
  misc_feature 1..20: note = Description of Artificial Sequence: Synthetic oligonucleotide
  misc_feature 1..20: note = Target: FXN; (+) strand; PAM type: NRG; PAM sequence: GGG
  source 1..20: mol_type = other DNA
catgatgtactcctttatct

SEQ ID NO: 21556 - DNA, 20 bp, synthetic construct
  misc_feature 1..20: note = Description of Artificial Sequence: Synthetic oligonucleotide
  misc_feature 1..20: note = Target: FXN; (+) strand; PAM type: NRG; PAM sequence: CAG
  source 1..20: mol_type = other DNA
gtactcctttatctgggaca

SEQ ID NO: 21557 - DNA, 20 bp, synthetic construct
  misc_feature 1..20: note = Description of Artificial Sequence: Synthetic oligonucleotide
  misc_feature 1..20: note = Target: FXN; (+) strand; PAM type: NRG; PAM sequence: AAG
  source 1..20: mol_type = other DNA
ttatctgggacacagcacaa

SEQ ID NO: 21558 - DNA, 20 bp, synthetic construct
  misc_feature 1..20: note = Description of Artificial Sequence: Synthetic oligonucleotide
  misc_feature 1..20: note = Target: FXN; (+) strand; PAM type: NRG; PAM sequence: GAG
  source 1..20: mol_type = other DNA
atctgggacacagcacaaaa

SEQ ID NO: 21559 - DNA, 20 bp, synthetic construct
  misc_feature 1..20: note = Description of Artificial Sequence: Synthetic oligonucleotide
  misc_feature 1..20: note = Target: FXN; (+) strand; PAM type: NRG; PAM sequence: AGG
  source 1..20: mol_type = other DNA
tctgggacacagcacaaaag

SEQ ID NO: 21560 - DNA, 20 bp, synthetic construct
  misc_feature 1..20: note = Description of Artificial Sequence: Synthetic oligonucleotide
  misc_feature 1..20: note = Target: FXN; (+) strand; PAM type: NRG; PAM sequence: CAG
  source 1..20: mol_type = other DNA
cacagcacaaaagaggtatg

SEQ ID NO: 21561 - DNA, 20 bp, synthetic construct
  misc_feature 1..20: note = Description of Artificial Sequence: Synthetic oligonucleotide
  misc_feature 1..20: note = Target: FXN; (+) strand; PAM type: NRG; PAM sequence: TGG
  source 1..20: mol_type = other DNA
agcacaaaagaggtatgcag

SEQ ID NO: 21562 - DNA, 20 bp, synthetic construct
  misc_feature 1..20: note = Description of Artificial Sequence: Synthetic oligonucleotide
  misc_feature 1..20: note = Target: FXN; (+) strand; PAM type: NRG; PAM sequence: GGG
  source 1..20: mol_type = other DNA
gcacaaaagaggtatgcagt

SEQ ID NO: 21563 - DNA, 20 bp, synthetic construct
  misc_feature 1..20: note = Description of Artificial Sequence: Synthetic oligonucleotide
  misc_feature 1..20: note = Target: FXN; (+) strand; PAM type: NRG; PAM sequence: GGG
  source 1..20: mol_type = other DNA
cacaaaagaggtatgcagtg

SEQ ID NO: 21564 - DNA, 20 bp, synthetic construct
  misc_feature 1..20: note = Description of Artificial Sequence: Synthetic oligonucleotide
  misc_feature 1..20: note = Target: FXN; (+) strand; PAM type: NRG; PAM sequence: AAG
  source 1..20: mol_type = other DNA
gtggggctgctctgacatga

SEQ ID NO: 21565 - DNA, 20 bp, synthetic construct
  misc_feature 1..20: note = Description of Artificial Sequence: Synthetic oligonucleotide
  misc_feature 1..20: note = Target: FXN; (+) strand; PAM type: NRG; PAM sequence: TGG
  source 1..20: mol_type = other DNA
gggctgctctgacatgaaag

SEQ ID NO: 21566 - DNA, 20 bp, synthetic construct
  misc_feature 1..20: note = Description of Artificial Sequence: Synthetic oligonucleotide
  misc_feature 1..20: note = Target: FXN; (+) strand; PAM type: NRG; PAM sequence: AAG
  source 1..20: mol_type = other DNA
ctgctctgacatgaaagtgg

SEQ ID NO: 21567 - DNA, 20 bp, synthetic construct
  misc_feature 1..20: note = Description of Artificial Sequence: Synthetic oligonucleotide
  misc_feature 1..20: note = Target: FXN; (+) strand; PAM type: NRG; PAM sequence: AAG
  source 1..20: mol_type = other DNA
ctgacatgaaagtggaagtt

SEQ ID NO: 21568 - DNA, 20 bp, synthetic construct
  misc_feature 1..20: note = Description of Artificial Sequence: Synthetic oligonucleotide
  misc_feature 1..20: note = Target: FXN; (+) strand; PAM type: NRG; PAM sequence: AGG
  source 1..20: mol_type = other DNA
tgacatgaaagtggaagtta

SEQ ID NO: 21569 - DNA, 20 bp, synthetic construct
  misc_feature 1..20: note = Description of Artificial Sequence: Synthetic oligonucleotide
  misc_feature 1..20: note = Target: FXN; (+) strand; PAM type: NRG; PAM sequence: TGG
  source 1..20: mol_type = other DNA
aaagtggaagttaaggaatc

SEQ ID NO: 21570 - DNA, 20 bp, synthetic construct
  misc_feature 1..20: note = Description of Artificial Sequence: Synthetic oligonucleotide
  misc_feature 1..20: note = Target: FXN; (+) strand; PAM type: NRG; PAM sequence: GGG
  source 1..20: mol_type = other DNA
aagtggaagttaaggaatct

SEQ ID NO: 21571 - DNA, 20 bp, synthetic construct
  misc_feature 1..20: note = Description of Artificial Sequence: Synthetic oligonucleotide
  misc_feature 1..20: note = Target: FXN; (+) strand; PAM type: NRG; PAM sequence: TGG
  source 1..20: mol_type = other DNA
ttaaggaatctgggctctta

SEQ ID NO: 21572 - DNA, 20 bp, synthetic construct
  misc_feature 1..20: note = Description of Artificial Sequence: Synthetic oligonucleotide
  misc_feature 1..20: note = Target: FXN; (+) strand; PAM type: NRG; PAM sequence: GGG
  source 1..20: mol_type = other DNA
taaggaatctgggctcttat

SEQ ID NO: 21573 - DNA, 20 bp, synthetic construct
  misc_feature 1..20: note = Description of Artificial Sequence: Synthetic oligonucleotide
  misc_feature 1..20: note = Target: FXN; (+) strand; PAM type: NRG; PAM sequence: GGG
  source 1..20: mol_type = other DNA
aaggaatctgggctcttatg

SEQ ID NO: 21574 - DNA, 20 bp, synthetic construct
  misc_feature 1..20: note = Description of Artificial Sequence: Synthetic oligonucleotide
  misc_feature 1..20: note = Target: FXN; (+) strand; PAM type: NRG; PAM sequence: TGG
  source 1..20: mol_type = other DNA
gggctcttatggggtccttg

SEQ ID NO: 21575 - DNA, 20 bp, synthetic construct
  misc_feature 1..20: note = Description of Artificial Sequence: Synthetic oligonucleotide
  misc_feature 1..20: note = Target: FXN; (+) strand; PAM type: NRG; PAM sequence: GGG
  source 1..20: mol_type = other DNA
ggctcttatggggtccttgt

SEQ ID NO: 21576 - DNA, 20 bp, synthetic construct
  misc_feature 1..20: note = Description of Artificial Sequence: Synthetic oligonucleotide
  misc_feature 1..20: note = Target: FXN; (+) strand; PAM type: NRG; PAM sequence: CAG
  source 1..20: mol_type = other DNA
cttatggggtccttgtgggc

SEQ ID NO: 21577 - DNA, 20 bp, synthetic construct
  misc_feature 1..20: note = Description of Artificial Sequence: Synthetic oligonucleotide
  misc_feature 1..20: note = Target: FXN; (+) strand; PAM type: NRG; PAM sequence: CAG
  source 1..20: mol_type = other DNA
gtccttgtgggccagccctt

SEQ ID NO: 21578 - DNA, 20 bp, synthetic construct
  misc_feature 1..20: note = Description of Artificial Sequence: Synthetic oligonucleotide
  misc_feature 1..20: note = Target: FXN; (+) strand; PAM type: NRG; PAM sequence: AGG
  source 1..20: mol_type = other DNA
tccttgtgggccagcccttc

SEQ ID NO: 21579 - DNA, 20 bp, synthetic construct
  misc_feature 1..20: note = Description of Artificial Sequence: Synthetic oligonucleotide
  misc_feature 1..20: note = Target: FXN; (+) strand; PAM type: NRG; PAM sequence: TAG
  source 1..20: mol_type = other DNA
ttttactttcattttacata

SEQ ID NO: 21580 - DNA, 20 bp, synthetic construct
  misc_feature 1..20: note = Description of Artificial Sequence: Synthetic oligonucleotide
  misc_feature 1..20: note = Target: FXN; (+) strand; PAM type: NRG; PAM sequence: TGG
  source 1..20: mol_type = other DNA
attttacatatagctctaat

SEQ ID NO: 21581 - DNA, 20 bp, synthetic construct
  misc_feature 1..20: note = Description of Artificial Sequence: Synthetic oligonucleotide
  misc_feature 1..20: note = Target: FXN; (+) strand; PAM type: NRG; PAM sequence: AAG
  source 1..20: mol_type = other DNA
ggtttgattatctcgttccc

SEQ ID NO: 21582 - DNA, 20 bp, synthetic construct
  misc_feature 1..20: note = Description of Artificial Sequence: Synthetic oligonucleotide
  misc_feature 1..20: note = Target: FXN; (+) strand; PAM type: NRG; PAM sequence: AGG
  source 1..20: mol_type = other DNA
gtttgattatctcgttccca

SEQ ID NO: 21583 - DNA, 20 bp, synthetic construct
  misc_feature 1..20: note = Description of Artificial Sequence: Synthetic oligonucleotide
  misc_feature 1..20: note = Target: FXN; (+) strand; PAM type: NRG; PAM sequence: CAG
  source 1..20: mol_type = other DNA
tgattatctcgttcccaagg

SEQ ID NO: 21584 - DNA, 20 bp, synthetic construct
  misc_feature 1..20: note = Description of Artificial Sequence: Synthetic oligonucleotide
  misc_feature 1..20: note = Target: FXN; (+) strand; PAM type: NRG; PAM sequence: TGG
  source 1..20: mol_type = other DNA
ttatctcgttcccaaggcag

SEQ ID NO: 21585 - DNA, 20 bp, synthetic construct
  misc_feature 1..20: note = Description of Artificial Sequence: Synthetic oligonucleotide
  misc_feature 1..20: note = Target: FXN; (+) strand; PAM type: NRG; PAM sequence: GGG
  source 1..20: mol_type = other DNA
tatctcgttcccaaggcagt

SEQ ID NO: 21586 - DNA, 20 bp, synthetic construct
  misc_feature 1..20: note = Description of Artificial Sequence: Synthetic oligonucleotide
  misc_feature 1..20: note = Target: FXN; (+) strand; PAM type: NRG; PAM sequence: GAG
  source 1..20: mol_type = other DNA
tctcgttcccaaggcagtgg

SEQ ID NO: 21587 - DNA, 20 bp, synthetic construct
  misc_feature 1..20: note = Description of Artificial Sequence: Synthetic oligonucleotide
  misc_feature 1..20: note = Target: FXN; (+) strand; PAM type: NRG; PAM sequence: AAG
  source 1..20: mol_type = other DNA
gcagtgggagatccccattt

SEQ ID NO: 21588 - DNA, 20 bp, synthetic construct
  misc_feature 1..20: note = Description of Artificial Sequence: Synthetic oligonucleotide
  misc_feature 1..20: note = Target: FXN; (+) strand; PAM type: NRG; PAM sequence: AGG
  source 1..20: mol_type = other DNA
cagtgggagatccccattta

SEQ ID NO: 21589 - DNA, 20 bp, synthetic construct
  misc_feature 1..20: note = Description of Artificial Sequence: Synthetic oligonucleotide
  misc_feature 1..20: note = Target: FXN; (+) strand; PAM type: NRG; PAM sequence: AAG
  source 1..20: mol_type = other DNA
gggagatccccatttaagga

SEQ ID NO: 21590 - DNA, 20 bp, synthetic construct
  misc_feature 1..20: note = Description of Artificial Sequence: Synthetic oligonucleotide
  misc_feature 1..20: note = Target: FXN; (+) strand; PAM type: NRG; PAM sequence: AAG
  source 1..20: mol_type = other DNA
atccccatttaaggaaagaa

SEQ ID NO: 21591 - DNA, 20 bp, synthetic construct
  misc_feature 1..20: note = Description of Artificial Sequence: Synthetic oligonucleotide
  misc_feature 1..20: note = Target: FXN; (+) strand; PAM type: NRG; PAM sequence: AGG
  source 1..20: mol_type = other DNA
tccccatttaaggaaagaaa

SEQ ID NO: 21592 - DNA, 20 bp, synthetic construct
  misc_feature 1..20: note = Description of Artificial Sequence: Synthetic oligonucleotide
  misc_feature 1..20: note = Target: FXN; (+) strand; PAM type: NRG; PAM sequence: GGG
  source 1..20: mol_type = other DNA
ccccatttaaggaaagaaaa

SEQ ID NO: 21593 - DNA, 20 bp, synthetic construct
  misc_feature 1..20: note = Description of Artificial Sequence: Synthetic oligonucleotide
  misc_feature 1..20: note = Target: FXN; (+) strand; PAM type: NRG; PAM sequence: GGG
  source 1..20: mol_type = other DNA
cccatttaaggaaagaaaag

SEQ ID NO: 21594 - DNA, 20 bp, synthetic construct
  misc_feature 1..20: note = Description of Artificial Sequence: Synthetic oligonucleotide
  misc_feature 1..20: note = Target: FXN; (+) strand; PAM type: NRG; PAM sequence: TGG
  source 1..20: mol_type = other DNA
ttaaggaaagaaaaggggcc

SEQ ID NO: 21595 - DNA, 20 bp, synthetic construct
  misc_feature 1..20: note = Description of Artificial Sequence: Synthetic oligonucleotide
  misc_feature 1..20: note = Target: FXN; (+) strand; PAM type: NRG; PAM sequence: CAG
  source 1..20: mol_type = other DNA
gaaagaaaaggggcctggca

SEQ ID NO: 21596 - DNA, 20 bp, synthetic construct
  misc_feature 1..20: note = Description of Artificial Sequence: Synthetic oligonucleotide
  misc_feature 1..20: note = Target: FXN; (+) strand; PAM type: NRG; PAM sequence: TGG
  source 1..20: mol_type = other DNA
agaaaaggggcctggcacag

SEQ ID NO: 21597 - DNA, 20 bp, synthetic construct
  misc_feature 1..20: note = Description of Artificial Sequence: Synthetic oligonucleotide
  misc_feature 1..20: note = Target: FXN; (+) strand; PAM type: NRG; PAM sequence: CAG
  source 1..20: mol_type = other DNA
gtggctcatgcctgtaatcc

SEQ ID NO: 21598 - DNA, 20 bp, synthetic construct
  misc_feature 1..20: note = Description of Artificial Sequence: Synthetic oligonucleotide
  misc_feature 1..20: note = Target: FXN; (+) strand; PAM type: NRG; PAM sequence: TGG
  source 1..20: mol_type = other DNA
tgcctgtaatcccagcactt

SEQ ID NO: 21599 - DNA, 20 bp, synthetic construct
  misc_feature 1..20: note = Description of Artificial Sequence: Synthetic oligonucleotide
  misc_feature 1..20: note = Target: FXN; (+) strand; PAM type: NRG; PAM sequence: GGG
  source 1..20: mol_type = other DNA
gcctgtaatcccagcacttt

SEQ ID NO: 21600 - DNA, 20 bp, synthetic construct
  misc_feature 1..20: note = Description of Artificial Sequence: Synthetic oligonucleotide
  misc_feature 1..20: note = Target: FXN; (+) strand; PAM type: NRG; PAM sequence: GAG
  source 1..20: mol_type = other DNA
ctgtaatcccagcactttgg

SEQ ID NO: 21601 - DNA, 20 bp, synthetic construct
  misc_feature 1..20: note = Description of Artificial Sequence: Synthetic oligonucleotide
  misc_feature 1..20: note = Target: FXN; (+) strand; PAM type: NRG; PAM sequence: AGG
  source 1..20: mol_type = other DNA
tgtaatcccagcactttggg

SEQ ID NO: 21602 - DNA, 20 bp, synthetic construct
  misc_feature 1..20: note = Description of Artificial Sequence: Synthetic oligonucleotide
  misc_feature 1..20: note = Target: FXN; (+) strand; PAM type: NRG; PAM sequence: GAG
  source 1..20: mol_type = other DNA
tcccagcactttgggaggct

SEQ ID NO: 21603 - DNA, 20 bp, synthetic construct
  misc_feature 1..20: note = Description of Artificial Sequence: Synthetic oligonucleotide
  misc_feature 1..20: note = Target: FXN; (+) strand; PAM type: NRG; PAM sequence: AGG
  source 1..20: mol_type = other DNA
cccagcactttgggaggctg

SEQ ID NO: 21604 - DNA, 20 bp, synthetic construct
  misc_feature 1..20: note = Description of Artificial Sequence: Synthetic oligonucleotide
  misc_feature 1..20: note = Target: FXN; (+) strand; PAM type: NRG; PAM sequence: AAG
  source 1..20: mol_type = other DNA
gcactttgggaggctgaggc

SEQ ID NO: 21605 - DNA, 20 bp, synthetic construct
  misc_feature 1..20: note = Description of Artificial Sequence: Synthetic oligonucleotide
  misc_feature 1..20: note = Target: FXN; (+) strand; PAM type: NRG; PAM sequence: GAG
  source 1..20: mol_type = other DNA
ctgaggcaagtgtatcacct

SEQ ID NO: 21606 - DNA, 20 bp, synthetic construct
  misc_feature 1..20: note = Description of Artificial Sequence: Synthetic oligonucleotide
  misc_feature 1..20: note = Target: FXN; (+) strand; PAM type: NRG; PAM sequence: AGG
  source 1..20: mol_type = other DNA
tgaggcaagtgtatcacctg

SEQ ID NO: 21607 - DNA, 20 bp, synthetic construct
  misc_feature 1..20: note = Description of Artificial Sequence: Synthetic oligonucleotide
  misc_feature 1..20: note = Target: FXN; (+) strand; PAM type: NRG; PAM sequence: CAG
  source 1..20: mol_type = other DNA
gcaagtgtatcacctgaggt

SEQ ID NO: 21608 - DNA, 20 bp, synthetic construct
  misc_feature 1..20: note = Description of Artificial Sequence: Synthetic oligonucleotide
  misc_feature 1..20: note = Target: FXN; (+) strand; PAM type: NRG; PAM sequence: AGG
  source 1..20: mol_type = other DNA
caagtgtatcacctgaggtc

SEQ ID NO: 21609 - DNA, 20 bp, synthetic construct
  misc_feature 1..20: note = Description of Artificial Sequence: Synthetic oligonucleotide
  misc_feature 1..20: note = Target: FXN; (+) strand; PAM type: NRG; PAM sequence: GAG
  source 1..20: mol_type = other DNA
agtgtatcacctgaggtcag

SEQ ID NO: 21610 - DNA, 20 bp, synthetic construct
  misc_feature 1..20: note = Description of Artificial Sequence: Synthetic oligonucleotide
  misc_feature 1..20: note = Target: FXN; (+) strand; PAM type: NRG; PAM sequence: AAG
  source 1..20: mol_type = other DNA
tcacctgaggtcaggagttc

SEQ ID NO: 21611 - DNA, 20 bp, synthetic construct
  misc_feature 1..20: note = Description of Artificial Sequence: Synthetic oligonucleotide
  misc_feature 1..20: note = Target: FXN; (+) strand; PAM type: NRG; PAM sequence: CAG
  source 1..20: mol_type = other DNA
tgaggtcaggagttcaagac

SEQ ID NO: 21612 - DNA, 20 bp, synthetic construct
  misc_feature 1..20: note = Description of Artificial Sequence: Synthetic oligonucleotide
  misc_feature 1..20: note = Target: FXN; (+) strand; PAM type: NRG; PAM sequence: TGG
  source 1..20: mol_type = other DNA
tcaggagttcaagaccagcc

SEQ ID NO: 21613 - DNA, 20 bp, synthetic construct
  misc_feature 1..20: note = Description of Artificial Sequence: Synthetic oligonucleotide
  misc_feature 1..20: note = Target: FXN; (+) strand; PAM type: NRG; PAM sequence: TGG
  source 1..20: mol_type = other DNA
caagaccagcctggccaaca

SEQ ID NO: 21614 - DNA, 20 bp, synthetic construct
  misc_feature 1..20: note = Description of Artificial Sequence: Synthetic oligonucleotide
  misc_feature 1..20: note = Target: FXN; (+) strand; PAM type: NRG; PAM sequence: TGG
  source 1..20: mol_type = other DNA
tactaaaaatattaaaaaat

SEQ ID NO: 21615 - DNA, 20 bp, synthetic construct
  misc_feature 1..20: note = Description of Artificial Sequence: Synthetic oligonucleotide
  misc_feature 1..20: note = Target: FXN; (+) strand; PAM type: NRG; PAM sequence: TGG
  source 1..20: mol_type = other DNA
aaaaatattaaaaaattggc

SEQ ID NO: 21616 - DNA, 20 bp, synthetic construct
  misc_feature 1..20: note = Description of Artificial Sequence: Synthetic oligonucleotide
  misc_feature 1..20: note = Target: FXN; (+) strand; PAM type: NRG; PAM sequence: GGG
  source 1..20: mol_type = other DNA
aaaatattaaaaaattggct

SEQ ID NO: 21617 - DNA, 20 bp, synthetic construct
  misc_feature 1..20: note = Description of Artificial Sequence: Synthetic oligonucleotide
  misc_feature 1..20: note = Target: FXN; (+) strand; PAM type: NRG; PAM sequence: TGG
  source 1..20: mol_type = other DNA
attaaaaaattggctgggcg

SEQ ID NO: 21618 - DNA, 20 bp, synthetic construct
  misc_feature 1..20: note = Description of Artificial Sequence: Synthetic oligonucleotide
  misc_feature 1..20: note = Target: FXN; (+) strand; PAM type: NRG; PAM sequence: TGG
  source 1..20: mol_type = other DNA
aaaaaattggctgggcgtgg

SEQ ID NO: 21619 - DNA, 20 bp, synthetic construct
  misc_feature 1..20: note = Description of Artificial Sequence: Synthetic oligonucleotide
  misc_feature 1..20: note = Target: FXN; (+) strand; PAM type: NRG; PAM sequence: CAG
  source 1..20: mol_type = other DNA
gtggttcgtgcctataattt

SEQ ID NO: 21620 - DNA, 20 bp, synthetic construct
  misc_feature 1..20: note = Description of Artificial Sequence: Synthetic oligonucleotide
  misc_feature 1..20: note = Target: FXN; (+) strand; PAM type: NRG; PAM sequence: CAG
  source 1..20: mol_type = other DNA
tgcctataatttcagctact

SEQ ID NO: 21621 - DNA, 20 bp, synthetic construct
  misc_feature 1..20: note = Description of Artificial Sequence: Synthetic oligonucleotide
  misc_feature 1..20: note = Target: FXN; (+) strand; PAM type: NRG; PAM sequence: AGG
  source 1..20: mol_type = other DNA
gcctataatttcagctactc

SEQ ID NO: 21622 - DNA, 20 bp, synthetic construct
  misc_feature 1..20: note = Description of Artificial Sequence: Synthetic oligonucleotide
  misc_feature 1..20: note = Target: FXN; (+) strand; PAM type: NRG; PAM sequence: GAG
  source 1..20: mol_type = other DNA
ctataatttcagctactcag

SEQ ID NO: 21623 - DNA, 20 bp, synthetic construct
  misc_feature 1..20: note = Description of Artificial Sequence: Synthetic oligonucleotide
  misc_feature 1..20: note = Target: FXN; (+) strand; PAM type: NRG; PAM sequence: AGG
  source 1..20: mol_type = other DNA
tataatttcagctactcagg

SEQ ID NO: 21624 - DNA, 20 bp, synthetic construct
  misc_feature 1..20: note = Description of Artificial Sequence: Synthetic oligonucleotide
  misc_feature 1..20: note = Target: FXN; (+) strand; PAM type: NRG; PAM sequence: GAG
  source 1..20: mol_type = other DNA
tttcagctactcaggaggct

SEQ ID NO: 21625 - DNA, 20 bp, synthetic construct
  misc_feature 1..20: note = Description of Artificial Sequence: Synthetic oligonucleotide
  misc_feature 1..20: note = Target: FXN; (+) strand; PAM type: NRG; PAM sequence: AGG
  source 1..20: mol_type = other DNA
ttcagctactcaggaggctg

SEQ ID NO: 21626 - DNA, 20 bp, synthetic construct
  misc_feature 1..20: note = Description of Artificial Sequence: Synthetic oligonucleotide
  misc_feature 1..20: note = Target: FXN; (+) strand; PAM type: NRG; PAM sequence: CAG
  source 1..20: mol_type = other DNA
agctactcaggaggctgagg

SEQ ID NO: 21627 - DNA, 20 bp, synthetic construct
  misc_feature 1..20: note = Description of Artificial Sequence: Synthetic oligonucleotide
  misc_feature 1..20: note = Target: FXN; (+) strand; PAM type: NRG; PAM sequence: AGG
  source 1..20: mol_type = other DNA
gctactcaggaggctgaggc

SEQ ID NO: 21628 - DNA, 20 bp, synthetic construct
  misc_feature 1..20: note = Description of Artificial Sequence: Synthetic oligonucleotide
  misc_feature 1..20: note = Target: FXN; (+) strand; PAM type: NRG; PAM sequence: GAG
  source 1..20: mol_type = other DNA
tactcaggaggctgaggcag

SEQ ID NO: 21629 - DNA, 20 bp, synthetic construct
  misc_feature 1..20: note = Description of Artificial Sequence: Synthetic oligonucleotide
  misc_feature 1..20: note = Target: FXN; (+) strand; PAM type: NRG; PAM sequence: TGG
  source 1..20: mol_type = other DNA
gcaggagaatcgctgtaacc

SEQ ID NO: 21630 - DNA, 20 bp, synthetic construct
  misc_feature 1..20: note = Description of Artificial Sequence: Synthetic oligonucleotide
  misc_feature 1..20: note = Target: FXN; (+) strand; PAM type: NRG; PAM sequence: GGG
  source 1..20: mol_type = other DNA
caggagaatcgctgtaacct

SEQ ID NO: 21631 - DNA, 20 bp, synthetic construct
  misc_feature 1..20: note = Description of Artificial Sequence: Synthetic oligonucleotide
  misc_feature 1..20: note = Target: FXN; (+) strand; PAM type: NRG; PAM sequence: GGG
  source 1..20: mol_type = other DNA
aggagaatcgctgtaacctg

SEQ ID NO: 21632 - DNA, 20 bp, synthetic construct
  misc_feature 1..20: note = Description of Artificial Sequence: Synthetic oligonucleotide
  misc_feature 1..20: note = Target: FXN; (+) strand; PAM type: NRG; PAM sequence: GGG
  source 1..20: mol_type = other DNA
ggagaatcgctgtaacctgg

SEQ ID NO: 21633 - DNA, 20 bp, synthetic construct
  misc_feature 1..20: note = Description of Artificial Sequence: Synthetic oligonucleotide
  misc_feature 1..20: note = Target: FXN; (+) strand; PAM type: NRG; PAM sequence: GGG
  source 1..20: mol_type = other DNA
gagaatcgctgtaacctggg

SEQ ID NO: 21634 - DNA, 20 bp, synthetic construct
  misc_feature 1..20: note = Description of Artificial Sequence: Synthetic oligonucleotide
  misc_feature 1..20: note = Target: FXN; (+) strand; PAM type: NRG; PAM sequence: TGG
  source 1..20: mol_type = other DNA
aatcgctgtaacctgggggg

SEQ ID NO: 21635 - DNA, 20 bp, synthetic construct
  misc_feature 1..20: note = Description of Artificial Sequence: Synthetic oligonucleotide
  misc_feature 1..20: note = Target: FXN; (+) strand; PAM type: NRG; PAM sequence: GAG
  source 1..20: mol_type = other DNA
tcgctgtaacctggggggtg

SEQ ID NO: 21636 - DNA, 20 bp, synthetic construct
  misc_feature 1..20: note = Description of Artificial Sequence: Synthetic oligonucleotide
  misc_feature 1..20: note = Target: FXN; (+) strand; PAM type: NRG; PAM sequence: AGG
  source 1..20: mol_type = other DNA
cgctgtaacctggggggtgg

SEQ ID NO: 21637 - DNA, 20 bp, synthetic construct
  misc_feature 1..20: note = Description of Artificial Sequence: Synthetic oligonucleotide
  misc_feature 1..20: note = Target: FXN; (+) strand; PAM type: NRG; PAM sequence: CAG
  source 1..20: mol_type = other DNA
aacctggggggtggaggttg

SEQ ID NO: 21638 - DNA, 20 bp, synthetic construct
  misc_feature 1..20: note = Description of Artificial Sequence: Synthetic oligonucleotide
  misc_feature 1..20: note = Target: FXN; (+) strand; PAM type: NRG; PAM sequence: GAG
  source 1..20: mol_type = other DNA
tggggggtggaggttgcagt

SEQ ID NO: 21639 - DNA, 20 bp, synthetic construct
  misc_feature 1..20: note = Description of Artificial Sequence: Synthetic oligonucleotide
  misc_feature 1..20: note = Target: FXN; (+) strand; PAM type: NRG; PAM sequence: GAG
  source 1..20: mol_type = other DNA
ggtggaggttgcagtgagac

SEQ ID NO: 21640 - DNA, 20 bp, synthetic construct
  misc_feature 1..20: note = Description of Artificial Sequence: Synthetic oligonucleotide
  misc_feature 1..20: note = Target: FXN; (+) strand; PAM type: NRG; PAM sequence: CAG
  source 1..20: mol_type = other DNA
gagatcatgccacttcactc

SEQ ID NO: 21641 - DNA, 20 bp, synthetic construct
  misc_feature 1..20: note = Description of Artificial Sequence: Synthetic oligonucleotide
  misc_feature 1..20: note = Target: FXN; (+) strand; PAM type: NRG; PAM sequence: TGG
  source 1..20: mol_type = other DNA
catgccacttcactccagcc

SEQ ID NO: 21642 - DNA, 20 bp, synthetic construct
  misc_feature 1..20: note = Description of Artificial Sequence: Synthetic oligonucleotide
  misc_feature 1..20: note = Target: FXN; (+) strand; PAM type: NRG; PAM sequence: CAG
  source 1..20: mol_type = other DNA
cttcactccagcctggccaa

SEQ ID NO: 21643 - DNA, 20 bp, synthetic construct
  misc_feature 1..20: note = Description of Artificial Sequence: Synthetic oligonucleotide
  misc_feature 1..20: note = Target: FXN; (+) strand; PAM type: NRG; PAM sequence: GAG
  source 1..20: mol_type = other DNA
tcactccagcctggccaaca

SEQ ID NO: 21644 - DNA, 20 bp, synthetic construct
  misc_feature 1..20: note = Description of Artificial Sequence: Synthetic oligonucleotide
  misc_feature 1..20: note = Target: FXN; (+) strand; PAM type: NRG; PAM sequence: AAG
  source 1..20: mol_type = other DNA
aataaataaataaataaata

SEQ ID NO: 21645 - DNA, 20 bp, synthetic construct
  misc_feature 1..20: note = Description of Artificial Sequence: Synthetic oligonucleotide
  misc_feature 1..20: note = Target: FXN; (+) strand; PAM type: NRG; PAM sequence: AGG
  source 1..20: mol_type = other DNA
ataaataaataaataaataa

SEQ ID NO: 21646 - DNA, 20 bp, synthetic construct
  misc_feature 1..20: note = Description of Artificial Sequence: Synthetic oligonucleotide
  misc_feature 1..20: note = Target: FXN; (+) strand; PAM type: NRG; PAM sequence: GGG
  source 1..20: mol_type = other DNA
taaataaataaataaataaa

SEQ ID NO: 21647 - DNA, 20 bp, synthetic construct
  misc_feature 1..20: note = Description of Artificial Sequence: Synthetic oligonucleotide
  misc_feature 1..20: note = Target: FXN; (+) strand; PAM type: NRG; PAM sequence: CAG
  source 1..20: mol_type = other DNA
agggacttcaaacacatgaa

SEQ ID NO: 21648 - DNA, 20 bp, synthetic construct
  misc_feature 1..20: note = Description of Artificial Sequence: Synthetic oligonucleotide
  misc_feature 1..20: note = Target: FXN; (+) strand; PAM type: NRG; PAM sequence: CAG
  source 1..20: mol_type = other DNA
gacttcaaacacatgaacag

SEQ ID NO: 21649 - DNA, 20 bp, synthetic construct
  misc_feature 1..20: note = Description of Artificial Sequence: Synthetic oligonucleotide
  misc_feature 1..20: note = Target: FXN; (+) strand; PAM type: NRG; PAM sequence: CAG
  source 1..20: mol_type = other DNA
tcaaacacatgaacagcagc

SEQ ID NO: 21650 - DNA, 20 bp, synthetic construct
  misc_feature 1..20: note = Description of Artificial Sequence: Synthetic oligonucleotide
  misc_feature 1..20: note = Target: FXN; (+) strand; PAM type: NRG; PAM sequence: AGG
  source 1..20: mol_type = other DNA
caaacacatgaacagcagcc

SEQ ID NO: 21651 - DNA, 20 bp, synthetic construct
  misc_feature 1..20: note = Description of Artificial Sequence: Synthetic oligonucleotide
  misc_feature 1..20: note = Target: FXN; (+) strand; PAM type: NRG; PAM sequence: GGG
  source 1..20: mol_type = other DNA
aaacacatgaacagcagcca

SEQ ID NO: 21652 - DNA, 20 bp, synthetic construct
  misc_feature 1..20: note = Description of Artificial Sequence: Synthetic oligonucleotide
  misc_feature 1..20: note = Target: FXN; (+) strand; PAM type: NRG; PAM sequence: GGG
  source 1..20: mol_type = other DNA
aacacatgaacagcagccag

SEQ ID NO: 21653 - DNA, 20 bp, synthetic construct
  misc_feature 1..20: note = Description of Artificial Sequence: Synthetic oligonucleotide
  misc_feature 1..20: note = Target: FXN; (+) strand; PAM type: NRG; PAM sequence: AAG
  source 1..20: mol_type = other DNA
acatgaacagcagccagggg

SEQ ID NO: 21654 - DNA, 20 bp, synthetic construct
  misc_feature 1..20: note = Description of Artificial Sequence: Synthetic oligonucleotide
  misc_feature 1..20: note = Target: FXN; (+) strand; PAM type: NRG; PAM sequence: AAG
  source 1..20: mol_type = other DNA
aatcaaaatcatattctgtc

SEQ ID NO: 21655 - DNA, 20 bp, synthetic construct
  misc_feature 1..20: note = Description of Artificial Sequence: Synthetic oligonucleotide
  misc_feature 1..20: note = Target: FXN; (+) strand; PAM type: NRG; PAM sequence: TGG
  source 1..20: mol_type = other DNA
tcatattctgtcaagcaaac

SEQ ID NO: 21656 - DNA, 20 bp, synthetic construct
  misc_feature 1..20: note = Description of Artificial Sequence: Synthetic oligonucleotide
  misc_feature 1..20: note = Target: FXN; (+) strand; PAM type: NRG; PAM sequence: AAG
  source 1..20: mol_type = other DNA
ttctgtcaagcaaactggaa

SEQ ID NO: 21657 - DNA, 20 bp, synthetic construct
  misc_feature 1..20: note = Description of Artificial Sequence: Synthetic oligonucleotide
  misc_feature 1..20: note = Target: FXN; (+) strand; PAM type: NRG; PAM sequence: TAG
  source 1..20: mol_type = other DNA
agtaccactgtgtgtaccaa

SEQ ID NO: 21658 - DNA, 20 bp, synthetic construct
  misc_feature 1..20: note = Description of Artificial Sequence: Synthetic oligonucleotide
  misc_feature 1..20: note = Target: FXN; (+) strand; PAM type: NRG; PAM sequence: CAG
  source 1..20: mol_type = other DNA
taccaatagcctccccacca

SEQ ID NO: 21659 - DNA, 20 bp, synthetic construct
  misc_feature 1..20: note = Description of Artificial Sequence: Synthetic oligonucleotide
  misc_feature 1..20: note = Target: FXN; (+) strand; PAM type: NRG; PAM sequence: TGG
  source 1..20: mol_type = other DNA
agcctccccaccacagaccc

SEQ ID NO: 21660 - DNA, 20 bp, synthetic construct
  misc_feature 1..20: note = Description of Artificial Sequence: Synthetic oligonucleotide
  misc_feature 1..20: note = Target: FXN; (+) strand; PAM type: NRG; PAM sequence: GGG
  source 1..20: mol_type = other DNA
gcctccccaccacagaccct

SEQ ID NO: 21661 - DNA, 20 bp, synthetic construct
  misc_feature 1..20: note = Description of Artificial Sequence: Synthetic oligonucleotide
  misc_feature 1..20: note = Target: FXN; (+) strand; PAM type: NRG; PAM sequence: GAG
  source 1..20: mol_type = other DNA
ctccccaccacagaccctgg

SEQ ID NO: 21662 - DNA, 20 bp, synthetic construct
  misc_feature 1..20: note = Description of Artificial Sequence: Synthetic oligonucleotide
  misc_feature 1..20: note = Target: FXN; (+) strand; PAM type: NRG; PAM sequence: TGG
  source 1..20: mol_type = other DNA
tgggagcatcgcctcattta

SEQ ID NO: 21663 - DNA, 20 bp, synthetic construct
  misc_feature 1..20: note = Description of Artificial Sequence: Synthetic oligonucleotide
  misc_feature 1..20: note = Target: FXN; (+) strand; PAM type: NRG; PAM sequence: TGG
  source 1..20: mol_type = other DNA
gcatcgcctcatttatggtg

SEQ ID NO: 21664 - DNA, 20 bp, synthetic construct
  misc_feature 1..20: note = Description of Artificial Sequence: Synthetic oligonucleotide
  misc_feature 1..20: note = Target: FXN; (+) strand; PAM type: NRG; PAM sequence: CAG
  source 1..20: mol_type = other DNA
gcctcatttatggtgtggtc

SEQ ID NO: 21665 - DNA, 20 bp, synthetic construct
  misc_feature 1..20: note = Description of Artificial Sequence: Synthetic oligonucleotide
  misc_feature 1..20: note = Target: FXN; (+) strand; PAM type: NRG; PAM sequence: AAG
  source 1..20: mol_type = other DNA
gtggtccagtcatccatgtg

SEQ ID NO: 21666 - DNA, 20 bp, synthetic construct
  misc_feature 1..20: note = Description of Artificial Sequence: Synthetic oligonucleotide
  misc_feature 1..20: note = Target: FXN; (+) strand; PAM type: NRG; PAM sequence: AGG
  source 1..20: mol_type = other DNA
tggtccagtcatccatgtga

SEQ ID NO: 21667 - DNA, 20 bp, synthetic construct
  misc_feature 1..20: note = Description of Artificial Sequence: Synthetic oligonucleotide
  misc_feature 1..20: note = Target: FXN; (+) strand; PAM type: NRG; PAM sequence: GAG
  source 1..20: mol_type = other DNA
cagtcatccatgtgaaggat

SEQ ID NO: 21668 - DNA, 20 bp, synthetic construct
  misc_feature 1..20: note = Description of Artificial Sequence: Synthetic oligonucleotide
  misc_feature 1..20: note = Target: FXN; (+) strand; PAM type: NRG; PAM sequence: CAG
  source 1..20: mol_type = other DNA
ccatgtgaaggatgagtttc

SEQ ID NO: 21669 - DNA, 20 bp, synthetic construct
  misc_feature 1..20: note = Description of Artificial Sequence: Synthetic oligonucleotide
  misc_feature 1..20: note = Target: FXN; (+) strand; PAM type: NRG; PAM sequence: AGG
  source 1..20: mol_type = other DNA
catgtgaaggatgagtttcc

SEQ ID NO: 21670 - DNA, 20 bp, synthetic construct
  misc_feature 1..20: note = Description of Artificial Sequence: Synthetic oligonucleotide
  misc_feature 1..20: note = Target: FXN; (+) strand; PAM type: NRG; PAM sequence: AAG
  source 1..20: mol_type = other DNA
gaaggatgagtttccaggaa

SEQ ID NO: 21671 - DNA, 20 bp, synthetic construct
  misc_feature 1..20: note = Description of Artificial Sequence: Synthetic oligonucleotide
  misc_feature 1..20: note = Target: FXN; (+) strand; PAM type: NRG; PAM sequence: AGG
  source 1..20: mol_type = other DNA
aaggatgagtttccaggaaa

SEQ ID NO: 21672 - DNA, 20 bp, synthetic construct
  misc_feature 1..20: note = Description of Artificial Sequence: Synthetic oligonucleotide
  misc_feature 1..20: note = Target: FXN; (+) strand; PAM type: NRG; PAM sequence: TGG
  source 1..20: mol_type = other DNA
aaatattcactgtaacatac

SEQ ID NO: 21673 - DNA, 20 bp, synthetic construct
  misc_feature 1..20: note = Description of Artificial Sequence: Synthetic oligonucleotide
  misc_feature 1..20: note = Target: FXN; (+) strand; PAM type: NRG; PAM sequence: GAG
  source 1..20: mol_type = other DNA
atattcactgtaacatactg

SEQ ID NO: 21674 - DNA, 20 bp, synthetic construct
  misc_feature 1..20: note = Description of Artificial Sequence: Synthetic oligonucleotide
  misc_feature 1..20: note = Target: FXN; (+) strand; PAM type: NRG; PAM sequence: AGG
  source 1..20: mol_type = other DNA
tattcactgtaacatactgg

SEQ ID NO: 21675 - DNA, 20 bp, synthetic construct
  misc_feature 1..20: note = Description of Artificial Sequence: Synthetic oligonucleotide
  misc_feature 1..20: note = Target: FXN; (+) strand; PAM type: NRG; PAM sequence: GAG
  source 1..20: mol_type = other DNA
ttcactgtaacatactggag

SEQ ID NO: 21676 - DNA, 20 bp, synthetic construct
  misc_feature 1..20: note = Description of Artificial Sequence: Synthetic oligonucleotide
  misc_feature 1..20: note = Target: FXN; (+) strand; PAM type: NRG; PAM sequence: AGG
  source 1..20: mol_type = other DNA
tcactgtaacatactggagg

SEQ ID NO: 21677 - DNA, 20 bp, synthetic construct
  misc_feature 1..20: note = Description of Artificial Sequence: Synthetic oligonucleotide
  misc_feature 1..20: note = Target: FXN; (+) strand; PAM type: NRG; PAM sequence: GAG
  source 1..20: mol_type = other DNA
tgtaacatactggaggaggt

SEQ ID NO: 21678 - DNA, 20 bp, synthetic construct
  misc_feature 1..20: note = Description of Artificial Sequence: Synthetic oligonucleotide
  misc_feature 1..20: note = Target: FXN; (+) strand; PAM type: NRG; PAM sequence: AGG
  source 1..20: mol_type = other DNA
gtaacatactggaggaggtg

SEQ ID NO: 21679 - DNA, 20 bp, synthetic construct
  misc_feature 1..20: note = Description of Artificial Sequence: Synthetic oligonucleotide
  misc_feature 1..20: note = Target: FXN; (+) strand; PAM type: NRG; PAM sequence: TAG
  source 1..20: mol_type = other DNA
ggaattgcataatacaatct

SEQ ID NO: 21680 - DNA, 20 bp, synthetic construct
  misc_feature 1..20: note = Description of Artificial Sequence: Synthetic oligonucleotide
  misc_feature 1..20: note = Target: FXN; (+) strand; PAM type: NRG; PAM sequence: GAG
  source 1..20: mol_type = other DNA
ttttcccctttctatttttt

SEQ ID NO: 21681 - DNA, 20 bp, synthetic construct
  misc_feature 1..20: note = Description of Artificial Sequence: Synthetic oligonucleotide
  misc_feature 1..20: note = Target: FXN; (+) strand; PAM type: NRG; PAM sequence: CAG
  source 1..20: mol_type = other DNA
cccctttctattttttgaga

SEQ ID NO: 21682 - DNA, 20 bp, synthetic construct
  misc_feature 1..20: note = Description of Artificial Sequence: Synthetic oligonucleotide
  misc_feature 1..20: note = Target: FXN; (+) strand; PAM type: NRG; PAM sequence: AGG
  source 1..20: mol_type = other DNA
ccctttctattttttgagac

SEQ ID NO: 21683 - DNA, 20 bp, synthetic construct
  misc_feature 1..20: note = Description of Artificial Sequence: Synthetic oligonucleotide
  misc_feature 1..20: note = Target: FXN; (+) strand; PAM type: NRG; PAM sequence: TGG
  source 1..20: mol_type = other DNA
tttgagacaggatctcactt

SEQ ID NO: 21684 - DNA, 20 bp, synthetic construct
  misc_feature 1..20: note = Description of Artificial Sequence: Synthetic oligonucleotide
  misc_feature 1..20: note = Target: FXN; (+) strand; PAM type: NRG; PAM sequence: CAG
  source 1..20: mol_type = other DNA
caggatctcactttggcact

SEQ ID NO: 21685 - DNA, 20 bp, synthetic construct
  misc_feature 1..20: note = Description of Artificial Sequence: Synthetic oligonucleotide
  misc_feature 1..20: note = Target: FXN; (+) strand; PAM type: NRG; PAM sequence: AGG
  source 1..20: mol_type = other DNA
aggatctcactttggcactc

SEQ ID NO: 21686 - DNA, 20 bp, synthetic construct
  misc_feature 1..20: note = Description of Artificial Sequence: Synthetic oligonucleotide
  misc_feature 1..20: note = Target: FXN; (+) strand; PAM type: NRG; PAM sequence: TGG
  source 1..20: mol_type = other DNA
tctcactttggcactcaggc

SEQ ID NO: 21687 - DNA, 20 bp, synthetic construct
  misc_feature 1..20: note = Description of Artificial Sequence: Synthetic oligonucleotide
  misc_feature 1..20: note = Target: FXN; (+) strand; PAM type: NRG; PAM sequence: GAG
  source 1..20: mol_type = other DNA
tcactttggcactcaggctg

SEQ ID NO: 21688 - DNA, 20 bp, synthetic construct
  misc_feature 1..20: note = Description of Artificial Sequence: Synthetic oligonucleotide
  misc_feature 1..20: note = Target: FXN; (+) strand; PAM type: NRG; PAM sequence: AGG
  source 1..20: mol_type = other DNA
cactttggcactcaggctgg

SEQ ID NO: 21689 - DNA, 20 bp, synthetic construct
  misc_feature 1..20: note = Description of Artificial Sequence: Synthetic oligonucleotide
  misc_feature 1..20: note = Target: FXN; (+) strand; PAM type: NRG; PAM sequence: CAG
  source 1..20: mol_type = other DNA
ttggcactcaggctggagga

SEQ ID NO: 21690 - DNA, 20 bp, synthetic construct
  misc_feature 1..20: note = Description of Artificial Sequence: Synthetic oligonucleotide
  misc_feature 1..20: note = Target: FXN; (+) strand; PAM type: NRG; PAM sequence: TGG
  source 1..20: mol_type = other DNA
gcactcaggctggaggacag

SEQ ID NO: 21691 - DNA, 20 bp, synthetic construct
  misc_feature 1..20: note = Description of Artificial Sequence: Synthetic oligonucleotide
  misc_feature 1..20: note = Target: FXN; (+) strand; PAM type: NRG; PAM sequence: AAG
  source 1..20: mol_type = other DNA
ggaggacagtggtacaatca

SEQ ID NO: 21692 - DNA, 20 bp, synthetic construct
  misc_feature 1..20: note = Description of Artificial Sequence: Synthetic oligonucleotide
  misc_feature 1..20: note = Target: FXN; (+) strand; PAM type: NRG; PAM sequence: TGG
  source 1..20: mol_type = other DNA
agtggtacaatcaaagctca

SEQ ID NO: 21693 - DNA, 20 bp, synthetic construct
  misc_feature 1..20: note = Description of Artificial Sequence: Synthetic oligonucleotide
  misc_feature 1..20: note = Target: FXN; (+) strand; PAM type: NRG; PAM sequence: CAG
  source 1..20: mol_type = other DNA
ggtacaatcaaagctcatgg

SEQ ID NO: 21694 - DNA, 20 bp, synthetic construct
  misc_feature 1..20: note = Description of Artificial Sequence: Synthetic oligonucleotide
  misc_feature 1..20: note = Target: FXN; (+) strand; PAM type: NRG; PAM sequence: TGG
  source 1..20: mol_type = other DNA
catggcagcctcgacctccc

SEQ ID NO: 21695 - DNA, 20 bp, synthetic construct
  misc_feature 1..20: note = Description of Artificial Sequence: Synthetic oligonucleotide
  misc_feature 1..20: note = Target: FXN; (+) strand; PAM type: NRG; PAM sequence: GGG
  source 1..20: mol_type = other DNA
atggcagcctcgacctccct

SEQ ID NO: 21696 - DNA, 20 bp, synthetic construct
  misc_feature 1..20: note = Description of Artificial Sequence: Synthetic oligonucleotide
  misc_feature 1..20: note = Target: FXN; (+) strand; PAM type: NRG; PAM sequence: TGG
  source 1..20: mol_type = other DNA
agcctcgacctccctgggct

SEQ ID NO: 21697 - DNA, 20 bp, synthetic construct
  misc_feature 1..20: note = Description of Artificial Sequence: Synthetic oligonucleotide
  misc_feature 1..20: note = Target: FXN; (+) strand; PAM type: NRG; PAM sequence: GGG
  source 1..20: mol_type = other DNA
gcctcgacctccctgggctt

SEQ ID NO: 21698 - DNA, 20 bp, synthetic construct
  misc_feature 1..20: note = Description of Artificial Sequence: Synthetic oligonucleotide
  misc_feature 1..20: note = Target: FXN; (+) strand; PAM type: NRG; PAM sequence: CAG
  source 1..20: mol_type = other DNA
gggcttgggcaatcctccca

SEQ ID NO: 21699 - DNA, 20 bp, synthetic construct
  misc_feature 1..20: note = Description of Artificial Sequence: Synthetic oligonucleotide
  misc_feature 1..20: note = Target: FXN; (+) strand; PAM type: NRG; PAM sequence: AGG
  source 1..20: mol_type = other DNA
ggcttgggcaatcctcccac

SEQ ID NO: 21700 - DNA, 20 bp, synthetic construct
  misc_feature 1..20: note = Description of Artificial Sequence: Synthetic oligonucleotide
  misc_feature 1..20: note = Target: FXN; (+) strand; PAM type: NRG; PAM sequence: TAG
  source 1..20: mol_type = other DNA
cccacaggtgtgcacctcca

SEQ ID NO: 21701 - DNA, 20 bp, synthetic construct
  misc_feature 1..20: note = Description of Artificial Sequence: Synthetic oligonucleotide
  misc_feature 1..20: note = Target: FXN; (+) strand; PAM type: NRG; PAM sequence: TGG
  source 1..20: mol_type = other DNA
caggtgtgcacctccatagc

SEQ ID NO: 21702 - DNA, 20 bp, synthetic construct
  misc_feature 1..20: note = Description of Artificial Sequence: Synthetic oligonucleotide
  misc_feature 1..20: note = Target: FXN; (+) strand; PAM type: NRG; PAM sequence: TAG
  source 1..20: mol_type = other DNA
gctaatttgtgtattttttg

SEQ ID NO: 21703 - DNA, 20 bp, synthetic construct
  misc_feature 1..20: note = Description of Artificial Sequence: Synthetic oligonucleotide
  misc_feature 1..20: note = Target: FXN; (+) strand; PAM type: NRG; PAM sequence: GAG
  source 1..20: mol_type = other DNA
taatttgtgtattttttgta

SEQ ID NO: 21704 - DNA, 20 bp, synthetic construct
  misc_feature 1..20: note = Description of Artificial Sequence: Synthetic oligonucleotide
  misc_feature 1..20: note = Target: FXN; (+) strand; PAM type: NRG; PAM sequence: TGG
  source 1..20: mol_type = other DNA
ttgtgtattttttgtagaga

SEQ ID NO: 21705 - DNA, 20 bp, synthetic construct
  misc_feature 1..20: note = Description of Artificial Sequence: Synthetic oligonucleotide
  misc_feature 1..20: note = Target: FXN; (+) strand; PAM type: NRG; PAM sequence: GGG
  source 1..20: mol_type = other DNA
tgtgtattttttgtagagat

SEQ ID NO: 21706 - DNA, 20 bp, synthetic construct
  misc_feature 1..20: note = Description of Artificial Sequence: Synthetic oligonucleotide
  misc_feature 1..20: note = Target: FXN; (+) strand; PAM type: NRG; PAM sequence: GGG
  source 1..20: mol_type = other DNA
gtgtattttttgtagagatg

SEQ ID NO: 21707 - DNA, 20 bp, synthetic construct
  misc_feature 1..20: note = Description of Artificial Sequence: Synthetic oligonucleotide
  misc_feature 1..20: note = Target: FXN; (+) strand; PAM type: NRG; PAM sequence: CAG
  source 1..20: mol_type = other DNA
tggggtttcaccatgttgcc

SEQ ID NO: 21708 - DNA, 20 bp, synthetic construct
  misc_feature 1..20: note = Description of Artificial Sequence: Synthetic oligonucleotide
  misc_feature 1..20: note = Target: FXN; (+) strand; PAM type: NRG; PAM sequence: AGG
  source 1..20: mol_type = other DNA
ggggtttcaccatgttgccc

SEQ ID NO: 21709 - DNA, 20 bp, synthetic construct
  misc_feature 1..20: note = Description of Artificial Sequence: Synthetic oligonucleotide
  misc_feature 1..20: note = Target: FXN; (+) strand; PAM type: NRG; PAM sequence: TGG
  source 1..20: mol_type = other DNA
tttcaccatgttgcccaggc

SEQ ID NO: 21710 - DNA, 20 bp, synthetic construct
  misc_feature 1..20: note = Description of Artificial Sequence: Synthetic oligonucleotide
  misc_feature 1..20: note = Target: FXN; (+) strand; PAM type: NRG; PAM sequence: TAG
  source 1..20: mol_type = other DNA
ccaggctggtctctaacact

SEQ ID NO: 21711 - DNA, 20 bp, synthetic construct
  misc_feature 1..20: note = Description of Artificial Sequence: Synthetic oligonucleotide
  misc_feature 1..20: note = Target: FXN; (+) strand; PAM type: NRG; PAM sequence: AGG
  source 1..20: mol_type = other DNA
caggctggtctctaacactt

SEQ ID NO: 21712 - DNA, 20 bp, synthetic construct
  misc_feature 1..20: note = Description of Artificial Sequence: Synthetic oligonucleotide
  misc_feature 1..20: note = Target: FXN; (+) strand; PAM type: NRG; PAM sequence: AAG
  source 1..20: mol_type = other DNA
ggtctctaacacttaggctc

SEQ ID NO: 21713 - DNA, 20 bp, synthetic construct
  misc_feature 1..20: note = Description of Artificial Sequence: Synthetic oligonucleotide
  misc_feature 1..20: note = Target: FXN; (+) strand; PAM type: NRG; PAM sequence: AAG
  source 1..20: mol_type = other DNA
tccacctgcctcgtcctccc

SEQ ID NO: 21714 - DNA, 20 bp, synthetic construct
  misc_feature 1..20: note = Description of Artificial Sequence: Synthetic oligonucleotide
  misc_feature 1..20: note = Target: FXN; (+) strand; PAM type: NRG; PAM sequence: TGG
  source 1..20: mol_type = other DNA
gcctcgtcctcccaagatgc

SEQ ID NO: 21715 - DNA, 20 bp, synthetic construct
  misc_feature 1..20: note = Description of Artificial Sequence: Synthetic oligonucleotide
  misc_feature 1..20: note = Target: FXN; (+) strand; PAM type: NRG; PAM sequence: GGG
  source 1..20: mol_type = other DNA
cctcgtcctcccaagatgct

SEQ ID NO: 21716 - DNA, 20 bp, synthetic construct
  misc_feature 1..20: note = Description of Artificial Sequence: Synthetic oligonucleotide
  misc_feature 1..20: note = Target: FXN; (+) strand; PAM type: NRG; PAM sequence: CAG
  source 1..20: mol_type = other DNA
ctcccaagatgctgggatta

SEQ ID NO: 21717 - DNA, 20 bp, synthetic construct
  misc_feature 1..20: note = Description of Artificial Sequence: Synthetic oligonucleotide
  misc_feature 1..20: note = Target: FXN; (+) strand; PAM type: NRG; PAM sequence: AGG
  source 1..20: mol_type = other DNA
tcccaagatgctgggattac

SEQ ID NO: 21718 - DNA, 20 bp, synthetic construct
  misc_feature 1..20: note = Description of Artificial Sequence: Synthetic oligonucleotide
  misc_feature 1..20: note = Target: FXN; (+) strand; PAM type: NRG; PAM sequence: CAG
  source 1..20: mol_type = other DNA
gggattacaggtgtgtgcca

SEQ ID NO: 21719 - DNA, 20 bp, synthetic construct
  misc_feature 1..20: note = Description of Artificial Sequence: Synthetic oligonucleotide
  misc_feature 1..20: note = Target: FXN; (+) strand; PAM type: NRG; PAM sequence: AGG
  source 1..20: mol_type = other DNA
ggattacaggtgtgtgccac

SEQ ID NO: 21720 - DNA, 20 bp, synthetic construct
  misc_feature 1..20: note = Description of Artificial Sequence: Synthetic oligonucleotide
  misc_feature 1..20: note = Target: FXN; (+) strand; PAM type: NRG; PAM sequence: CAG
  source 1..20: mol_type = other DNA
tgtgtgccacaggtgttcat

SEQ ID NO: 21721 - DNA, 20 bp, synthetic construct
  misc_feature 1..20: note = Description of Artificial Sequence: Synthetic oligonucleotide
  misc_feature 1..20: note = Target: FXN; (+) strand; PAM type: NRG; PAM sequence: AAG
  source 1..20: mol_type = other DNA
tgccacaggtgttcatcaga

SEQ ID NO: 21722 - DNA, 20 bp, synthetic construct
  misc_feature 1..20: note = Description of Artificial Sequence: Synthetic oligonucleotide
  misc_feature 1..20: note = Target: FXN; (+) strand; PAM type: NRG; PAM sequence: GAG
  source 1..20: mol_type = other DNA
tctattatttttaccttctt

SEQ ID NO: 21723 - DNA, 20 bp, synthetic construct
  misc_feature 1..20: note = Description of Artificial Sequence: Synthetic oligonucleotide
  misc_feature 1..20: note = Target: FXN; (+) strand; PAM type: NRG; PAM sequence: TGG
  source 1..20: mol_type = other DNA
attatttttaccttcttgag

SEQ ID NO: 21724 - DNA, 20 bp, synthetic construct
  misc_feature 1..20: note = Description of Artificial Sequence: Synthetic oligonucleotide
  misc_feature 1..20: note = Target: FXN; (+) strand; PAM type: NRG; PAM sequence: GGG
  source 1..20: mol_type = other DNA
ttatttttaccttcttgagt

SEQ ID NO: 21725 - DNA, 20 bp, synthetic construct
  misc_feature 1..20: note = Description of Artificial Sequence: Synthetic oligonucleotide
  misc_feature 1..20: note = Target: FXN; (+) strand; PAM type: NRG; PAM sequence: TAG
  source 1..20: mol_type = other DNA
tttttaccttcttgagtggg

SEQ ID NO: 21726 - DNA, 20 bp, synthetic construct
  misc_feature 1..20: note = Description of Artificial Sequence: Synthetic oligonucleotide
  misc_feature 1..20: note = Target: FXN; (+) strand; PAM type: NRG; PAM sequence: CAG
  source 1..20: mol_type = other DNA
ttcttgagtgggtagaacct

SEQ ID NO: 21727 - DNA, 20 bp, synthetic construct
  misc_feature 1..20: note = Description of Artificial Sequence: Synthetic oligonucleotide
  misc_feature 1..20: note = Target: FXN; (+) strand; PAM type: NRG; PAM sequence: TAG
  source 1..20: mol_type = other DNA
tgggtagaacctcagccaca

SEQ ID NO: 21728 - DNA, 20 bp, synthetic construct
  misc_feature 1..20: note = Description of Artificial Sequence: Synthetic oligonucleotide
  misc_feature 1..20: note = Target: FXN; (+) strand; PAM type: NRG; PAM sequence: TGG
  source 1..20: mol_type = other DNA
acatagaaaataaaatgttc

SEQ ID NO: 21729 - DNA, 20 bp, synthetic construct
  misc_feature 1..20: note = Description of Artificial Sequence: Synthetic oligonucleotide
  misc_feature 1..20: note = Target: FXN; (+) strand; PAM type: NRG; PAM sequence: TAG
  source 1..20: mol_type = other DNA
atgttctggcatgacttatt

SEQ ID NO: 21730 - DNA, 20 bp, synthetic construct
  misc_feature 1..20: note = Description of Artificial Sequence: Synthetic oligonucleotide
  misc_feature 1..20: note = Target: FXN; (+) strand; PAM type: NRG; PAM sequence: TGG
  source 1..20: mol_type = other DNA
gcatgacttatttagctctc

SEQ ID NO: 21731 - DNA, 20 bp, synthetic construct
  misc_feature 1..20: note = Description of Artificial Sequence: Synthetic oligonucleotide
  misc_feature 1..20: note = Target: FXN; (+) strand; PAM type: NRG; PAM sequence: AAG
  source 1..20: mol_type = other DNA
tttagctctctggaattaca

SEQ ID NO: 21732 - DNA, 20 bp, synthetic construct
  misc_feature 1..20: note = Description of Artificial Sequence: Synthetic oligonucleotide
  misc_feature 1..20: note = Target: FXN; (+) strand; PAM type: NRG; PAM sequence: AAG
  source 1..20: mol_type = other DNA
agctctctggaattacaaag

SEQ ID NO: 21733 - DNA, 20 bp, synthetic construct
  misc_feature 1..20: note = Description of Artificial Sequence: Synthetic oligonucleotide
  misc_feature 1..20: note = Target: FXN; (+) strand; PAM type: NRG; PAM sequence: AGG
  source 1..20: mol_type = other DNA
gctctctggaattacaaaga

SEQ ID NO: 21734 - DNA, 20 bp, synthetic construct
  misc_feature 1..20: note = Description of Artificial Sequence: Synthetic oligonucleotide
  misc_feature 1..20: note = Target: FXN; (+) strand; PAM type: NRG; PAM sequence: GAG
  source 1..20: mol_type = other DNA
tggaattacaaagaaggaat

SEQ ID NO: 21735 - DNA, 20 bp, synthetic construct
  misc_feature 1..20: note = Description of Artificial Sequence: Synthetic oligonucleotide
  misc_feature 1..20: note = Target: FXN; (+) strand; PAM type: NRG; PAM sequence: AGG
  source 1..20: mol_type = other DNA
ggaattacaaagaaggaatg

SEQ ID NO: 21736 - DNA, 20 bp, synthetic construct
  misc_feature 1..20: note = Description of Artificial Sequence: Synthetic oligonucleotide
  misc_feature 1..20: note = Target: FXN; (+) strand; PAM type: NRG; PAM sequence: AAG
  source 1..20: mol_type = other DNA
agaaggaatgaggtgtgtaa

SEQ ID NO: 21737 - DNA, 20 bp, synthetic construct
  misc_feature 1..20: note = Description of Artificial Sequence: Synthetic oligonucleotide
  misc_feature 1..20: note = Target: FXN; (+) strand; PAM type: NRG; PAM sequence: GAG
  source 1..20: mol_type = other DNA
aaggaatgaggtgtgtaaaa

SEQ ID NO: 21738 - DNA, 20 bp, synthetic construct
  misc_feature 1..20: note = Description of Artificial Sequence: Synthetic oligonucleotide
  misc_feature 1..20: note = Target: FXN; (+) strand; PAM type: NRG; PAM sequence: TGG
  source 1..20: mol_type = other DNA
gaggtgtgtaaaagagaacc

SEQ ID NO: 21739 - DNA, 20 bp, synthetic construct
  misc_feature 1..20: note = Description of Artificial Sequence: Synthetic oligonucleotide
  misc_feature 1..20: note = Target: FXN; (+) strand; PAM type: NRG; PAM sequence: GGG
  source 1..20: mol_type = other DNA
aggtgtgtaaaagagaacct

SEQ ID NO: 21740 - DNA, 20 bp, synthetic construct
  misc_feature 1..20: note = Description of Artificial Sequence: Synthetic oligonucleotide
  misc_feature 1..20: note = Target: FXN; (+) strand; PAM type: NRG; PAM sequence: TAG
  source 1..20: mol_type = other DNA
gggtttttgaatcacaaatt

SEQ ID NO: 21741 - DNA, 20 bp, synthetic construct
  misc_feature 1..20: note = Description of Artificial Sequence: Synthetic oligonucleotide
  misc_feature 1..20: note = Target: FXN; (+) strand; PAM type: NRG; PAM sequence: TAG
  source 1..20: mol_type = other DNA
ctctgcctcttacttgtttg

SEQ ID NO: 21742 - DNA, 20 bp, synthetic construct
  misc_feature 1..20: note = Description of Artificial Sequence: Synthetic oligonucleotide
  misc_feature 1..20: note = Target: FXN; (+) strand; PAM type: NRG; PAM sequence: CAG
  source 1..20: mol_type = other DNA
tacttgtttgtagacactga

SEQ ID NO: 21743 - DNA, 20 bp, synthetic construct
  misc_feature 1..20: note = Description of Artificial Sequence: Synthetic oligonucleotide
  misc_feature 1..20: note = Target: FXN; (+) strand; PAM type: NRG; PAM sequence: TGG
  source 1..20: mol_type = other DNA
ttgtttgtagacactgacag

SEQ ID NO: 21744 - DNA, 20 bp, synthetic construct
  misc_feature 1..20: note = Description of Artificial Sequence: Synthetic oligonucleotide
  misc_feature 1..20: note = Target: FXN; (+) strand; PAM type: NRG; PAM sequence: TGG
  source 1..20: mol_type = other DNA
tttttttttaatctataaaa

SEQ ID NO: 21745 - DNA, 20 bp, synthetic construct
  misc_feature 1..20: note = Description of Artificial Sequence: Synthetic oligonucleotide
  misc_feature 1..20: note = Target: FXN; (+) strand; PAM type: NRG; PAM sequence: GAG
  source 1..20: mol_type = other DNA
tttttttaatctataaaatg

SEQ ID NO: 21746 - DNA, 20 bp, synthetic construct
  misc_feature 1..20: note = Description of Artificial Sequence: Synthetic oligonucleotide
  misc_feature 1..20: note = Target: FXN; (+) strand; PAM type: NRG; PAM sequence: GAG
  source 1..20: mol_type = other DNA
atggagatatctaacatgtt

SEQ ID NO: 21747 - DNA, 20 bp, synthetic construct
  misc_feature 1..20: note = Description of Artificial Sequence: Synthetic oligonucleotide
  misc_feature 1..20: note = Target: FXN; (+) strand; PAM type: NRG; PAM sequence: TGG
  source 1..20: mol_type = other DNA
gatatctaacatgttgagcc

SEQ ID NO: 21748 - DNA, 20 bp, synthetic construct
  misc_feature 1..20: note = Description of Artificial Sequence: Synthetic oligonucleotide
  misc_feature 1..20: note = Target: FXN; (+) strand; PAM type: NRG; PAM sequence: GGG
  source 1..20: mol_type = other DNA
atatctaacatgttgagcct

SEQ ID NO: 21749 - DNA, 20 bp, synthetic construct
  misc_feature 1..20: note = Description of Artificial Sequence: Synthetic oligonucleotide
  misc_feature 1..20: note = Target: FXN; (+) strand; PAM type: NRG; PAM sequence: CAG
  source 1..20: mol_type = other DNA
acatgttgagcctgggccca

SEQ ID NO: 21750 - DNA, 20 bp, synthetic construct
  misc_feature 1..20: note = Description of Artificial Sequence: Synthetic oligonucleotide
  misc_feature 1..20: note = Target: FXN; (+) strand; PAM type: NRG; PAM sequence: AGG
  source 1..20: mol_type = other DNA
catgttgagcctgggcccac

SEQ ID NO: 21751 - DNA, 20 bp, synthetic construct
  misc_feature 1..20: note = Description of Artificial Sequence: Synthetic oligonucleotide
  misc_feature 1..20: note = Target: FXN; (+) strand; PAM type: NRG; PAM sequence: AAG
  source 1..20: mol_type = other DNA
tgagcctgggcccacaggca

SEQ ID NO: 21752 - DNA, 20 bp, synthetic construct
  misc_feature 1..20: note = Description of Artificial Sequence: Synthetic oligonucleotide
  misc_feature 1..20: note = Target: FXN; (+) strand; PAM type: NRG; PAM sequence: GAG
  source 1..20: mol_type = other DNA
gcaaagcacaatcctgatgt

SEQ ID NO: 21753 - DNA, 20 bp, synthetic construct
  misc_feature 1..20: note = Description of Artificial Sequence: Synthetic oligonucleotide
  misc_feature 1..20: note = Target: FXN; (+) strand; PAM type: NRG; PAM sequence: AAG
  source 1..20: mol_type = other DNA
aagcacaatcctgatgtgag

SEQ ID NO: 21754 - DNA, 20 bp, synthetic construct
  misc_feature 1..20: note = Description of Artificial Sequence: Synthetic oligonucleotide
  misc_feature 1..20: note = Target: FXN; (+) strand; PAM type: NRG; PAM sequence: CAG
  source 1..20: mol_type = other DNA
atcctgatgtgagaagtact

SEQ ID NO: 21755 - DNA, 20 bp, synthetic construct
  misc_feature 1..20: note = Description of Artificial Sequence: Synthetic oligonucleotide
  misc_feature 1..20: note = Target: FXN; (+) strand; PAM type: NRG; PAM sequence: TAG
  source 1..20: mol_type = other DNA
aactgttgttctcacatgca

SEQ ID NO: 21756 - DNA, 20 bp, synthetic construct
  misc_feature 1..20: note = Description of Artificial Sequence: Synthetic oligonucleotide
  misc_feature 1..20: note = Target: FXN; (+) strand; PAM type: NRG; PAM sequence: TGG
  source 1..20: mol_type = other DNA
gcataatttcatattcacat

SEQ ID NO: 21757 - DNA, 20 bp, synthetic construct
  misc_feature 1..20: note = Description of Artificial Sequence: Synthetic oligonucleotide
  misc_feature 1..20: note = Target: FXN; (+) strand; PAM type: NRG; PAM sequence: GAG
  source 1..20: mol_type = other DNA
ataatttcatattcacattg

SEQ ID NO: 21758 - DNA, 20 bp, synthetic construct
  misc_feature 1..20: note = Description of Artificial Sequence: Synthetic oligonucleotide
  misc_feature 1..20: note = Target: FXN; (+) strand; PAM type: NRG; PAM sequence: AGG
  source 1..20: mol_type = other DNA
taatttcatattcacattgg

SEQ ID NO: 21759 - DNA, 20 bp, synthetic construct
  misc_feature 1..20: note = Description of Artificial Sequence: Synthetic oligonucleotide
  misc_feature 1..20: note = Target: FXN; (+) strand; PAM type: NRG; PAM sequence: TGG
  source 1..20: mol_type = other DNA
ggaggacttctcccaaaata

SEQ ID NO: 21760 - DNA, 20 bp, synthetic construct
  misc_feature 1..20: note = Description of Artificial Sequence: Synthetic oligonucleotide
  misc_feature 1..20: note = Target: FXN; (+) strand; PAM type: NRG; PAM sequence: CAG
  source 1..20: mol_type = other DNA
ttgaacttaatcaaaatact

SEQ ID NO: 21761 - DNA, 20 bp, synthetic construct
  misc_feature 1..20: note = Description of Artificial Sequence: Synthetic oligonucleotide
  misc_feature 1..20: note = Target: FXN; (+) strand; PAM type: NRG; PAM sequence: TAG
  source 1..20: mol_type = other DNA
cagtttacttaacttcgtat

SEQ ID NO: 21762 - DNA, 20 bp, synthetic construct
  misc_feature 1..20: note = Description of Artificial Sequence: Synthetic oligonucleotide
  misc_feature 1..20: note = Target: FXN; (+) strand; PAM type: NRG; PAM sequence: TGG
  source 1..20: mol_type = other DNA
cgtattagattctgattccc

SEQ ID NO: 21763 - DNA, 20 bp, synthetic construct
  misc_feature 1..20: note = Description of Artificial Sequence: Synthetic oligonucleotide
  misc_feature 1..20: note = Target: FXN; (+) strand; PAM type: NRG; PAM sequence: TAG
  source 1..20: mol_type = other DNA
cataccttctaaaactattt

SEQ ID NO: 21764 - DNA, 20 bp, synthetic construct
  misc_feature 1..20: note = Description of Artificial Sequence: Synthetic oligonucleotide
  misc_feature 1..20: note = Target: FXN; (+) strand; PAM type: NRG; PAM sequence: CAG
  source 1..20: mol_type = other DNA
ttagccaatttaaaatttga

SEQ ID NO: 21765 - DNA, 20 bp, synthetic construct
  misc_feature 1..20: note = Description of Artificial Sequence: Synthetic oligonucleotide
  misc_feature 1..20: note = Target: FXN; (+) strand; PAM type: NRG; PAM sequence: TAG
  source 1..20: mol_type = other DNA
tgacagtttgcattaaatta

SEQ ID NO: 21766 - DNA, 20 bp, synthetic construct
  misc_feature 1..20: note = Description of Artificial Sequence: Synthetic oligonucleotide
  misc_feature 1..20: note = Target: FXN; (+) strand; PAM type: NRG; PAM sequence: AGG
  source 1..20: mol_type = other DNA
gacagtttgcattaaattat

SEQ ID NO: 21767 - DNA, 20 bp, synthetic construct
  misc_feature 1..20: note = Description of Artificial Sequence: Synthetic oligonucleotide
  misc_feature 1..20: note = Target: FXN; (+) strand; PAM type: NRG; PAM sequence: CAG
  source 1..20: mol_type = other DNA
ggtttacaatatgctttatc

SEQ ID NO: 21768 - DNA, 20 bp, synthetic construct
  misc_feature 1..20: note = Description of Artificial Sequence: Synthetic oligonucleotide
  misc_feature 1..20: note = Target: FXN; (+) strand; PAM type: NRG; PAM sequence: CAG
  source 1..20: mol_type = other DNA
atacctgccccaaattctga

SEQ ID NO: 21769 - DNA, 20 bp, synthetic construct
  misc_feature 1..20: note = Description of Artificial Sequence: Synthetic oligonucleotide
  misc_feature 1..20: note = Target: FXN; (+) strand; PAM type: NRG; PAM sequence: AAG
  source 1..20: mol_type = other DNA
agatgcttttgccacctcta

SEQ ID NO: 21770 - DNA, 20 bp, synthetic construct
  misc_feature 1..20: note = Description of Artificial Sequence: Synthetic oligonucleotide
  misc_feature 1..20: note = Target: FXN; (+) strand; PAM type: NRG; PAM sequence: AGG
  source 1..20: mol_type = other DNA
gatgcttttgccacctctaa

SEQ ID NO: 21771 - DNA, 20 bp, synthetic construct
  misc_feature 1..20: note = Description of Artificial Sequence: Synthetic oligonucleotide
  misc_feature 1..20: note = Target: FXN; (+) strand; PAM type: NRG; PAM sequence: AAG
  source 1..20: mol_type = other DNA
gcttttgccacctctaaagg

SEQ ID NO: 21772 - DNA, 20 bp, synthetic construct
  misc_feature 1..20: note = Description of Artificial Sequence: Synthetic oligonucleotide
  misc_feature 1..20: note = Target: FXN; (+) strand; PAM type: NRG; PAM sequence: TAG
  source 1..20: mol_type = other DNA
taaaggaagacccatgttca

SEQ ID NO: 21773 - DNA, 20 bp, synthetic construct
  misc_feature 1..20: note = Description of Artificial Sequence: Synthetic oligonucleotide
  misc_feature 1..20: note = Target: FXN; (+) strand; PAM type: NRG; PAM sequence: TGG
  source 1..20: mol_type = other DNA
aagacccatgttcatagtga

SEQ ID NO: 21774 - DNA, 20 bp, synthetic construct
  misc_feature 1..20: note = Description of Artificial Sequence: Synthetic oligonucleotide
  misc_feature 1..20: note = Target: FXN; (+) strand; PAM type: NRG; PAM sequence: GAG
  source 1..20: mol_type = other DNA
gacccatgttcatagtgatg

SEQ ID NO: 21775 - DNA, 20 bp, synthetic construct
  misc_feature 1..20: note = Description of Artificial Sequence: Synthetic oligonucleotide
  misc_feature 1..20: note = Target: FXN; (+) strand; PAM type: NRG; PAM sequence: TGG
  source 1..20: mol_type = other DNA
tcatagtgatggagtttgtg

SEQ ID NO: 21776 - DNA, 20 bp, synthetic construct
  misc_feature 1..20: note = Description of Artificial Sequence: Synthetic oligonucleotide
  misc_feature 1..20: note = Target: FXN; (+) strand; PAM type: NRG; PAM sequence: AAG
  source 1..20: mol_type = other DNA
tttgtgtggactaaccatgc

SEQ ID NO: 21777 - DNA, 20 bp, synthetic construct
  misc_feature 1..20: note = Description of Artificial Sequence: Synthetic oligonucleotide
  misc_feature 1..20: note = Target: FXN; (+) strand; PAM type: NRG; PAM sequence: AGG
  source 1..20: mol_type = other DNA
ttgtgtggactaaccatgca

SEQ ID NO: 21778 - DNA, 20 bp, synthetic construct
  misc_feature 1..20: note = Description of Artificial Sequence: Synthetic oligonucleotide
  misc_feature 1..20: note = Target: FXN; (+) strand; PAM type: NRG; PAM sequence: AAG
  source 1..20: mol_type = other DNA
actaaccatgcaaggttgcc

SEQ ID NO: 21779 - DNA, 20 bp, synthetic construct
  misc_feature 1..20: note = Description of Artificial Sequence: Synthetic oligonucleotide
  misc_feature 1..20: note = Target: FXN; (+) strand; PAM type: NRG; PAM sequence: AGG
  source 1..20: mol_type = other DNA
ctaaccatgcaaggttgcca

SEQ ID NO: 21780 - DNA, 20 bp, synthetic construct
  misc_feature 1..20: note = Description of Artificial Sequence: Synthetic oligonucleotide
  misc_feature 1..20: note = Target: FXN; (+) strand; PAM type: NRG; PAM sequence: AAG
  source 1..20: mol_type = other DNA
aaaaatcgctttacgcttcc

SEQ ID NO: 21781 - DNA, 20 bp, synthetic construct
  misc_feature 1..20: note = Description of Artificial Sequence: Synthetic oligonucleotide
  misc_feature 1..20: note = Target: FXN; (+) strand; PAM type: NRG; PAM sequence: AGG
  source 1..20: mol_type = other DNA
aaaatcgctttacgcttcca

SEQ ID NO: 21782 - DNA, 20 bp, synthetic construct
  misc_feature 1..20: note = Description of Artificial Sequence: Synthetic oligonucleotide
  misc_feature 1..20: note = Target: FXN; (+) strand; PAM type: NRG; PAM sequence: AAG
  source 1..20: mol_type = other DNA
acgcttccaaggtacacact

SEQ ID NO: 21783 - DNA, 20 bp, synthetic construct
  misc_feature 1..20: note = Description of Artificial Sequence: Synthetic oligonucleotide
  misc_feature 1..20: note = Target: FXN; (+) strand; PAM type: NRG; PAM sequence: AAG
  source 1..20: mol_type = other DNA
caaggtacacactaagatga

SEQ ID NO: 21784 - DNA, 20 bp, synthetic construct
  misc_feature 1..20: note = Description of Artificial Sequence: Synthetic oligonucleotide
  misc_feature 1..20: note = Target: FXN; (+) strand; PAM type: NRG; PAM sequence: TAG
  source 1..20: mol_type = other DNA
cactaagatgaaagtaattt

SEQ ID NO: 21785 - DNA, 20 bp, synthetic construct
  misc_feature 1..20: note = Description of Artificial Sequence: Synthetic oligonucleotide
  misc_feature 1..20: note = Target: FXN; (+) strand; PAM type: NRG; PAM sequence: CAG
  source 1..20: mol_type = other DNA
aagtaattttagtccgtgtc

SEQ ID NO: 21786 - DNA, 20 bp, synthetic construct
  misc_feature 1..20: note = Description of Artificial Sequence: Synthetic oligonucleotide
  misc_feature 1..20: note = Target: FXN; (+) strand; PAM type: NRG; PAM sequence: TGG
  source 1..20: mol_type = other DNA
aattttagtccgtgtccagt

SEQ ID NO: 21787 - DNA, 20 bp, synthetic construct
  misc_feature 1..20: note = Description of Artificial Sequence: Synthetic oligonucleotide
  misc_feature 1..20: note = Target: FXN; (+) strand; PAM type: NRG; PAM sequence: TGG
  source 1..20: mol_type = other DNA
tccgtgtccagttggattct

SEQ ID NO: 21788 - DNA, 20 bp, synthetic construct
  misc_feature 1..20: note = Description of Artificial Sequence: Synthetic oligonucleotide
  misc_feature 1..20: note = Target: FXN; (+) strand; PAM type: NRG; PAM sequence: TAG
  source 1..20: mol_type = other DNA
ccagttggattcttggcaca

SEQ ID NO: 21789 - DNA, 20 bp, synthetic construct
  misc_feature 1..20: note = Description of Artificial Sequence: Synthetic oligonucleotide
  misc_feature 1..20: note = Target: FXN; (+) strand; PAM type: NRG; PAM sequence: TAG
  source 1..20: mol_type = other DNA
ggcacatagttatcttctgc

SEQ ID NO: 21790 - DNA, 20 bp, synthetic construct
  misc_feature 1..20: note = Description of Artificial Sequence: Synthetic oligonucleotide
  misc_feature 1..20: note = Target: FXN; (+) strand; PAM type: NRG; PAM sequence: CAG
  source 1..20: mol_type = other DNA
tctgctagaacaaactaaaa

SEQ ID NO: 21791 - DNA, 20 bp, synthetic construct
  misc_feature 1..20: note = Description of Artificial Sequence: Synthetic oligonucleotide
  misc_feature 1..20: note = Target: FXN; (+) strand; PAM type: NRG; PAM sequence: CAG
  source 1..20: mol_type = other DNA
aaactaaaacagctacatgc

SEQ ID NO: 21792 - DNA, 20 bp, synthetic construct
  misc_feature 1..20: note = Description of Artificial Sequence: Synthetic oligonucleotide
  misc_feature 1..20: note = Target: FXN; (+) strand; PAM type: NRG; PAM sequence: AAG
  source 1..20: mol_type = other DNA
taaaacagctacatgccagc

SEQ ID NO: 21793 - DNA, 20 bp, synthetic construct
  misc_feature 1..20: note = Description of Artificial Sequence: Synthetic oligonucleotide
  misc_feature 1..20: note = Target: FXN; (+) strand; PAM type: NRG; PAM sequence: AGG
  source 1..20: mol_type = other DNA
aaaacagctacatgccagca

SEQ ID NO: 21794 - DNA, 20 bp, synthetic construct
  misc_feature 1..20: note = Description of Artificial Sequence: Synthetic oligonucleotide
  misc_feature 1..20: note = Target: FXN; (+) strand; PAM type: NRG; PAM sequence: GGG
  source 1..20: mol_type = other DNA
aaacagctacatgccagcaa

SEQ ID NO: 21795 - DNA, 20 bp, synthetic construct
  misc_feature 1..20: note = Description of Artificial Sequence: Synthetic oligonucleotide
  misc_feature 1..20: note = Target: FXN; (+) strand; PAM type: NRG; PAM sequence: GAG
  source 1..20: mol_type = other DNA
acagctacatgccagcaagg

SEQ ID NO: 21796 - DNA, 20 bp, synthetic construct
  misc_feature 1..20: note = Description of Artificial Sequence: Synthetic oligonucleotide
  misc_feature 1..20: note = Target: FXN; (+) strand; PAM type: NRG; PAM sequence: AAG
  source 1..20: mol_type = other DNA
ctacatgccagcaagggaga

SEQ ID NO: 21797 - DNA, 20 bp, synthetic construct
  misc_feature 1..20: note = Description of Artificial Sequence: Synthetic oligonucleotide
  misc_feature 1..20: note = Target: FXN; (+) strand; PAM type: NRG; PAM sequence: AGG
  source 1..20: mol_type = other DNA
tacatgccagcaagggagaa

SEQ ID NO: 21798 - DNA, 20 bp, synthetic construct
  misc_feature 1..20: note = Description of Artificial Sequence: Synthetic oligonucleotide
  misc_feature 1..20: note = Target: FXN; (+) strand; PAM type: NRG; PAM sequence: GGG
  source 1..20: mol_type = other DNA
acatgccagcaagggagaaa

SEQ ID NO: 21799 - DNA, 20 bp, synthetic construct
  misc_feature 1..20: note = Description of Artificial Sequence: Synthetic oligonucleotide
  misc_feature 1..20: note = Target: FXN; (+) strand; PAM type: NRG; PAM sequence: GGG
  source 1..20: mol_type = other DNA
catgccagcaagggagaaag

SEQ ID NO: 21800 - DNA, 20 bp, synthetic construct
  misc_feature 1..20: note = Description of Artificial Sequence: Synthetic oligonucleotide
  misc_feature 1..20: note = Target: FXN; (+) strand; PAM type: NRG; PAM sequence: AAG
  source 1..20: mol_type = other DNA
gccagcaagggagaaagggg

SEQ ID NO: 21801 - DNA, 20 bp, synthetic construct
  misc_feature 1..20: note = Description of Artificial Sequence: Synthetic oligonucleotide
  misc_feature 1..20: note = Target: FXN; (+) strand; PAM type: NRG; PAM sequence: AGG
  source 1..20: mol_type = other DNA
ccagcaagggagaaagggga

SEQ ID NO: 21802 - DNA, 20 bp, synthetic construct
  misc_feature 1..20: note = Description of Artificial Sequence: Synthetic oligonucleotide
  misc_feature 1..20: note = Target: FXN; (+) strand; PAM type: NRG; PAM sequence: GAG
  source 1..20: mol_type = other DNA
agcaagggagaaaggggaag

SEQ ID NO: 21803 - DNA, 20 bp, synthetic construct
  misc_feature 1..20: note = Description of Artificial Sequence: Synthetic oligonucleotide
  misc_feature 1..20: note = Target: FXN; (+) strand; PAM type: NRG; PAM sequence: AGG
  source 1..20: mol_type = other DNA
gcaagggagaaaggggaagg

SEQ ID NO: 21804 - DNA, 20 bp, synthetic construct
  misc_feature 1..20: note = Description of Artificial Sequence: Synthetic oligonucleotide
  misc_feature 1..20: note = Target: FXN; (+) strand; PAM type: NRG; PAM sequence: GGG
  source 1..20: mol_type = other DNA
caagggagaaaggggaagga

SEQ ID NO: 21805 - DNA, 20 bp, synthetic construct
  misc_feature 1..20: note = Description of Artificial Sequence: Synthetic oligonucleotide
  misc_feature 1..20: note = Target: FXN; (+) strand; PAM type: NRG; PAM sequence: GGG
  source 1..20: mol_type = other DNA
aagggagaaaggggaaggag

SEQ ID NO: 21806 - DNA, 20 bp, synthetic construct
  misc_feature 1..20: note = Description of Artificial Sequence: Synthetic oligonucleotide
  misc_feature 1..20: note = Target: FXN; (+) strand; PAM type: NRG; PAM sequence: AAG
  source 1..20: mol_type = other DNA
agaaaggggaaggaggggca

SEQ ID NO: 21807 - DNA, 20 bp, synthetic construct
  misc_feature 1..20: note = Description of Artificial Sequence: Synthetic oligonucleotide
  misc_feature 1..20: note = Target: FXN; (+) strand; PAM type: NRG; PAM sequence: GAG
  source 1..20: mol_type = other DNA
tttatgctgttcaaaacgac

SEQ ID NO: 21808 - DNA, 20 bp, synthetic construct
  misc_feature 1..20: note = Description of Artificial Sequence: Synthetic oligonucleotide
  misc_feature 1..20: note = Target: FXN; (+) strand; PAM type: NRG; PAM sequence: TAG
  source 1..20: mol_type = other DNA
cgagttcatgactttgtgta

SEQ ID NO: 21809 - DNA, 20 bp, synthetic construct
  misc_feature 1..20: note = Description of Artificial Sequence: Synthetic oligonucleotide
  misc_feature 1..20: note = Target: FXN; (+) strand; PAM type: NRG; PAM sequence: GAG
  source 1..20: mol_type = other DNA
agttcatgactttgtgtata

SEQ ID NO: 21810 - DNA, 20 bp, synthetic construct
  misc_feature 1..20: note = Description of Artificial Sequence: Synthetic oligonucleotide
  misc_feature 1..20: note = Target: FXN; (+) strand; PAM type: NRG; PAM sequence: AAG
  source 1..20: mol_type = other DNA
catgactttgtgtatagagt

SEQ ID NO: 21811 - DNA, 20 bp, synthetic construct
  misc_feature 1..20: note = Description of Artificial Sequence: Synthetic oligonucleotide
  misc_feature 1..20: note = Target: FXN; (+) strand; PAM type: NRG; PAM sequence: GAG
  source 1..20: mol_type = other DNA
agaaatgccttttctttttt

SEQ ID NO: 21812 - DNA, 20 bp, synthetic construct
  misc_feature 1..20: note = Description of Artificial Sequence: Synthetic oligonucleotide
  misc_feature 1..20: note = Target: FXN; (+) strand; PAM type: NRG; PAM sequence: CAG
  source 1..20: mol_type = other DNA
atgccttttcttttttgaga

SEQ ID NO: 21813 - DNA, 20 bp, synthetic construct
  misc_feature 1..20: note = Description of Artificial Sequence: Synthetic oligonucleotide
  misc_feature 1..20: note = Target: FXN; (+) strand; PAM type: NRG; PAM sequence: GAG
  source 1..20: mol_type = other DNA
gccttttcttttttgagaca

SEQ ID NO: 21814 - DNA, 20 bp, synthetic construct
  misc_feature 1..20: note = Description of Artificial Sequence: Synthetic oligonucleotide
  misc_feature 1..20: note = Target: FXN; (+) strand; PAM type: NRG; PAM sequence: CAG
  source 1..20: mol_type = other DNA
cagagtcttgctctgtcacc

SEQ ID NO: 21815 - DNA, 20 bp, synthetic construct
  misc_feature 1..20: note = Description of Artificial Sequence: Synthetic oligonucleotide
  misc_feature 1..20: note = Target: FXN; (+) strand; PAM type: NRG; PAM sequence: AGG
  source 1..20: mol_type = other DNA
agagtcttgctctgtcaccc

SEQ ID NO: 21816 - DNA, 20 bp, synthetic construct
  misc_feature 1..20: note = Description of Artificial Sequence: Synthetic oligonucleotide
  misc_feature 1..20: note = Target: FXN; (+) strand; PAM type: NRG; PAM sequence: TGG
  source 1..20: mol_type = other DNA
tcttgctctgtcacccaggc

SEQ ID NO: 21817 - DNA, 20 bp, synthetic construct
  misc_feature 1..20: note = Description of Artificial Sequence: Synthetic oligonucleotide
  misc_feature 1..20: note = Target: FXN; (+) strand; PAM type: NRG; PAM sequence: GAG
  source 1..20: mol_type = other DNA
ttgctctgtcacccaggctg

SEQ ID NO: 21818 - DNA, 20 bp, synthetic construct
  misc_feature 1..20: note = Description of Artificial Sequence: Synthetic oligonucleotide
  misc_feature 1..20: note = Target: FXN; (+) strand; PAM type: NRG; PAM sequence: CAG
  source 1..20: mol_type = other DNA
ctgtcacccaggctggagtg

SEQ ID NO: 21819 - DNA, 20 bp, synthetic construct
  misc_feature 1..20: note = Description of Artificial Sequence: Synthetic oligonucleotide
  misc_feature 1..20: note = Target: FXN; (+) strand; PAM type: NRG; PAM sequence: TGG
  source 1..20: mol_type = other DNA
tcacccaggctggagtgcag

SEQ ID NO: 21820 - DNA, 20 bp, synthetic construct
  misc_feature 1..20: note = Description of Artificial Sequence: Synthetic oligonucleotide
  misc_feature 1..20: note = Target: FXN; (+) strand; PAM type: NRG; PAM sequence: TGG
  source 1..20: mol_type = other DNA
tggagtgcagtggcacgatc

SEQ ID NO: 21821 - DNA, 20 bp, synthetic construct
  misc_feature 1..20: note = Description of Artificial Sequence: Synthetic oligonucleotide
  misc_feature 1..20: note = Target: FXN; (+) strand; PAM type: NRG; PAM sequence: GGG
  source 1..20: mol_type = other DNA
ggagtgcagtggcacgatct

SEQ ID NO: 21822 - DNA, 20 bp, synthetic construct
  misc_feature 1..20: note = Description of Artificial Sequence: Synthetic oligonucleotide
  misc_feature 1..20: note = Target: FXN; (+) strand; PAM type: NRG; PAM sequence: TGG
  source 1..20: mol_type = other DNA
tcactacaacctccgcctcc

SEQ ID NO: 21823 - DNA, 20 bp, synthetic construct
  misc_feature 1..20: note = Description of Artificial Sequence: Synthetic oligonucleotide
  misc_feature 1..20: note = Target: FXN; (+) strand; PAM type: NRG; PAM sequence: GGG
  source 1..20: mol_type = other DNA
cactacaacctccgcctcct

SEQ ID NO: 21824 - DNA, 20 bp, synthetic construct
  misc_feature 1..20: note = Description of Artificial Sequence: Synthetic oligonucleotide
  misc_feature 1..20: note = Target: FXN; (+) strand; PAM type: NRG; PAM sequence: AAG
  source 1..20: mol_type = other DNA
aacctccgcctcctgggttc

SEQ ID NO: 21825 - DNA, 20 bp, synthetic construct
  misc_feature 1..20: note = Description of Artificial Sequence: Synthetic oligonucleotide
  misc_feature 1..20: note = Target: FXN; (+) strand; PAM type: NRG; PAM sequence: CAG
  source 1..20: mol_type = other DNA
gttcaagcaattctctgcct

SEQ ID NO: 21826 - DNA, 20 bp, synthetic construct
  misc_feature 1..20: note = Description of Artificial Sequence: Synthetic oligonucleotide
  misc_feature 1..20: note = Target: FXN; (+) strand; PAM type: NRG; PAM sequence: GAG
  source 1..20: mol_type = other DNA
attctctgcctcagcctccc

SEQ ID NO: 21827 - DNA, 20 bp, synthetic construct
  misc_feature 1..20: note = Description of Artificial Sequence: Synthetic oligonucleotide
  misc_feature 1..20: note = Target: FXN; (+) strand; PAM type: NRG; PAM sequence: TAG
  source 1..20: mol_type = other DNA
ctctgcctcagcctcccgag

SEQ ID NO: 21828 - DNA, 20 bp, synthetic construct
  misc_feature 1..20: note = Description of Artificial Sequence: Synthetic oligonucleotide
  misc_feature 1..20: note = Target: FXN; (+) strand; PAM type: NRG; PAM sequence: TGG
  source 1..20: mol_type = other DNA
gcctcagcctcccgagtagc

SEQ ID NO: 21829 - DNA, 20 bp, synthetic construct
  misc_feature 1..20: note = Description of Artificial Sequence: Synthetic oligonucleotide
  misc_feature 1..20: note = Target: FXN; (+) strand; PAM type: NRG; PAM sequence: GGG
  source 1..20: mol_type = other DNA
cctcagcctcccgagtagct

SEQ ID NO: 21830 - DNA, 20 bp, synthetic construct
  misc_feature 1..20: note = Description of Artificial Sequence: Synthetic oligonucleotide
  misc_feature 1..20: note = Target: FXN; (+) strand; PAM type: NRG; PAM sequence: CAG
  source 1..20: mol_type = other DNA
ctcccgagtagctgggatta

SEQ ID NO: 21831 - DNA, 20 bp, synthetic construct
  misc_feature 1..20: note = Description of Artificial Sequence: Synthetic oligonucleotide
  misc_feature 1..20: note = Target: FXN; (+) strand; PAM type: NRG; PAM sequence: AGG
  source 1..20: mol_type = other DNA
tcccgagtagctgggattac

SEQ ID NO: 21832 - DNA, 20 bp, synthetic construct
  misc_feature 1..20: note = Description of Artificial Sequence: Synthetic oligonucleotide
  misc_feature 1..20: note = Target: FXN; (+) strand; PAM type: NRG; PAM sequence: CGG
  source 1..20: mol_type = other DNA
caggtgcctgccaccacacc

SEQ ID NO: 21833 - DNA, 20 bp, synthetic construct
  misc_feature 1..20: note = Description of Artificial Sequence: Synthetic oligonucleotide
  misc_feature 1..20: note = Target: FXN; (+) strand; PAM type: NRG; PAM sequence: TAG
  source 1..20: mol_type = other DNA
ccggctaatttttgtatttt

SEQ ID NO: 21834 - DNA, 20 bp, synthetic construct
  misc_feature 1..20: note = Description of Artificial Sequence: Synthetic oligonucleotide
  misc_feature 1..20: note = Target: FXN; (+) strand; PAM type: NRG; PAM sequence: TAG
  source 1..20: mol_type = other DNA
gctaatttttgtatttttag

SEQ ID NO: 21835 - DNA, 20 bp, synthetic construct
  misc_feature 1..20: note = Description of Artificial Sequence: Synthetic oligonucleotide
  misc_feature 1..20: note = Target: FXN; (+) strand; PAM type: NRG; PAM sequence: GAG
  source 1..20: mol_type = other DNA
taatttttgtatttttagta

SEQ ID NO: 21836 - DNA, 20 bp, synthetic construct
  misc_feature 1..20: note = Description of Artificial Sequence: Synthetic oligonucleotide
  misc_feature 1..20: note = Target: FXN; (+) strand; PAM type: NRG; PAM sequence: CGG
  source 1..20: mol_type = other DNA
ttttgtatttttagtagaga

SEQ ID NO: 21837 - DNA, 20 bp, synthetic construct
  misc_feature 1..20: note = Description of Artificial Sequence: Synthetic oligonucleotide
  misc_feature 1..20: note = Target: FXN; (+) strand; PAM type: NRG; PAM sequence: GGG
  source 1..20: mol_type = other DNA
tttgtatttttagtagagac

SEQ ID NO: 21838 - DNA, 20 bp, synthetic construct
  misc_feature 1..20: note = Description of Artificial Sequence: Synthetic oligonucleotide
  misc_feature 1..20: note = Target: FXN; (+) strand; PAM type: NRG; PAM sequence: GGG
  source 1..20: mol_type = other DNA
ttgtatttttagtagagacg

SEQ ID NO: 21839 - DNA, 20 bp, synthetic construct
  misc_feature 1..20: note = Description of Artificial Sequence: Synthetic oligonucleotide
  misc_feature 1..20: note = Target: FXN; (+) strand; PAM type: NRG; PAM sequence: TGG
  source 1..20: mol_type = other DNA
gagacggggtttcaccatca

SEQ ID NO: 21840 - DNA, 20 bp, synthetic construct
  misc_feature 1..20: note = Description of Artificial Sequence: Synthetic oligonucleotide
  misc_feature 1..20: note = Target: FXN; (+) strand; PAM type: NRG; PAM sequence: CAG
  source 1..20: mol_type = other DNA
cggggtttcaccatcatggc

SEQ ID NO: 21841 - DNA, 20 bp, synthetic construct
  misc_feature 1..20: note = Description of Artificial Sequence: Synthetic oligonucleotide
  misc_feature 1..20: note = Target: FXN; (+) strand; PAM type: NRG; PAM sequence: AGG
  source 1..20: mol_type = other DNA
ggggtttcaccatcatggcc

SEQ ID NO: 21842 - DNA, 20 bp, synthetic construct
  misc_feature 1..20: note = Description of Artificial Sequence: Synthetic oligonucleotide
  misc_feature 1..20: note = Target: FXN; (+) strand; PAM type: NRG; PAM sequence: TGG
  source 1..20: mol_type = other DNA
tttcaccatcatggccaggc

SEQ ID NO: 21843 - DNA, 20 bp, synthetic construct
  misc_feature 1..20: note = Description of Artificial Sequence: Synthetic oligonucleotide
  misc_feature 1..20: note = Target: FXN; (+) strand; PAM type: NRG; PAM sequence: TAG
  source 1..20: mol_type = other DNA
ctggtcttgaactcctgacc

SEQ ID NO: 21844 - DNA, 20 bp, synthetic construct
  misc_feature 1..20: note = Description of Artificial Sequence: Synthetic oligonucleotide
  misc_feature 1..20: note = Target: FXN; (+) strand; PAM type: NRG; PAM sequence: AAG
  source 1..20: mol_type = other DNA
ccacctgcctccgcctccca

SEQ ID NO: 21845 - DNA, 20 bp, synthetic construct
  misc_feature 1..20: note = Description of Artificial Sequence: Synthetic oligonucleotide
  misc_feature 1..20: note = Target: FXN; (+) strand; PAM type: NRG; PAM sequence: TGG
  source 1..20: mol_type = other DNA
gcctccgcctcccaaagtgc

SEQ ID NO: 21846 - DNA, 20 bp, synthetic construct
  misc_feature 1..20: note = Description of Artificial Sequence: Synthetic oligonucleotide
  misc_feature 1..20: note = Target: FXN; (+) strand; PAM type: NRG; PAM sequence: GGG
  source 1..20: mol_type = other DNA
cctccgcctcccaaagtgct

SEQ ID NO: 21847 - DNA, 20 bp, synthetic construct
  misc_feature 1..20: note = Description of Artificial Sequence: Synthetic oligonucleotide
  misc_feature 1..20: note = Target: FXN; (+) strand; PAM type: NRG; PAM sequence: CAG
  source 1..20: mol_type = other DNA
ctcccaaagtgctgggatta

SEQ ID NO: 21848 - DNA, 20 bp, synthetic construct
  misc_feature 1..20: note = Description of Artificial Sequence: Synthetic oligonucleotide
  misc_feature 1..20: note = Target: FXN; (+) strand; PAM type: NRG; PAM sequence: AGG
  source 1..20: mol_type = other DNA
tcccaaagtgctgggattac

SEQ ID NO: 21849 - DNA, 20 bp, synthetic construct
  misc_feature 1..20: note = Description of Artificial Sequence: Synthetic oligonucleotide
  misc_feature 1..20: note = Target: FXN; (+) strand; PAM type: NRG; PAM sequence: GAG
  source 1..20: mol_type = other DNA
agtgctgggattacaggcgt

SEQ ID NO: 21850 - DNA, 20 bp, synthetic construct
  misc_feature 1..20: note = Description of Artificial Sequence: Synthetic oligonucleotide
  misc_feature 1..20: note = Target: FXN; (+) strand; PAM type: NRG; PAM sequence: CAG
  source 1..20: mol_type = other DNA
caggcgtgagccactgcacc

SEQ ID NO: 21851 - DNA, 20 bp, synthetic construct
  misc_feature 1..20: note = Description of Artificial Sequence: Synthetic oligonucleotide
  misc_feature 1..20: note = Target: FXN; (+) strand; PAM type: NRG; PAM sequence: CAG
  source 1..20: mol_type = other DNA
cgtgagccactgcacccagc

SEQ ID NO: 21852 - DNA, 20 bp, synthetic construct
  misc_feature 1..20: note = Description of Artificial Sequence: Synthetic oligonucleotide
  misc_feature 1..20: note = Target: FXN; (+) strand; PAM type: NRG; PAM sequence: TGG
  source 1..20: mol_type = other DNA
cagaaatgccttctaatctt

SEQ ID NO: 21853 - DNA, 20 bp, synthetic construct
  misc_feature 1..20: note = Description of Artificial Sequence: Synthetic oligonucleotide
  misc_feature 1..20: note = Target: FXN; (+) strand; PAM type: NRG; PAM sequence: TAG
  source 1..20: mol_type = other DNA
aatctttggtttatcttaat

SEQ ID NO: 21854 - DNA, 20 bp, synthetic construct
  misc_feature 1..20: note = Description of Artificial Sequence: Synthetic oligonucleotide
  misc_feature 1..20: note = Target: FXN; (+) strand; PAM type: NRG; PAM sequence: CAG
  source 1..20: mol_type = other DNA
tttggtttatcttaattagc

SEQ ID NO: 21855 - DNA, 20 bp, synthetic construct
  misc_feature 1..20: note = Description of Artificial Sequence: Synthetic oligonucleotide
  misc_feature 1..20: note = Target: FXN; (+) strand; PAM type: NRG; PAM sequence: AGG
  source 1..20: mol_type = other DNA
ttggtttatcttaattagcc

SEQ ID NO: 21856 - DNA, 20 bp, synthetic construct
  misc_feature 1..20: note = Description of Artificial Sequence: Synthetic oligonucleotide
  misc_feature 1..20: note = Target: FXN; (+) strand; PAM type: NRG; PAM sequence: TGG
  source 1..20: mol_type = other DNA
tcttaattagccaggacact

SEQ ID NO: 21857 - DNA, 20 bp, synthetic construct
  misc_feature 1..20: note = Description of Artificial Sequence: Synthetic oligonucleotide
  misc_feature 1..20: note = Target: FXN; (+) strand; PAM type: NRG; PAM sequence: GAG
  source 1..20: mol_type = other DNA
ttaattagccaggacacttg

SEQ ID NO: 21858 - DNA, 20 bp, synthetic construct
  misc_feature 1..20: note = Description of Artificial Sequence: Synthetic oligonucleotide
  misc_feature 1..20: note = Target: FXN; (+) strand; PAM type: NRG; PAM sequence: AAG
  source 1..20: mol_type = other DNA
gacacttggagtgcatcccg

SEQ ID NO: 21859 - DNA, 20 bp, synthetic construct
  misc_feature 1..20: note = Description of Artificial Sequence: Synthetic oligonucleotide
  misc_feature 1..20: note = Target: FXN; (+) strand; PAM type: NRG; PAM sequence: CAG
  source 1..20: mol_type = other DNA
tgcatcccgaagtacctgat

SEQ ID NO: 21860 - DNA, 20 bp, synthetic construct
  misc_feature 1..20: note = Description of Artificial Sequence: Synthetic oligonucleotide
  misc_feature 1..20: note = Target: FXN; (+) strand; PAM type: NRG; PAM sequence: TGG
  source 1..20: mol_type = other DNA
atcccgaagtacctgatcag

SEQ ID NO: 21861 - DNA, 20 bp, synthetic construct
  misc_feature 1..20: note = Description of Artificial Sequence: Synthetic oligonucleotide
  misc_feature 1..20: note = Target: FXN; (+) strand; PAM type: NRG; PAM sequence: TGG
  source 1..20: mol_type = other DNA
tacctgatcagtggcccctt

SEQ ID NO: 21862 - DNA, 20 bp, synthetic construct
  misc_feature 1..20: note = Description of Artificial Sequence: Synthetic oligonucleotide
  misc_feature 1..20: note = Target: FXN; (+) strand; PAM type: NRG; PAM sequence: CAG
  source 1..20: mol_type = other DNA
cctttggaatgtgtaaaact

SEQ ID NO: 21863 - DNA, 20 bp, synthetic construct
  misc_feature 1..20: note = Description of Artificial Sequence: Synthetic oligonucleotide
  misc_feature 1..20: note = Target: FXN; (+) strand; PAM type: NRG; PAM sequence: CAG
  source 1..20: mol_type = other DNA
ttatatccctgcatccgcta

SEQ ID NO: 21864 - DNA, 20 bp, synthetic construct
  misc_feature 1..20: note = Description of Artificial Sequence: Synthetic oligonucleotide
  misc_feature 1..20: note = Target: FXN; (+) strand; PAM type: NRG; PAM sequence: GAG
  source 1..20: mol_type = other DNA
atatccctgcatccgctaca

SEQ ID NO: 21865 - DNA, 20 bp, synthetic construct
  misc_feature 1..20: note = Description of Artificial Sequence: Synthetic oligonucleotide
  misc_feature 1..20: note = Target: FXN; (+) strand; PAM type: NRG; PAM sequence: CAG
  source 1..20: mol_type = other DNA
ccctgcatccgctacagaga

SEQ ID NO: 21866 - DNA, 20 bp, synthetic construct
  misc_feature 1..20: note = Description of Artificial Sequence: Synthetic oligonucleotide
  misc_feature 1..20: note = Target: FXN; (+) strand; PAM type: NRG; PAM sequence: AAG
  source 1..20: mol_type = other DNA
ccgctacagagacagaatcc

SEQ ID NO: 21867 - DNA, 20 bp, synthetic construct
  misc_feature 1..20: note = Description of Artificial Sequence: Synthetic oligonucleotide
  misc_feature 1..20: note = Target: FXN; (+) strand; PAM type: NRG; PAM sequence: TGG
  source 1..20: mol_type = other DNA
ctcatatgttccatcttctc

SEQ ID NO: 21868 - DNA, 20 bp, synthetic construct
  misc_feature 1..20: note = Description of Artificial Sequence: Synthetic oligonucleotide
  misc_feature 1..20: note = Target: FXN; (+) strand; PAM type: NRG; PAM sequence: TAG
  source 1..20: mol_type = other DNA
ttccatcttctctggctgta

SEQ ID NO: 21869 - DNA, 20 bp, synthetic construct
  misc_feature 1..20: note = Description of Artificial Sequence: Synthetic oligonucleotide
  misc_feature 1..20: note = Target: FXN; (+) strand; PAM type: NRG; PAM sequence: AAG
  source 1..20: mol_type = other DNA
cttctctggctgtatagttt

SEQ ID NO: 21870 - DNA, 20 bp, synthetic construct
  misc_feature 1..20: note = Description of Artificial Sequence: Synthetic oligonucleotide
  misc_feature 1..20: note = Target: FXN; (+) strand; PAM type: NRG; PAM sequence: AGG
  source 1..20: mol_type = other DNA
ttctctggctgtatagttta

SEQ ID NO: 21871 - DNA, 20 bp, synthetic construct
  misc_feature 1..20: note = Description of Artificial Sequence: Synthetic oligonucleotide
  misc_feature 1..20: note = Target: FXN; (+) strand; PAM type: NRG; PAM sequence: TGG
  source 1..20: mol_type = other DNA
tggctgtatagtttaaggaa

SEQ ID NO: 21872 - DNA, 20 bp, synthetic construct
  misc_feature 1..20: note = Description of Artificial Sequence: Synthetic oligonucleotide
  misc_feature 1..20: note = Target: FXN; (+) strand; PAM type: NRG; PAM sequence: AAG
  source 1..20: mol_type = other DNA
ctgtatagtttaaggaatgg

SEQ ID NO: 21873 - DNA, 20 bp, synthetic construct
  misc_feature 1..20: note = Description of Artificial Sequence: Synthetic oligonucleotide
  misc_feature 1..20: note = Target: FXN; (+) strand; PAM type: NRG; PAM sequence: AGG
  source 1..20: mol_type = other DNA
tgtatagtttaaggaatgga

SEQ ID NO: 21874 - DNA, 20 bp, synthetic construct
  misc_feature 1..20: note = Description of Artificial Sequence: Synthetic oligonucleotide
  misc_feature 1..20: note = Target: FXN; (+) strand; PAM type: NRG; PAM sequence: CAG
  source 1..20: mol_type = other DNA
gtttaaggaatggaaggcac

SEQ ID NO: 21875 - DNA, 20 bp, synthetic construct
  misc_feature 1..20: note = Description of Artificial Sequence: Synthetic oligonucleotide
  misc_feature 1..20: note = Target: FXN; (+) strand; PAM type: NRG; PAM sequence: CAG
  source 1..20: mol_type = other DNA
aggaatggaaggcaccagaa

SEQ ID NO: 21876 - DNA, 20 bp, synthetic construct
  misc_feature 1..20: note = Description of Artificial Sequence: Synthetic oligonucleotide
  misc_feature 1..20: note = Target: FXN; (+) strand; PAM type: NRG; PAM sequence: TAG
  source 1..20: mol_type = other DNA
agatttattgaaatgtttat

SEQ ID NO: 21877 - DNA, 20 bp, synthetic construct
  misc_feature 1..20: note = Description of Artificial Sequence: Synthetic oligonucleotide
  misc_feature 1..20: note = Target: FXN; (+) strand; PAM type: NRG; PAM sequence: AAG
  source 1..20: mol_type = other DNA
attgaaatgtttattagctg

SEQ ID NO: 21878 - DNA, 20 bp, synthetic construct
  misc_feature 1..20: note = Description of Artificial Sequence: Synthetic oligonucleotide
  misc_feature 1..20: note = Target: FXN; (+) strand; PAM type: NRG; PAM sequence: TAG
  source 1..20: mol_type = other DNA
ttattagctgaagatttatt

SEQ ID NO: 21879 - DNA, 20 bp, synthetic construct
  misc_feature 1..20: note = Description of Artificial Sequence: Synthetic oligonucleotide
  misc_feature 1..20: note = Target: FXN; (+) strand; PAM type: NRG; PAM sequence: CAG
  source 1..20: mol_type = other DNA
tagctgaagatttatttaga

SEQ ID NO: 21880 - DNA, 20 bp, synthetic construct
  misc_feature 1..20: note = Description of Artificial Sequence: Synthetic oligonucleotide
  misc_feature 1..20: note = Target: FXN; (+) strand; PAM type: NRG; PAM sequence: GAG
  source 1..20: mol_type = other DNA
gaagatttatttagacagtt

SEQ ID NO: 21881 - DNA, 20 bp, synthetic construct
  misc_feature 1..20: note = Description of Artificial Sequence: Synthetic oligonucleotide
  misc_feature 1..20: note = Target: FXN; (+) strand; PAM type: NRG; PAM sequence: AGG
  source 1..20: mol_type = other DNA
aagatttatttagacagttg

SEQ ID NO: 21882 - DNA, 20 bp, synthetic construct
  misc_feature 1..20: note = Description of Artificial Sequence: Synthetic oligonucleotide
  misc_feature 1..20: note = Target: FXN; (+) strand; PAM type: NRG; PAM sequence: CAG
  source 1..20: mol_type = other DNA
tagacagttgaggaaaacat

SEQ ID NO: 21883 - DNA, 20 bp, synthetic construct
  misc_feature 1..20: note = Description of Artificial Sequence: Synthetic oligonucleotide
  misc_feature 1..20: note = Target: FXN; (+) strand; PAM type: NRG; PAM sequence: CAG
  source 1..20: mol_type = other DNA
ttgaggaaaacatcagcacc

SEQ ID NO: 21884 - DNA, 20 bp, synthetic construct
  misc_feature 1..20: note = Description of Artificial Sequence: Synthetic oligonucleotide
  misc_feature 1..20: note = Target: FXN; (+) strand; PAM type: NRG; PAM sequence: CAG
  source 1..20: mol_type = other DNA
aggaaaacatcagcacccag

SEQ ID NO: 21885 - DNA, 20 bp, synthetic construct
  misc_feature 1..20: note = Description of Artificial Sequence: Synthetic oligonucleotide
  misc_feature 1..20: note = Target: FXN; (+) strand; PAM type: NRG; PAM sequence: TGG
  source 1..20: mol_type = other DNA
tcagcacccagcagtaaaat

SEQ ID NO: 21886 - DNA, 20 bp, synthetic construct
  misc_feature 1..20: note = Description of Artificial Sequence: Synthetic oligonucleotide
  misc_feature 1..20: note = Target: FXN; (+) strand; PAM type: NRG; PAM sequence: AAG
  source 1..20: mol_type = other DNA
agcagtaaaattggctctca

SEQ ID NO: 21887 - DNA, 20 bp, synthetic construct
  misc_feature 1..20: note = Description of Artificial Sequence: Synthetic oligonucleotide
  misc_feature 1..20: note = Target: FXN; (+) strand; PAM type: NRG; PAM sequence: TGG
  source 1..20: mol_type = other DNA
tcaaagattttcttctcctg

SEQ ID NO: 21888 - DNA, 20 bp, synthetic construct
  misc_feature 1..20: note = Description of Artificial Sequence: Synthetic oligonucleotide
  misc_feature 1..20: note = Target: FXN; (+) strand; PAM type: NRG; PAM sequence: AAG
  source 1..20: mol_type = other DNA
agattttcttctcctgtgga

SEQ ID NO: 21889 - DNA, 20 bp, synthetic construct
  misc_feature 1..20: note = Description of Artificial Sequence: Synthetic oligonucleotide
  misc_feature 1..20: note = Target: FXN; (+) strand; PAM type: NRG; PAM sequence: CAG
  source 1..20: mol_type = other DNA
tttcttctcctgtggaaagt

SEQ ID NO: 21890 - DNA, 20 bp, synthetic construct
  misc_feature 1..20: note = Description of Artificial Sequence: Synthetic oligonucleotide
  misc_feature 1..20: note = Target: FXN; (+) strand; PAM type: NRG; PAM sequence: GAG
  source 1..20: mol_type = other DNA
ctgtggaaagtcagacctct

SEQ ID NO: 21891 - DNA, 20 bp, synthetic construct
  misc_feature 1..20: note = Description of Artificial Sequence: Synthetic oligonucleotide
  misc_feature 1..20: note = Target: FXN; (+) strand; PAM type: NRG; PAM sequence: AGG
  source 1..20: mol_type = other DNA
tgtggaaagtcagacctctg

SEQ ID NO: 21892 - DNA, 20 bp, synthetic construct
  misc_feature 1..20: note = Description of Artificial Sequence: Synthetic oligonucleotide
  misc_feature 1..20: note = Target: FXN; (+) strand; PAM type: NRG; PAM sequence: CAG
  source 1..20: mol_type = other DNA
cagacctctgaggccccatc

SEQ ID NO: 21893 - DNA, 20 bp, synthetic construct
  misc_feature 1..20: note = Description of Artificial Sequence: Synthetic oligonucleotide
  misc_feature 1..20: note = Target: FXN; (+) strand; PAM type: NRG; PAM sequence: AGG
  source 1..20: mol_type = other DNA
agacctctgaggccccatcc

SEQ ID NO: 21894 - DNA, 20 bp, synthetic construct
  misc_feature 1..20: note = Description of Artificial Sequence: Synthetic oligonucleotide
  misc_feature 1..20: note = Target: FXN; (+) strand; PAM type: NRG; PAM sequence: TAG
  source 1..20: mol_type = other DNA
cctctgaggccccatccagg

SEQ ID NO: 21895 - DNA, 20 bp, synthetic construct
  misc_feature 1..20: note = Description of Artificial Sequence: Synthetic oligonucleotide
  misc_feature 1..20: note = Target: FXN; (+) strand; PAM type: NRG; PAM sequence: AAG
  source 1..20: mol_type = other DNA
ctgaggccccatccaggtag

SEQ ID NO: 21896 - DNA, 20 bp, synthetic construct
  misc_feature 1..20: note = Description of Artificial Sequence: Synthetic oligonucleotide
  misc_feature 1..20: note = Target: FXN; (+) strand; PAM type: NRG; PAM sequence: TAG
  source 1..20: mol_type = other DNA
ccccatccaggtagaagtac

SEQ ID NO: 21897 - DNA, 20 bp, synthetic construct
  misc_feature 1..20: note = Description of Artificial Sequence: Synthetic oligonucleotide
  misc_feature 1..20: note = Target: FXN; (+) strand; PAM type: NRG; PAM sequence: AAG
  source 1..20: mol_type = other DNA
ccaggtagaagtactagtgc

SEQ ID NO: 21898 - DNA, 20 bp, synthetic construct
  misc_feature 1..20: note = Description of Artificial Sequence: Synthetic oligonucleotide
  misc_feature 1..20: note = Target: FXN; (+) strand; PAM type: NRG; PAM sequence: AAG
  source 1..20: mol_type = other DNA
ggtagaagtactagtgcaag

SEQ ID NO: 21899 - DNA, 20 bp, synthetic construct
  misc_feature 1..20: note = Description of Artificial Sequence: Synthetic oligonucleotide
  misc_feature 1..20: note = Target: FXN; (+) strand; PAM type: NRG; PAM sequence: AGG
  source 1..20: mol_type = other DNA
gtagaagtactagtgcaaga

SEQ ID NO: 21900 - DNA, 20 bp, synthetic construct
  misc_feature 1..20: note = Description of Artificial Sequence: Synthetic oligonucleotide
  misc_feature 1..20: note = Target: FXN; (+) strand; PAM type: NRG; PAM sequence: GGG
  source 1..20: mol_type = other DNA
tagaagtactagtgcaagaa

SEQ ID NO: 21901 - DNA, 20 bp, synthetic construct
  misc_feature 1..20: note = Description of Artificial Sequence: Synthetic oligonucleotide
  misc_feature 1..20: note = Target: FXN; (+) strand; PAM type: NRG; PAM sequence: TGG
  source 1..20: mol_type = other DNA
acttgtgtttctgtgatctg

SEQ ID NO: 21902 - DNA, 20 bp, synthetic construct
  misc_feature 1..20: note = Description of Artificial Sequence: Synthetic oligonucleotide
  misc_feature 1..20: note = Target: FXN; (+) strand; PAM type: NRG; PAM sequence: GGG
  source 1..20: mol_type = other DNA
cttgtgtttctgtgatctgt

SEQ ID NO: 21903 - DNA, 20 bp, synthetic construct
  misc_feature 1..20: note = Description of Artificial Sequence: Synthetic oligonucleotide
  misc_feature 1..20: note = Target: FXN; (+) strand; PAM type: NRG; PAM sequence: TAG
  source 1..20: mol_type = other DNA
catcttgacctcaaattgtt

SEQ ID NO: 21904 - DNA, 20 bp, synthetic construct
  misc_feature 1..20: note = Description of Artificial Sequence: Synthetic oligonucleotide
  misc_feature 1..20: note = Target: FXN; (+) strand; PAM type: NRG; PAM sequence: TGG
  source 1..20: mol_type = other DNA
acctcaaattgtttagctcc

SEQ ID NO: 21905 - DNA, 20 bp, synthetic construct
  misc_feature 1..20: note = Description of Artificial Sequence: Synthetic oligonucleotide
  misc_feature 1..20: note = Target: FXN; (+) strand; PAM type: NRG; PAM sequence: CAG
  source 1..20: mol_type = other DNA
caaattgtttagctcctggc

SEQ ID NO: 21906 - DNA, 20 bp, synthetic construct
  misc_feature 1..20: note = Description of Artificial Sequence: Synthetic oligonucleotide
  misc_feature 1..20: note = Target: FXN; (+) strand; PAM type: NRG; PAM sequence: CGG
  source 1..20: mol_type = other DNA
gtttagctcctggccagaca

SEQ ID NO: 21907 - DNA, 20 bp, synthetic construct
  misc_feature 1..20: note = Description of Artificial Sequence: Synthetic oligonucleotide
  misc_feature 1..20: note = Target: FXN; (+) strand; PAM type: NRG; PAM sequence: TGG
  source 1..20: mol_type = other DNA
tagctcctggccagacacgg

SEQ ID NO: 21908 - DNA, 20 bp, synthetic construct
  misc_feature 1..20: note = Description of Artificial Sequence: Synthetic oligonucleotide
  misc_feature 1..20: note = Target: FXN; (+) strand; PAM type: NRG; PAM sequence: CAG
  source 1..20: mol_type = other DNA
gtggctcacacctgtaatcc

SEQ ID NO: 21909 - DNA, 20 bp, synthetic construct
  misc_feature 1..20: note = Description of Artificial Sequence: Synthetic oligonucleotide
  misc_feature 1..20: note = Target: FXN; (+) strand; PAM type: NRG; PAM sequence: GAG
  source 1..20: mol_type = other DNA
acctgtaatcccagcacttt

SEQ ID NO: 21910 - DNA, 20 bp, synthetic construct
  misc_feature 1..20: note = Description of Artificial Sequence: Synthetic oligonucleotide
  misc_feature 1..20: note = Target: FXN; (+) strand; PAM type: NRG; PAM sequence: GAG
  source 1..20: mol_type = other DNA
ctgtaatcccagcactttga

SEQ ID NO: 21911 - DNA, 20 bp, synthetic construct
  misc_feature 1..20: note = Description of Artificial Sequence: Synthetic oligonucleotide
  misc_feature 1..20: note = Target: FXN; (+) strand; PAM type: NRG; PAM sequence: AGG
  source 1..20: mol_type = other DNA
tgtaatcccagcactttgag

SEQ ID NO: 21912 - DNA, 20 bp, synthetic construct
  misc_feature 1..20: note = Description of Artificial Sequence: Synthetic oligonucleotide
  misc_feature 1..20: note = Target: FXN; (+) strand; PAM type: NRG; PAM sequence: GAG
  source 1..20: mol_type = other DNA
tcccagcactttgagaggct

SEQ ID NO: 21913 - DNA, 20 bp, synthetic construct
  misc_feature 1..20: note = Description of Artificial Sequence: Synthetic oligonucleotide
  misc_feature 1..20: note = Target: FXN; (+) strand; PAM type: NRG; PAM sequence: AGG
  source 1..20: mol_type = other DNA
cccagcactttgagaggctg

SEQ ID NO: 21914 - DNA, 20 bp, synthetic construct
  misc_feature 1..20: note = Description of Artificial Sequence: Synthetic oligonucleotide
  misc_feature 1..20: note = Target: FXN; (+) strand; PAM type: NRG; PAM sequence: CAG
  source 1..20: mol_type = other DNA
agcactttgagaggctgagg

SEQ ID NO: 21915 - DNA, 20 bp, synthetic construct
  misc_feature 1..20: note = Description of Artificial Sequence: Synthetic oligonucleotide
  misc_feature 1..20: note = Target: FXN; (+) strand; PAM type: NRG; PAM sequence: AGG
  source 1..20: mol_type = other DNA
gcactttgagaggctgaggc

SEQ ID NO: 21916 - DNA, 20 bp, synthetic construct
  misc_feature 1..20: note = Description of Artificial Sequence: Synthetic oligonucleotide
  misc_feature 1..20: note = Target: FXN; (+) strand; PAM type: NRG; PAM sequence: TGG
  source 1..20: mol_type = other DNA
ctttgagaggctgaggcagg

SEQ ID NO: 21917 - DNA, 20 bp, synthetic construct
  misc_feature 1..20: note = Description of Artificial Sequence: Synthetic oligonucleotide
  misc_feature 1..20: note = Target: FXN; (+) strand; PAM type: NRG; PAM sequence: GAG
  source 1..20: mol_type = other DNA
ctgaggcaggtggatcacct

SEQ ID NO: 21918 - DNA, 20 bp, synthetic construct
  misc_feature 1..20: note = Description of Artificial Sequence: Synthetic oligonucleotide
  misc_feature 1..20: note = Target: FXN; (+) strand; PAM type: NRG; PAM sequence: AGG
  source 1..20: mol_type = other DNA
tgaggcaggtggatcacctg

SEQ ID NO: 21919 - DNA, 20 bp, synthetic construct
  misc_feature 1..20: note = Description of Artificial Sequence: Synthetic oligonucleotide
  misc_feature 1..20: note = Target: FXN; (+) strand; PAM type: NRG; PAM sequence: TAG
  source 1..20: mol_type = other DNA
gcaggtggatcacctgaggt

SEQ ID NO: 21920 - DNA, 20 bp, synthetic construct
  misc_feature 1..20: note = Description of Artificial Sequence: Synthetic oligonucleotide
  misc_feature 1..20: note = Target: FXN; (+) strand; PAM type: NRG; PAM sequence: AGG
  source 1..20: mol_type = other DNA
caggtggatcacctgaggtt

SEQ ID NO: 21921 - DNA, 20 bp, synthetic construct
  misc_feature 1..20: note = Description of Artificial Sequence: Synthetic oligonucleotide
  misc_feature 1..20: note = Target: FXN; (+) strand; PAM type: NRG; PAM sequence: GAG
  source 1..20: mol_type = other DNA
ggtggatcacctgaggttag

SEQ ID NO: 21922 - DNA, 20 bp, synthetic construct
  misc_feature 1..20: note = Description of Artificial Sequence: Synthetic oligonucleotide
  misc_feature 1..20: note = Target: FXN; (+) strand; PAM type: NRG; PAM sequence: GAG
  source 1..20: mol_type = other DNA
tcacctgaggttaggagttc

SEQ ID NO: 21923 - DNA, 20 bp, synthetic construct
  misc_feature 1..20: note = Description of Artificial Sequence: Synthetic oligonucleotide
  misc_feature 1..20: note = Target: FXN; (+) strand; PAM type: NRG; PAM sequence: AGG
  source 1..20: mol_type = other DNA
cacctgaggttaggagttcg

SEQ ID NO: 21924 - DNA, 20 bp, synthetic construct
  misc_feature 1..20: note = Description of Artificial Sequence: Synthetic oligonucleotide
  misc_feature 1..20: note = Target: FXN; (+) strand; PAM type: NRG; PAM sequence: CAG
  source 1..20: mol_type = other DNA
tgaggttaggagttcgaggc

SEQ ID NO: 21925 - DNA, 20 bp, synthetic construct
  misc_feature 1..20: note = Description of Artificial Sequence: Synthetic oligonucleotide
  misc_feature 1..20: note = Target: FXN; (+) strand; PAM type: NRG; PAM sequence: TGG
  source 1..20: mol_type = other DNA
ttaggagttcgaggccagcc

SEQ ID NO: 21926 - DNA, 20 bp, synthetic construct
  misc_feature 1..20: note = Description of Artificial Sequence: Synthetic oligonucleotide
  misc_feature 1..20: note = Target: FXN; (+) strand; PAM type: NRG; PAM sequence: TGG
  source 1..20: mol_type = other DNA
cgaggccagcctggtcaaca

SEQ ID NO: 21927 - DNA, 20 bp, synthetic construct
  misc_feature 1..20: note = Description of Artificial Sequence: Synthetic oligonucleotide
  misc_feature 1..20: note = Target: FXN; (+) strand; PAM type: NRG; PAM sequence: TAG
  source 1..20: mol_type = other DNA
tctactaaaaatacaaaaat

SEQ ID NO: 21928 - DNA, 20 bp, synthetic construct
  misc_feature 1..20: note = Description of Artificial Sequence: Synthetic oligonucleotide
  misc_feature 1..20: note = Target: FXN; (+) strand; PAM type: NRG; PAM sequence: TGG
  source 1..20: mol_type = other DNA
ctaaaaatacaaaaattagc

SEQ ID NO: 21929 - DNA, 20 bp, synthetic construct
  misc_feature 1..20: note = Description of Artificial Sequence: Synthetic oligonucleotide
  misc_feature 1..20: note = Target: FXN; (+) strand; PAM type: NRG; PAM sequence: TAG
  source 1..20: mol_type = other DNA
atacaaaaattagctggccg

SEQ ID NO: 21930 - DNA, 20 bp, synthetic construct
  misc_feature 1..20: note = Description of Artificial Sequence: Synthetic oligonucleotide
  misc_feature 1..20: note = Target: FXN; (+) strand; PAM type: NRG; PAM sequence: TGG
  source 1..20: mol_type = other DNA
caaaaattagctggccgtag

SEQ ID NO: 21931 - DNA, 20 bp, synthetic construct
  misc_feature 1..20: note = Description of Artificial Sequence: Synthetic oligonucleotide
  misc_feature 1..20: note = Target: FXN; (+) strand; PAM type: NRG; PAM sequence: CAG
  source 1..20: mol_type = other DNA
gtggcgcacgcctgttatcc

SEQ ID NO: 21932 - DNA, 20 bp, synthetic construct
  misc_feature 1..20: note = Description of Artificial Sequence: Synthetic oligonucleotide
  misc_feature 1..20: note = Target: FXN; (+) strand; PAM type: NRG; PAM sequence: CGG
  source 1..20: mol_type = other DNA
cgcctgttatcccagctact

SEQ ID NO: 21933 - DNA, 20 bp, synthetic construct
  misc_feature 1..20: note = Description of Artificial Sequence: Synthetic oligonucleotide
  misc_feature 1..20: note = Target: FXN; (+) strand; PAM type: NRG; PAM sequence: GGG
  source 1..20: mol_type = other DNA
gcctgttatcccagctactc

SEQ ID NO: 21934 - DNA, 20 bp, synthetic construct
  misc_feature 1..20: note = Description of Artificial Sequence: Synthetic oligonucleotide
  misc_feature 1..20: note = Target: FXN; (+) strand; PAM type: NRG; PAM sequence: GAG
  source 1..20: mol_type = other DNA
ctgttatcccagctactcgg

SEQ ID NO: 21935 - DNA, 20 bp, synthetic construct
  misc_feature 1..20: note = Description of Artificial Sequence: Synthetic oligonucleotide
  misc_feature 1..20: note = Target: FXN; (+) strand; PAM type: NRG; PAM sequence: AGG
  source 1..20: mol_type = other DNA
tgttatcccagctactcggg

SEQ ID NO: 21936 - DNA, 20 bp, synthetic construct
  misc_feature 1..20: note = Description of Artificial Sequence: Synthetic oligonucleotide
  misc_feature 1..20: note = Target: FXN; (+) strand; PAM type: NRG; PAM sequence: GAG
  source 1..20: mol_type = other DNA
tcccagctactcgggaggct

SEQ ID NO: 21937 - DNA, 20 bp, synthetic construct
  misc_feature 1..20: note = Description of Artificial Sequence: Synthetic oligonucleotide
  misc_feature 1..20: note = Target: FXN; (+) strand; PAM type: NRG; PAM sequence: AGG
  source 1..20: mol_type = other DNA
cccagctactcgggaggctg

SEQ ID NO: 21938 - DNA, 20 bp, synthetic construct
  misc_feature 1..20: note = Description of Artificial Sequence: Synthetic oligonucleotide
  misc_feature 1..20: note = Target: FXN; (+) strand; PAM type: NRG; PAM sequence: CAG
  source 1..20: mol_type = other DNA
agctactcgggaggctgagg

SEQ ID NO: 21939 - DNA, 20 bp, synthetic construct
  misc_feature 1..20: note = Description of Artificial Sequence: Synthetic oligonucleotide
  misc_feature 1..20: note = Target: FXN; (+) strand; PAM type: NRG; PAM sequence: AGG
  source 1..20: mol_type = other DNA
gctactcgggaggctgaggc

SEQ ID NO: 21940 - DNA, 20 bp, synthetic construct
  misc_feature 1..20: note = Description of Artificial Sequence: Synthetic oligonucleotide
  misc_feature 1..20: note = Target: FXN; (+) strand; PAM type: NRG; PAM sequence: GAG
  source 1..20: mol_type = other DNA
tactcgggaggctgaggcag

SEQ ID NO: 21941 - DNA, 20 bp, synthetic construct
  misc_feature 1..20: note = Description of Artificial Sequence: Synthetic oligonucleotide
  misc_feature 1..20: note = Target: FXN; (+) strand; PAM type: NRG; PAM sequence: TGG
  source 1..20: mol_type = other DNA
gcaggagaattgcttgaacc

SEQ ID NO: 21942 - DNA, 20 bp, synthetic construct
  misc_feature 1..20: note = Description of Artificial Sequence: Synthetic oligonucleotide
  misc_feature 1..20: note = Target: FXN; (+) strand; PAM type: NRG; PAM sequence: GGG
  source 1..20: mol_type = other DNA
caggagaattgcttgaacct

SEQ ID NO: 21943 - DNA, 20 bp, synthetic construct
  misc_feature 1..20: note = Description of Artificial Sequence: Synthetic oligonucleotide
  misc_feature 1..20: note = Target: FXN; (+) strand; PAM type: NRG; PAM sequence: TGG
  source 1..20: mol_type = other DNA
gagaattgcttgaacctggg

SEQ ID NO: 21944 - DNA, 20 bp, synthetic construct
  misc_feature 1..20: note = Description of Artificial Sequence: Synthetic oligonucleotide
  misc_feature 1..20: note = Target: FXN; (+) strand; PAM type: NRG; PAM sequence: TGG
  source 1..20: mol_type = other DNA
aattgcttgaacctgggtgg

SEQ ID NO: 21945 - DNA, 20 bp, synthetic construct
  misc_feature 1..20: note = Description of Artificial Sequence: Synthetic oligonucleotide
  misc_feature 1..20: note = Target: FXN; (+) strand; PAM type: NRG; PAM sequence: GAG
  source 1..20: mol_type = other DNA
ttgcttgaacctgggtggtg

SEQ ID NO: 21946 - DNA, 20 bp, synthetic construct
  misc_feature 1..20: note = Description of Artificial Sequence: Synthetic oligonucleotide
  misc_feature 1..20: note = Target: FXN; (+) strand; PAM type: NRG; PAM sequence: AGG
  source 1..20: mol_type = other DNA
tgcttgaacctgggtggtgg

SEQ ID NO: 21947 - DNA, 20 bp, synthetic construct
  misc_feature 1..20: note = Description of Artificial Sequence: Synthetic oligonucleotide
  misc_feature 1..20: note = Target: FXN; (+) strand; PAM type: NRG; PAM sequence: CAG
  source 1..20: mol_type = other DNA
aacctgggtggtggaggttg

SEQ ID NO: 21948 - DNA, 20 bp, synthetic construct
  misc_feature 1..20: note = Description of Artificial Sequence: Synthetic oligonucleotide
  misc_feature 1..20: note = Target: FXN; (+) strand; PAM type: NRG; PAM sequence: GAG
  source 1..20: mol_type = other DNA
tgggtggtggaggttgcagt

SEQ ID NO: 21949 - DNA, 20 bp, synthetic construct
  misc_feature 1..20: note = Description of Artificial Sequence: Synthetic oligonucleotide
  misc_feature 1..20: note = Target: FXN; (+) strand; PAM type: NRG; PAM sequence: GAG
  source 1..20: mol_type = other DNA
ggtggaggttgcagtgagcc

SEQ ID NO: 21950 - DNA, 20 bp, synthetic construct
  misc_feature 1..20: note = Description of Artificial Sequence: Synthetic oligonucleotide
  misc_feature 1..20: note = Target: FXN; (+) strand; PAM type: NRG; PAM sequence: CAG
  source 1..20: mol_type = other DNA
gagattacaccactgcactc

SEQ ID NO: 21951 - DNA, 20 bp, synthetic construct
  misc_feature 1..20: note = Description of Artificial Sequence: Synthetic oligonucleotide
  misc_feature 1..20: note = Target: FXN; (+) strand; PAM type: NRG; PAM sequence: TGG
  source 1..20: mol_type = other DNA
tacaccactgcactccagcc

SEQ ID NO: 21952 - DNA, 20 bp, synthetic construct
  misc_feature 1..20: note = Description of Artificial Sequence: Synthetic oligonucleotide
  misc_feature 1..20: note = Target: FXN; (+) strand; PAM type: NRG; PAM sequence: GGG
  source 1..20: mol_type = other DNA
acaccactgcactccagcct

SEQ ID NO: 21953 - DNA, 20 bp, synthetic construct
  misc_feature 1..20: note = Description of Artificial Sequence: Synthetic oligonucleotide
  misc_feature 1..20: note = Target: FXN; (+) strand; PAM type: NRG; PAM sequence: AAG
  source 1..20: mol_type = other DNA
tgcactccagcctgggtgac

SEQ ID NO: 21954 - DNA, 20 bp, synthetic construct
  misc_feature 1..20: note = Description of Artificial Sequence: Synthetic oligonucleotide
  misc_feature 1..20: note = Target: FXN; (+) strand; PAM type: NRG; PAM sequence: GAG
  source 1..20: mol_type = other DNA
cactccagcctgggtgacaa

SEQ ID NO: 21955 - DNA, 20 bp, synthetic construct
  misc_feature 1..20: note = Description of Artificial Sequence: Synthetic oligonucleotide
  misc_feature 1..20: note = Target: FXN; (+) strand; PAM type: NRG; PAM sequence: AGG
  source 1..20: mol_type = other DNA
actccagcctgggtgacaag

SEQ ID NO: 21956 - DNA, 20 bp, synthetic construct
  misc_feature 1..20: note = Description of Artificial Sequence: Synthetic oligonucleotide
  misc_feature 1..20: note = Target: FXN; (+) strand; PAM type: NRG; PAM sequence: GGG
  source 1..20: mol_type = other DNA
ctccagcctgggtgacaaga

SEQ ID NO: 21957 - DNA, 20 bp, synthetic construct
  misc_feature 1..20: note = Description of Artificial Sequence: Synthetic oligonucleotide
  misc_feature 1..20: note = Target: FXN; (+) strand; PAM type: NRG; PAM sequence: AAG
  source 1..20: mol_type = other DNA
attcccgtgtctgccatctt

SEQ ID NO: 21958 - DNA, 20 bp, synthetic construct
  misc_feature 1..20: note = Description of Artificial Sequence: Synthetic oligonucleotide
  misc_feature 1..20: note = Target: FXN; (+) strand; PAM type: NRG; PAM sequence: AAG
  source 1..20: mol_type = other DNA
tgtctgccatcttaagtgta

SEQ ID NO: 21959 - DNA, 20 bp, synthetic construct
  misc_feature 1..20: note = Description of Artificial Sequence: Synthetic oligonucleotide
  misc_feature 1..20: note = Target: FXN; (+) strand; PAM type: NRG; PAM sequence: AGG
  source 1..20: mol_type = other DNA
gtctgccatcttaagtgtaa

SEQ ID NO: 21960 - DNA, 20 bp, synthetic construct
  misc_feature 1..20: note = Description of Artificial Sequence: Synthetic oligonucleotide
  misc_feature 1..20: note = Target: FXN; (+) strand; PAM type: NRG; PAM sequence: TGG
  source 1..20: mol_type = other DNA
tgccatcttaagtgtaaagg

SEQ ID NO: 21961 - DNA, 20 bp, synthetic construct
  misc_feature 1..20: note = Description of Artificial Sequence: Synthetic oligonucleotide
  misc_feature 1..20: note = Target: FXN; (+) strand; PAM type: NRG; PAM sequence: TAG
  source 1..20: mol_type = other DNA
gtaaaggtggctaaattata

SEQ ID NO: 21962 - DNA, 20 bp, synthetic construct
  misc_feature 1..20: note = Description of Artificial Sequence: Synthetic oligonucleotide
  misc_feature 1..20: note = Target: FXN; (+) strand; PAM type: NRG; PAM sequence: AAG
  source 1..20: mol_type = other DNA
gctaaattatatagaaaaat

SEQ ID NO: 21963 - DNA, 20 bp, synthetic construct
  misc_feature 1..20: note = Description of Artificial Sequence: Synthetic oligonucleotide
  misc_feature 1..20: note = Target: FXN; (+) strand; PAM type: NRG; PAM sequence: TAG
  source 1..20: mol_type = other DNA
cctaccgcactctatgatgc

SEQ ID NO: 21964 - DNA, 20 bp, synthetic construct
  misc_feature 1..20: note = Description of Artificial Sequence: Synthetic oligonucleotide
  misc_feature 1..20: note = Target: FXN; (+) strand; PAM type: NRG; PAM sequence: GAG
  source 1..20: mol_type = other DNA
cgcactctatgatgctagct

SEQ ID NO: 21965 - DNA, 20 bp, synthetic construct
  misc_feature 1..20: note = Description of Artificial Sequence: Synthetic oligonucleotide
  misc_feature 1..20: note = Target: FXN; (+) strand; PAM type: NRG; PAM sequence: AAG
  source 1..20: mol_type = other DNA
gctagctgagatttttccaa

SEQ ID NO: 21966 - DNA, 20 bp, synthetic construct
  misc_feature 1..20: note = Description of Artificial Sequence: Synthetic oligonucleotide
  misc_feature 1..20: note = Target: FXN; (+) strand; PAM type: NRG; PAM sequence: TGG
  source 1..20: mol_type = other DNA
gagatttttccaaaagaaaa

SEQ ID NO: 21967 - DNA, 20 bp, synthetic construct
  misc_feature 1..20: note = Description of Artificial Sequence: Synthetic oligonucleotide
  misc_feature 1..20: note = Target: FXN; (+) strand; PAM type: NRG; PAM sequence: AAG
  source 1..20: mol_type = other DNA
aatggcttaaataaaaccct

SEQ ID NO: 21968 - DNA, 20 bp, synthetic construct
  misc_feature 1..20: note = Description of Artificial Sequence: Synthetic oligonucleotide
  misc_feature 1..20: note = Target: FXN; (+) strand; PAM type: NRG; PAM sequence: GAG
  source 1..20: mol_type = other DNA
tggcttaaataaaaccctaa

SEQ ID NO: 21969 - DNA, 20 bp, synthetic construct
  misc_feature 1..20: note = Description of Artificial Sequence: Synthetic oligonucleotide
  misc_feature 1..20: note = Target: FXN; (+) strand; PAM type: NRG; PAM sequence: AAG
  source 1..20: mol_type = other DNA
ttaaataaaaccctaagaga

SEQ ID NO: 21970 - DNA, 20 bp, synthetic construct
  misc_feature 1..20: note = Description of Artificial Sequence: Synthetic oligonucleotide
  misc_feature 1..20: note = Target: FXN; (+) strand; PAM type: NRG; PAM sequence: AAG
  source 1..20: mol_type = other DNA
aaaaactttaaatccctcca

SEQ ID NO: 21971 - DNA, 20 bp, synthetic construct
  misc_feature 1..20: note = Description of Artificial Sequence: Synthetic oligonucleotide
  misc_feature 1..20: note = Target: FXN; (+) strand; PAM type: NRG; PAM sequence: AAG
  source 1..20: mol_type = other DNA
taaatccctccaaagctcaa

SEQ ID NO: 21972 - DNA, 20 bp, synthetic construct
  misc_feature 1..20: note = Description of Artificial Sequence: Synthetic oligonucleotide
  misc_feature 1..20: note = Target: FXN; (+) strand; PAM type: NRG; PAM sequence: TAG
  source 1..20: mol_type = other DNA
cctccaaagctcaaaagtaa

SEQ ID NO: 21973 - DNA, 20 bp, synthetic construct
  misc_feature 1..20: note = Description of Artificial Sequence: Synthetic oligonucleotide
  misc_feature 1..20: note = Target: FXN; (+) strand; PAM type: NRG; PAM sequence: CAG
  source 1..20: mol_type = other DNA
aagctcaaaagtaatagaaa

SEQ ID NO: 21974 - DNA, 20 bp, synthetic construct
  misc_feature 1..20: note = Description of Artificial Sequence: Synthetic oligonucleotide
  misc_feature 1..20: note = Target: FXN; (+) strand; PAM type: NRG; PAM sequence: GAG
  source 1..20: mol_type = other DNA
caaaagtaatagaaacagat

SEQ ID NO: 21975 - DNA, 20 bp, synthetic construct
  misc_feature 1..20: note = Description of Artificial Sequence: Synthetic oligonucleotide
  misc_feature 1..20: note = Target: FXN; (+) strand; PAM type: NRG; PAM sequence: TGG
  source 1..20: mol_type = other DNA
gtaatagaaacagatgagtt

SEQ ID NO: 21976 - DNA, 20 bp, synthetic construct
  misc_feature 1..20: note = Description of Artificial Sequence: Synthetic oligonucleotide
  misc_feature 1..20: note = Target: FXN; (+) strand; PAM type: NRG; PAM sequence: GAG
  source 1..20: mol_type = other DNA
aatagaaacagatgagtttg

SEQ ID NO: 21977 - DNA, 20 bp, synthetic construct
  misc_feature 1..20: note = Description of Artificial Sequence: Synthetic oligonucleotide
  misc_feature 1..20: note = Target: FXN; (+) strand; PAM type: NRG; PAM sequence: CAG
  source 1..20: mol_type = other DNA
gaaacagatgagtttggagt

SEQ ID NO: 21978 - DNA, 20 bp, synthetic construct
  misc_feature 1..20: note = Description of Artificial Sequence: Synthetic oligonucleotide
  misc_feature 1..20: note = Target: FXN; (+) strand; PAM type: NRG; PAM sequence: AGG
  source 1..20: mol_type = other DNA
aaacagatgagtttggagtc

SEQ ID NO: 21979 - DNA, 20 bp, synthetic construct
  misc_feature 1..20: note = Description of Artificial Sequence: Synthetic oligonucleotide
  misc_feature 1..20: note = Target: FXN; (+) strand; PAM type: NRG; PAM sequence: AAG
  source 1..20: mol_type = other DNA
tggagtcaggatttctctgt

SEQ ID NO: 21980 - DNA, 20 bp, synthetic construct
  misc_feature 1..20: note = Description of Artificial Sequence: Synthetic oligonucleotide
  misc_feature 1..20: note = Target: FXN; (+) strand; PAM type: NRG; PAM sequence: TAG
  source 1..20: mol_type = other DNA
gatttctctgtaagattgcc

SEQ ID NO: 21981 - DNA, 20 bp, synthetic construct
  misc_feature 1..20: note = Description of Artificial Sequence: Synthetic oligonucleotide
  misc_feature 1..20: note = Target: FXN; (+) strand; PAM type: NRG; PAM sequence: AGG
  source 1..20: mol_type = other DNA
atttctctgtaagattgcct

SEQ ID NO: 21982 - DNA, 20 bp, synthetic construct
  misc_feature 1..20: note = Description of Artificial Sequence: Synthetic oligonucleotide
  misc_feature 1..20: note = Target: FXN; (+) strand; PAM type: NRG; PAM sequence: CAG
  source 1..20: mol_type = other DNA
ggctgtgtactgcacatctc

SEQ ID NO: 21983 - DNA, 20 bp, synthetic construct
  misc_feature 1..20: note = Description of Artificial Sequence: Synthetic oligonucleotide
  misc_feature 1..20: note = Target: FXN; (+) strand; PAM type: NRG; PAM sequence: AGG
  source 1..20: mol_type = other DNA
gctgtgtactgcacatctcc

SEQ ID NO: 21984 - DNA, 20 bp, synthetic construct
  misc_feature 1..20: note = Description of Artificial Sequence: Synthetic oligonucleotide
  misc_feature 1..20: note = Target: FXN; (+) strand; PAM type: NRG; PAM sequence: CAG
  source 1..20: mol_type = other DNA
tctccaggtgccactgttga

SEQ ID NO: 21985 - DNA, 20 bp, synthetic construct
  misc_feature 1..20: note = Description of Artificial Sequence: Synthetic oligonucleotide
  misc_feature 1..20: note = Target: FXN; (+) strand; PAM type: NRG; PAM sequence: GAG
  source 1..20: mol_type = other DNA
tccaggtgccactgttgaca

SEQ ID NO: 21986 - DNA, 20 bp, synthetic construct
  misc_feature 1..20: note = Description of Artificial Sequence: Synthetic oligonucleotide
  misc_feature 1..20: note = Target: FXN; (+) strand; PAM type: NRG; PAM sequence: AAG
  source 1..20: mol_type = other DNA
gagattataactacaatgtg

SEQ ID NO: 21987 - DNA, 20 bp, synthetic construct
  misc_feature 1..20: note = Description of Artificial Sequence: Synthetic oligonucleotide
  misc_feature 1..20: note = Target: FXN; (+) strand; PAM type: NRG; PAM sequence: TGG
  source 1..20: mol_type = other DNA
taactacaatgtgaagtgaa

SEQ ID NO: 21988 - DNA, 20 bp, synthetic construct
  misc_feature 1..20: note = Description of Artificial Sequence: Synthetic oligonucleotide
  misc_feature 1..20: note = Target: FXN; (+) strand; PAM type: NRG; PAM sequence: CAG
  source 1..20: mol_type = other DNA
gaagtgaatggtgccactga

SEQ ID NO: 21989 - DNA, 20 bp, synthetic construct
  misc_feature 1..20: note = Description of Artificial Sequence: Synthetic oligonucleotide
  misc_feature 1..20: note = Target: FXN; (+) strand; PAM type: NRG; PAM sequence: CAG
  source 1..20: mol_type = other DNA
tgacagttatgcaaaccgtc

SEQ ID NO: 21990 - DNA, 20 bp, synthetic construct
  misc_feature 1..20: note = Description of Artificial Sequence: Synthetic oligonucleotide
  misc_feature 1..20: note = Target: FXN; (+) strand; PAM type: NRG; PAM sequence: GAG
  source 1..20: mol_type = other DNA
acagttatgcaaaccgtcca

SEQ ID NO: 21991 - DNA, 20 bp, synthetic construct
  misc_feature 1..20: note = Description of Artificial Sequence: Synthetic oligonucleotide
  misc_feature 1..20: note = Target: FXN; (+) strand; PAM type: NRG; PAM sequence: TAG
  source 1..20: mol_type = other DNA
tatgcaaaccgtccagagca

SEQ ID NO: 21992 - DNA, 20 bp, synthetic construct
  misc_feature 1..20: note = Description of Artificial Sequence: Synthetic oligonucleotide
  misc_feature 1..20: note = Target: FXN; (+) strand; PAM type: NRG; PAM sequence: TGG
  source 1..20: mol_type = other DNA
gcatagccacctgatcctgc

SEQ ID NO: 21993 - DNA, 20 bp, synthetic construct
  misc_feature 1..20: note = Description of Artificial Sequence: Synthetic oligonucleotide
  misc_feature 1..20: note = Target: FXN; (+) strand; PAM type: NRG; PAM sequence: GGG
  source 1..20: mol_type = other DNA
catagccacctgatcctgct

SEQ ID NO: 21994 - DNA, 20 bp, synthetic construct
  misc_feature 1..20: note = Description of Artificial Sequence: Synthetic oligonucleotide
  misc_feature 1..20: note = Target: FXN; (+) strand; PAM type: NRG; PAM sequence: CAG
  source 1..20: mol_type = other DNA
cctgctgggattcctcttgc

SEQ ID NO: 21995 - DNA, 20 bp, synthetic construct
  misc_feature 1..20: note = Description of Artificial Sequence: Synthetic oligonucleotide
  misc_feature 1..20: note = Target: FXN; (+) strand; PAM type: NRG; PAM sequence: CAG
  source 1..20: mol_type = other DNA
gattcctcttgccagtccat

SEQ ID NO: 21996 - DNA, 20 bp, synthetic construct
  misc_feature 1..20: note = Description of Artificial Sequence: Synthetic oligonucleotide
  misc_feature 1..20: note = Target: FXN; (+) strand; PAM type: NRG; PAM sequence: CAG
  source 1..20: mol_type = other DNA
tcctcttgccagtccatcag

SEQ ID NO: 21997 - DNA, 20 bp, synthetic construct
  misc_feature 1..20: note = Description of Artificial Sequence: Synthetic oligonucleotide
  misc_feature 1..20: note = Target: FXN; (+) strand; PAM type: NRG; PAM sequence: AAG
  source 1..20: mol_type = other DNA
ccatcagcagttccccttga

SEQ ID NO: 21998 - DNA, 20 bp, synthetic construct
  misc_feature 1..20: note = Description of Artificial Sequence: Synthetic oligonucleotide
  misc_feature 1..20: note = Target: FXN; (+) strand; PAM type: NRG; PAM sequence: CAG
  source 1..20: mol_type = other DNA
tgccctctcctgcccgtccc

SEQ ID NO: 21999 - DNA, 20 bp, synthetic construct
  misc_feature 1..20: note = Description of Artificial Sequence: Synthetic oligonucleotide
  misc_feature 1..20: note = Target: FXN; (+) strand; PAM type: NRG; PAM sequence: TGG
  source 1..20: mol_type = other DNA
cctctcctgcccgtccccag

SEQ ID NO: 22000 - DNA, 20 bp, synthetic construct
  misc_feature 1..20: note = Description of Artificial Sequence: Synthetic oligonucleotide
  misc_feature 1..20: note = Target: FXN; (+) strand; PAM type: NRG; PAM sequence: GAG
  source 1..20: mol_type = other DNA
tctcctgcccgtccccagtg

SEQ ID NO: 22001 - DNA, 20 bp, synthetic construct
  misc_feature 1..20: note = Description of Artificial Sequence: Synthetic oligonucleotide
  misc_feature 1..20: note = Target: FXN; (+) strand; PAM type: NRG; PAM sequence: AGG
  source 1..20: mol_type = other DNA
ctcctgcccgtccccagtgg

SEQ ID NO: 22002 - DNA, 20 bp, synthetic construct
  misc_feature 1..20: note = Description of Artificial Sequence: Synthetic oligonucleotide
  misc_feature 1..20: note = Target: FXN; (+) strand; PAM type: NRG; PAM sequence: CAG
  source 1..20: mol_type = other DNA
atttttcacctgcatttttg

SEQ ID NO: 22003 - DNA, 20 bp, synthetic construct
  misc_feature 1..20: note = Description of Artificial Sequence: Synthetic oligonucleotide
  misc_feature 1..20: note = Target: FXN; (+) strand; PAM type: NRG; PAM sequence: AGG
  source 1..20: mol_type = other DNA
tttttcacctgcatttttgc

SEQ ID NO: 22004 - DNA, 20 bp, synthetic construct
  misc_feature 1..20: note = Description of Artificial Sequence: Synthetic oligonucleotide
  misc_feature 1..20: note = Target: FXN; (+) strand; PAM type: NRG; PAM sequence: GAG
  source 1..20: mol_type = other DNA
tttcacctgcatttttgcag

SEQ ID NO: 22005 - DNA, 20 bp, synthetic construct
  misc_feature 1..20: note = Description of Artificial Sequence: Synthetic oligonucleotide
  misc_feature 1..20: note = Target: FXN; (+) strand; PAM type: NRG; PAM sequence: CAG
  source 1..20: mol_type = other DNA
ccaccttcctccttttctct

SEQ ID NO: 22006 - DNA, 20 bp, synthetic construct
  misc_feature 1..20: note = Description of Artificial Sequence: Synthetic oligonucleotide
  misc_feature 1..20: note = Target: FXN; (+) strand; PAM type: NRG; PAM sequence: TAG
  source 1..20: mol_type = other DNA
ttttctctcagcccatcatc

SEQ ID NO: 22007 - DNA, 20 bp, synthetic construct
  misc_feature 1..20: note = Description of Artificial Sequence: Synthetic oligonucleotide
  misc_feature 1..20: note = Target: FXN; (+) strand; PAM type: NRG; PAM sequence: CAG
  source 1..20: mol_type = other DNA
cagcccatcatctagctaca

SEQ ID NO: 22008 - DNA, 20 bp, synthetic construct
  misc_feature 1..20: note = Description of Artificial Sequence: Synthetic oligonucleotide
  misc_feature 1..20: note = Target: FXN; (+) strand; PAM type: NRG; PAM sequence: CAG
  source 1..20: mol_type = other DNA
tcatctagctacacagtctc

SEQ ID NO: 22009 - DNA, 20 bp, synthetic construct
  misc_feature 1..20: note = Description of Artificial Sequence: Synthetic oligonucleotide
  misc_feature 1..20: note = Target: FXN; (+) strand; PAM type: NRG; PAM sequence: AGG
  source 1..20: mol_type = other DNA
catctagctacacagtctcc

SEQ ID NO: 22010 - DNA, 20 bp, synthetic construct
  misc_feature 1..20: note = Description of Artificial Sequence: Synthetic oligonucleotide
  misc_feature 1..20: note = Target: FXN; (+) strand; PAM type: NRG; PAM sequence: GGG
  source 1..20: mol_type = other DNA
atctagctacacagtctcca

SEQ ID NO: 22011 - DNA, 20 bp, synthetic construct
  misc_feature 1..20: note = Description of Artificial Sequence: Synthetic oligonucleotide
  misc_feature 1..20: note = Target: FXN; (+) strand; PAM type: NRG; PAM sequence: AAG
  source 1..20: mol_type = other DNA
agctacacagtctccagggt

SEQ ID NO: 22012 - DNA, 20 bp, synthetic construct
  misc_feature 1..20: note = Description of Artificial Sequence: Synthetic oligonucleotide
  misc_feature 1..20: note = Target: FXN; (+) strand; PAM type: NRG; PAM sequence: CAG
  source 1..20: mol_type = other DNA
cagtctccagggtaagcttt

SEQ ID NO: 22013 - DNA, 20 bp, synthetic construct
  misc_feature 1..20: note = Description of Artificial Sequence: Synthetic oligonucleotide
  misc_feature 1..20: note = Target: FXN; (+) strand; PAM type: NRG; PAM sequence: AAG
  source 1..20: mol_type = other DNA
ctccagggtaagctttcaga

SEQ ID NO: 22014 - DNA, 20 bp, synthetic construct
  misc_feature 1..20: note = Description of Artificial Sequence: Synthetic oligonucleotide
  misc_feature 1..20: note = Target: FXN; (+) strand; PAM type: NRG; PAM sequence: AGG
  source 1..20: mol_type = other DNA
tccagggtaagctttcagaa

SEQ ID NO: 22015 - DNA, 20 bp, synthetic construct
  misc_feature 1..20: note = Description of Artificial Sequence: Synthetic oligonucleotide
  misc_feature 1..20: note = Target: FXN; (+) strand; PAM type: NRG; PAM sequence: AAG
  source 1..20: mol_type = other DNA
atctcttgtctgtaaaacct

SEQ ID NO: 22016 - DNA, 20 bp, synthetic construct
  misc_feature 1..20: note = Description of Artificial Sequence: Synthetic oligonucleotide
  misc_feature 1..20: note = Target: FXN; (+) strand; PAM type: NRG; PAM sequence: CAG
  source 1..20: mol_type = other DNA
tcttgtctgtaaaacctaag

SEQ ID NO: 22017 - DNA, 20 bp, synthetic construct
  misc_feature 1..20: note = Description of Artificial Sequence: Synthetic oligonucleotide
  misc_feature 1..20: note = Target: FXN; (+) strand; PAM type: NRG; PAM sequence: AGG
  source 1..20: mol_type = other DNA
cttgtctgtaaaacctaagc

SEQ ID NO: 22018 - DNA, 20 bp, synthetic construct
  misc_feature 1..20: note = Description of Artificial Sequence: Synthetic oligonucleotide
  misc_feature 1..20: note = Target: FXN; (+) strand; PAM type: NRG; PAM sequence: AAG
  source 1..20: mol_type = other DNA
tgtaaaacctaagcaggacc

SEQ ID NO: 22019 - DNA, 20 bp, synthetic construct
  misc_feature 1..20: note = Description of Artificial Sequence: Synthetic oligonucleotide
  misc_feature 1..20: note = Target: FXN; (+) strand; PAM type: NRG; PAM sequence: AGG
  source 1..20: mol_type = other DNA
gtaaaacctaagcaggacca

SEQ ID NO: 22020 - DNA, 20 bp, synthetic construct
  misc_feature 1..20: note = Description of Artificial Sequence: Synthetic oligonucleotide
  misc_feature 1..20: note = Target: FXN; (+) strand; PAM type: NRG; PAM sequence: AAG
  source 1..20: mol_type = other DNA
acctaagcaggaccaaggcc

SEQ ID NO: 22021 - DNA, 20 bp, synthetic construct
  misc_feature 1..20: note = Description of Artificial Sequence: Synthetic oligonucleotide
  misc_feature 1..20: note = Target: FXN; (+) strand; PAM type: NRG; PAM sequence: TAG
  source 1..20: mol_type = other DNA
aggaccaaggccaagtttct

SEQ ID NO: 22022 - DNA, 20 bp, synthetic construct
  misc_feature 1..20: note = Description of Artificial Sequence: Synthetic oligonucleotide
  misc_feature 1..20: note = Target: FXN; (+) strand; PAM type: NRG; PAM sequence: CAG
  source 1..20: mol_type = other DNA
gcttttctgactgaactgtt

SEQ ID NO: 22023 - DNA, 20 bp, synthetic construct
  misc_feature 1..20: note = Description of Artificial Sequence: Synthetic oligonucleotide
  misc_feature 1..20: note = Target: FXN; (+) strand; PAM type: NRG; PAM sequence: AGG
  source 1..20: mol_type = other DNA
cttttctgactgaactgttc

SEQ ID NO: 22024 - DNA, 20 bp, synthetic construct
  misc_feature 1..20: note = Description of Artificial Sequence: Synthetic oligonucleotide
  misc_feature 1..20: note = Target: FXN; (+) strand; PAM type: NRG; PAM sequence: CAG
  source 1..20: mol_type = other DNA
cacactcaacactttgactc

SEQ ID NO: 22025 - DNA, 20 bp, synthetic construct
  misc_feature 1..20: note = Description of Artificial Sequence: Synthetic oligonucleotide
  misc_feature 1..20: note = Target: FXN; (+) strand; PAM type: NRG; PAM sequence: CAG
  source 1..20: mol_type = other DNA
ctccagcaatcccaaatccc

SEQ ID NO: 22026 - DNA, 20 bp, synthetic construct
  misc_feature 1..20: note = Description of Artificial Sequence: Synthetic oligonucleotide
  misc_feature 1..20: note = Target: FXN; (+) strand; PAM type: NRG; PAM sequence: AAG
  source 1..20: mol_type = other DNA
tcccaaatccccagatccct

SEQ ID NO: 22027 - DNA, 20 bp, synthetic construct
  misc_feature 1..20: note = Description of Artificial Sequence: Synthetic oligonucleotide
  misc_feature 1..20: note = Target: FXN; (+) strand; PAM type: NRG; PAM sequence: TGG
  source 1..20: mol_type = other DNA
tgtgctgtgctattttcacg

SEQ ID NO: 22028 - DNA, 20 bp, synthetic construct
  misc_feature 1..20: note = Description of Artificial Sequence: Synthetic oligonucleotide
  misc_feature 1..20: note = Target: FXN; (+) strand; PAM type: NRG; PAM sequence: CAG
  source 1..20: mol_type = other DNA
tgctattttcacgtggctct

SEQ ID NO: 22029 - DNA, 20 bp, synthetic construct
  misc_feature 1..20: note = Description of Artificial Sequence: Synthetic oligonucleotide
  misc_feature 1..20: note = Target: FXN; (+) strand; PAM type: NRG; PAM sequence: TGG
  source 1..20: mol_type = other DNA
tttcacgtggctctcagact

SEQ ID NO: 22030 - DNA, 20 bp, synthetic construct
  misc_feature 1..20: note = Description of Artificial Sequence: Synthetic oligonucleotide
  misc_feature 1..20: note = Target: FXN; (+) strand; PAM type: NRG; PAM sequence: CAG
  source 1..20: mol_type = other DNA
acgtggctctcagacttggc

SEQ ID NO: 22031 - DNA, 20 bp, synthetic construct
  misc_feature 1..20: note = Description of Artificial Sequence: Synthetic oligonucleotide
  misc_feature 1..20: note = Target: FXN; (+) strand; PAM type: NRG; PAM sequence: TGG
  source 1..20: mol_type = other DNA
ggccagtgctgtttccattt

SEQ ID NO: 22032 - DNA, 20 bp, synthetic construct
  misc_feature 1..20: note = Description of Artificial Sequence: Synthetic oligonucleotide
  misc_feature 1..20: note = Target: FXN; (+) strand; PAM type: NRG; PAM sequence: TGG
  source 1..20: mol_type = other DNA
ttattccccacatctctgcc

SEQ ID NO: 22033 - DNA, 20 bp, synthetic construct
  misc_feature 1..20: note = Description of Artificial Sequence: Synthetic oligonucleotide
  misc_feature 1..20: note = Target: FXN; (+) strand; PAM type: NRG; PAM sequence: GGG
  source 1..20: mol_type = other DNA
tattccccacatctctgcct

SEQ ID NO: 22034 - DNA, 20 bp, synthetic construct
  misc_feature 1..20: note = Description of Artificial Sequence: Synthetic oligonucleotide
  misc_feature 1..20: note = Target: FXN; (+) strand; PAM type: NRG; PAM sequence: GGG
  source 1..20: mol_type = other DNA
attccccacatctctgcctg

SEQ ID NO: 22035 - DNA, 20 bp, synthetic construct
  misc_feature 1..20: note = Description of Artificial Sequence: Synthetic oligonucleotide
  misc_feature 1..20: note = Target: FXN; (+) strand; PAM type: NRG; PAM sequence: GGG
  source 1..20: mol_type = other DNA
ttccccacatctctgcctgg

SEQ ID NO: 22036 - DNA, 20 bp, synthetic construct
  misc_feature 1..20: note = Description of Artificial Sequence: Synthetic oligonucleotide
  misc_feature 1..20: note = Target: FXN; (+) strand; PAM type: NRG; PAM sequence: GGG
  source 1..20: mol_type = other DNA
tccccacatctctgcctggg

SEQ ID NO: 22037 - DNA, 20 bp, synthetic construct
  misc_feature 1..20: note = Description of Artificial Sequence: Synthetic oligonucleotide
  misc_feature 1..20: note = Target: FXN; (+) strand; PAM type: NRG; PAM sequence: TAG
  source 1..20: mol_type = other DNA
ccacatctctgcctgggggg

SEQ ID NO: 22038 - DNA, 20 bp, synthetic construct
  misc_feature 1..20: note = Description of Artificial Sequence: Synthetic oligonucleotide
  misc_feature 1..20: note = Target: FXN; (+) strand; PAM type: NRG; PAM sequence: TGG
  source 1..20: mol_type = other DNA
tctaccctgaaaaatgttct

SEQ ID NO: 22039 - DNA, 20 bp, synthetic construct
  misc_feature 1..20: note = Description of Artificial Sequence: Synthetic oligonucleotide
  misc_feature 1..20: note = Target: FXN; (+) strand; PAM type: NRG; PAM sequence: CAG
  source 1..20: mol_type = other DNA
cctgaaaaatgttcttggca

SEQ ID NO: 22040 - DNA, 20 bp, synthetic construct
  misc_feature 1..20: note = Description of Artificial Sequence: Synthetic oligonucleotide
  misc_feature 1..20: note = Target: FXN; (+) strand; PAM type: NRG; PAM sequence: CAG
  source 1..20: mol_type = other DNA
ttgcaaactcctcctccact

SEQ ID NO: 22041 - DNA, 20 bp, synthetic construct
  misc_feature 1..20: note = Description of Artificial Sequence: Synthetic oligonucleotide
  misc_feature 1..20: note = Target: FXN; (+) strand; PAM type: NRG; PAM sequence: TGG
  source 1..20: mol_type = other DNA
tcctccactcagcctctgcc

SEQ ID NO: 22042 - DNA, 20 bp, synthetic construct
  misc_feature 1..20: note = Description of Artificial Sequence: Synthetic oligonucleotide
  misc_feature 1..20: note = Target: FXN; (+) strand; PAM type: NRG; PAM sequence: CAG
  source 1..20: mol_type = other DNA
ccttgattgttccatgtcct

SEQ ID NO: 22043 - DNA, 20 bp, synthetic construct
  misc_feature 1..20: note = Description of Artificial Sequence: Synthetic oligonucleotide
  misc_feature 1..20: note = Target: FXN; (+) strand; PAM type: NRG; PAM sequence: CAG
  source 1..20: mol_type = other DNA
cataccatgtttgtctttcc

SEQ ID NO: 22044 - DNA, 20 bp, synthetic construct
  misc_feature 1..20: note = Description of Artificial Sequence: Synthetic oligonucleotide
  misc_feature 1..20: note = Target: FXN; (+) strand; PAM type: NRG; PAM sequence: TGG
  source 1..20: mol_type = other DNA
taccatgtgtcacccctgct

SEQ ID NO: 22045 - DNA, 20 bp, synthetic construct
  misc_feature 1..20: note = Description of Artificial Sequence: Synthetic oligonucleotide
  misc_feature 1..20: note = Target: FXN; (+) strand; PAM type: NRG; PAM sequence: GAG
  source 1..20: mol_type = other DNA
tgcttggctgtaccttccat

SEQ ID NO: 22046 - DNA, 20 bp, synthetic construct
  misc_feature 1..20: note = Description of Artificial Sequence: Synthetic oligonucleotide
  misc_feature 1..20: note = Target: FXN; (+) strand; PAM type: NRG; PAM sequence: AGG
  source 1..20: mol_type = other DNA
gcttggctgtaccttccatg

SEQ ID NO: 22047 - DNA, 20 bp, synthetic construct
  misc_feature 1..20: note = Description of Artificial Sequence: Synthetic oligonucleotide
  misc_feature 1..20: note = Target: FXN; (+) strand; PAM type: NRG; PAM sequence: TAG
  source 1..20: mol_type = other DNA
ggctgtaccttccatgaggc

SEQ ID NO: 22048 - DNA, 20 bp, synthetic construct
  misc_feature 1..20: note = Description of Artificial Sequence: Synthetic oligonucleotide
  misc_feature 1..20: note = Target: FXN; (+) strand; PAM type: NRG; PAM sequence: AGG
  source 1..20: mol_type = other DNA
gctgtaccttccatgaggct

SEQ ID NO: 22049 - DNA, 20 bp, synthetic construct
  misc_feature 1..20: note = Description of Artificial Sequence: Synthetic oligonucleotide
  misc_feature 1..20: note = Target: FXN; (+) strand; PAM type: NRG; PAM sequence: TAG
  source 1..20: mol_type = other DNA
tttgttgactgctgttgccc

SEQ ID NO: 22050 - DNA, 20 bp, synthetic construct
  misc_feature 1..20: note = Description of Artificial Sequence: Synthetic oligonucleotide
  misc_feature 1..20: note = Target: FXN; (+) strand; PAM type: NRG; PAM sequence: CAG
  source 1..20: mol_type = other DNA
tgttgccctagcatcttgca

SEQ ID NO: 22051 - DNA, 20 bp, synthetic construct
  misc_feature 1..20: note = Description of Artificial Sequence: Synthetic oligonucleotide
  misc_feature 1..20: note = Target: FXN; (+) strand; PAM type: NRG; PAM sequence: TAG
  source 1..20: mol_type = other DNA
cacagttccttgcacacaat

SEQ ID NO: 22052 - DNA, 20 bp, synthetic construct
  misc_feature 1..20: note = Description of Artificial Sequence: Synthetic oligonucleotide
  misc_feature 1..20: note = Target: FXN; (+) strand; PAM type: NRG; PAM sequence: GAG
  source 1..20: mol_type = other DNA
cagttccttgcacacaatta

SEQ ID NO: 22053 - DNA, 20 bp, synthetic construct
  misc_feature 1..20: note = Description of Artificial Sequence: Synthetic oligonucleotide
  misc_feature 1..20: note = Target: FXN; (+) strand; PAM type: NRG; PAM sequence: AAG
  source 1..20: mol_type = other DNA
tgtgttataattatatgttt

SEQ ID NO: 22054 - DNA, 20 bp, synthetic construct
  misc_feature 1..20: note = Description of Artificial Sequence: Synthetic oligonucleotide
  misc_feature 1..20: note = Target: FXN; (+) strand; PAM type: NRG; PAM sequence: TAG
  source 1..20: mol_type = other DNA
ttataattatatgtttaaga

SEQ ID NO: 22055 - DNA, 20 bp, synthetic construct
  misc_feature 1..20: note = Description of Artificial Sequence: Synthetic oligonucleotide
  misc_feature 1..20: note = Target: FXN; (+) strand; PAM type: NRG; PAM sequence: AAG
  source 1..20: mol_type = other DNA
ctctaaataaccccaactcc

SEQ ID NO: 22056 - DNA, 20 bp, synthetic construct
  misc_feature 1..20: note = Description of Artificial Sequence: Synthetic oligonucleotide
  misc_feature 1..20: note = Target: FXN; (+) strand; PAM type: NRG; PAM sequence: GAG
  source 1..20: mol_type = other DNA
ctaaataaccccaactccaa

SEQ ID NO: 22057 - DNA, 20 bp, synthetic construct
  misc_feature 1..20: note = Description of Artificial Sequence: Synthetic oligonucleotide
  misc_feature 1..20: note = Target: FXN; (+) strand; PAM type: NRG; PAM sequence: TAG
  source 1..20: mol_type = other DNA
aaccccaactccaagagtgt

SEQ ID NO: 22058 - DNA, 20 bp, synthetic construct
  misc_feature 1..20: note = Description of Artificial Sequence: Synthetic oligonucleotide
  misc_feature 1..20: note = Target: FXN; (+) strand; PAM type: NRG; PAM sequence: AAG
  source 1..20: mol_type = other DNA
ccaactccaagagtgttagc

SEQ ID NO: 22059 - DNA, 20 bp, synthetic construct
  misc_feature 1..20: note = Description of Artificial Sequence: Synthetic oligonucleotide
  misc_feature 1..20: note = Target: FXN; (+) strand; PAM type: NRG; PAM sequence: CAG
  source 1..20: mol_type = other DNA
agcaagaaatataaatttta

SEQ ID NO: 22060 - DNA, 20 bp, synthetic construct
  misc_feature 1..20: note = Description of Artificial Sequence: Synthetic oligonucleotide
  misc_feature 1..20: note = Target: FXN; (+) strand; PAM type: NRG; PAM sequence: AAG
  source 1..20: mol_type = other DNA
aagaaatataaattttacag

SEQ ID NO: 22061 - DNA, 20 bp, synthetic construct
  misc_feature 1..20: note = Description of Artificial Sequence: Synthetic oligonucleotide
  misc_feature 1..20: note = Target: FXN; (+) strand; PAM type: NRG; PAM sequence: TGG
  source 1..20: mol_type = other DNA
atataaattttacagaagaa

SEQ ID NO: 22062 - DNA, 20 bp, synthetic construct
  misc_feature 1..20: note = Description of Artificial Sequence: Synthetic oligonucleotide
  misc_feature 1..20: note = Target: FXN; (+) strand; PAM type: NRG; PAM sequence: TGG
  source 1..20: mol_type = other DNA
aaattttacagaagaatggt

SEQ ID NO: 22063 - DNA, 20 bp, synthetic construct
  misc_feature 1..20: note = Description of Artificial Sequence: Synthetic oligonucleotide
  misc_feature 1..20: note = Target: FXN; (+) strand; PAM type: NRG; PAM sequence: GAG
  source 1..20: mol_type = other DNA
attttacagaagaatggttg

SEQ ID NO: 22064 - DNA, 20 bp, synthetic construct
  misc_feature 1..20: note = Description of Artificial Sequence: Synthetic oligonucleotide
  misc_feature 1..20: note = Target: FXN; (+) strand; PAM type: NRG; PAM sequence: AGG
  source 1..20: mol_type = other DNA
ttttacagaagaatggttgg

SEQ ID NO: 22065 - DNA, 20 bp, synthetic construct
  misc_feature 1..20: note = Description of Artificial Sequence: Synthetic oligonucleotide
  misc_feature 1..20: note = Target: FXN; (+) strand; PAM type: NRG; PAM sequence: TGG
  source 1..20: mol_type = other DNA
tacagaagaatggttggagg

SEQ ID NO: 22066 - DNA, 20 bp, synthetic construct
  misc_feature 1..20: note = Description of Artificial Sequence: Synthetic oligonucleotide
  misc_feature 1..20: note = Target: FXN; (+) strand; PAM type: NRG; PAM sequence: GGG
  source 1..20: mol_type = other DNA
acagaagaatggttggaggt

SEQ ID NO: 22067 - DNA, 20 bp, synthetic construct
  misc_feature 1..20: note = Description of Artificial Sequence: Synthetic oligonucleotide
  misc_feature 1..20: note = Target: FXN; (+) strand; PAM type: NRG; PAM sequence: GGG
  source 1..20: mol_type = other DNA
cagaagaatggttggaggtg

SEQ ID NO: 22068 - DNA, 20 bp, synthetic construct
  misc_feature 1..20: note = Description of Artificial Sequence: Synthetic oligonucleotide
  misc_feature 1..20: note = Target: FXN; (+) strand; PAM type: NRG; PAM sequence: GAG
  source 1..20: mol_type = other DNA
gaagaatggttggaggtggg

SEQ ID NO: 22069 - DNA, 20 bp, synthetic construct
  misc_feature 1..20: note = Description of Artificial Sequence: Synthetic oligonucleotide
  misc_feature 1..20: note = Target: FXN; (+) strand; PAM type: NRG; PAM sequence: AGG
  source 1..20: mol_type = other DNA
aagaatggttggaggtgggg

SEQ ID NO: 22070 - DNA, 20 bp, synthetic construct
  misc_feature 1..20: note = Description of Artificial Sequence: Synthetic oligonucleotide
  misc_feature 1..20: note = Target: FXN; (+) strand; PAM type: NRG; PAM sequence: GGG
  source 1..20: mol_type = other DNA
agaatggttggaggtgggga

SEQ ID NO: 22071 - DNA, 20 bp, synthetic construct
  misc_feature 1..20: note = Description of Artificial Sequence: Synthetic oligonucleotide
  misc_feature 1..20: note = Target: FXN; (+) strand; PAM type: NRG; PAM sequence: CGG
  source 1..20: mol_type = other DNA
ggaggtggggagggtgtcca

SEQ ID NO: 22072 - DNA, 20 bp, synthetic construct
  misc_feature 1..20: note = Description of Artificial Sequence: Synthetic oligonucleotide
  misc_feature 1..20: note = Target: FXN; (+) strand; PAM type: NRG; PAM sequence: GAG
  source 1..20: mol_type = other DNA
aggtggggagggtgtccacg

SEQ ID NO: 22073 - DNA, 20 bp, synthetic construct
  misc_feature 1..20: note = Description of Artificial Sequence: Synthetic oligonucleotide
  misc_feature 1..20: note = Target: FXN; (+) strand; PAM type: NRG; PAM sequence: GAG
  source 1..20: mol_type = other DNA
ggggagggtgtccacggagt

SEQ ID NO: 22074 - DNA, 20 bp, synthetic construct
  misc_feature 1..20: note = Description of Artificial Sequence: Synthetic oligonucleotide
  misc_feature 1..20: note = Target: FXN; (+) strand; PAM type: NRG; PAM sequence: CAG
  source 1..20: mol_type = other DNA
acggagtgagttacctcaca

SEQ ID NO: 22075 - DNA, 20 bp, synthetic construct
  misc_feature 1..20: note = Description of Artificial Sequence: Synthetic oligonucleotide
  misc_feature 1..20: note = Target: FXN; (+) strand; PAM type: NRG; PAM sequence: AGG
  source 1..20: mol_type = other DNA
cggagtgagttacctcacac

SEQ ID NO: 22076 - DNA, 20 bp, synthetic construct
  misc_feature 1..20: note = Description of Artificial Sequence: Synthetic oligonucleotide
  misc_feature 1..20: note = Target: FXN; (+) strand; PAM type: NRG; PAM sequence: CGG
  source 1..20: mol_type = other DNA
tgagttacctcacacaggca

SEQ ID NO: 22077 - DNA, 20 bp, synthetic construct
  misc_feature 1..20: note = Description of Artificial Sequence: Synthetic oligonucleotide
  misc_feature 1..20: note = Target: FXN; (+) strand; PAM type: NRG; PAM sequence: AAG
  source 1..20: mol_type = other DNA
cggaaaaacttgaacctcct

SEQ ID NO: 22078 - DNA, 20 bp, synthetic construct
  misc_feature 1..20: note = Description of Artificial Sequence: Synthetic oligonucleotide
  misc_feature 1..20: note = Target: FXN; (+) strand; PAM type: NRG; PAM sequence: AGG
  source 1..20: mol_type = other DNA
ggaaaaacttgaacctccta

SEQ ID NO: 22079 - DNA, 20 bp, synthetic construct
  misc_feature 1..20: note = Description of Artificial Sequence: Synthetic oligonucleotide
  misc_feature 1..20: note = Target: FXN; (+) strand; PAM type: NRG; PAM sequence: AAG
  source 1..20: mol_type = other DNA
aacctcctaaggacattttt

SEQ ID NO: 22080 - DNA, 20 bp, synthetic construct
  misc_feature 1..20: note = Description of Artificial Sequence: Synthetic oligonucleotide
  misc_feature 1..20: note = Target: FXN; (-) strand; PAM type: YTN; PAM sequence: TTA
  source 1..20: mol_type = other DNA
gtgtatagtttcactttgaa

SEQ ID NO: 22081 - DNA, 20 bp, synthetic construct
  misc_feature 1..20: note = Description of Artificial Sequence: Synthetic oligonucleotide
  misc_feature 1..20: note = Target: FXN; (-) strand; PAM type: YTN; PAM sequence: TTT
  source 1..20: mol_type = other DNA
agtgtatagtttcactttga

SEQ ID NO: 22082 - DNA, 20 bp, synthetic construct
  misc_feature 1..20: note = Description of Artificial Sequence: Synthetic oligonucleotide
  misc_feature 1..20: note = Target: FXN; (-) strand; PAM type: YTN; PAM sequence: CTG
  source 1..20: mol_type = other DNA
tgggaggaatttagtgtata

SEQ ID NO: 22083 - DNA, 20 bp, synthetic construct
  misc_feature 1..20: note = Description of Artificial Sequence: Synthetic oligonucleotide
  misc_feature 1..20: note = Target: FXN; (-) strand; PAM type: YTN; PAM sequence: CTA
  source 1..20: mol_type = other DNA
actgtgggaggaatttagtg

SEQ ID NO: 22084 - DNA, 20 bp, synthetic construct
  misc_feature 1..20: note = Description of Artificial Sequence: Synthetic oligonucleotide
  misc_feature 1..20: note = Target: FXN; (-) strand; PAM type: YTN; PAM sequence: CTG
  source 1..20: mol_type = other DNA
ggcatataacaaaggccacg

SEQ ID NO: 22085 - DNA, 20 bp, synthetic construct
  misc_feature 1..20: note = Description of Artificial Sequence: Synthetic oligonucleotide
  misc_feature 1..20: note = Target: FXN; (-) strand; PAM type: YTN; PAM sequence: TTC
  source 1..20: mol_type = other DNA
ctgggcatataacaaaggcc

SEQ ID NO: 22086 - DNA, 20 bp, synthetic construct
  misc_feature 1..20: note = Description of Artificial Sequence: Synthetic oligonucleotide
  misc_feature 1..20: note = Target: FXN; (-) strand; PAM type: YTN; PAM sequence: TTA
  source 1..20: mol_type = other DNA
ttcctgggcatataacaaag

SEQ ID NO: 22087 - DNA, 20 bp, synthetic construct
  misc_feature 1..20: note = Description of Artificial Sequence: Synthetic oligonucleotide
  misc_feature 1..20: note = Target: FXN; (-) strand; PAM type: YTN; PAM sequence: CTT
  source 1..20: mol_type = other DNA
attcctgggcatataacaaa

SEQ ID NO: 22088 - DNA, 20 bp, synthetic construct
  misc_feature 1..20: note = Description of Artificial Sequence: Synthetic oligonucleotide
  misc_feature 1..20: note = Target: FXN; (-) strand; PAM type: YTN; PAM sequence: CTC
  source 1..20: mol_type = other DNA
acttattcctgggcatataa

SEQ ID NO: 22089 - DNA, 20 bp, synthetic construct
  misc_feature 1..20: note = Description of Artificial Sequence: Synthetic oligonucleotide
  misc_feature 1..20: note = Target: FXN; (-) strand; PAM type: YTN; PAM sequence: CTG
  source 1..20: mol_type = other DNA
tcctcacttattcctgggca

SEQ ID NO: 22090 - DNA, 20 bp, synthetic construct
  misc_feature 1..20: note = Description of Artificial Sequence: Synthetic oligonucleotide
  misc_feature 1..20: note = Target: FXN; (-) strand; PAM type: YTN; PAM sequence: CTG
  source 1..20: mol_type = other DNA
gctgtcctcacttattcctg

SEQ ID NO: 22091 - DNA, 20 bp, synthetic construct
  misc_feature 1..20: note = Description of Artificial Sequence: Synthetic oligonucleotide
  misc_feature 1..20: note = Target: FXN; (-) strand; PAM type: YTN; PAM sequence: CTC
  source 1..20: mol_type = other DNA
ataggctggctgtcctcact

SEQ ID NO: 22092 - DNA, 20 bp, synthetic construct
  misc_feature 1..20: note = Description of Artificial Sequence: Synthetic oligonucleotide
  misc_feature 1..20: note = Target: FXN; (-) strand; PAM type: YTN; PAM sequence: CTA
  source 1..20: mol_type = other DNA
gtctcataggctggctgtcc

SEQ ID NO: 22093 - DNA, 20 bp, synthetic construct
  misc_feature 1..20: note = Description of Artificial Sequence: Synthetic oligonucleotide
  misc_feature 1..20: note = Target: FXN; (-) strand; PAM type: YTN; PAM sequence: TTC
  source 1..20: mol_type = other DNA
tagtctcataggctggctgt

SEQ ID NO: 22094 - DNA, 20 bp, synthetic construct
  misc_feature 1..20: note = Description of Artificial Sequence: Synthetic oligonucleotide
  misc_feature 1..20: note = Target: FXN; (-) strand; PAM type: YTN; PAM sequence: CTT
  source 1..20: mol_type = other DNA
ctagtctcataggctggctg

SEQ ID NO: 22095 - DNA, 20 bp, synthetic construct
  misc_feature 1..20: note = Description of Artificial Sequence: Synthetic oligonucleotide
  misc_feature 1..20: note = Target: FXN; (-) strand; PAM type: YTN; PAM sequence: TTG
  source 1..20: mol_type = other DNA
cttctagtctcataggctgg

SEQ ID NO: 22096 - DNA, 20 bp, synthetic construct
  misc_feature 1..20: note = Description of Artificial Sequence: Synthetic oligonucleotide
  misc_feature 1..20: note = Target: FXN; (-) strand; PAM type: YTN; PAM sequence: CTT
  source 1..20: mol_type = other DNA
gcttctagtctcataggctg

SEQ ID NO: 22097 - DNA, 20 bp, synthetic construct
  misc_feature 1..20: note = Description of Artificial Sequence: Synthetic oligonucleotide
  misc_feature 1..20: note = Target: FXN; (-) strand; PAM type: YTN; PAM sequence: CTC
  source 1..20: mol_type = other DNA
catcttgcttctagtctcat

SEQ ID NO: 22098 - DNA, 20 bp, synthetic construct
  misc_feature 1..20: note = Description of Artificial Sequence: Synthetic oligonucleotide
  misc_feature 1..20: note = Target: FXN; (-) strand; PAM type: YTN; PAM sequence: CTG
  source 1..20: mol_type = other DNA
actccatcttgcttctagtc

SEQ ID NO: 22099 - DNA, 20 bp, synthetic construct
  misc_feature 1..20: note = Description of Artificial Sequence: Synthetic oligonucleotide
  misc_feature 1..20: note = Target: FXN; (-) strand; PAM type: YTN; PAM sequence: TTG
  source 1..20: mol_type = other DNA
gctgactccatcttgcttct

SEQ ID NO: 22100 - DNA, 20 bp, synthetic construct
  misc_feature 1..20: note = Description of Artificial Sequence: Synthetic oligonucleotide
  misc_feature 1..20: note = Target: FXN; (-) strand; PAM type: YTN; PAM sequence: CTT
  source 1..20: mol_type = other DNA
ggctgactccatcttgcttc

SEQ ID NO: 22101 - DNA, 20 bp, synthetic construct
  misc_feature 1..20: note = Description of Artificial Sequence: Synthetic oligonucleotide
  misc_feature 1..20: note = Target: FXN; (-) strand; PAM type: YTN; PAM sequence: TTA
  source 1..20: mol_type = other DNA
gcttggctgactccatcttg

SEQ ID NO: 22102 - DNA, 20 bp, synthetic construct
  misc_feature 1..20: note = Description of Artificial Sequence: Synthetic oligonucleotide
  misc_feature 1..20: note = Target: FXN; (-) strand; PAM type: YTN; PAM sequence: TTT
  source 1..20: mol_type = other DNA
agcttggctgactccatctt

SEQ ID NO: 22103 - DNA, 20 bp, synthetic construct
  misc_feature 1..20: note = Description of Artificial Sequence: Synthetic oligonucleotide
  misc_feature 1..20: note = Target: FXN; (-) strand; PAM type: YTN; PAM sequence: TTA
  source 1..20: mol_type = other DNA
tgacagtgagagaaatttag

SEQ ID NO: 22104 - DNA, 20 bp, synthetic construct
  misc_feature 1..20: note = Description of Artificial Sequence: Synthetic oligonucleotide
  misc_feature 1..20: note = Target: FXN; (-) strand; PAM type: YTN; PAM sequence: TTG
  source 1..20: mol_type = other DNA
taaaggttatgacagtgaga

SEQ ID NO: 22105 - DNA, 20 bp, synthetic construct
  misc_feature 1..20: note = Description of Artificial Sequence: Synthetic oligonucleotide
  misc_feature 1..20: note = Target: FXN; (-) strand; PAM type: YTN; PAM sequence: TTT
  source 1..20: mol_type = other DNA
gtaaaggttatgacagtgag

SEQ ID NO: 22106 - DNA, 20 bp, synthetic construct
  misc_feature 1..20: note = Description of Artificial Sequence: Synthetic oligonucleotide
  misc_feature 1..20: note = Target: FXN; (-) strand; PAM type: YTN; PAM sequence: CTT
  source 1..20: mol_type = other DNA
tgtaaaggttatgacagtga

SEQ ID NO: 22107 - DNA, 20 bp, synthetic construct
  misc_feature 1..20: note = Description of Artificial Sequence: Synthetic oligonucleotide
  misc_feature 1..20: note = Target: FXN; (-) strand; PAM type: YTN; PAM sequence: CTA
  source 1..20: mol_type = other DNA
atgaaaccacctttgtaaag

SEQ ID NO: 22108 - DNA, 20 bp, synthetic construct
  misc_feature 1..20: note = Description of Artificial Sequence: Synthetic oligonucleotide
  misc_feature 1..20: note = Target: FXN; (-) strand; PAM type: YTN; PAM sequence: TTA
  source 1..20: mol_type = other DNA
atatgcctaatgaaaccacc

SEQ ID NO: 22109 - DNA, 20 bp, synthetic construct
  misc_feature 1..20: note = Description of Artificial Sequence: Synthetic oligonucleotide
  misc_feature 1..20: note = Target: FXN; (-) strand; PAM type: YTN; PAM sequence: TTG
  source 1..20: mol_type = other DNA
cattaatatgcctaatgaaa

SEQ ID NO: 22110 - DNA, 20 bp, synthetic construct
  misc_feature 1..20: note = Description of Artificial Sequence: Synthetic oligonucleotide
  misc_feature 1..20: note = Target: FXN; (-) strand; PAM type: YTN; PAM sequence: TTT
  source 1..20: mol_type = other DNA
gcattaatatgcctaatgaa

SEQ ID NO: 22111 - DNA, 20 bp, synthetic construct
  misc_feature 1..20: note = Description of Artificial Sequence: Synthetic oligonucleotide
  misc_feature 1..20: note = Target: FXN; (-) strand; PAM type: YTN; PAM sequence: CTA
  source 1..20: mol_type = other DNA
aggaatttgcattaatatgc

SEQ ID NO: 22112 - DNA, 20 bp, synthetic construct
  misc_feature 1..20: note = Description of Artificial Sequence: Synthetic oligonucleotide
  misc_feature 1..20: note = Target: FXN; (-) strand; PAM type: YTN; PAM sequence: TTA
  source 1..20: mol_type = other DNA
actaaggaatttgcattaat

SEQ ID NO: 22113 - DNA, 20 bp, synthetic construct
  misc_feature 1..20: note = Description of Artificial Sequence: Synthetic oligonucleotide
  misc_feature 1..20: note = Target: FXN; (-) strand; PAM type: YTN; PAM sequence: TTT
  source 1..20: mol_type = other DNA
aactaaggaatttgcattaa

SEQ ID NO: 22114 - DNA, 20 bp, synthetic construct
  misc_feature 1..20: note = Description of Artificial Sequence: Synthetic oligonucleotide
  misc_feature 1..20: note = Target: FXN; (-) strand; PAM type: YTN; PAM sequence: TTT
  source 1..20: mol_type = other DNA
taactaaggaatttgcatta

SEQ ID NO: 22115 - DNA, 20 bp, synthetic construct
  misc_feature 1..20: note = Description of Artificial Sequence: Synthetic oligonucleotide
  misc_feature 1..20: note = Target: FXN; (-) strand; PAM type: YTN; PAM sequence: TTG
  source 1..20: mol_type = other DNA
ttttaactaaggaatttgca

SEQ ID NO: 22116 - DNA, 20 bp, synthetic construct
  misc_feature 1..20: note = Description of Artificial Sequence: Synthetic oligonucleotide
  misc_feature 1..20: note = Target: FXN; (-) strand; PAM type: YTN; PAM sequence: CTT
  source 1..20: mol_type = other DNA
gttttaactaaggaatttgc

SEQ ID NO: 22117 - DNA, 20 bp, synthetic construct
  misc_feature 1..20: note = Description of Artificial Sequence: Synthetic oligonucleotide
  misc_feature 1..20: note = Target: FXN; (-) strand; PAM type: YTN; PAM sequence: TTC
  source 1..20: mol_type = other DNA
ttgttttaactaaggaattt

SEQ ID NO: 22118 - DNA, 20 bp, synthetic construct
  misc_feature 1..20: note = Description of Artificial Sequence: Synthetic oligonucleotide
  misc_feature 1..20: note = Target: FXN; (-) strand; PAM type: YTN; PAM sequence: TTA
  source 1..20: mol_type = other DNA
gagagtcattcttgttttaa

SEQ ID NO: 22119 - DNA, 20 bp, synthetic construct
  misc_feature 1..20: note = Description of Artificial Sequence: Synthetic oligonucleotide
  misc_feature 1..20: note = Target: FXN; (-) strand; PAM type: YTN; PAM sequence: TTT
  source 1..20: mol_type = other DNA
agagagtcattcttgtttta

SEQ ID NO: 22120 - DNA, 20 bp, synthetic construct
  misc_feature 1..20: note = Description of Artificial Sequence: Synthetic oligonucleotide
  misc_feature 1..20: note = Target: FXN; (-) strand; PAM type: YTN; PAM sequence: CTT
  source 1..20: mol_type = other DNA
tagagagtcattcttgtttt

SEQ ID NO: 22121 - DNA, 20 bp, synthetic construct
  misc_feature 1..20: note = Description of Artificial Sequence: Synthetic oligonucleotide
  misc_feature 1..20: note = Target: FXN; (-) strand; PAM type: YTN; PAM sequence: CTG
  source 1..20: mol_type = other DNA
aaatatagcctttagagagt

SEQ ID NO: 22122 - DNA, 20 bp, synthetic construct
  misc_feature 1..20: note = Description of Artificial Sequence: Synthetic oligonucleotide
  misc_feature 1..20: note = Target: FXN; (-) strand; PAM type: YTN; PAM sequence: TTG
  source 1..20: mol_type = other DNA
aggggacaagaggaaagaag

SEQ ID NO: 22123 - DNA, 20 bp, synthetic construct
  misc_feature 1..20: note = Description of Artificial Sequence: Synthetic oligonucleotide
  misc_feature 1..20: note = Target: FXN; (-) strand; PAM type: YTN; PAM sequence: CTG
  source 1..20: mol_type = other DNA
ttgaggggacaagaggaaag

SEQ ID NO: 22124 - DNA, 20 bp, synthetic construct
  misc_feature 1..20: note = Description of Artificial Sequence: Synthetic oligonucleotide
  misc_feature 1..20: note = Target: FXN; (-) strand; PAM type: YTN; PAM sequence: TTA
  source 1..20: mol_type = other DNA
ctgttgaggggacaagagga

SEQ ID NO: 22125 - DNA, 20 bp, synthetic construct
  misc_feature 1..20: note = Description of Artificial Sequence: Synthetic oligonucleotide
  misc_feature 1..20: note = Target: FXN; (-) strand; PAM type: YTN; PAM sequence: CTT
  source 1..20: mol_type = other DNA
actgttgaggggacaagagg

SEQ ID NO: 22126 - DNA, 20 bp, synthetic construct
  misc_feature 1..20: note = Description of Artificial Sequence: Synthetic oligonucleotide
  misc_feature 1..20: note = Target: FXN; (-) strand; PAM type: YTN; PAM sequence: TTG
  source 1..20: mol_type = other DNA
cttactgttgaggggacaag

SEQ ID NO: 22127 - DNA, 20 bp, synthetic construct
  misc_feature 1..20: note = Description of Artificial Sequence: Synthetic oligonucleotide
  misc_feature 1..20: note = Target: FXN; (-) strand; PAM type: YTN; PAM sequence: CTT
  source 1..20: mol_type = other DNA
gcttactgttgaggggacaa

SEQ ID NO: 22128 - DNA, 20 bp, synthetic construct
  misc_feature 1..20: note = Description of Artificial Sequence: Synthetic oligonucleotide
  misc_feature 1..20: note = Target: FXN; (-) strand; PAM type: YTN; PAM sequence: TTC
  source 1..20: mol_type = other DNA
ttgcttactgttgaggggac

SEQ ID NO: 22129 - DNA, 20 bp, synthetic construct
  misc_feature 1..20: note = Description of Artificial Sequence: Synthetic oligonucleotide
  misc_feature 1..20: note = Target: FXN; (-) strand; PAM type: YTN; PAM sequence: CTT
  source 1..20: mol_type = other DNA
cttgcttactgttgagggga

SEQ ID NO: 22130 - DNA, 20 bp, synthetic construct
  misc_feature 1..20: note = Description of Artificial Sequence: Synthetic oligonucleotide
  misc_feature 1..20: note = Target: FXN; (-) strand; PAM type: YTN; PAM sequence: CTC
  source 1..20: mol_type = other DNA
ttcttgcttactgttgaggg

SEQ ID NO: 22131 - DNA, 20 bp, synthetic construct
  misc_feature 1..20: note = Description of Artificial Sequence: Synthetic oligonucleotide
  misc_feature 1..20: note = Target: FXN; (-) strand; PAM type: YTN; PAM sequence: TTG
  source 1..20: mol_type = other DNA
tacaaaaatactcttcttgc

SEQ ID NO: 22132 - DNA, 20 bp, synthetic construct
  misc_feature 1..20: note = Description of Artificial Sequence: Synthetic oligonucleotide
  misc_feature 1..20: note = Target: FXN; (-) strand; PAM type: YTN; PAM sequence: CTT
  source 1..20: mol_type = other DNA
gtacaaaaatactcttcttg

SEQ ID NO: 22133 - DNA, 20 bp, synthetic construct
  misc_feature 1..20: note = Description of Artificial Sequence: Synthetic oligonucleotide
  misc_feature 1..20: note = Target: FXN; (-) strand; PAM type: YTN; PAM sequence: CTC
  source 1..20: mol_type = other DNA
ttgtacaaaaatactcttct

SEQ ID NO: 22134 - DNA, 20 bp, synthetic construct
  misc_feature 1..20: note = Description of Artificial Sequence: Synthetic oligonucleotide
  misc_feature 1..20: note = Target: FXN; (-) strand; PAM type: YTN; PAM sequence: CTC
  source 1..20: mol_type = other DNA
tcttgtacaaaaatactctt

SEQ ID NO: 22135 - DNA, 20 bp, synthetic construct
  misc_feature 1..20: note = Description of Artificial Sequence: Synthetic oligonucleotide
  misc_feature 1..20: note = Target: FXN; (-) strand; PAM type: YTN; PAM sequence: CTC
  source 1..20: mol_type = other DNA
tctcttgtacaaaaatactc

SEQ ID NO: 22136 - DNA, 20 bp, synthetic construct
  misc_feature 1..20: note = Description of Artificial Sequence: Synthetic oligonucleotide
  misc_feature 1..20: note = Target: FXN; (-) strand; PAM type: YTN; PAM sequence: TTC
  source 1..20: mol_type = other DNA
aggcagaggcctctctcttg

SEQ ID NO: 22137 - DNA, 20 bp, synthetic construct
  misc_feature 1..20: note = Description of Artificial Sequence: Synthetic oligonucleotide
  misc_feature 1..20: note = Target: FXN; (-) strand; PAM type: YTN; PAM sequence: CTT
  source 1..20: mol_type = other DNA
caggcagaggcctctctctt

SEQ ID NO: 22138 - DNA, 20 bp, synthetic construct
  misc_feature 1..20: note = Description of Artificial Sequence: Synthetic oligonucleotide
  misc_feature 1..20: note = Target: FXN; (-) strand; PAM type: YTN; PAM sequence: TTA
  source 1..20: mol_type = other DNA
agggagcttcaggcagaggc

SEQ ID NO: 22139 - DNA, 20 bp, synthetic construct
  misc_feature 1..20: note = Description of Artificial Sequence: Synthetic oligonucleotide
  misc_feature 1..20: note = Target: FXN; (-) strand; PAM type: YTN; PAM sequence: CTG
  source 1..20: mol_type = other DNA
acagattaagggagcttcag

SEQ ID NO: 22140 - DNA, 20 bp, synthetic construct
  misc_feature 1..20: note = Description of Artificial Sequence: Synthetic oligonucleotide
  misc_feature 1..20: note = Target: FXN; (-) strand; PAM type: YTN; PAM sequence: CTG
  source 1..20: mol_type = other DNA
tgatctgacagattaaggga

SEQ ID NO: 22141 - DNA, 20 bp, synthetic construct
  misc_feature 1..20: note = Description of Artificial Sequence: Synthetic oligonucleotide
  misc_feature 1..20: note = Target: FXN; (-) strand; PAM type: YTN; PAM sequence: TTG
  source 1..20: mol_type = other DNA
atctgtgatctgacagatta

SEQ ID NO: 22142 - DNA, 20 bp, synthetic construct
  misc_feature 1..20: note = Description of Artificial Sequence: Synthetic oligonucleotide
  misc_feature 1..20: note = Target: FXN; (-) strand; PAM type: YTN; PAM sequence: TTT
  source 1..20: mol_type = other DNA
gatctgtgatctgacagatt

SEQ ID NO: 22143 - DNA, 20 bp, synthetic construct
  misc_feature 1..20: note = Description of Artificial Sequence: Synthetic oligonucleotide
  misc_feature 1..20: note = Target: FXN; (-) strand; PAM type: YTN; PAM sequence: TTT
  source 1..20: mol_type = other DNA
tgatctgtgatctgacagat

SEQ ID NO: 22144 - DNA, 20 bp, synthetic construct
  misc_feature 1..20: note = Description of Artificial Sequence: Synthetic oligonucleotide
  misc_feature 1..20: note = Target: FXN; (-) strand; PAM type: YTN; PAM sequence: CTT
  source 1..20: mol_type = other DNA
ttgatctgtgatctgacaga

SEQ ID NO: 22145 - DNA, 20 bp, synthetic construct
  misc_feature 1..20: note = Description of Artificial Sequence: Synthetic oligonucleotide
  misc_feature 1..20: note = Target: FXN; (-) strand; PAM type: YTN; PAM sequence: TTG
  source 1..20: mol_type = other DNA
ggcagtgtgtgatagctttt

SEQ ID NO: 22146 - DNA, 20 bp, synthetic construct
  misc_feature 1..20: note = Description of Artificial Sequence: Synthetic oligonucleotide
  misc_feature 1..20: note = Target: FXN; (-) strand; PAM type: YTN; PAM sequence: CTT
  source 1..20: mol_type = other DNA
gggcagtgtgtgatagcttt

SEQ ID NO: 22147 - DNA, 20 bp, synthetic construct
  misc_feature 1..20: note = Description of Artificial Sequence: Synthetic oligonucleotide
  misc_feature 1..20: note = Target: FXN; (-) strand; PAM type: YTN; PAM sequence: TTA
  source 1..20: mol_type = other DNA
gggtcccttgggcagtgtgt

SEQ ID NO: 22148 - DNA, 20 bp, synthetic construct
  misc_feature 1..20: note = Description of Artificial Sequence: Synthetic oligonucleotide
  misc_feature 1..20: note = Target: FXN; (-) strand; PAM type: YTN; PAM sequence: TTT
  source 1..20: mol_type = other DNA
agggtcccttgggcagtgtg

SEQ ID NO: 22149 - DNA, 20 bp, synthetic construct
  misc_feature 1..20: note = Description of Artificial Sequence: Synthetic oligonucleotide
  misc_feature 1..20: note = Target: FXN; (-) strand; PAM type: YTN; PAM sequence: CTT
  source 1..20: mol_type = other DNA
tagggtcccttgggcagtgt

SEQ ID NO: 22150 - DNA, 20 bp, synthetic construct
  misc_feature 1..20: note = Description of Artificial Sequence: Synthetic oligonucleotide
  misc_feature 1..20: note = Target: FXN; (-) strand; PAM type: YTN; PAM sequence: CTC
  source 1..20: mol_type = other DNA
cctttagggtcccttgggca

SEQ ID NO: 22151 - DNA, 20 bp, synthetic construct
  misc_feature 1..20: note = Description of Artificial Sequence: Synthetic oligonucleotide
  misc_feature 1..20: note = Target: FXN; (-) strand; PAM type: YTN; PAM sequence: CTG
  source 1..20: mol_type = other DNA
agagtggctccctttagggt

SEQ ID NO: 22152 - DNA, 20 bp, synthetic construct
  misc_feature 1..20: note = Description of Artificial Sequence: Synthetic oligonucleotide
  misc_feature 1..20: note = Target: FXN; (-) strand; PAM type: YTN; PAM sequence: TTC
  source 1..20: mol_type = other DNA
tgagagtggctccctttagg

SEQ ID NO: 22153 - DNA, 20 bp, synthetic construct
  misc_feature 1..20: note = Description of Artificial Sequence: Synthetic oligonucleotide
  misc_feature 1..20: note = Target: FXN; (-) strand; PAM type: YTN; PAM sequence: TTT
  source 1..20: mol_type = other DNA
ctgagagtggctccctttag

SEQ ID NO: 22154 - DNA, 20 bp, synthetic construct
  misc_feature 1..20: note = Description of Artificial Sequence: Synthetic oligonucleotide
  misc_feature 1..20: note = Target: FXN; (-) strand; PAM type: YTN; PAM sequence: TTT
  source 1..20: mol_type = other DNA
tctgagagtggctcccttta

SEQ ID NO: 22155 - DNA, 20 bp, synthetic construct
  misc_feature 1..20: note = Description of Artificial Sequence: Synthetic oligonucleotide
  misc_feature 1..20: note = Target: FXN; (-) strand; PAM type: YTN; PAM sequence: TTA
  source 1..20: mol_type = other DNA
ttttctgagagtggctccct

SEQ ID NO: 22156 - DNA, 20 bp, synthetic construct
  misc_feature 1..20: note = Description of Artificial Sequence: Synthetic oligonucleotide
  misc_feature 1..20: note = Target: FXN; (-) strand; PAM type: YTN; PAM sequence: TTT
  source 1..20: mol_type = other DNA
attttctgagagtggctccc

SEQ ID NO: 22157 - DNA, 20 bp, synthetic construct
  misc_feature 1..20: note = Description of Artificial Sequence: Synthetic oligonucleotide
  misc_feature 1..20: note = Target: FXN; (-) strand; PAM type: YTN; PAM sequence: TTG
  source 1..20: mol_type = other DNA
gatttattttctgagagtgg

SEQ ID NO: 22158 - DNA, 20 bp, synthetic construct
  misc_feature 1..20: note = Description of Artificial Sequence: Synthetic oligonucleotide
  misc_feature 1..20: note = Target: FXN; (-) strand; PAM type: YTN; PAM sequence: TTT
  source 1..20: mol_type = other DNA
ggatttattttctgagagtg

SEQ ID NO: 22159 - DNA, 20 bp, synthetic construct
  misc_feature 1..20: note = Description of Artificial Sequence: Synthetic oligonucleotide
  misc_feature 1..20: note = Target: FXN; (-) strand; PAM type: YTN; PAM sequence: TTC
  source 1..20: mol_type = other DNA
agtggccagaaaaaaggagg

SEQ ID NO: 22160 - DNA, 20 bp, synthetic construct
  misc_feature 1..20: note = Description of Artificial Sequence: Synthetic oligonucleotide
  misc_feature 1..20: note = Target: FXN; (-) strand; PAM type: YTN; PAM sequence: TTT
  source 1..20: mol_type = other DNA
cagtggccagaaaaaaggag

SEQ ID NO: 22161 - DNA, 20 bp, synthetic construct
  misc_feature 1..20: note = Description of Artificial Sequence: Synthetic oligonucleotide
  misc_feature 1..20: note = Target: FXN; (-) strand; PAM type: YTN; PAM sequence: TTG
  source 1..20: mol_type = other DNA
aacgtttcagtggccagaaa

SEQ ID NO: 22162 - DNA, 20 bp, synthetic construct
  misc_feature 1..20: note = Description of Artificial Sequence: Synthetic oligonucleotide
  misc_feature 1..20: note = Target: FXN; (-) strand; PAM type: YTN; PAM sequence: TTA
  source 1..20: mol_type = other DNA
ttgaacgtttcagtggccag

SEQ ID NO: 22163 - DNA, 20 bp, synthetic construct
  misc_feature 1..20: note = Description of Artificial Sequence: Synthetic oligonucleotide
  misc_feature 1..20: note = Target: FXN; (-) strand; PAM type: YTN; PAM sequence: CTA
  source 1..20: mol_type = other DNA
attattgaacgtttcagtgg

SEQ ID NO: 22164 - DNA, 20 bp, synthetic construct
  misc_feature 1..20: note = Description of Artificial Sequence: Synthetic oligonucleotide
  misc_feature 1..20: note = Target: FXN; (-) strand; PAM type: YTN; PAM sequence: TTA
  source 1..20: mol_type = other DNA
aacatgtgaatgatgtagat

SEQ ID NO: 22165 - DNA, 20 bp, synthetic construct
  misc_feature 1..20: note = Description of Artificial Sequence: Synthetic oligonucleotide
  misc_feature 1..20: note = Target: FXN; (-) strand; PAM type: YTN; PAM sequence: TTC
  source 1..20: mol_type = other DNA
caaagtcaataaatattaaa

SEQ ID NO: 22166 - DNA, 20 bp, synthetic construct
  misc_feature 1..20: note = Description of Artificial Sequence: Synthetic oligonucleotide
  misc_feature 1..20: note = Target: FXN; (-) strand; PAM type: YTN; PAM sequence: CTC
  source 1..20: mol_type = other DNA
agcaaagtaatcaataattc

SEQ ID NO: 22167 - DNA, 20 bp, synthetic construct
  misc_feature 1..20: note = Description of Artificial Sequence: Synthetic oligonucleotide
  misc_feature 1..20: note = Target: FXN; (-) strand; PAM type: YTN; PAM sequence: TTC
  source 1..20: mol_type = other DNA
ataagatactcagcaaagta

SEQ ID NO: 22168 - DNA, 20 bp, synthetic construct
  misc_feature 1..20: note = Description of Artificial Sequence: Synthetic oligonucleotide
  misc_feature 1..20: note = Target: FXN; (-) strand; PAM type: YTN; PAM sequence: TTA
  source 1..20: mol_type = other DNA
aattcataagatactcagca

SEQ ID NO: 22169 - DNA, 20 bp, synthetic construct
  misc_feature 1..20: note = Description of Artificial Sequence: Synthetic oligonucleotide
  misc_feature 1..20: note = Target: FXN; (-) strand; PAM type: YTN; PAM sequence: TTA
  source 1..20: mol_type = other DNA
atatagattaaattcataag

SEQ ID NO: 22170 - DNA, 20 bp, synthetic construct
  misc_feature 1..20: note = Description of Artificial Sequence: Synthetic oligonucleotide
  misc_feature 1..20: note = Target: FXN; (-) strand; PAM type: YTN; PAM sequence: TTA
  source 1..20: mol_type = other DNA
atattaatatagattaaatt

SEQ ID NO: 22171 - DNA, 20 bp, synthetic construct
  misc_feature 1..20: note = Description of Artificial Sequence: Synthetic oligonucleotide
  misc_feature 1..20: note = Target: FXN; (-) strand; PAM type: YTN; PAM sequence: CTT
  source 1..20: mol_type = other DNA
aatattaatatagattaaat

SEQ ID NO: 22172 - DNA, 20 bp, synthetic construct
  misc_feature 1..20: note = Description of Artificial Sequence: Synthetic oligonucleotide
  misc_feature 1..20: note = Target: FXN; (-) strand; PAM type: YTN; PAM sequence: TTG
  source 1..20: mol_type = other DNA
atacatcaccttaatattaa

SEQ ID NO: 22173 - DNA, 20 bp, synthetic construct
  misc_feature 1..20: note = Description of Artificial Sequence: Synthetic oligonucleotide
  misc_feature 1..20: note = Target: FXN; (-) strand; PAM type: YTN; PAM sequence: TTT
  source 1..20: mol_type = other DNA
gatacatcaccttaatatta

SEQ ID NO: 22174 - DNA, 20 bp, synthetic construct
  misc_feature 1..20: note = Description of Artificial Sequence: Synthetic oligonucleotide
  misc_feature 1..20: note = Target: FXN; (-) strand; PAM type: YTN; PAM sequence: CTG
  source 1..20: mol_type = other DNA
gaatgcaatttgatacatca

SEQ ID NO: 22175 - DNA, 20 bp, synthetic construct
  misc_feature 1..20: note = Description of Artificial Sequence: Synthetic oligonucleotide
  misc_feature 1..20: note = Target: FXN; (-) strand; PAM type: YTN; PAM sequence: CTC
  source 1..20: mol_type = other DNA
tggaatgcaatttgatacat

SEQ ID NO: 22176 - DNA, 20 bp, synthetic construct
  misc_feature 1..20: note = Description of Artificial Sequence: Synthetic oligonucleotide
  misc_feature 1..20: note = Target: FXN; (-) strand; PAM type: YTN; PAM sequence: CTA
  source 1..20: mol_type = other DNA
gagtcaaatccacactctgg

SEQ ID NO: 22177 - DNA, 20 bp, synthetic construct
  misc_feature 1..20: note = Description of Artificial Sequence: Synthetic oligonucleotide
  misc_feature 1..20: note = Target: FXN; (-) strand; PAM type: YTN; PAM sequence: TTA
  source 1..20: mol_type = other DNA
tggcactagagtcaaatcca

SEQ ID NO: 22178 - DNA, 20 bp, synthetic construct
  misc_feature 1..20: note = Description of Artificial Sequence: Synthetic oligonucleotide
  misc_feature 1..20: note = Target: FXN; (-) strand; PAM type: YTN; PAM sequence: CTG
  source 1..20: mol_type = other DNA
attatggcactagagtcaaa

SEQ ID NO: 22179 - DNA, 20 bp, synthetic construct
  misc_feature 1..20: note = Description of Artificial Sequence: Synthetic oligonucleotide
  misc_feature 1..20: note = Target: FXN; (-) strand; PAM type: YTN; PAM sequence: TTG
  source 1..20: mol_type = other DNA
tcccaggagactgattatgg

SEQ ID NO: 22180 - DNA, 20 bp, synthetic construct
  misc_feature 1..20: note = Description of Artificial Sequence: Synthetic oligonucleotide
  misc_feature 1..20: note = Target: FXN; (-) strand; PAM type: YTN; PAM sequence: TTT
  source 1..20: mol_type = other DNA
gtcccaggagactgattatg

SEQ ID NO: 22181 - DNA, 20 bp, synthetic construct
  misc_feature 1..20: note = Description of Artificial Sequence: Synthetic oligonucleotide
  misc_feature 1..20: note = Target: FXN; (-) strand; PAM type: YTN; PAM sequence: CTG
  source 1..20: mol_type = other DNA
tttgtcccaggagactgatt

SEQ ID NO: 22182 - DNA, 20 bp, synthetic construct
  misc_feature 1..20: note = Description of Artificial Sequence: Synthetic oligonucleotide
  misc_feature 1..20: note = Target: FXN; (-) strand; PAM type: YTN; PAM sequence: CTA
  source 1..20: mol_type = other DNA
taatgagggaagagaaacag

SEQ ID NO: 22183 - DNA, 20 bp, synthetic construct
  misc_feature 1..20: note = Description of Artificial Sequence: Synthetic oligonucleotide
  misc_feature 1..20: note = Target: FXN; (-) strand; PAM type: YTN; PAM sequence: TTC
  source 1..20: mol_type = other DNA
tataatgagggaagagaaac

SEQ ID NO: 22184 - DNA, 20 bp, synthetic construct
  misc_feature 1..20: note = Description of Artificial Sequence: Synthetic oligonucleotide
  misc_feature 1..20: note = Target: FXN; (-) strand; PAM type: YTN; PAM sequence: TTT
  source 1..20: mol_type = other DNA
ctataatgagggaagagaaa

SEQ ID NO: 22185 - DNA, 20 bp, synthetic construct
  misc_feature 1..20: note = Description of Artificial Sequence: Synthetic oligonucleotide
  misc_feature 1..20: note = Target: FXN; (-) strand; PAM type: YTN; PAM sequence: TTT
  source 1..20: mol_type = other DNA
tctataatgagggaagagaa

SEQ ID NO: 22186 - DNA, 20 bp, synthetic construct
  misc_feature 1..20: note = Description of Artificial Sequence: Synthetic oligonucleotide
  misc_feature 1..20: note = Target: FXN; (-) strand; PAM type: YTN; PAM sequence: TTT
  source 1..20: mol_type = other DNA
ttctataatgagggaagaga

SEQ ID NO: 22187 - DNA, 20 bp, synthetic construct
  misc_feature 1..20: note = Description of Artificial Sequence: Synthetic oligonucleotide
  misc_feature 1..20: note = Target: FXN; (-) strand; PAM type: YTN; PAM sequence: TTT
  source 1..20: mol_type = other DNA
tttctataatgagggaagag

SEQ ID NO: 22188 - DNA, 20 bp, synthetic construct
  misc_feature 1..20: note = Description of Artificial Sequence: Synthetic oligonucleotide
  misc_feature 1..20: note = Target: FXN; (-) strand; PAM type: YTN; PAM sequence: TTT
  source 1..20: mol_type = other DNA
ttttctataatgagggaaga

SEQ ID NO: 22189 - DNA, 20 bp, synthetic construct
  misc_feature 1..20: note = Description of Artificial Sequence: Synthetic oligonucleotide
  misc_feature 1..20: note = Target: FXN; (-) strand; PAM type: YTN; PAM sequence: TTG
  source 1..20: mol_type = other DNA
ccaagggcaatttttttcta

SEQ ID NO: 22190 - DNA, 20 bp, synthetic construct
  misc_feature 1..20: note = Description of Artificial Sequence: Synthetic oligonucleotide
  misc_feature 1..20: note = Target: FXN; (-) strand; PAM type: YTN; PAM sequence: TTT
  source 1..20: mol_type = other DNA
gccaagggcaatttttttct

SEQ ID NO: 22191 - DNA, 20 bp, synthetic construct
  misc_feature 1..20: note = Description of Artificial Sequence: Synthetic oligonucleotide
  misc_feature 1..20: note = Target: FXN; (-) strand; PAM type: YTN; PAM sequence: TTG
  source 1..20: mol_type = other DNA
acatttgccaagggcaattt

SEQ ID NO: 22192 - DNA, 20 bp, synthetic construct
  misc_feature 1..20: note = Description of Artificial Sequence: Synthetic oligonucleotide
  misc_feature 1..20: note = Target: FXN; (-) strand; PAM type: YTN; PAM sequence: TTT
  source 1..20: mol_type = other DNA
gacatttgccaagggcaatt

SEQ ID NO: 22193 - DNA, 20 bp, synthetic construct
  misc_feature 1..20: note = Description of Artificial Sequence: Synthetic oligonucleotide
  misc_feature 1..20: note = Target: FXN; (-) strand; PAM type: YTN; PAM sequence: CTT
  source 1..20: mol_type = other DNA
tgacatttgccaagggcaat

SEQ ID NO: 22194 - DNA, 20 bp, synthetic construct
  misc_feature 1..20: note = Description of Artificial Sequence: Synthetic oligonucleotide
  misc_feature 1..20: note = Target: FXN; (-) strand; PAM type: YTN; PAM sequence: TTC
  source 1..20: mol_type = other DNA
tttgacatttgccaagggca

SEQ ID NO: 22195 - DNA, 20 bp, synthetic construct
  misc_feature 1..20: note = Description of Artificial Sequence: Synthetic oligonucleotide
  misc_feature 1..20: note = Target: FXN; (-) strand; PAM type: YTN; PAM sequence: TTG
  source 1..20: mol_type = other DNA
ataaaaggatgttctttgac

SEQ ID NO: 22196 - DNA, 20 bp, synthetic construct
  misc_feature 1..20: note = Description of Artificial Sequence: Synthetic oligonucleotide
  misc_feature 1..20: note = Target: FXN; (-) strand; PAM type: YTN; PAM sequence: TTG
  source 1..20: mol_type = other DNA
gtaagagagattgataaaag

SEQ ID NO: 22197 - DNA, 20 bp, synthetic construct
  misc_feature 1..20: note = Description of Artificial Sequence: Synthetic oligonucleotide
  misc_feature 1..20: note = Target: FXN; (-) strand; PAM type: YTN; PAM sequence: TTG
  source 1..20: mol_type = other DNA
attggtaagagagattgata

SEQ ID NO: 22198 - DNA, 20 bp, synthetic construct
  misc_feature 1..20: note = Description of Artificial Sequence: Synthetic oligonucleotide
  misc_feature 1..20: note = Target: FXN; (-) strand; PAM type: YTN; PAM sequence: TTG
  source 1..20: mol_type = other DNA
gattgattggtaagagagat

SEQ ID NO: 22199 - DNA, 20 bp, synthetic construct
  misc_feature 1..20: note = Description of Artificial Sequence: Synthetic oligonucleotide
  misc_feature 1..20: note = Target: FXN; (-) strand; PAM type: YTN; PAM sequence: CTT
  source 1..20: mol_type = other DNA
ggattgattggtaagagaga

SEQ ID NO: 22200 - DNA, 20 bp, synthetic construct
  misc_feature 1..20: note = Description of Artificial Sequence: Synthetic oligonucleotide
  misc_feature 1..20: note = Target: FXN; (-) strand; PAM type: YTN; PAM sequence: TTG
  source 1..20: mol_type = other DNA
cttggattgattggtaagag

SEQ ID NO: 22201 - DNA, 20 bp, synthetic construct
  misc_feature 1..20: note = Description of Artificial Sequence: Synthetic oligonucleotide
  misc_feature 1..20: note = Target: FXN; (-) strand; PAM type: YTN; PAM sequence: TTT
  source 1..20: mol_type = other DNA
gcttggattgattggtaaga

SEQ ID NO: 22202 - DNA, 20 bp, synthetic construct
  misc_feature 1..20: note = Description of Artificial Sequence: Synthetic oligonucleotide
  misc_feature 1..20: note = Target: FXN; (-) strand; PAM type: YTN; PAM sequence: CTG
  source 1..20: mol_type = other DNA
catttgcttggattgattgg

SEQ ID NO: 22203 - DNA, 20 bp, synthetic construct
  misc_feature 1..20: note = Description of Artificial Sequence: Synthetic oligonucleotide
  misc_feature 1..20: note = Target: FXN; (-) strand; PAM type: YTN; PAM sequence: CTG
  source 1..20: mol_type = other DNA
gggaaaagaaatcccactgc

SEQ ID NO: 22204 - DNA, 20 bp, synthetic construct
  misc_feature 1..20: note = Description of Artificial Sequence: Synthetic oligonucleotide
  misc_feature 1..20: note = Target: FXN; (-) strand; PAM type: YTN; PAM sequence: CTC
  source 1..20: mol_type = other DNA
tggggaaaagaaatcccact

SEQ ID NO: 22205 - DNA, 20 bp, synthetic construct
  misc_feature 1..20: note = Description of Artificial Sequence: Synthetic oligonucleotide
  misc_feature 1..20: note = Target: FXN; (-) strand; PAM type: YTN; PAM sequence: TTC
  source 1..20: mol_type = other DNA
aactctggggaaaagaaatc

SEQ ID NO: 22206 - DNA, 20 bp, synthetic construct
  misc_feature 1..20: note = Description of Artificial Sequence: Synthetic oligonucleotide
  misc_feature 1..20: note = Target: FXN; (-) strand; PAM type: YTN; PAM sequence: CTT
  source 1..20: mol_type = other DNA
caactctggggaaaagaaat

SEQ ID NO: 22207 - DNA, 20 bp, synthetic construct
  misc_feature 1..20: note = Description of Artificial Sequence: Synthetic oligonucleotide
  misc_feature 1..20: note = Target: FXN; (-) strand; PAM type: YTN; PAM sequence: CTG
  source 1..20: mol_type = other DNA
tcaggaggtgacttcaactc

SEQ ID NO: 22208 - DNA, 20 bp, synthetic construct
  misc_feature 1..20: note = Description of Artificial Sequence: Synthetic oligonucleotide
  misc_feature 1..20: note = Target: FXN; (-) strand; PAM type: YTN; PAM sequence: TTC
  source 1..20: mol_type = other DNA
ctgtcaggaggtgacttcaa

SEQ ID NO: 22209 - DNA, 20 bp, synthetic construct
  misc_feature 1..20: note = Description of Artificial Sequence: Synthetic oligonucleotide
  misc_feature 1..20: note = Target: FXN; (-) strand; PAM type: YTN; PAM sequence: CTT
  source 1..20: mol_type = other DNA
cctgtcaggaggtgacttca

SEQ ID NO: 22210 - DNA, 20 bp, synthetic construct
  misc_feature 1..20: note = Description of Artificial Sequence: Synthetic oligonucleotide
  misc_feature 1..20: note = Target: FXN; (-) strand; PAM type: YTN; PAM sequence: TTA
  source 1..20: mol_type = other DNA
acttcctgtcaggaggtgac

SEQ ID NO: 22211 - DNA, 20 bp, synthetic construct
  misc_feature 1..20: note = Description of Artificial Sequence: Synthetic oligonucleotide
  misc_feature 1..20: note = Target: FXN; (-) strand; PAM type: YTN; PAM sequence: CTT
  source 1..20: mol_type = other DNA
aacttcctgtcaggaggtga

SEQ ID NO: 22212 - DNA, 20 bp, synthetic construct
  misc_feature 1..20: note = Description of Artificial Sequence: Synthetic oligonucleotide
  misc_feature 1..20: note = Target: FXN; (-) strand; PAM type: YTN; PAM sequence: CTA
  source 1..20: mol_type = other DNA
aagacttaacttcctgtcag

SEQ ID NO: 22213 - DNA, 20 bp, synthetic construct
  misc_feature 1..20: note = Description of Artificial Sequence: Synthetic oligonucleotide
  misc_feature 1..20: note = Target: FXN; (-) strand; PAM type: YTN; PAM sequence: TTC
  source 1..20: mol_type = other DNA
agtgcctaaagacttaactt

SEQ ID NO: 22214 - DNA, 20 bp, synthetic construct
  misc_feature 1..20: note = Description of Artificial Sequence: Synthetic oligonucleotide
  misc_feature 1..20: note = Target: FXN; (-) strand; PAM type: YTN; PAM sequence: CTA
  source 1..20: mol_type = other DNA
tgattcagtgcctaaagact

SEQ ID NO: 22215 - DNA, 20 bp, synthetic construct
  misc_feature 1..20: note = Description of Artificial Sequence: Synthetic oligonucleotide
  misc_feature 1..20: note = Target: FXN; (-) strand; PAM type: YTN; PAM sequence: CTC
  source 1..20: mol_type = other DNA
agtgctatgattcagtgcct

SEQ ID NO: 22216 - DNA, 20 bp, synthetic construct
  misc_feature 1..20: note = Description of Artificial Sequence: Synthetic oligonucleotide
  misc_feature 1..20: note = Target: FXN; (-) strand; PAM type: YTN; PAM sequence: TTC
  source 1..20: mol_type = other DNA
agctcagtgctatgattcag

SEQ ID NO: 22217 - DNA, 20 bp, synthetic construct
  misc_feature 1..20: note = Description of Artificial Sequence: Synthetic oligonucleotide
  misc_feature 1..20: note = Target: FXN; (-) strand; PAM type: YTN; PAM sequence: CTT
  source 1..20: mol_type = other DNA
cagctcagtgctatgattca

SEQ ID NO: 22218 - DNA, 20 bp, synthetic construct
  misc_feature 1..20: note = Description of Artificial Sequence: Synthetic oligonucleotide
  misc_feature 1..20: note = Target: FXN; (-) strand; PAM type: YTN; PAM sequence: CTG
  source 1..20: mol_type = other DNA
ggcttcagctcagtgctatg

SEQ ID NO: 22219 - DNA, 20 bp, synthetic construct
  misc_feature 1..20: note = Description of Artificial Sequence: Synthetic oligonucleotide
  misc_feature 1..20: note = Target: FXN; (-) strand; PAM type: YTN; PAM sequence: TTA
  source 1..20: mol_type = other DNA
gtcctgggcttcagctcagt

SEQ ID NO: 22220 - DNA, 20 bp, synthetic construct
  misc_feature 1..20: note = Description of Artificial Sequence: Synthetic oligonucleotide
  misc_feature 1..20: note = Target: FXN; (-) strand; PAM type: YTN; PAM sequence: CTT
  source 1..20: mol_type = other DNA
agtcctgggcttcagctcag

SEQ ID NO: 22221 - DNA, 20 bp, synthetic construct
  misc_feature 1..20: note = Description of Artificial Sequence: Synthetic oligonucleotide
  misc_feature 1..20: note = Target: FXN; (-) strand; PAM type: YTN; PAM sequence: TTG
  source 1..20: mol_type = other DNA
cttagtcctgggcttcagct

SEQ ID NO: 22222 - DNA, 20 bp, synthetic construct
  misc_feature 1..20: note = Description of Artificial Sequence: Synthetic oligonucleotide
  misc_feature 1..20: note = Target: FXN; (-) strand; PAM type: YTN; PAM sequence: CTT
  source 1..20: mol_type = other DNA
gcttagtcctgggcttcagc

SEQ ID NO: 22223 - DNA, 20 bp, synthetic construct
  misc_feature 1..20: note = Description of Artificial Sequence: Synthetic oligonucleotide
  misc_feature 1..20: note = Target: FXN; (-) strand; PAM type: YTN; PAM sequence: TTC
  source 1..20: mol_type = other DNA
ttgcttagtcctgggcttca

SEQ ID NO: 22224 - DNA, 20 bp, synthetic construct
  misc_feature 1..20: note = Description of Artificial Sequence: Synthetic oligonucleotide
  misc_feature 1..20: note = Target: FXN; (-) strand; PAM type: YTN; PAM sequence: CTC
  source 1..20: mol_type = other DNA
attcttgcttagtcctgggc

SEQ ID NO: 22225 - DNA, 20 bp, synthetic construct
  misc_feature 1..20: note = Description of Artificial Sequence: Synthetic oligonucleotide
  misc_feature 1..20: note = Target: FXN; (-) strand; PAM type: YTN; PAM sequence: CTC
  source 1..20: mol_type = other DNA
actcattcttgcttagtcct

SEQ ID NO: 22226 - DNA, 20 bp, synthetic construct
  misc_feature 1..20: note = Description of Artificial Sequence: Synthetic oligonucleotide
  misc_feature 1..20: note = Target: FXN; (-) strand; PAM type: YTN; PAM sequence: TTC
  source 1..20: mol_type = other DNA
tcactcattcttgcttagtc

SEQ ID NO: 22227 - DNA, 20 bp, synthetic construct
  misc_feature 1..20: note = Description of Artificial Sequence: Synthetic oligonucleotide
  misc_feature 1..20: note = Target: FXN; (-) strand; PAM type: YTN; PAM sequence: CTC
  source 1..20: mol_type = other DNA
caaattctcactcattcttg

SEQ ID NO: 22228 - DNA, 20 bp, synthetic construct
  misc_feature 1..20: note = Description of Artificial Sequence: Synthetic oligonucleotide
  misc_feature 1..20: note = Target: FXN; (-) strand; PAM type: YTN; PAM sequence: TTA
  source 1..20: mol_type = other DNA
agtctccaaattctcactca

SEQ ID NO: 22229 - DNA, 20 bp, synthetic construct
  misc_feature 1..20: note = Description of Artificial Sequence: Synthetic oligonucleotide
  misc_feature 1..20: note = Target: FXN; (-) strand; PAM type: YTN; PAM sequence: CTT
  source 1..20: mol_type = other DNA
aagtctccaaattctcactc

SEQ ID NO: 22230 - DNA, 20 bp, synthetic construct
  misc_feature 1..20: note = Description of Artificial Sequence: Synthetic oligonucleotide
  misc_feature 1..20: note = Target: FXN; (-) strand; PAM type: YTN; PAM sequence: CTA
  source 1..20: mol_type = other DNA
cagatgaccaaaccttaagt

SEQ ID NO: 22231 - DNA, 20 bp, synthetic construct
  misc_feature 1..20: note = Description of Artificial Sequence: Synthetic oligonucleotide
  misc_feature 1..20: note = Target: FXN; (-) strand; PAM type: YTN; PAM sequence: CTC
  source 1..20: mol_type = other DNA
tacagatgaccaaaccttaa

SEQ ID NO: 22232 - DNA, 20 bp, synthetic construct
  misc_feature 1..20: note = Description of Artificial Sequence: Synthetic oligonucleotide
  misc_feature 1..20: note = Target: FXN; (-) strand; PAM type: YTN; PAM sequence: TTG
  source 1..20: mol_type = other DNA
caggacaccaaaacaaaaac

SEQ ID NO: 22233 - DNA, 20 bp, synthetic construct
  misc_feature 1..20: note = Description of Artificial Sequence: Synthetic oligonucleotide
  misc_feature 1..20: note = Target: FXN; (-) strand; PAM type: YTN; PAM sequence: CTT
  source 1..20: mol_type = other DNA
gcaggacaccaaaacaaaaa

SEQ ID NO: 22234 - DNA, 20 bp, synthetic construct
  misc_feature 1..20: note = Description of Artificial Sequence: Synthetic oligonucleotide
  misc_feature 1..20: note = Target: FXN; (-) strand; PAM type: YTN; PAM sequence: CTG
  source 1..20: mol_type = other DNA
atgaagggcagtgagaaacc

SEQ ID NO: 22235 - DNA, 20 bp, synthetic construct
  misc_feature 1..20: note = Description of Artificial Sequence: Synthetic oligonucleotide
  misc_feature 1..20: note = Target: FXN; (-) strand; PAM type: YTN; PAM sequence: TTA
  source 1..20: mol_type = other DNA
cctgatgaagggcagtgaga

SEQ ID NO: 22236 - DNA, 20 bp, synthetic construct
  misc_feature 1..20: note = Description of Artificial Sequence: Synthetic oligonucleotide
  misc_feature 1..20: note = Target: FXN; (-) strand; PAM type: YTN; PAM sequence: TTC
  source 1..20: mol_type = other DNA
agggacagggcatattacct

SEQ ID NO: 22237 - DNA, 20 bp, synthetic construct
  misc_feature 1..20: note = Description of Artificial Sequence: Synthetic oligonucleotide
  misc_feature 1..20: note = Target: FXN; (-) strand; PAM type: YTN; PAM sequence: TTG
  source 1..20: mol_type = other DNA
gccagttcagggacagggca

SEQ ID NO: 22238 - DNA, 20 bp, synthetic construct
  misc_feature 1..20: note = Description of Artificial Sequence: Synthetic oligonucleotide
  misc_feature 1..20: note = Target: FXN; (-) strand; PAM type: YTN; PAM sequence: CTA
  source 1..20: mol_type = other DNA
agggaatggggtaacacaat

SEQ ID NO: 22239 - DNA, 20 bp, synthetic construct
  misc_feature 1..20: note = Description of Artificial Sequence: Synthetic oligonucleotide
  misc_feature 1..20: note = Target: FXN; (-) strand; PAM type: YTN; PAM sequence: TTG
  source 1..20: mol_type = other DNA
ctaagggaatggggtaacac

SEQ ID NO: 22240 - DNA, 20 bp, synthetic construct
  misc_feature 1..20: note = Description of Artificial Sequence: Synthetic oligonucleotide
  misc_feature 1..20: note = Target: FXN; (-) strand; PAM type: YTN; PAM sequence: CTG
  source 1..20: mol_type = other DNA
ttgctaagggaatggggtaa

SEQ ID NO: 22241 - DNA, 20 bp, synthetic construct
  misc_feature 1..20: note = Description of Artificial Sequence: Synthetic oligonucleotide
  misc_feature 1..20: note = Target: FXN; (-) strand; PAM type: YTN; PAM sequence: TTC
  source 1..20: mol_type = other DNA
agtagcaatcactgttgcta

SEQ ID NO: 22242 - DNA, 20 bp, synthetic construct
  misc_feature 1..20: note = Description of Artificial Sequence: Synthetic oligonucleotide
  misc_feature 1..20: note = Target: FXN; (-) strand; PAM type: YTN; PAM sequence: CTT
  source 1..20: mol_type = other DNA
cagtagcaatcactgttgct

SEQ ID NO: 22243 - DNA, 20 bp, synthetic construct
  misc_feature 1..20: note = Description of Artificial Sequence: Synthetic oligonucleotide
  misc_feature 1..20: note = Target: FXN; (-) strand; PAM type: YTN; PAM sequence: TTC
  source 1..20: mol_type = other DNA
ttcagtagcaatcactgttg

SEQ ID NO: 22244 - DNA, 20 bp, synthetic construct
  misc_feature 1..20: note = Description of Artificial Sequence: Synthetic oligonucleotide
  misc_feature 1..20: note = Target: FXN; (-) strand; PAM type: YTN; PAM sequence: TTT
  source 1..20: mol_type = other DNA
cttcagtagcaatcactgtt

SEQ ID NO: 22245 - DNA, 20 bp, synthetic construct
  misc_feature 1..20: note = Description of Artificial Sequence: Synthetic oligonucleotide
  misc_feature 1..20: note = Target: FXN; (-) strand; PAM type: YTN; PAM sequence: CTG
  source 1..20: mol_type = other DNA
tttcttcagtagcaatcact

SEQ ID NO: 22246 - DNA, 20 bp, synthetic construct
  misc_feature 1..20: note = Description of Artificial Sequence: Synthetic oligonucleotide
  misc_feature 1..20: note = Target: FXN; (-) strand; PAM type: YTN; PAM sequence: CTC
  source 1..20: mol_type = other DNA
ctgtttcttcagtagcaatc

SEQ ID NO: 22247 - DNA, 20 bp, synthetic construct
  misc_feature 1..20: note = Description of Artificial Sequence: Synthetic oligonucleotide
  misc_feature 1..20: note = Target: FXN; (-) strand; PAM type: YTN; PAM sequence: TTG
  source 1..20: mol_type = other DNA
gcctcctgtttcttcagtag

SEQ ID NO: 22248 - DNA, 20 bp, synthetic construct
  misc_feature 1..20: note = Description of Artificial Sequence: Synthetic oligonucleotide
  misc_feature 1..20: note = Target: FXN; (-) strand; PAM type: YTN; PAM sequence: TTG
  source 1..20: mol_type = other DNA
ttggcctcctgtttcttcag

SEQ ID NO: 22249 - DNA, 20 bp, synthetic construct
  misc_feature 1..20: note = Description of Artificial Sequence: Synthetic oligonucleotide
  misc_feature 1..20: note = Target: FXN; (-) strand; PAM type: YTN; PAM sequence: TTT
  source 1..20: mol_type = other DNA
gttggcctcctgtttcttca

SEQ ID NO: 22250 - DNA, 20 bp, synthetic construct
  misc_feature 1..20: note = Description of Artificial Sequence: Synthetic oligonucleotide
  misc_feature 1..20: note = Target: FXN; (-) strand; PAM type: YTN; PAM sequence: CTT
  source 1..20: mol_type = other DNA
tgttggcctcctgtttcttc

SEQ ID NO: 22251 - DNA, 20 bp, synthetic construct
  misc_feature 1..20: note = Description of Artificial Sequence: Synthetic oligonucleotide
  misc_feature 1..20: note = Target: FXN; (-) strand; PAM type: YTN; PAM sequence: TTC
  source 1..20: mol_type = other DNA
tttgttggcctcctgtttct

SEQ ID NO: 22252 - DNA, 20 bp, synthetic construct
  misc_feature 1..20: note = Description of Artificial Sequence: Synthetic oligonucleotide
  misc_feature 1..20: note = Target: FXN; (-) strand; PAM type: YTN; PAM sequence: CTG
  source 1..20: mol_type = other DNA
gtgaatgagtgatattcttt

SEQ ID NO: 22253 - DNA, 20 bp, synthetic construct
  misc_feature 1..20: note = Description of Artificial Sequence: Synthetic oligonucleotide
  misc_feature 1..20: note = Target: FXN; (-) strand; PAM type: YTN; PAM sequence: CTA
  source 1..20: mol_type = other DNA
ctggtgaatgagtgatattc

SEQ ID NO: 22254 - DNA, 20 bp, synthetic construct
  misc_feature 1..20: note = Description of Artificial Sequence: Synthetic oligonucleotide
  misc_feature 1..20: note = Target: FXN; (-) strand; PAM type: YTN; PAM sequence: CTC
  source 1..20: mol_type = other DNA
tactggtgaatgagtgatat

SEQ ID NO: 22255 - DNA, 20 bp, synthetic construct
  misc_feature 1..20: note = Description of Artificial Sequence: Synthetic oligonucleotide
  misc_feature 1..20: note = Target: FXN; (-) strand; PAM type: YTN; PAM sequence: CTG
  source 1..20: mol_type = other DNA
acatagacactctactggtg

SEQ ID NO: 22256 - DNA, 20 bp, synthetic construct
  misc_feature 1..20: note = Description of Artificial Sequence: Synthetic oligonucleotide
  misc_feature 1..20: note = Target: FXN; (-) strand; PAM type: YTN; PAM sequence: CTC
  source 1..20: mol_type = other DNA
tgacatagacactctactgg

SEQ ID NO: 22257 - DNA, 20 bp, synthetic construct
  misc_feature 1..20: note = Description of Artificial Sequence: Synthetic oligonucleotide
  misc_feature 1..20: note = Target: FXN; (-) strand; PAM type: YTN; PAM sequence: CTA
  source 1..20: mol_type = other DNA
atatctctgacatagacact

SEQ ID NO: 22258 - DNA, 20 bp, synthetic construct
  misc_feature 1..20: note = Description of Artificial Sequence: Synthetic oligonucleotide
  misc_feature 1..20: note = Target: FXN; (-) strand; PAM type: YTN; PAM sequence: TTA
  source 1..20: mol_type = other DNA
tctaatatctctgacataga

SEQ ID NO: 22259 - DNA, 20 bp, synthetic construct
  misc_feature 1..20: note = Description of Artificial Sequence: Synthetic oligonucleotide
  misc_feature 1..20: note = Target: FXN; (-) strand; PAM type: YTN; PAM sequence: TTT
  source 1..20: mol_type = other DNA
atctaatatctctgacatag

SEQ ID NO: 22260 - DNA, 20 bp, synthetic construct
  misc_feature 1..20: note = Description of Artificial Sequence: Synthetic oligonucleotide
  misc_feature 1..20: note = Target: FXN; (-) strand; PAM type: YTN; PAM sequence: CTG
  source 1..20: mol_type = other DNA
tttatctaatatctctgaca

SEQ ID NO: 22261 - DNA, 20 bp, synthetic construct
  misc_feature 1..20: note = Description of Artificial Sequence: Synthetic oligonucleotide
  misc_feature 1..20: note = Target: FXN; (-) strand; PAM type: YTN; PAM sequence: TTC
  source 1..20: mol_type = other DNA
ctgtttatctaatatctctg

SEQ ID NO: 22262 - DNA, 20 bp, synthetic construct
  misc_feature 1..20: note = Description of Artificial Sequence: Synthetic oligonucleotide
  misc_feature 1..20: note = Target: FXN; (-) strand; PAM type: YTN; PAM sequence: TTT
  source 1..20: mol_type = other DNA
cctgtttatctaatatctct

SEQ ID NO: 22263 - DNA, 20 bp, synthetic construct
  misc_feature 1..20: note = Description of Artificial Sequence: Synthetic oligonucleotide
  misc_feature 1..20: note = Target: FXN; (-) strand; PAM type: YTN; PAM sequence: TTT
  source 1..20: mol_type = other DNA
tcctgtttatctaatatctc

SEQ ID NO: 22264 - DNA, 20 bp, synthetic construct
  misc_feature 1..20: note = Description of Artificial Sequence: Synthetic oligonucleotide
  misc_feature 1..20: note = Target: FXN; (-) strand; PAM type: YTN; PAM sequence: TTA
  source 1..20: mol_type = other DNA
gttttcctgtttatctaata

SEQ ID NO: 22265 - DNA, 20 bp, synthetic construct
  misc_feature 1..20: note = Description of Artificial Sequence: Synthetic oligonucleotide
  misc_feature 1..20: note = Target: FXN; (-) strand; PAM type: YTN; PAM sequence: TTG
  source 1..20: mol_type = other DNA
ttagttttcctgtttatcta

SEQ ID NO: 22266 - DNA, 20 bp, synthetic construct
  misc_feature 1..20: note = Description of Artificial Sequence: Synthetic oligonucleotide
  misc_feature 1..20: note = Target: FXN; (-) strand; PAM type: YTN; PAM sequence: CTG
  source 1..20: mol_type = other DNA
caatgtaattgttagttttc

SEQ ID NO: 22267 - DNA, 20 bp, synthetic construct
  misc_feature 1..20: note = Description of Artificial Sequence: Synthetic oligonucleotide
  misc_feature 1..20: note = Target: FXN; (-) strand; PAM type: YTN; PAM sequence: TTC
  source 1..20: mol_type = other DNA
cacagcctgcaatgtaattg

SEQ ID NO: 22268 - DNA, 20 bp, synthetic construct
  misc_feature 1..20: note = Description of Artificial Sequence: Synthetic oligonucleotide
  misc_feature 1..20: note = Target: FXN; (-) strand; PAM type: YTN; PAM sequence: TTT
  source 1..20: mol_type = other DNA
ccacagcctgcaatgtaatt

SEQ ID NO: 22269 - DNA, 20 bp, synthetic construct
  misc_feature 1..20: note = Description of Artificial Sequence: Synthetic oligonucleotide
  misc_feature 1..20: note = Target: FXN; (-) strand; PAM type: YTN; PAM sequence: CTG
  source 1..20: mol_type = other DNA
tttccacagcctgcaatgta

SEQ ID NO: 22270 - DNA, 20 bp, synthetic construct
  misc_feature 1..20: note = Description of Artificial Sequence: Synthetic oligonucleotide
  misc_feature 1..20: note = Target: FXN; (-) strand; PAM type: YTN; PAM sequence: CTC
  source 1..20: mol_type = other DNA
tgtttccacagcctgcaatg

SEQ ID NO: 22271 - DNA, 20 bp, synthetic construct
  misc_feature 1..20: note = Description of Artificial Sequence: Synthetic oligonucleotide
  misc_feature 1..20: note = Target: FXN; (-) strand; PAM type: YTN; PAM sequence: CTC
  source 1..20: mol_type = other DNA
tctgtttccacagcctgcaa

SEQ ID NO: 22272 - DNA, 20 bp, synthetic construct
  misc_feature 1..20: note = Description of Artificial Sequence: Synthetic oligonucleotide
  misc_feature 1..20: note = Target: FXN; (-) strand; PAM type: YTN; PAM sequence: CTC
  source 1..20: mol_type = other DNA
tctctgtttccacagcctgc

SEQ ID NO: 22273 - DNA, 20 bp, synthetic construct
  misc_feature 1..20: note = Description of Artificial Sequence: Synthetic oligonucleotide
  misc_feature 1..20: note = Target: FXN; (-) strand; PAM type: YTN; PAM sequence: TTA
  source 1..20: mol_type = other DNA
ggtacctctctctgtttcca

SEQ ID NO: 22274 - DNA, 20 bp, synthetic construct
  misc_feature 1..20: note = Description of Artificial Sequence: Synthetic oligonucleotide
  misc_feature 1..20: note = Target: FXN; (-) strand; PAM type: YTN; PAM sequence: CTT
  source 1..20: mol_type = other DNA
aggtacctctctctgtttcc

SEQ ID NO: 22275 - DNA, 20 bp, synthetic construct
  misc_feature 1..20: note = Description of Artificial Sequence: Synthetic oligonucleotide
  misc_feature 1..20: note = Target: FXN; (-) strand; PAM type: YTN; PAM sequence: TTC
  source 1..20: mol_type = other DNA
ccacaggtgtgccttaggta

SEQ ID NO: 22276 - DNA, 20 bp, synthetic construct
  misc_feature 1..20: note = Description of Artificial Sequence: Synthetic oligonucleotide
  misc_feature 1..20: note = Target: FXN; (-) strand; PAM type: YTN; PAM sequence: TTC
  source 1..20: mol_type = other DNA
atattcccacaggtgtgcct

SEQ ID NO: 22277 - DNA, 20 bp, synthetic construct
  misc_feature 1..20: note = Description of Artificial Sequence: Synthetic oligonucleotide
  misc_feature 1..20: note = Target: FXN; (-) strand; PAM type: YTN; PAM sequence: TTT
  source 1..20: mol_type = other DNA
catattcccacaggtgtgcc

SEQ ID NO: 22278 - DNA, 20 bp, synthetic construct
  misc_feature 1..20: note = Description of Artificial Sequence: Synthetic oligonucleotide
  misc_feature 1..20: note = Target: FXN; (-) strand; PAM type: YTN; PAM sequence: CTT
  source 1..20: mol_type = other DNA
tcatattcccacaggtgtgc

SEQ ID NO: 22279 - DNA, 20 bp, synthetic construct
  misc_feature 1..20: note = Description of Artificial Sequence: Synthetic oligonucleotide
  misc_feature 1..20: note = Target: FXN; (-) strand; PAM type: YTN; PAM sequence: TTA
  source 1..20: mol_type = other DNA
tgaaaccaaactttcatatt

SEQ ID NO: 22280 - DNA, 20 bp, synthetic construct
  misc_feature 1..20: note = Description of Artificial Sequence: Synthetic oligonucleotide
  misc_feature 1..20: note = Target: FXN; (-) strand; PAM type: YTN; PAM sequence: TTT
  source 1..20: mol_type = other DNA
atgaaaccaaactttcatat

SEQ ID NO: 22281 - DNA, 20 bp, synthetic construct
  misc_feature 1..20: note = Description of Artificial Sequence: Synthetic oligonucleotide
  misc_feature 1..20: note = Target: FXN; (-) strand; PAM type: YTN; PAM sequence: TTT
  source 1..20: mol_type = other DNA
tatgaaaccaaactttcata

SEQ ID NO: 22282 - DNA, 20 bp, synthetic construct
  misc_feature 1..20: note = Description of Artificial Sequence: Synthetic oligonucleotide
  misc_feature 1..20: note = Target: FXN; (-) strand; PAM type: YTN; PAM sequence: CTT
  source 1..20: mol_type = other DNA
ttatgaaaccaaactttcat

SEQ ID NO: 22283 - DNA, 20 bp, synthetic construct
  misc_feature 1..20: note = Description of Artificial Sequence: Synthetic oligonucleotide
  misc_feature 1..20: note = Target: FXN; (-) strand; PAM type: YTN; PAM sequence: CTC
  source 1..20: mol_type = other DNA
cagaatccttttatgaaacc

SEQ ID NO: 22284 - DNA, 20 bp, synthetic construct
  misc_feature 1..20: note = Description of Artificial Sequence: Synthetic oligonucleotide
  misc_feature 1..20: note = Target: FXN; (-) strand; PAM type: YTN; PAM sequence: TTC
  source 1..20: mol_type = other DNA
ctccagaatccttttatgaa

SEQ ID NO: 22285 - DNA, 20 bp, synthetic construct
  misc_feature 1..20: note = Description of Artificial Sequence: Synthetic oligonucleotide
  misc_feature 1..20: note = Target: FXN; (-) strand; PAM type: YTN; PAM sequence: CTT
  source 1..20: mol_type = other DNA
cctccagaatccttttatga

SEQ ID NO: 22286 - DNA, 20 bp, synthetic construct
  misc_feature 1..20: note = Description of Artificial Sequence: Synthetic oligonucleotide
  misc_feature 1..20: note = Target: FXN; (-) strand; PAM type: YTN; PAM sequence: CTC
  source 1..20: mol_type = other DNA
aaatgtcagaggtgacttcc

SEQ ID NO: 22287 - DNA, 20 bp, synthetic construct
  misc_feature 1..20: note = Description of Artificial Sequence: Synthetic oligonucleotide
  misc_feature 1..20: note = Target: FXN; (-) strand; PAM type: YTN; PAM sequence: CTC
  source 1..20: mol_type = other DNA
aactcaaatgtcagaggtga

SEQ ID NO: 22288 - DNA, 20 bp, synthetic construct
  misc_feature 1..20: note = Description of Artificial Sequence: Synthetic oligonucleotide
  misc_feature 1..20: note = Target: FXN; (-) strand; PAM type: YTN; PAM sequence: CTG
  source 1..20: mol_type = other DNA
taggactcaactcaaatgtc

SEQ ID NO: 22289 - DNA, 20 bp, synthetic construct
  misc_feature 1..20: note = Description of Artificial Sequence: Synthetic oligonucleotide
  misc_feature 1..20: note = Target: FXN; (-) strand; PAM type: YTN; PAM sequence: TTC
  source 1..20: mol_type = other DNA
atatcctgtaggactcaact

SEQ ID NO: 22290 - DNA, 20 bp, synthetic construct
  misc_feature 1..20: note = Description of Artificial Sequence: Synthetic oligonucleotide
  misc_feature 1..20: note = Target: FXN; (-) strand; PAM type: YTN; PAM sequence: CTT
  source 1..20: mol_type = other DNA
catatcctgtaggactcaac

SEQ ID NO: 22291 - DNA, 20 bp, synthetic construct
  misc_feature 1..20: note = Description of Artificial Sequence: Synthetic oligonucleotide
  misc_feature 1..20: note = Target: FXN; (-) strand; PAM type: YTN; PAM sequence: TTC
  source 1..20: mol_type = other DNA
ttcatatcctgtaggactca

SEQ ID NO: 22292 - DNA, 20 bp, synthetic construct
  misc_feature 1..20: note = Description of Artificial Sequence: Synthetic oligonucleotide
  misc_feature 1..20: note = Target: FXN; (-) strand; PAM type: YTN; PAM sequence: TTT
  source 1..20: mol_type = other DNA
cttcatatcctgtaggactc

SEQ ID NO: 22293 - DNA, 20 bp, synthetic construct
  misc_feature 1..20: note = Description of Artificial Sequence: Synthetic oligonucleotide
  misc_feature 1..20: note = Target: FXN; (-) strand; PAM type: YTN; PAM sequence: CTT
  source 1..20: mol_type = other DNA
tcttcatatcctgtaggact

SEQ ID NO: 22294 - DNA, 20 bp, synthetic construct
  misc_feature 1..20: note = Description of Artificial Sequence: Synthetic oligonucleotide
  misc_feature 1..20: note = Target: FXN; (-) strand; PAM type: YTN; PAM sequence: CTA
  source 1..20: mol_type = other DNA
ctttcttcatatcctgtagg

SEQ ID NO: 22295 - DNA, 20 bp, synthetic construct
  misc_feature 1..20: note = Description of Artificial Sequence: Synthetic oligonucleotide
  misc_feature 1..20: note = Target: FXN; (-) strand; PAM type: YTN; PAM sequence: TTA
  source 1..20: mol_type = other DNA
cacagccatagtaaccggaa

SEQ ID NO: 22296 - DNA, 20 bp, synthetic construct
  misc_feature 1..20: note = Description of Artificial Sequence: Synthetic oligonucleotide
  misc_feature 1..20: note = Target: FXN; (-) strand; PAM type: YTN; PAM sequence: TTA
  source 1..20: mol_type = other DNA
ttacacagccatagtaaccg

SEQ ID NO: 22297 - DNA, 20 bp, synthetic construct
  misc_feature 1..20: note = Description of Artificial Sequence: Synthetic oligonucleotide
  misc_feature 1..20: note = Target: FXN; (-) strand; PAM type: YTN; PAM sequence: TTT
  source 1..20: mol_type = other DNA
attacacagccatagtaacc

SEQ ID NO: 22298 - DNA, 20 bp, synthetic construct
  misc_feature 1..20: note = Description of Artificial Sequence: Synthetic oligonucleotide
  misc_feature 1..20: note = Target: FXN; (-) strand; PAM type: YTN; PAM sequence: TTA
  source 1..20: mol_type = other DNA
ggtaatttattacacagcca

SEQ ID NO: 22299 - DNA, 20 bp, synthetic construct
  misc_feature 1..20: note = Description of Artificial Sequence: Synthetic oligonucleotide
  misc_feature 1..20: note = Target: FXN; (-) strand; PAM type: YTN; PAM sequence: TTT
  source 1..20: mol_type = other DNA
aggtaatttattacacagcc

SEQ ID NO: 22300 - DNA, 20 bp, synthetic construct
  misc_feature 1..20: note = Description of Artificial Sequence: Synthetic oligonucleotide
  misc_feature 1..20: note = Target: FXN; (-) strand; PAM type: YTN; PAM sequence: TTT
  source 1..20: mol_type = other DNA
taggtaatttattacacagc

SEQ ID NO: 22301 - DNA, 20 bp, synthetic construct
  misc_feature 1..20: note = Description of Artificial Sequence: Synthetic oligonucleotide
  misc_feature 1..20: note = Target: FXN; (-) strand; PAM type: YTN; PAM sequence: TTA
  source 1..20: mol_type = other DNA
atccagtatgttttaggtaa

SEQ ID NO: 22302 - DNA, 20 bp, synthetic construct
  misc_feature 1..20: note = Description of Artificial Sequence: Synthetic oligonucleotide
  misc_feature 1..20: note = Target: FXN; (-) strand; PAM type: YTN; PAM sequence: TTT
  source 1..20: mol_type = other DNA
aatccagtatgttttaggta

SEQ ID NO: 22303 - DNA, 20 bp, synthetic construct
  misc_feature 1..20: note = Description of Artificial Sequence: Synthetic oligonucleotide
  misc_feature 1..20: note = Target: FXN; (-) strand; PAM type: YTN; PAM sequence: CTT
  source 1..20: mol_type = other DNA
taatccagtatgttttaggt

SEQ ID NO: 22304 - DNA, 20 bp, synthetic construct
  misc_feature 1..20: note = Description of Artificial Sequence: Synthetic oligonucleotide
  misc_feature 1..20: note = Target: FXN; (-) strand; PAM type: YTN; PAM sequence: TTC
  source 1..20: mol_type = other DNA
atagctttaatccagtatgt

SEQ ID NO: 22305 - DNA, 20 bp, synthetic construct
  misc_feature 1..20: note = Description of Artificial Sequence: Synthetic oligonucleotide
  misc_feature 1..20: note = Target: FXN; (-) strand; PAM type: YTN; PAM sequence: TTT
  source 1..20: mol_type = other DNA
catagctttaatccagtatg

SEQ ID NO: 22306 - DNA, 20 bp, synthetic construct
  misc_feature 1..20: note = Description of Artificial Sequence: Synthetic oligonucleotide
  misc_feature 1..20: note = Target: FXN; (-) strand; PAM type: YTN; PAM sequence: TTT
  source 1..20: mol_type = other DNA
tcatagctttaatccagtat

SEQ ID NO: 22307 - DNA, 20 bp, synthetic construct
  misc_feature 1..20: note = Description of Artificial Sequence: Synthetic oligonucleotide
  misc_feature 1..20: note = Target: FXN; (-) strand; PAM type: YTN; PAM sequence: CTG
  source 1..20: mol_type = other DNA
ggcagaaaagatgttttcat

SEQ ID NO: 22308 - DNA, 20 bp, synthetic construct
  misc_feature 1..20: note = Description of Artificial Sequence: Synthetic oligonucleotide
  misc_feature 1..20: note = Target: FXN; (-) strand; PAM type: YTN; PAM sequence: CTC
  source 1..20: mol_type = other DNA
tgggcagaaaagatgttttc

SEQ ID NO: 22309 - DNA, 20 bp, synthetic construct
  misc_feature 1..20: note = Description of Artificial Sequence: Synthetic oligonucleotide
  misc_feature 1..20: note = Target: FXN; (-) strand; PAM type: YTN; PAM sequence: TTC
  source 1..20: mol_type = other DNA
aggcccacagaatctctggg

SEQ ID NO: 22310 - DNA, 20 bp, synthetic construct
  misc_feature 1..20: note = Description of Artificial Sequence: Synthetic oligonucleotide
  misc_feature 1..20: note = Target: FXN; (-) strand; PAM type: YTN; PAM sequence: TTT
  source 1..20: mol_type = other DNA
caggcccacagaatctctgg

SEQ ID NO: 22311 - DNA, 20 bp, synthetic construct
  misc_feature 1..20: note = Description of Artificial Sequence: Synthetic oligonucleotide
  misc_feature 1..20: note = Target: FXN; (-) strand; PAM type: YTN; PAM sequence: TTC
  source 1..20: mol_type = other DNA
catgtgaatttcaggcccac

SEQ ID NO: 22312 - DNA, 20 bp, synthetic construct
  misc_feature 1..20: note = Description of Artificial Sequence: Synthetic oligonucleotide
  misc_feature 1..20: note = Target: FXN; (-) strand; PAM type: YTN; PAM sequence: TTA
  source 1..20: mol_type = other DNA
tgtgttccatgtgaatttca

SEQ ID NO: 22313 - DNA, 20 bp, synthetic construct
  misc_feature 1..20: note = Description of Artificial Sequence: Synthetic oligonucleotide
  misc_feature 1..20: note = Target: FXN; (-) strand; PAM type: YTN; PAM sequence: CTT
  source 1..20: mol_type = other DNA
atgtgttccatgtgaatttc

SEQ ID NO: 22314 - DNA, 20 bp, synthetic construct
  misc_feature 1..20: note = Description of Artificial Sequence: Synthetic oligonucleotide
  misc_feature 1..20: note = Target: FXN; (-) strand; PAM type: YTN; PAM sequence: TTA
  source 1..20: mol_type = other DNA
gacatcatggagcagaaaca

SEQ ID NO: 22315 - DNA, 20 bp, synthetic construct
  misc_feature 1..20: note = Description of Artificial Sequence: Synthetic oligonucleotide
  misc_feature 1..20: note = Target: FXN; (-) strand; PAM type: YTN; PAM sequence: CTT
  source 1..20: mol_type = other DNA
agacatcatggagcagaaac

SEQ ID NO: 22316 - DNA, 20 bp, synthetic construct
  misc_feature 1..20: note = Description of Artificial Sequence: Synthetic oligonucleotide
  misc_feature 1..20: note = Target: FXN; (-) strand; PAM type: YTN; PAM sequence: CTG
  source 1..20: mol_type = other DNA
aatccttagacatcatggag

SEQ ID NO: 22317 - DNA, 20 bp, synthetic construct
  misc_feature 1..20: note = Description of Artificial Sequence: Synthetic oligonucleotide
  misc_feature 1..20: note = Target: FXN; (-) strand; PAM type: YTN; PAM sequence: TTC
  source 1..20: mol_type = other DNA
cagctgaatccttagacatc

SEQ ID NO: 22318 - DNA, 20 bp, synthetic construct
  misc_feature 1..20: note = Description of Artificial Sequence: Synthetic oligonucleotide
  misc_feature 1..20: note = Target: FXN; (-) strand; PAM type: YTN; PAM sequence: CTT
  source 1..20: mol_type = other DNA
ccagctgaatccttagacat

SEQ ID NO: 22319 - DNA, 20 bp, synthetic construct
  misc_feature 1..20: note = Description of Artificial Sequence: Synthetic oligonucleotide
  misc_feature 1..20: note = Target: FXN; (-) strand; PAM type: YTN; PAM sequence: CTC
  source 1..20: mol_type = other DNA
ccagtcttccagctgaatcc

SEQ ID NO: 22320 - DNA, 20 bp, synthetic construct
  misc_feature 1..20: note = Description of Artificial Sequence: Synthetic oligonucleotide
  misc_feature 1..20: note = Target: FXN; (-) strand; PAM type: YTN; PAM sequence: TTC
  source 1..20: mol_type = other DNA
cagcccccagcctcccagtc

SEQ ID NO: 22321 - DNA, 20 bp, synthetic construct
  misc_feature 1..20: note = Description of Artificial Sequence: Synthetic oligonucleotide
  misc_feature 1..20: note = Target: FXN; (-) strand; PAM type: YTN; PAM sequence: TTC
  source 1..20: mol_type = other DNA
agataaattccagcccccag

SEQ ID NO: 22322 - DNA, 20 bp, synthetic construct
  misc_feature 1..20: note = Description of Artificial Sequence: Synthetic oligonucleotide
  misc_feature 1..20: note = Target: FXN; (-) strand; PAM type: YTN; PAM sequence: CTT
  source 1..20: mol_type = other DNA
cagataaattccagccccca

SEQ ID NO: 22323 - DNA, 20 bp, synthetic construct
  misc_feature 1..20: note = Description of Artificial Sequence: Synthetic oligonucleotide
  misc_feature 1..20: note = Target: FXN; (-) strand; PAM type: YTN; PAM sequence: TTC
  source 1..20: mol_type = other DNA
ttcagataaattccagcccc

SEQ ID NO: 22324 - DNA, 20 bp, synthetic construct
  misc_feature 1..20: note = Description of Artificial Sequence: Synthetic oligonucleotide
  misc_feature 1..20: note = Target: FXN; (-) strand; PAM type: YTN; PAM sequence: CTC
  source 1..20: mol_type = other DNA
agccaacagccagggtcaac

SEQ ID NO: 22325 - DNA, 20 bp, synthetic construct
  misc_feature 1..20: note = Description of Artificial Sequence: Synthetic oligonucleotide
  misc_feature 1..20: note = Target: FXN; (-) strand; PAM type: YTN; PAM sequence: CTG
  source 1..20: mol_type = other DNA
aggccccctcagccaacagc

SEQ ID NO: 22326 - DNA, 20 bp, synthetic construct
  misc_feature 1..20: note = Description of Artificial Sequence: Synthetic oligonucleotide
  misc_feature 1..20: note = Target: FXN; (-) strand; PAM type: YTN; PAM sequence: CTA
  source 1..20: mol_type = other DNA
gccaaagtagagaaacaatg

SEQ ID NO: 22327 - DNA, 20 bp, synthetic construct
  misc_feature 1..20: note = Description of Artificial Sequence: Synthetic oligonucleotide
  misc_feature 1..20: note = Target: FXN; (-) strand; PAM type: YTN; PAM sequence: TTG
  source 1..20: mol_type = other DNA
aggaaatccaaactagccaa

SEQ ID NO: 22328 - DNA, 20 bp, synthetic construct
  misc_feature 1..20: note = Description of Artificial Sequence: Synthetic oligonucleotide
  misc_feature 1..20: note = Target: FXN; (-) strand; PAM type: YTN; PAM sequence: TTT
  source 1..20: mol_type = other DNA
gaggaaatccaaactagcca

SEQ ID NO: 22329 - DNA, 20 bp, synthetic construct
  misc_feature 1..20: note = Description of Artificial Sequence: Synthetic oligonucleotide
  misc_feature 1..20: note = Target: FXN; (-) strand; PAM type: YTN; PAM sequence: TTT
  source 1..20: mol_type = other DNA
tgaggaaatccaaactagcc

SEQ ID NO: 22330 - DNA, 20 bp, synthetic construct
  misc_feature 1..20: note = Description of Artificial Sequence: Synthetic oligonucleotide
  misc_feature 1..20: note = Target: FXN; (-) strand; PAM type: YTN; PAM sequence: CTG
  source 1..20: mol_type = other DNA
aggaccagccatcatgtttt

SEQ ID NO: 22331 - DNA, 20 bp, synthetic construct
  misc_feature 1..20: note = Description of Artificial Sequence: Synthetic oligonucleotide
  misc_feature 1..20: note = Target: FXN; (-) strand; PAM type: YTN; PAM sequence: CTG
  source 1..20: mol_type = other DNA
acactgaggaccagccatca

SEQ ID NO: 22332 - DNA, 20 bp, synthetic construct
  misc_feature 1..20: note = Description of Artificial Sequence: Synthetic oligonucleotide
  misc_feature 1..20: note = Target: FXN; (-) strand; PAM type: YTN; PAM sequence: TTG
  source 1..20: mol_type = other DNA
ggatgctgacactgaggacc

SEQ ID NO: 22333 - DNA, 20 bp, synthetic construct
  misc_feature 1..20: note = Description of Artificial Sequence: Synthetic oligonucleotide
  misc_feature 1..20: note = Target: FXN; (-) strand; PAM type: YTN; PAM sequence: TTT
  source 1..20: mol_type = other DNA
gggatgctgacactgaggac

SEQ ID NO: 22334 - DNA, 20 bp, synthetic construct
  misc_feature 1..20: note = Description of Artificial Sequence: Synthetic oligonucleotide
  misc_feature 1..20: note = Target: FXN; (-) strand; PAM type: YTN; PAM sequence: TTT
  source 1..20: mol_type = other DNA
tgggatgctgacactgagga

SEQ ID NO: 22335 - DNA, 20 bp, synthetic construct
  misc_feature 1..20: note = Description of Artificial Sequence: Synthetic oligonucleotide
  misc_feature 1..20: note = Target: FXN; (-) strand; PAM type: YTN; PAM sequence: TTT
  source 1..20: mol_type = other DNA
ttgggatgctgacactgagg

SEQ ID NO: 22336 - DNA, 20 bp, synthetic construct
  misc_feature 1..20: note = Description of Artificial Sequence: Synthetic oligonucleotide
  misc_feature 1..20: note = Target: FXN; (-) strand; PAM type: YTN; PAM sequence: CTT
  source 1..20: mol_type = other DNA
tttgggatgctgacactgag

SEQ ID NO: 22337 - DNA, 20 bp, synthetic construct
  misc_feature 1..20: note = Description of Artificial Sequence: Synthetic oligonucleotide
  misc_feature 1..20: note = Target: FXN; (-) strand; PAM type: YTN; PAM sequence: CTC
  source 1..20: mol_type = other DNA
tttttgggatgctgacactg

SEQ ID NO: 22338 - DNA, 20 bp, synthetic construct
  misc_feature 1..20: note = Description of Artificial Sequence: Synthetic oligonucleotide
  misc_feature 1..20: note = Target: FXN; (-) strand; PAM type: YTN; PAM sequence: TTC
  source 1..20: mol_type = other DNA
tctttttgggatgctgacac

SEQ ID NO: 22339 - DNA, 20 bp, synthetic construct
  misc_feature 1..20: note = Description of Artificial Sequence: Synthetic oligonucleotide
  misc_feature 1..20: note = Target: FXN; (-) strand; PAM type: YTN; PAM sequence: CTG
  source 1..20: mol_type = other DNA
tgtccggcattctctttttg

SEQ ID NO: 22340 - DNA, 20 bp, synthetic construct
  misc_feature 1..20: note = Description of Artificial Sequence: Synthetic oligonucleotide
  misc_feature 1..20: note = Target: FXN; (-) strand; PAM type: YTN; PAM sequence: TTA
  source 1..20: mol_type = other DNA
caggtgtgagccactgtgtc

SEQ ID NO: 22341 - DNA, 20 bp, synthetic construct
  misc_feature 1..20: note = Description of Artificial Sequence: Synthetic oligonucleotide
  misc_feature 1..20: note = Target: FXN; (-) strand; PAM type: YTN; PAM sequence: CTG
  source 1..20: mol_type = other DNA
aggttacaggtgtgagccac

SEQ ID NO: 22342 - DNA, 20 bp, synthetic construct
  misc_feature 1..20: note = Description of Artificial Sequence: Synthetic oligonucleotide
  misc_feature 1..20: note = Target: FXN; (-) strand; PAM type: YTN; PAM sequence: TTG
  source 1..20: mol_type = other DNA
ctgaggttacaggtgtgagc

SEQ ID NO: 22343 - DNA, 20 bp, synthetic construct
  misc_feature 1..20: note = Description of Artificial Sequence: Synthetic oligonucleotide
  misc_feature 1..20: note = Target: FXN; (-) strand; PAM type: YTN; PAM sequence: CTC
  source 1..20: mol_type = other DNA
ccaaattgctgaggttacag

SEQ ID NO: 22344 - DNA, 20 bp, synthetic construct
  misc_feature 1..20: note = Description of Artificial Sequence: Synthetic oligonucleotide
  misc_feature 1..20: note = Target: FXN; (-) strand; PAM type: YTN; PAM sequence: CTC
  source 1..20: mol_type = other DNA
agcctcccaaattgctgagg

SEQ ID NO: 22345 - DNA, 20 bp, synthetic construct
  misc_feature 1..20: note = Description of Artificial Sequence: Synthetic oligonucleotide
  misc_feature 1..20: note = Target: FXN; (-) strand; PAM type: YTN; PAM sequence: CTC
  source 1..20: mol_type = other DNA
ccacctcagcctcccaaatt

SEQ ID NO: 22346 - DNA, 20 bp, synthetic construct
  misc_feature 1..20: note = Description of Artificial Sequence: Synthetic oligonucleotide
  misc_feature 1..20: note = Target: FXN; (-) strand; PAM type: YTN; PAM sequence: CTC
  source 1..20: mol_type = other DNA
aagcaacctcccacctcagc

SEQ ID NO: 22347 - DNA, 20 bp, synthetic construct
  misc_feature 1..20: note = Description of Artificial Sequence: Synthetic oligonucleotide
  misc_feature 1..20: note = Target: FXN; (-) strand; PAM type: YTN; PAM sequence: CTG
  source 1..20: mol_type = other DNA
aactcaagcaacctcccacc

SEQ ID NO: 22348 - DNA, 20 bp, synthetic construct
  misc_feature 1..20: note = Description of Artificial Sequence: Synthetic oligonucleotide
  misc_feature 1..20: note = Target: FXN; (-) strand; PAM type: YTN; PAM sequence: CTC
  source 1..20: mol_type = other DNA
ctgaactcaagcaacctccc

SEQ ID NO: 22349 - DNA, 20 bp, synthetic construct
  misc_feature 1..20: note = Description of Artificial Sequence: Synthetic oligonucleotide
  misc_feature 1..20: note = Target: FXN; (-) strand; PAM type: YTN; PAM sequence: TTG
  source 1..20: mol_type = other DNA
aactcctgaactcaagcaac

SEQ ID NO: 22350 - DNA, 20 bp, synthetic construct
  misc_feature 1..20: note = Description of Artificial Sequence: Synthetic oligonucleotide
  misc_feature 1..20: note = Target: FXN; (-) strand; PAM type: YTN; PAM sequence: CTT
  source 1..20: mol_type = other DNA
gaactcctgaactcaagcaa

SEQ ID NO: 22351 - DNA, 20 bp, synthetic construct
  misc_feature 1..20: note = Description of Artificial Sequence: Synthetic oligonucleotide
  misc_feature 1..20: note = Target: FXN; (-) strand; PAM type: YTN; PAM sequence: CTG
  source 1..20: mol_type = other DNA
gtcttgaactcctgaactca

SEQ ID NO: 22352 - DNA, 20 bp, synthetic construct
  misc_feature 1..20: note = Description of Artificial Sequence: Synthetic oligonucleotide
  misc_feature 1..20: note = Target: FXN; (-) strand; PAM type: YTN; PAM sequence: TTG
  source 1..20: mol_type = other DNA
cccaggctggtcttgaactc

SEQ ID NO: 22353 - DNA, 20 bp, synthetic construct
  misc_feature 1..20: note = Description of Artificial Sequence: Synthetic oligonucleotide
  misc_feature 1..20: note = Target: FXN; (-) strand; PAM type: YTN; PAM sequence: CTA
  source 1..20: mol_type = other DNA
tgttgcccaggctggtcttg

SEQ ID NO: 22354 - DNA, 20 bp, synthetic construct
  misc_feature 1..20: note = Description of Artificial Sequence: Synthetic oligonucleotide
  misc_feature 1..20: note = Target: FXN; (-) strand; PAM type: YTN; PAM sequence: CTC
  source 1..20: mol_type = other DNA
actatgttgcccaggctggt

SEQ ID NO: 22355 - DNA, 20 bp, synthetic construct
  misc_feature 1..20: note = Description of Artificial Sequence: Synthetic oligonucleotide
  misc_feature 1..20: note = Target: FXN; (-) strand; PAM type: YTN; PAM sequence: TTG
  source 1..20: mol_type = other DNA
gtagagacagagtctcacta

SEQ ID NO: 22356 - DNA, 20 bp, synthetic construct
  misc_feature 1..20: note = Description of Artificial Sequence: Synthetic oligonucleotide
  misc_feature 1..20: note = Target: FXN; (-) strand; PAM type: YTN; PAM sequence: TTT
  source 1..20: mol_type = other DNA
ggtagagacagagtctcact

SEQ ID NO: 22357 - DNA, 20 bp, synthetic construct
  misc_feature 1..20: note = Description of Artificial Sequence: Synthetic oligonucleotide
  misc_feature 1..20: note = Target: FXN; (-) strand; PAM type: YTN; PAM sequence: TTT
  source 1..20: mol_type = other DNA
tggtagagacagagtctcac

SEQ ID NO: 22358 - DNA, 20 bp, synthetic construct
  misc_feature 1..20: note = Description of Artificial Sequence: Synthetic oligonucleotide
  misc_feature 1..20: note = Target: FXN; (-) strand; PAM type: YTN; PAM sequence: TTT
  source 1..20: mol_type = other DNA
ttggtagagacagagtctca

SEQ ID NO: 22359 - DNA, 20 bp, synthetic construct
  misc_feature 1..20: note = Description of Artificial Sequence: Synthetic oligonucleotide
  misc_feature 1..20: note = Target: FXN; (-) strand; PAM type: YTN; PAM sequence: TTA
  source 1..20: mol_type = other DNA
aaaatttttggtagagacag

SEQ ID NO: 22360 - DNA, 20 bp, synthetic construct
  misc_feature 1..20: note = Description of Artificial Sequence: Synthetic oligonucleotide
  misc_feature 1..20: note = Target: FXN; (-) strand; PAM type: YTN; PAM sequence: TTT
  source 1..20: mol_type = other DNA
aaaaatttttggtagagaca

SEQ ID NO: 22361 - DNA, 20 bp, synthetic construct
  misc_feature 1..20: note = Description of Artificial Sequence: Synthetic oligonucleotide
  misc_feature 1..20: note = Target: FXN; (-) strand; PAM type: YTN; PAM sequence: TTT
  source 1..20: mol_type = other DNA
taaaaatttttggtagagac

SEQ ID NO: 22362 - DNA, 20 bp, synthetic construct
  misc_feature 1..20: note = Description of Artificial Sequence: Synthetic oligonucleotide
  misc_feature 1..20: note = Target: FXN; (-) strand; PAM type: YTN; PAM sequence: TTA
  source 1..20: mol_type = other DNA
aaattttaaaaatttttggt

SEQ ID NO: 22363 - DNA, 20 bp, synthetic construct
  misc_feature 1..20: note = Description of Artificial Sequence: Synthetic oligonucleotide
  misc_feature 1..20: note = Target: FXN; (-) strand; PAM type: YTN; PAM sequence: TTT
  source 1..20: mol_type = other DNA
aaaattttaaaaatttttgg

SEQ ID NO: 22364 - DNA, 20 bp, synthetic construct
  misc_feature 1..20: note = Description of Artificial Sequence: Synthetic oligonucleotide
  misc_feature 1..20: note = Target: FXN; (-) strand; PAM type: YTN; PAM sequence: TTT
  source 1..20: mol_type = other DNA
taaaattttaaaaatttttg

SEQ ID NO: 22365 - DNA, 20 bp, synthetic construct
  misc_feature 1..20: note = Description of Artificial Sequence: Synthetic oligonucleotide
  misc_feature 1..20: note = Target: FXN; (-) strand; PAM type: YTN; PAM sequence: TTT
  source 1..20: mol_type = other DNA
ttaaaattttaaaaattttt

SEQ ID NO: 22366 - DNA, 20 bp, synthetic construct
  misc_feature 1..20: note = Description of Artificial Sequence: Synthetic oligonucleotide
  misc_feature 1..20: note = Target: FXN; (-) strand; PAM type: YTN; PAM sequence: CTG
  source 1..20: mol_type = other DNA
atttttaaaattttaaaaat

SEQ ID NO: 22367 - DNA, 20 bp, synthetic construct
  misc_feature 1..20: note = Description of Artificial Sequence: Synthetic oligonucleotide
  misc_feature 1..20: note = Target: FXN; (-) strand; PAM type: YTN; PAM sequence: CTG
  source 1..20: mol_type = other DNA
gctgatttttaaaattttaa

SEQ ID NO: 22368 - DNA, 20 bp, synthetic construct
  misc_feature 1..20: note = Description of Artificial Sequence: Synthetic oligonucleotide
  misc_feature 1..20: note = Target: FXN; (-) strand; PAM type: YTN; PAM sequence: CTA
  source 1..20: mol_type = other DNA
taggtgtgcataaccacacc

SEQ ID NO: 22369 - DNA, 20 bp, synthetic construct
  misc_feature 1..20: note = Description of Artificial Sequence: Synthetic oligonucleotide
  misc_feature 1..20: note = Target: FXN; (-) strand; PAM type: YTN; PAM sequence: CTG
  source 1..20: mol_type = other DNA
ggactataggtgtgcataac

SEQ ID NO: 22370 - DNA, 20 bp, synthetic construct
  misc_feature 1..20: note = Description of Artificial Sequence: Synthetic oligonucleotide
  misc_feature 1..20: note = Target: FXN; (-) strand; PAM type: YTN; PAM sequence: CTA
  source 1..20: mol_type = other DNA
agtaactgggactataggtg

SEQ ID NO: 22371 - DNA, 20 bp, synthetic construct
  misc_feature 1..20: note = Description of Artificial Sequence: Synthetic oligonucleotide
  misc_feature 1..20: note = Target: FXN; (-) strand; PAM type: YTN; PAM sequence: CTC
  source 1..20: mol_type = other DNA
ctaagtaactgggactatag

SEQ ID NO: 22372 - DNA, 20 bp, synthetic construct
  misc_feature 1..20: note = Description of Artificial Sequence: Synthetic oligonucleotide
  misc_feature 1..20: note = Target: FXN; (-) strand; PAM type: YTN; PAM sequence: CTC
  source 1..20: mol_type = other DNA
agcctcctaagtaactggga

SEQ ID NO: 22373 - DNA, 20 bp, synthetic construct
  misc_feature 1..20: note = Description of Artificial Sequence: Synthetic oligonucleotide
  misc_feature 1..20: note = Target: FXN; (-) strand; PAM type: YTN; PAM sequence: CTG
  source 1..20: mol_type = other DNA
cctcagcctcctaagtaact

SEQ ID NO: 22374 - DNA, 20 bp, synthetic construct
  misc_feature 1..20: note = Description of Artificial Sequence: Synthetic oligonucleotide
  misc_feature 1..20: note = Target: FXN; (-) strand; PAM type: YTN; PAM sequence: CTC
  source 1..20: mol_type = other DNA
ctgcctcagcctcctaagta

SEQ ID NO: 22375 - DNA, 20 bp, synthetic construct
  misc_feature 1..20: note = Description of Artificial Sequence: Synthetic oligonucleotide
  misc_feature 1..20: note = Target: FXN; (-) strand; PAM type: YTN; PAM sequence: CTG
  source 1..20: mol_type = other DNA
gaatcaagtgatcctcctgc

SEQ ID NO: 22376 - DNA, 20 bp, synthetic construct
  misc_feature 1..20: note = Description of Artificial Sequence: Synthetic oligonucleotide
  misc_feature 1..20: note = Target: FXN; (-) strand; PAM type: YTN; PAM sequence: CTC
  source 1..20: mol_type = other DNA
ctggaatcaagtgatcctcc

SEQ ID NO: 22377 - DNA, 20 bp, synthetic construct
  misc_feature 1..20: note = Description of Artificial Sequence: Synthetic oligonucleotide
  misc_feature 1..20: note = Target: FXN; (-) strand; PAM type: YTN; PAM sequence: TTG
  source 1..20: mol_type = other DNA
acctcctggaatcaagtgat

SEQ ID NO: 22378 - DNA, 20 bp, synthetic construct
  misc_feature 1..20: note = Description of Artificial Sequence: Synthetic oligonucleotide
  misc_feature 1..20: note = Target: FXN; (-) strand; PAM type: YTN; PAM sequence: CTT
  source 1..20: mol_type = other DNA
gacctcctggaatcaagtga

SEQ ID NO: 22379 - DNA, 20 bp, synthetic construct
  misc_feature 1..20: note = Description of Artificial Sequence: Synthetic oligonucleotide
  misc_feature 1..20: note = Target: FXN; (-) strand; PAM type: YTN; PAM sequence: CTC
  source 1..20: mol_type = other DNA
acagcagccttgacctcctg

SEQ ID NO: 22380 - DNA, 20 bp, synthetic construct
  misc_feature 1..20: note = Description of Artificial Sequence: Synthetic oligonucleotide
  misc_feature 1..20: note = Target: FXN; (-) strand; PAM type: YTN; PAM sequence: CTG
  source 1..20: mol_type = other DNA
aaatgcagtggtgtggtcat

SEQ ID NO: 22381 - DNA, 20 bp, synthetic construct
  misc_feature 1..20: note = Description of Artificial Sequence: Synthetic oligonucleotide
  misc_feature 1..20: note = Target: FXN; (-) strand; PAM type: YTN; PAM sequence: TTA
  source 1..20: mol_type = other DNA
cccaggctgaaatgcagtgg

SEQ ID NO: 22382 - DNA, 20 bp, synthetic construct
  misc_feature 1..20: note = Description of Artificial Sequence: Synthetic oligonucleotide
  misc_feature 1..20: note = Target: FXN; (-) strand; PAM type: YTN; PAM sequence: CTG
  source 1..20: mol_type = other DNA
ttacccaggctgaaatgcag

SEQ ID NO: 22383 - DNA, 20 bp, synthetic construct
  misc_feature 1..20: note = Description of Artificial Sequence: Synthetic oligonucleotide
  misc_feature 1..20: note = Target: FXN; (-) strand; PAM type: YTN; PAM sequence: TTC
  source 1..20: mol_type = other DNA
tgttacccaggctgaaatgc

SEQ ID NO: 22384 - DNA, 20 bp, synthetic construct
  misc_feature 1..20: note = Description of Artificial Sequence: Synthetic oligonucleotide
  misc_feature 1..20: note = Target: FXN; (-) strand; PAM type: YTN; PAM sequence: CTC
  source 1..20: mol_type = other DNA
attctgttacccaggctgaa

SEQ ID NO: 22385 - DNA, 20 bp, synthetic construct
  misc_feature 1..20: note = Description of Artificial Sequence: Synthetic oligonucleotide
  misc_feature 1..20: note = Target: FXN; (-) strand; PAM type: YTN; PAM sequence: TTG
  source 1..20: mol_type = other DNA
aaacagagtctcattctgtt

SEQ ID NO: 22386 - DNA, 20 bp, synthetic construct
  misc_feature 1..20: note = Description of Artificial Sequence: Synthetic oligonucleotide
  misc_feature 1..20: note = Target: FXN; (-) strand; PAM type: YTN; PAM sequence: TTT
  source 1..20: mol_type = other DNA
gaaacagagtctcattctgt

SEQ ID NO: 22387 - DNA, 20 bp, synthetic construct
  misc_feature 1..20: note = Description of Artificial Sequence: Synthetic oligonucleotide
  misc_feature 1..20: note = Target: FXN; (-) strand; PAM type: YTN; PAM sequence: TTG
  source 1..20: mol_type = other DNA
tttgaaacagagtctcattc

SEQ ID NO: 22388 - DNA, 20 bp, synthetic construct
  misc_feature 1..20: note = Description of Artificial Sequence: Synthetic oligonucleotide
  misc_feature 1..20: note = Target: FXN; (-) strand; PAM type: YTN; PAM sequence: TTT
  source 1..20: mol_type = other DNA
gtttgaaacagagtctcatt

SEQ ID NO: 22389 - DNA, 20 bp, synthetic construct
  misc_feature 1..20: note = Description of Artificial Sequence: Synthetic oligonucleotide
  misc_feature 1..20: note = Target: FXN; (-) strand; PAM type: YTN; PAM sequence: TTG
  source 1..20: mol_type = other DNA
tttgtttgaaacagagtctc

SEQ ID NO: 22390 - DNA, 20 bp, synthetic construct
  misc_feature 1..20: note = Description of Artificial Sequence: Synthetic oligonucleotide
  misc_feature 1..20: note = Target: FXN; (-) strand; PAM type: YTN; PAM sequence: TTT
  source 1..20: mol_type = other DNA
gtttgtttgaaacagagtct

SEQ ID NO: 22391 - DNA, 20 bp, synthetic construct
  misc_feature 1..20: note = Description of Artificial Sequence: Synthetic oligonucleotide
  misc_feature 1..20: note = Target: FXN; (-) strand; PAM type: YTN; PAM sequence: TTT
  source 1..20: mol_type = other DNA
tgtttgtttgaaacagagtc

SEQ ID NO: 22392 - DNA, 20 bp, synthetic construct
  misc_feature 1..20: note = Description of Artificial Sequence: Synthetic oligonucleotide
  misc_feature 1..20: note = Target: FXN; (-) strand; PAM type: YTN; PAM sequence: TTT
  source 1..20: mol_type = other DNA
ttgtttgtttgaaacagagt

SEQ ID NO: 22393 - DNA, 20 bp, synthetic construct
  misc_feature 1..20: note = Description of Artificial Sequence: Synthetic oligonucleotide
  misc_feature 1..20: note = Target: FXN; (-) strand; PAM type: YTN; PAM sequence: TTG
  source 1..20: mol_type = other DNA
ggtttttgtttgtttgaaac

SEQ ID NO: 22394 - DNA, 20 bp, synthetic construct
  misc_feature 1..20: note = Description of Artificial Sequence: Synthetic oligonucleotide
  misc_feature 1..20: note = Target: FXN; (-) strand; PAM type: YTN; PAM sequence: TTT
  source 1..20: mol_type = other DNA
gggtttttgtttgtttgaaa

SEQ ID NO: 22395 - DNA, 20 bp, synthetic construct
  misc_feature 1..20: note = Description of Artificial Sequence: Synthetic oligonucleotide
  misc_feature 1..20: note = Target: FXN; (-) strand; PAM type: YTN; PAM sequence: TTT
  source 1..20: mol_type = other DNA
tgggtttttgtttgtttgaa

SEQ ID NO: 22396 - DNA, 20 bp, synthetic construct
  misc_feature 1..20: note = Description of Artificial Sequence: Synthetic oligonucleotide
  misc_feature 1..20: note = Target: FXN; (-) strand; PAM type: YTN; PAM sequence: TTT
  source 1..20: mol_type = other DNA
ttgggtttttgtttgtttga

SEQ ID NO: 22397 - DNA, 20 bp, synthetic construct
  misc_feature 1..20: note = Description of Artificial Sequence: Synthetic oligonucleotide
  misc_feature 1..20: note = Target: FXN; (-) strand; PAM type: YTN; PAM sequence: TTT
  source 1..20: mol_type = other DNA
tttgggtttttgtttgtttg

SEQ ID NO: 22398 - DNA, 20 bp, synthetic construct
  misc_feature 1..20: note = Description of Artificial Sequence: Synthetic oligonucleotide
  misc_feature 1..20: note = Target: FXN; (-) strand; PAM type: YTN; PAM sequence: TTT
  source 1..20: mol_type = other DNA
ttttgggtttttgtttgttt

SEQ ID NO: 22399 - DNA, 20 bp, synthetic construct
  misc_feature 1..20: note = Description of Artificial Sequence: Synthetic oligonucleotide
  misc_feature 1..20: note = Target: FXN; (-) strand; PAM type: YTN; PAM sequence: TTT
  source 1..20: mol_type = other DNA
tttttgggtttttgtttgtt

SEQ ID NO: 22400 - DNA, 20 bp, synthetic construct
  misc_feature 1..20: note = Description of Artificial Sequence: Synthetic oligonucleotide
  misc_feature 1..20: note = Target: FXN; (-) strand; PAM type: YTN; PAM sequence: TTT
  source 1..20: mol_type = other DNA
ttttttgggtttttgtttgt

SEQ ID NO: 22401 - DNA, 20 bp, synthetic construct
  misc_feature 1..20: note = Description of Artificial Sequence: Synthetic oligonucleotide
  misc_feature 1..20: note = Target: FXN; (-) strand; PAM type: YTN; PAM sequence: TTT
  source 1..20: mol_type = other DNA
tttttttgggtttttgtttg

SEQ ID NO: 22402 - DNA, 20 bp, synthetic construct
  misc_feature 1..20: note = Description of Artificial Sequence: Synthetic oligonucleotide
  misc_feature 1..20: note = Target: FXN; (-) strand; PAM type: YTN; PAM sequence: TTT
  source 1..20: mol_type = other DNA
ttttttttgggtttttgttt

SEQ ID NO: 22403 - DNA, 20 bp, synthetic construct
  misc_feature 1..20: note = Description of Artificial Sequence: Synthetic oligonucleotide
  misc_feature 1..20: note = Target: FXN; (-) strand; PAM type: YTN; PAM sequence: TTT
  source 1..20: mol_type = other DNA
tttttttttgggtttttgtt

SEQ ID NO: 22404 - DNA, 20 bp, synthetic construct
  misc_feature 1..20: note = Description of Artificial Sequence: Synthetic oligonucleotide
  misc_feature 1..20: note = Target: FXN; (-) strand; PAM type: YTN; PAM sequence: TTT
  source 1..20: mol_type = other DNA
ttttttttttgggtttttgt

SEQ ID NO: 22405 - DNA, 20 bp, synthetic construct
  misc_feature 1..20: note = Description of Artificial Sequence: Synthetic oligonucleotide
  misc_feature 1..20: note = Target: FXN; (-) strand; PAM type: YTN; PAM sequence: TTT
  source 1..20: mol_type = other DNA
tttttttttttgggtttttg

SEQ ID NO: 22406 - DNA, 20 bp, synthetic construct
  misc_feature 1..20: note = Description of Artificial Sequence: Synthetic oligonucleotide
  misc_feature 1..20: note = Target: FXN; (-) strand; PAM type: YTN; PAM sequence: CTT
  source 1..20: mol_type = other DNA
ttttttttttttgggttttt

SEQ ID NO: 22407 - DNA, 20 bp, synthetic construct
  misc_feature 1..20: note = Description of Artificial Sequence: Synthetic oligonucleotide
  misc_feature 1..20: note = Target: FXN; (-) strand; PAM type: YTN; PAM sequence: CTC
  source 1..20: mol_type = other DNA
ttttttttttttttgggttt

SEQ ID NO: 22408 - DNA, 20 bp, synthetic construct
  misc_feature 1..20: note = Description of Artificial Sequence: Synthetic oligonucleotide
  misc_feature 1..20: note = Target: FXN; (-) strand; PAM type: YTN; PAM sequence: CTC
  source 1..20: mol_type = other DNA
tcttttttttttttttgggt

SEQ ID NO: 22409 - DNA, 20 bp, synthetic construct
  misc_feature 1..20: note = Description of Artificial Sequence: Synthetic oligonucleotide
  misc_feature 1..20: note = Target: FXN; (-) strand; PAM type: YTN; PAM sequence: CTC
  source 1..20: mol_type = other DNA
tctcttttttttttttttgg

SEQ ID NO: 22410 - DNA, 20 bp, synthetic construct
  misc_feature 1..20: note = Description of Artificial Sequence: Synthetic oligonucleotide
  misc_feature 1..20: note = Target: FXN; (-) strand; PAM type: YTN; PAM sequence: CTC
  source 1..20: mol_type = other DNA
tctctctttttttttttttt

SEQ ID NO: 22411 - DNA, 20 bp, synthetic construct
  misc_feature 1..20: note = Description of Artificial Sequence: Synthetic oligonucleotide
  misc_feature 1..20: note = Target: FXN; (-) strand; PAM type: YTN; PAM sequence: CTC
  source 1..20: mol_type = other DNA
tctctctctttttttttttt

SEQ ID NO: 22412 - DNA, 20 bp, synthetic construct
  misc_feature 1..20: note = Description of Artificial Sequence: Synthetic oligonucleotide
  misc_feature 1..20: note = Target: FXN; (-) strand; PAM type: YTN; PAM sequence: CTC
  source 1..20: mol_type = other DNA
cctctctctctctttttttt

SEQ ID NO: 22413 - DNA, 20 bp, synthetic construct
  misc_feature 1..20: note = Description of Artificial Sequence: Synthetic oligonucleotide
  misc_feature 1..20: note = Target: FXN; (-) strand; PAM type: YTN; PAM sequence: CTA
  source 1..20: mol_type = other DNA
actccctctctctctctttt

SEQ ID NO: 22414 - DNA, 20 bp, synthetic construct
  misc_feature 1..20: note = Description of Artificial Sequence: Synthetic oligonucleotide
  misc_feature 1..20: note = Target: FXN; (-) strand; PAM type: YTN; PAM sequence: TTC
  source 1..20: mol_type = other DNA
taactccctctctctctctt

SEQ ID NO: 22415 - DNA, 20 bp, synthetic construct
  misc_feature 1..20: note = Description of Artificial Sequence: Synthetic oligonucleotide
  misc_feature 1..20: note = Target: FXN; (-) strand; PAM type: YTN; PAM sequence: CTT
  source 1..20: mol_type = other DNA
ctaactccctctctctctct

SEQ ID NO: 22416 - DNA, 20 bp, synthetic construct
  misc_feature 1..20: note = Description of Artificial Sequence: Synthetic oligonucleotide
  misc_feature 1..20: note = Target: FXN; (-) strand; PAM type: YTN; PAM sequence: TTC
  source 1..20: mol_type = other DNA
cttctaactccctctctctc

SEQ ID NO: 22417 - DNA, 20 bp, synthetic construct
  misc_feature 1..20: note = Description of Artificial Sequence: Synthetic oligonucleotide
  misc_feature 1..20: note = Target: FXN; (-) strand; PAM type: YTN; PAM sequence: CTT
  source 1..20: mol_type = other DNA
ccttctaactccctctctct

SEQ ID NO: 22418 - DNA, 20 bp, synthetic construct
  misc_feature 1..20: note = Description of Artificial Sequence: Synthetic oligonucleotide
  misc_feature 1..20: note = Target: FXN; (-) strand; PAM type: YTN; PAM sequence: TTC
  source 1..20: mol_type = other DNA
caagtccaggtcataaaaat

SEQ ID NO: 22419 - DNA, 20 bp, synthetic construct
  misc_feature 1..20: note = Description of Artificial Sequence: Synthetic oligonucleotide
  misc_feature 1..20: note = Target: FXN; (-) strand; PAM type: YTN; PAM sequence: CTT
  source 1..20: mol_type = other DNA
ccaagtccaggtcataaaaa

SEQ ID NO: 22420 - DNA, 20 bp, synthetic construct
  misc_feature 1..20: note = Description of Artificial Sequence: Synthetic oligonucleotide
  misc_feature 1..20: note = Target: FXN; (-) strand; PAM type: YTN; PAM sequence: TTG
  source 1..20: mol_type = other DNA
gtgacttccaagtccaggtc

SEQ ID NO: 22421 - DNA, 20 bp, synthetic construct
  misc_feature 1..20: note = Description of Artificial Sequence: Synthetic oligonucleotide
  misc_feature 1..20: note = Target: FXN; (-) strand; PAM type: YTN; PAM sequence: CTT
  source 1..20: mol_type = other DNA
ggtgacttccaagtccaggt

SEQ ID NO: 22422 - DNA, 20 bp, synthetic construct
  misc_feature 1..20: note = Description of Artificial Sequence: Synthetic oligonucleotide
  misc_feature 1..20: note = Target: FXN; (-) strand; PAM type: YTN; PAM sequence: CTG
  source 1..20: mol_type = other DNA
cttggtgacttccaagtcca

SEQ ID NO: 22423 - DNA, 20 bp, synthetic construct
  misc_feature 1..20: note = Description of Artificial Sequence: Synthetic oligonucleotide
  misc_feature 1..20: note = Target: FXN; (-) strand; PAM type: YTN; PAM sequence: CTG
  source 1..20: mol_type = other DNA
cagaagtgctgcttggtgac

SEQ ID NO: 22424 - DNA, 20 bp, synthetic construct
  misc_feature 1..20: note = Description of Artificial Sequence: Synthetic oligonucleotide
  misc_feature 1..20: note = Target: FXN; (-) strand; PAM type: YTN; PAM sequence: TTC
  source 1..20: mol_type = other DNA
caaccaacagggtactgcag

SEQ ID NO: 22425 - DNA, 20 bp, synthetic construct
  misc_feature 1..20: note = Description of Artificial Sequence: Synthetic oligonucleotide
  misc_feature 1..20: note = Target: FXN; (-) strand; PAM type: YTN; PAM sequence: CTA
  source 1..20: mol_type = other DNA
ttccaaccaacagggtactg

SEQ ID NO: 22426 - DNA, 20 bp, synthetic construct
  misc_feature 1..20: note = Description of Artificial Sequence: Synthetic oligonucleotide
  misc_feature 1..20: note = Target: FXN; (-) strand; PAM type: YTN; PAM sequence: CTA
  source 1..20: mol_type = other DNA
caactattccaaccaacagg

SEQ ID NO: 22427 - DNA, 20 bp, synthetic construct
  misc_feature 1..20: note = Description of Artificial Sequence: Synthetic oligonucleotide
  misc_feature 1..20: note = Target: FXN; (-) strand; PAM type: YTN; PAM sequence: TTG
  source 1..20: mol_type = other DNA
ggctacaactattccaacca

SEQ ID NO: 22428 - DNA, 20 bp, synthetic construct
  misc_feature 1..20: note = Description of Artificial Sequence: Synthetic oligonucleotide
  misc_feature 1..20: note = Target: FXN; (-) strand; PAM type: YTN; PAM sequence: TTT
  source 1..20: mol_type = other DNA
gggctacaactattccaacc

SEQ ID NO: 22429 - DNA, 20 bp, synthetic construct
  misc_feature 1..20: note = Description of Artificial Sequence: Synthetic oligonucleotide
  misc_feature 1..20: note = Target: FXN; (-) strand; PAM type: YTN; PAM sequence: TTC
  source 1..20: mol_type = other DNA
gggtttgggctacaactatt

SEQ ID NO: 22430 - DNA, 20 bp, synthetic construct
  misc_feature 1..20: note = Description of Artificial Sequence: Synthetic oligonucleotide
  misc_feature 1..20: note = Target: FXN; (-) strand; PAM type: YTN; PAM sequence: TTC
  source 1..20: mol_type = other DNA
gaattcgggtttgggctaca

SEQ ID NO: 22431 - DNA, 20 bp, synthetic construct
  misc_feature 1..20: note = Description of Artificial Sequence: Synthetic oligonucleotide
  misc_feature 1..20: note = Target: FXN; (-) strand; PAM type: YTN; PAM sequence: CTT
  source 1..20: mol_type = other DNA
cgaattcgggtttgggctac

SEQ ID NO: 22432 - DNA, 20 bp, synthetic construct
  misc_feature 1..20: note = Description of Artificial Sequence: Synthetic oligonucleotide
  misc_feature 1..20: note = Target: FXN; (-) strand; PAM type: YTN; PAM sequence: CTC
  source 1..20: mol_type = other DNA
ccttcgaattcgggtttggg

SEQ ID NO: 22433 - DNA, 20 bp, synthetic construct
  misc_feature 1..20: note = Description of Artificial Sequence: Synthetic oligonucleotide
  misc_feature 1..20: note = Target: FXN; (-) strand; PAM type: YTN; PAM sequence: CTC
  source 1..20: mol_type = other DNA
ctcccttcgaattcgggttt

SEQ ID NO: 22434 - DNA, 20 bp, synthetic construct
  misc_feature 1..20: note = Description of Artificial Sequence: Synthetic oligonucleotide
  misc_feature 1..20: note = Target: FXN; (-) strand; PAM type: YTN; PAM sequence: TTC
  source 1..20: mol_type = other DNA
tcctcccttcgaattcgggt

SEQ ID NO: 22435 - DNA, 20 bp, synthetic construct
  misc_feature 1..20: note = Description of Artificial Sequence: Synthetic oligonucleotide
  misc_feature 1..20: note = Target: FXN; (-) strand; PAM type: YTN; PAM sequence: CTA
  source 1..20: mol_type = other DNA
ttctcctcccttcgaattcg

SEQ ID NO: 22436 - DNA, 20 bp, synthetic construct
  misc_feature 1..20: note = Description of Artificial Sequence: Synthetic oligonucleotide
  misc_feature 1..20: note = Target: FXN; (-) strand; PAM type: YTN; PAM sequence: TTA
  source 1..20: mol_type = other DNA
tctattctcctcccttcgaa

SEQ ID NO: 22437 - DNA, 20 bp, synthetic construct
  misc_feature 1..20: note = Description of Artificial Sequence: Synthetic oligonucleotide
  misc_feature 1..20: note = Target: FXN; (-) strand; PAM type: YTN; PAM sequence: CTG
  source 1..20: mol_type = other DNA
tcacccagggatgttatcta

SEQ ID NO: 22438 - DNA, 20 bp, synthetic construct
  misc_feature 1..20: note = Description of Artificial Sequence: Synthetic oligonucleotide
  misc_feature 1..20: note = Target: FXN; (-) strand; PAM type: YTN; PAM sequence: TTC
  source 1..20: mol_type = other DNA
ctgtcacccagggatgttat

SEQ ID NO: 22439 - DNA, 20 bp, synthetic construct
  misc_feature 1..20: note = Description of Artificial Sequence: Synthetic oligonucleotide
  misc_feature 1..20: note = Target: FXN; (-) strand; PAM type: YTN; PAM sequence: TTG
  source 1..20: mol_type = other DNA
acattcctgtcacccaggga

SEQ ID NO: 22440 - DNA, 20 bp, synthetic construct
  misc_feature 1..20: note = Description of Artificial Sequence: Synthetic oligonucleotide
  misc_feature 1..20: note = Target: FXN; (-) strand; PAM type: YTN; PAM sequence: TTT
  source 1..20: mol_type = other DNA
gacattcctgtcacccaggg

SEQ ID NO: 22441 - DNA, 20 bp, synthetic construct
  misc_feature 1..20: note = Description of Artificial Sequence: Synthetic oligonucleotide
  misc_feature 1..20: note = Target: FXN; (-) strand; PAM type: YTN; PAM sequence: CTT
  source 1..20: mol_type = other DNA
tgacattcctgtcacccagg

SEQ ID NO: 22442 - DNA, 20 bp, synthetic construct
  misc_feature 1..20: note = Description of Artificial Sequence: Synthetic oligonucleotide
  misc_feature 1..20: note = Target: FXN; (-) strand; PAM type: YTN; PAM sequence: TTG
  source 1..20: mol_type = other DNA
ggactttgacattcctgtca

SEQ ID NO: 22443 - DNA, 20 bp, synthetic construct
  misc_feature 1..20: note = Description of Artificial Sequence: Synthetic oligonucleotide
  misc_feature 1..20: note = Target: FXN; (-) strand; PAM type: YTN; PAM sequence: TTT
  source 1..20: mol_type = other DNA
gggactttgacattcctgtc

SEQ ID NO: 22444 - DNA, 20 bp, synthetic construct
  misc_feature 1..20: note = Description of Artificial Sequence: Synthetic oligonucleotide
  misc_feature 1..20: note = Target: FXN; (-) strand; PAM type: YTN; PAM sequence: CTG
  source 1..20: mol_type = other DNA
tttgggactttgacattcct

SEQ ID NO: 22445 - DNA, 20 bp, synthetic construct
  misc_feature 1..20: note = Description of Artificial Sequence: Synthetic oligonucleotide
  misc_feature 1..20: note = Target: FXN; (-) strand; PAM type: YTN; PAM sequence: TTG
  source 1..20: mol_type = other DNA
tcacatgtcatatgctgttt

SEQ ID NO: 22446 - DNA, 20 bp, synthetic construct
  misc_feature 1..20: note = Description of Artificial Sequence: Synthetic oligonucleotide
  misc_feature 1..20: note = Target: FXN; (-) strand; PAM type: YTN; PAM sequence: TTT
  source 1..20: mol_type = other DNA
gtcacatgtcatatgctgtt

SEQ ID NO: 22447 - DNA, 20 bp, synthetic construct
  misc_feature 1..20: note = Description of Artificial Sequence: Synthetic oligonucleotide
  misc_feature 1..20: note = Target: FXN; (-) strand; PAM type: YTN; PAM sequence: TTC
  source 1..20: mol_type = other DNA
caaagaaggccacaccaata

SEQ ID NO: 22448 - DNA, 20 bp, synthetic construct
  misc_feature 1..20: note = Description of Artificial Sequence: Synthetic oligonucleotide
  misc_feature 1..20: note = Target: FXN; (-) strand; PAM type: YTN; PAM sequence: CTT
  source 1..20: mol_type = other DNA
ccaaagaaggccacaccaat

SEQ ID NO: 22449 - DNA, 20 bp, synthetic construct
  misc_feature 1..20: note = Description of Artificial Sequence: Synthetic oligonucleotide
  misc_feature 1..20: note = Target: FXN; (-) strand; PAM type: YTN; PAM sequence: TTG
  source 1..20: mol_type = other DNA
gatcttccaaagaaggccac

SEQ ID NO: 22450 - DNA, 20 bp, synthetic construct
  misc_feature 1..20: note = Description of Artificial Sequence: Synthetic oligonucleotide
  misc_feature 1..20: note = Target: FXN; (-) strand; PAM type: YTN; PAM sequence: CTG
  source 1..20: mol_type = other DNA
gtatggaagattggatcttc

SEQ ID NO: 22451 - DNA, 20 bp, synthetic construct
  misc_feature 1..20: note = Description of Artificial Sequence: Synthetic oligonucleotide
  misc_feature 1..20: note = Target: FXN; (-) strand; PAM type: YTN; PAM sequence: TTG
  source 1..20: mol_type = other DNA
cctggtatggaagattggat

SEQ ID NO: 22452 - DNA, 20 bp, synthetic construct
  misc_feature 1..20: note = Description of Artificial Sequence: Synthetic oligonucleotide
  misc_feature 1..20: note = Target: FXN; (-) strand; PAM type: YTN; PAM sequence: TTT
  source 1..20: mol_type = other DNA
gcctggtatggaagattgga

SEQ ID NO: 22453 - DNA, 20 bp, synthetic construct
  misc_feature 1..20: note = Description of Artificial Sequence: Synthetic oligonucleotide
  misc_feature 1..20: note = Target: FXN; (-) strand; PAM type: YTN; PAM sequence: CTT
  source 1..20: mol_type = other DNA
tgcctggtatggaagattgg

SEQ ID NO: 22454 - DNA, 20 bp, synthetic construct
  misc_feature 1..20: note = Description of Artificial Sequence: Synthetic oligonucleotide
  misc_feature 1..20: note = Target: FXN; (-) strand; PAM type: YTN; PAM sequence: TTC
  source 1..20: mol_type = other DNA
catccctttgcctggtatgg

SEQ ID NO: 22455 - DNA, 20 bp, synthetic construct
  misc_feature 1..20: note = Description of Artificial Sequence: Synthetic oligonucleotide
  misc_feature 1..20: note = Target: FXN; (-) strand; PAM type: YTN; PAM sequence: CTT
  source 1..20: mol_type = other DNA
ccatccctttgcctggtatg

SEQ ID NO: 22456 - DNA, 20 bp, synthetic construct
  misc_feature 1..20: note = Description of Artificial Sequence: Synthetic oligonucleotide
  misc_feature 1..20: note = Target: FXN; (-) strand; PAM type: YTN; PAM sequence: TTA
  source 1..20: mol_type = other DNA
gtcttccatccctttgcctg

SEQ ID NO: 22457 - DNA, 20 bp, synthetic construct
  misc_feature 1..20: note = Description of Artificial Sequence: Synthetic oligonucleotide
  misc_feature 1..20: note = Target: FXN; (-) strand; PAM type: YTN; PAM sequence: CTT
  source 1..20: mol_type = other DNA
agtcttccatccctttgcct

SEQ ID NO: 22458 - DNA, 20 bp, synthetic construct
  misc_feature 1..20: note = Description of Artificial Sequence: Synthetic oligonucleotide
  misc_feature 1..20: note = Target: FXN; (-) strand; PAM type: YTN; PAM sequence: TTC
  source 1..20: mol_type = other DNA
cttagtcttccatccctttg

SEQ ID NO: 22459 - DNA, 20 bp, synthetic construct
  misc_feature 1..20: note = Description of Artificial Sequence: Synthetic oligonucleotide
  misc_feature 1..20: note = Target: FXN; (-) strand; PAM type: YTN; PAM sequence: TTG
  source 1..20: mol_type = other DNA
ttccttagtcttccatccct

SEQ ID NO: 22460 - DNA, 20 bp, synthetic construct
  misc_feature 1..20: note = Description of Artificial Sequence: Synthetic oligonucleotide
  misc_feature 1..20: note = Target: FXN; (-) strand; PAM type: YTN; PAM sequence: CTC
  source 1..20: mol_type = other DNA
atgttgttccttagtcttcc

SEQ ID NO: 22461 - DNA, 20 bp, synthetic construct
  misc_feature 1..20: note = Description of Artificial Sequence: Synthetic oligonucleotide
  misc_feature 1..20: note = Target: FXN; (-) strand; PAM type: YTN; PAM sequence: CTA
  source 1..20: mol_type = other DNA
tccctcatgttgttccttag

SEQ ID NO: 22462 - DNA, 20 bp, synthetic construct
  misc_feature 1..20: note = Description of Artificial Sequence: Synthetic oligonucleotide
  misc_feature 1..20: note = Target: FXN; (-) strand; PAM type: YTN; PAM sequence: CTG
  source 1..20: mol_type = other DNA
gctatccctcatgttgttcc

SEQ ID NO: 22463 - DNA, 20 bp, synthetic construct
  misc_feature 1..20: note = Description of Artificial Sequence: Synthetic oligonucleotide
  misc_feature 1..20: note = Target: FXN; (-) strand; PAM type: YTN; PAM sequence: CTC
  source 1..20: mol_type = other DNA
tggctatccctcatgttgtt

SEQ ID NO: 22464 - DNA, 20 bp, synthetic construct
  misc_feature 1..20: note = Description of Artificial Sequence: Synthetic oligonucleotide
  misc_feature 1..20: note = Target: FXN; (-) strand; PAM type: YTN; PAM sequence: CTC
  source 1..20: mol_type = other DNA
tctggctatccctcatgttg

SEQ ID NO: 22465 - DNA, 20 bp, synthetic construct
  misc_feature 1..20: note = Description of Artificial Sequence: Synthetic oligonucleotide
  misc_feature 1..20: note = Target: FXN; (-) strand; PAM type: YTN; PAM sequence: TTC
  source 1..20: mol_type = other DNA
cctctctggctatccctcat

SEQ ID NO: 22466 - DNA, 20 bp, synthetic construct
  misc_feature 1..20: note = Description of Artificial Sequence: Synthetic oligonucleotide
  misc_feature 1..20: note = Target: FXN; (-) strand; PAM type: YTN; PAM sequence: TTT
  source 1..20: mol_type = other DNA
ccctctctggctatccctca

SEQ ID NO: 22467 - DNA, 20 bp, synthetic construct
  misc_feature 1..20: note = Description of Artificial Sequence: Synthetic oligonucleotide
  misc_feature 1..20: note = Target: FXN; (-) strand; PAM type: YTN; PAM sequence: TTT
  source 1..20: mol_type = other DNA
tccctctctggctatccctc

SEQ ID NO: 22468 - DNA, 20 bp, synthetic construct
  misc_feature 1..20: note = Description of Artificial Sequence: Synthetic oligonucleotide
  misc_feature 1..20: note = Target: FXN; (-) strand; PAM type: YTN; PAM sequence: TTT
  source 1..20: mol_type = other DNA
ttccctctctggctatccct

SEQ ID NO: 22469 - DNA, 20 bp, synthetic construct
  misc_feature 1..20: note = Description of Artificial Sequence: Synthetic oligonucleotide
  misc_feature 1..20: note = Target: FXN; (-) strand; PAM type: YTN; PAM sequence: CTT
  source 1..20: mol_type = other DNA
tttccctctctggctatccc

SEQ ID NO: 22470 - DNA, 20 bp, synthetic construct
  misc_feature 1..20: note = Description of Artificial Sequence: Synthetic oligonucleotide
  misc_feature 1..20: note = Target: FXN; (-) strand; PAM type: YTN; PAM sequence: CTA
  source 1..20: mol_type = other DNA
gaacaagtgatgctttttcc

SEQ ID NO: 22471 - DNA, 20 bp, synthetic construct
  misc_feature 1..20: note = Description of Artificial Sequence: Synthetic oligonucleotide
  misc_feature 1..20: note = Target: FXN; (-) strand; PAM type: YTN; PAM sequence: TTC
  source 1..20: mol_type = other DNA
ctagaacaagtgatgctttt

SEQ ID NO: 22472 - DNA, 20 bp, synthetic construct
  misc_feature 1..20: note = Description of Artificial Sequence: Synthetic oligonucleotide
  misc_feature 1..20: note = Target: FXN; (-) strand; PAM type: YTN; PAM sequence: TTG
  source 1..20: mol_type = other DNA
tagttcctagaacaagtgat

SEQ ID NO: 22473 - DNA, 20 bp, synthetic construct
  misc_feature 1..20: note = Description of Artificial Sequence: Synthetic oligonucleotide
  misc_feature 1..20: note = Target: FXN; (-) strand; PAM type: YTN; PAM sequence: TTT
  source 1..20: mol_type = other DNA
gtagttcctagaacaagtga

SEQ ID NO: 22474 - DNA, 20 bp, synthetic construct
  misc_feature 1..20: note = Description of Artificial Sequence: Synthetic oligonucleotide
  misc_feature 1..20: note = Target: FXN; (-) strand; PAM type: YTN; PAM sequence: CTA
  source 1..20: mol_type = other DNA
tttgtagttcctagaacaag

SEQ ID NO: 22475 - DNA, 20 bp, synthetic construct
  misc_feature 1..20: note = Description of Artificial Sequence: Synthetic oligonucleotide
  misc_feature 1..20: note = Target: FXN; (-) strand; PAM type: YTN; PAM sequence: TTC
  source 1..20: mol_type = other DNA
aagctatttgtagttcctag

SEQ ID NO: 22476 - DNA, 20 bp, synthetic construct
  misc_feature 1..20: note = Description of Artificial Sequence: Synthetic oligonucleotide
  misc_feature 1..20: note = Target: FXN; (-) strand; PAM type: YTN; PAM sequence: CTT
  source 1..20: mol_type = other DNA
caagctatttgtagttccta

SEQ ID NO: 22477 - DNA, 20 bp, synthetic construct
  misc_feature 1..20: note = Description of Artificial Sequence: Synthetic oligonucleotide
  misc_feature 1..20: note = Target: FXN; (-) strand; PAM type: YTN; PAM sequence: TTC
  source 1..20: mol_type = other DNA
ttcaagctatttgtagttcc

SEQ ID NO: 22478 - DNA, 20 bp, synthetic construct
  misc_feature 1..20: note = Description of Artificial Sequence: Synthetic oligonucleotide
  misc_feature 1..20: note = Target: FXN; (-) strand; PAM type: YTN; PAM sequence: CTT
  source 1..20: mol_type = other DNA
cttcaagctatttgtagttc

SEQ ID NO: 22479 - DNA, 20 bp, synthetic construct
  misc_feature 1..20: note = Description of Artificial Sequence: Synthetic oligonucleotide
  misc_feature 1..20: note = Target: FXN; (-) strand; PAM type: YTN; PAM sequence: TTG
  source 1..20: mol_type = other DNA
cttcttcaagctatttgtag

SEQ ID NO: 22480 - DNA, 20 bp, synthetic construct
  misc_feature 1..20: note = Description of Artificial Sequence: Synthetic oligonucleotide
  misc_feature 1..20: note = Target: FXN; (-) strand; PAM type: YTN; PAM sequence: TTT
  source 1..20: mol_type = other DNA
gcttcttcaagctatttgta

SEQ ID NO: 22481 - DNA, 20 bp, synthetic construct
  misc_feature 1..20: note = Description of Artificial Sequence: Synthetic oligonucleotide
  misc_feature 1..20: note = Target: FXN; (-) strand; PAM type: YTN; PAM sequence: CTT
  source 1..20: mol_type = other DNA
tgcttcttcaagctatttgt

SEQ ID NO: 22482 - DNA, 20 bp, synthetic construct
  misc_feature 1..20: note = Description of Artificial Sequence: Synthetic oligonucleotide
  misc_feature 1..20: note = Target: FXN; (-) strand; PAM type: YTN; PAM sequence: CTA
  source 1..20: mol_type = other DNA
gacatctttgcttcttcaag

SEQ ID NO: 22483 - DNA, 20 bp, synthetic construct
  misc_feature 1..20: note = Description of Artificial Sequence: Synthetic oligonucleotide
  misc_feature 1..20: note = Target: FXN; (-) strand; PAM type: YTN; PAM sequence: TTG
  source 1..20: mol_type = other DNA
ggaggcatctagacatcttt

SEQ ID NO: 22484 - DNA, 20 bp, synthetic construct
  misc_feature 1..20: note = Description of Artificial Sequence: Synthetic oligonucleotide
  misc_feature 1..20: note = Target: FXN; (-) strand; PAM type: YTN; PAM sequence: CTG
  source 1..20: mol_type = other DNA
catattgggaggcatctaga

SEQ ID NO: 22485 - DNA, 20 bp, synthetic construct
  misc_feature 1..20: note = Description of Artificial Sequence: Synthetic oligonucleotide
  misc_feature 1..20: note = Target: FXN; (-) strand; PAM type: YTN; PAM sequence: CTC
  source 1..20: mol_type = other DNA
tgcatattgggaggcatcta

SEQ ID NO: 22486 - DNA, 20 bp, synthetic construct
  misc_feature 1..20: note = Description of Artificial Sequence: Synthetic oligonucleotide
  misc_feature 1..20: note = Target: FXN; (-) strand; PAM type: YTN; PAM sequence: CTG
  source 1..20: mol_type = other DNA
tacaccccactctgcatatt

SEQ ID NO: 22487 - DNA, 20 bp, synthetic construct
  misc_feature 1..20: note = Description of Artificial Sequence: Synthetic oligonucleotide
  misc_feature 1..20: note = Target: FXN; (-) strand; PAM type: YTN; PAM sequence: TTC
  source 1..20: mol_type = other DNA
tgtacaccccactctgcata

SEQ ID NO: 22488 - DNA, 20 bp, synthetic construct
  misc_feature 1..20: note = Description of Artificial Sequence: Synthetic oligonucleotide
  misc_feature 1..20: note = Target: FXN; (-) strand; PAM type: YTN; PAM sequence: CTT
  source 1..20: mol_type = other DNA
ctgtacaccccactctgcat

SEQ ID NO: 22489 - DNA, 20 bp, synthetic construct
  misc_feature 1..20: note = Description of Artificial Sequence: Synthetic oligonucleotide
  misc_feature 1..20: note = Target: FXN; (-) strand; PAM type: YTN; PAM sequence: CTC
  source 1..20: mol_type = other DNA
ttctgtacaccccactctgc

SEQ ID NO: 22490 - DNA, 20 bp, synthetic construct
  misc_feature 1..20: note = Description of Artificial Sequence: Synthetic oligonucleotide
  misc_feature 1..20: note = Target: FXN; (-) strand; PAM type: YTN; PAM sequence: CTC
  source 1..20: mol_type = other DNA
tcttctgtacaccccactct

SEQ ID NO: 22491 - DNA, 20 bp, synthetic construct
  misc_feature 1..20: note = Description of Artificial Sequence: Synthetic oligonucleotide
  misc_feature 1..20: note = Target: FXN; (-) strand; PAM type: YTN; PAM sequence: TTA
  source 1..20: mol_type = other DNA
ccactctcttctgtacaccc

SEQ ID NO: 22492 - DNA, 20 bp, synthetic construct
  misc_feature 1..20: note = Description of Artificial Sequence: Synthetic oligonucleotide
  misc_feature 1..20: note = Target: FXN; (-) strand; PAM type: YTN; PAM sequence: CTT
  source 1..20: mol_type = other DNA
accactctcttctgtacacc

SEQ ID NO: 22493 - DNA, 20 bp, synthetic construct
  misc_feature 1..20: note = Description of Artificial Sequence: Synthetic oligonucleotide
  misc_feature 1..20: note = Target: FXN; (-) strand; PAM type: YTN; PAM sequence: CTC
  source 1..20: mol_type = other DNA
ccagcgcccttaccactctc

SEQ ID NO: 22494 - DNA, 20 bp, synthetic construct
  misc_feature 1..20: note = Description of Artificial Sequence: Synthetic oligonucleotide
  misc_feature 1..20: note = Target: FXN; (-) strand; PAM type: YTN; PAM sequence: CTC
  source 1..20: mol_type = other DNA
tcccagcgcccttaccactc

SEQ ID NO: 22495 - DNA, 20 bp, synthetic construct
  misc_feature 1..20: note = Description of Artificial Sequence: Synthetic oligonucleotide
  misc_feature 1..20: note = Target: FXN; (-) strand; PAM type: YTN; PAM sequence: TTA
  source 1..20: mol_type = other DNA
gctctcccagcgcccttacc

SEQ ID NO: 22496 - DNA, 20 bp, synthetic construct
  misc_feature 1..20: note = Description of Artificial Sequence: Synthetic oligonucleotide
  misc_feature 1..20: note = Target: FXN; (-) strand; PAM type: YTN; PAM sequence: CTT
  source 1..20: mol_type = other DNA
agctctcccagcgcccttac

SEQ ID NO: 22497 - DNA, 20 bp, synthetic construct
  misc_feature 1..20: note = Description of Artificial Sequence: Synthetic oligonucleotide
  misc_feature 1..20: note = Target: FXN; (-) strand; PAM type: YTN; PAM sequence: TTG
  source 1..20: mol_type = other DNA
cccaccttagctctcccagc

SEQ ID NO: 22498 - DNA, 20 bp, synthetic construct
  misc_feature 1..20: note = Description of Artificial Sequence: Synthetic oligonucleotide
  misc_feature 1..20: note = Target: FXN; (-) strand; PAM type: YTN; PAM sequence: CTT
  source 1..20: mol_type = other DNA
gcccaccttagctctcccag

SEQ ID NO: 22499 - DNA, 20 bp, synthetic construct
  misc_feature 1..20: note = Description of Artificial Sequence: Synthetic oligonucleotide
  misc_feature 1..20: note = Target: FXN; (-) strand; PAM type: YTN; PAM sequence: CTC
  source 1..20: mol_type = other DNA
ttgcccaccttagctctccc

SEQ ID NO: 22500 - DNA, 20 bp, synthetic construct
  misc_feature 1..20: note = Description of Artificial Sequence: Synthetic oligonucleotide
  misc_feature 1..20: note = Target: FXN; (-) strand; PAM type: YTN; PAM sequence: CTC
  source 1..20: mol_type = other DNA
tcttgcccaccttagctctc

SEQ ID NO: 22501 - DNA, 20 bp, synthetic construct
  misc_feature 1..20: note = Description of Artificial Sequence: Synthetic oligonucleotide
  misc_feature 1..20: note = Target: FXN; (-) strand; PAM type: YTN; PAM sequence: TTA
  source 1..20: mol_type = other DNA
gcatgacagaggaagctctc

SEQ ID NO: 22502 - DNA, 20 bp, synthetic construct
  misc_feature 1..20: note = Description of Artificial Sequence: Synthetic oligonucleotide
  misc_feature 1..20: note = Target: FXN; (-) strand; PAM type: YTN; PAM sequence: CTT
  source 1..20: mol_type = other DNA
agcatgacagaggaagctct

SEQ ID NO: 22503 - DNA, 20 bp, synthetic construct
  misc_feature 1..20: note = Description of Artificial Sequence: Synthetic oligonucleotide
  misc_feature 1..20: note = Target: FXN; (-) strand; PAM type: YTN; PAM sequence: TTC
  source 1..20: mol_type = other DNA
ttagcatgacagaggaagct

SEQ ID NO: 22504 - DNA, 20 bp, synthetic construct
  misc_feature 1..20: note = Description of Artificial Sequence: Synthetic oligonucleotide
  misc_feature 1..20: note = Target: FXN; (-) strand; PAM type: YTN; PAM sequence: TTT
  source 1..20: mol_type = other DNA
cttagcatgacagaggaagc

SEQ ID NO: 22505 - DNA, 20 bp, synthetic construct
  misc_feature 1..20: note = Description of Artificial Sequence: Synthetic oligonucleotide
  misc_feature 1..20: note = Target: FXN; (-) strand; PAM type: YTN; PAM sequence: CTT
  source 1..20: mol_type = other DNA
tcttagcatgacagaggaag

SEQ ID NO: 22506 - DNA, 20 bp, synthetic construct
  misc_feature 1..20: note = Description of Artificial Sequence: Synthetic oligonucleotide
  misc_feature 1..20: note = Target: FXN; (-) strand; PAM type: YTN; PAM sequence: TTC
  source 1..20: mol_type = other DNA
caactttcttagcatgacag

SEQ ID NO: 22507 - DNA, 20 bp, synthetic construct
  misc_feature 1..20: note = Description of Artificial Sequence: Synthetic oligonucleotide
  misc_feature 1..20: note = Target: FXN; (-) strand; PAM type: YTN; PAM sequence: TTC
  source 1..20: mol_type = other DNA
accaccatcaagataaattc

SEQ ID NO: 22508 - DNA, 20 bp, synthetic construct
  misc_feature 1..20: note = Description of Artificial Sequence: Synthetic oligonucleotide
  misc_feature 1..20: note = Target: FXN; (-) strand; PAM type: YTN; PAM sequence: TTT
  source 1..20: mol_type = other DNA
caccaccatcaagataaatt

SEQ ID NO: 22509 - DNA, 20 bp, synthetic construct
  misc_feature 1..20: note = Description of Artificial Sequence: Synthetic oligonucleotide
  misc_feature 1..20: note = Target: FXN; (-) strand; PAM type: YTN; PAM sequence: CTT
  source 1..20: mol_type = other DNA
tcaccaccatcaagataaat

SEQ ID NO: 22510 - DNA, 20 bp, synthetic construct
  misc_feature 1..20: note = Description of Artificial Sequence: Synthetic oligonucleotide
  misc_feature 1..20: note = Target: FXN; (-) strand; PAM type: YTN; PAM sequence: CTG
  source 1..20: mol_type = other DNA
ctttcaccaccatcaagata

SEQ ID NO: 22511 - DNA, 20 bp, synthetic construct
  misc_feature 1..20: note = Description of Artificial Sequence: Synthetic oligonucleotide
  misc_feature 1..20: note = Target: FXN; (-) strand; PAM type: YTN; PAM sequence: CTC
  source 1..20: mol_type = other DNA
tgctttcaccaccatcaaga

SEQ ID NO: 22512 - DNA, 20 bp, synthetic construct
  misc_feature 1..20: note = Description of Artificial Sequence: Synthetic oligonucleotide
  misc_feature 1..20: note = Target: FXN; (-) strand; PAM type: YTN; PAM sequence: CTA
  source 1..20: mol_type = other DNA
accatagccctctgctttca

SEQ ID NO: 22513 - DNA, 20 bp, synthetic construct
  misc_feature 1..20: note = Description of Artificial Sequence: Synthetic oligonucleotide
  misc_feature 1..20: note = Target: FXN; (-) strand; PAM type: YTN; PAM sequence: CTC
  source 1..20: mol_type = other DNA
aaatgtgaatctaaccatag

SEQ ID NO: 22514 - DNA, 20 bp, synthetic construct
  misc_feature 1..20: note = Description of Artificial Sequence: Synthetic oligonucleotide
  misc_feature 1..20: note = Target: FXN; (-) strand; PAM type: YTN; PAM sequence: CTA
  source 1..20: mol_type = other DNA
aatctcaaatgtgaatctaa

SEQ ID NO: 22515 - DNA, 20 bp, synthetic construct
  misc_feature 1..20: note = Description of Artificial Sequence: Synthetic oligonucleotide
  misc_feature 1..20: note = Target: FXN; (-) strand; PAM type: YTN; PAM sequence: CTA
  source 1..20: mol_type = other DNA
aaaatctaaatctcaaatgt

SEQ ID NO: 22516 - DNA, 20 bp, synthetic construct
  misc_feature 1..20: note = Description of Artificial Sequence: Synthetic oligonucleotide
  misc_feature 1..20: note = Target: FXN; (-) strand; PAM type: YTN; PAM sequence: TTA
  source 1..20: mol_type = other DNA
aatctaaaaatctaaatctc

SEQ ID NO: 22517 - DNA, 20 bp, synthetic construct
  misc_feature 1..20: note = Description of Artificial Sequence: Synthetic oligonucleotide
  misc_feature 1..20: note = Target: FXN; (-) strand; PAM type: YTN; PAM sequence: TTT
  source 1..20: mol_type = other DNA
aaatctaaaaatctaaatct

SEQ ID NO: 22518 - DNA, 20 bp, synthetic construct
  misc_feature 1..20: note = Description of Artificial Sequence: Synthetic oligonucleotide
  misc_feature 1..20: note = Target: FXN; (-) strand; PAM type: YTN; PAM sequence: TTT
  source 1..20: mol_type = other DNA
taaatctaaaaatctaaatc

SEQ ID NO: 22519 - DNA, 20 bp, synthetic construct
  misc_feature 1..20: note = Description of Artificial Sequence: Synthetic oligonucleotide
  misc_feature 1..20: note = Target: FXN; (-) strand; PAM type: YTN; PAM sequence: TTA
  source 1..20: mol_type = other DNA
agccagtgtcaccagggtga

SEQ ID NO: 22520 - DNA, 20 bp, synthetic construct
  misc_feature 1..20: note = Description of Artificial Sequence: Synthetic oligonucleotide
  misc_feature 1..20: note = Target: FXN; (-) strand; PAM type: YTN; PAM sequence: TTG
  source 1..20: mol_type = other DNA
tgagttaagccagtgtcacc

SEQ ID NO: 22521 - DNA, 20 bp, synthetic construct
  misc_feature 1..20: note = Description of Artificial Sequence: Synthetic oligonucleotide
  misc_feature 1..20: note = Target: FXN; (-) strand; PAM type: YTN; PAM sequence: TTG
  source 1..20: mol_type = other DNA
ggcaaaattgtgagttaagc

SEQ ID NO: 22522 - DNA, 20 bp, synthetic construct
  misc_feature 1..20: note = Description of Artificial Sequence: Synthetic oligonucleotide
  misc_feature 1..20: note = Target: FXN; (-) strand; PAM type: YTN; PAM sequence: CTT
  source 1..20: mol_type = other DNA
gggcaaaattgtgagttaag

SEQ ID NO: 22523 - DNA, 20 bp, synthetic construct
  misc_feature 1..20: note = Description of Artificial Sequence: Synthetic oligonucleotide
  misc_feature 1..20: note = Target: FXN; (-) strand; PAM type: YTN; PAM sequence: CTG
  source 1..20: mol_type = other DNA
tggtagcataggccttgggc

SEQ ID NO: 22524 - DNA, 20 bp, synthetic construct
  misc_feature 1..20: note = Description of Artificial Sequence: Synthetic oligonucleotide
  misc_feature 1..20: note = Target: FXN; (-) strand; PAM type: YTN; PAM sequence: TTC
  source 1..20: mol_type = other DNA
agaagcactgtggtagcata

SEQ ID NO: 22525 - DNA, 20 bp, synthetic construct
  misc_feature 1..20: note = Description of Artificial Sequence: Synthetic oligonucleotide
  misc_feature 1..20: note = Target: FXN; (-) strand; PAM type: YTN; PAM sequence: TTT
  source 1..20: mol_type = other DNA
cagaagcactgtggtagcat

SEQ ID NO: 22526 - DNA, 20 bp, synthetic construct
  misc_feature 1..20: note = Description of Artificial Sequence: Synthetic oligonucleotide
  misc_feature 1..20: note = Target: FXN; (-) strand; PAM type: YTN; PAM sequence: TTA
  source 1..20: mol_type = other DNA
aagtttcagaagcactgtgg

SEQ ID NO: 22527 - DNA, 20 bp, synthetic construct
  misc_feature 1..20: note = Description of Artificial Sequence: Synthetic oligonucleotide
  misc_feature 1..20: note = Target: FXN; (-) strand; PAM type: YTN; PAM sequence: TTT
  source 1..20: mol_type = other DNA
aaagtttcagaagcactgtg

SEQ ID NO: 22528 - DNA, 20 bp, synthetic construct
  misc_feature 1..20: note = Description of Artificial Sequence: Synthetic oligonucleotide
  misc_feature 1..20: note = Target: FXN; (-) strand; PAM type: YTN; PAM sequence: CTT
  source 1..20: mol_type = other DNA
taaagtttcagaagcactgt

SEQ ID NO: 22529 - DNA, 20 bp, synthetic construct
  misc_feature 1..20: note = Description of Artificial Sequence: Synthetic oligonucleotide
  misc_feature 1..20: note = Target: FXN; (-) strand; PAM type: YTN; PAM sequence: CTA
  source 1..20: mol_type = other DNA
atgtgctttaaagtttcaga

SEQ ID NO: 22530 - DNA, 20 bp, synthetic construct
  misc_feature 1..20: note = Description of Artificial Sequence: Synthetic oligonucleotide
  misc_feature 1..20: note = Target: FXN; (-) strand; PAM type: YTN; PAM sequence: TTC
  source 1..20: mol_type = other DNA
taatgtgctttaaagtttca

SEQ ID NO: 22531 - DNA, 20 bp, synthetic construct
  misc_feature 1..20: note = Description of Artificial Sequence: Synthetic oligonucleotide
  misc_feature 1..20: note = Target: FXN; (-) strand; PAM type: YTN; PAM sequence: CTC
  source 1..20: mol_type = other DNA
caggtgattctaatgtgctt

SEQ ID NO: 22532 - DNA, 20 bp, synthetic construct
  misc_feature 1..20: note = Description of Artificial Sequence: Synthetic oligonucleotide
  misc_feature 1..20: note = Target: FXN; (-) strand; PAM type: YTN; PAM sequence: TTA
  source 1..20: mol_type = other DNA
acaagacctccaggtgattc

SEQ ID NO: 22533 - DNA, 20 bp, synthetic construct
  misc_feature 1..20: note = Description of Artificial Sequence: Synthetic oligonucleotide
  misc_feature 1..20: note = Target: FXN; (-) strand; PAM type: YTN; PAM sequence: TTT
  source 1..20: mol_type = other DNA
aacaagacctccaggtgatt

SEQ ID NO: 22534 - DNA, 20 bp, synthetic construct
  misc_feature 1..20: note = Description of Artificial Sequence: Synthetic oligonucleotide
  misc_feature 1..20: note = Target: FXN; (-) strand; PAM type: YTN; PAM sequence: TTC
  source 1..20: mol_type = other DNA
aaggcccagcaatccatggt

SEQ ID NO: 22535 - DNA, 20 bp, synthetic construct
  misc_feature 1..20: note = Description of Artificial Sequence: Synthetic oligonucleotide
  misc_feature 1..20: note = Target: FXN; (-) strand; PAM type: YTN; PAM sequence: TTT
  source 1..20: mol_type = other DNA
caaggcccagcaatccatgg

SEQ ID NO: 22536 - DNA, 20 bp, synthetic construct
  misc_feature 1..20: note = Description of Artificial Sequence: Synthetic oligonucleotide
  misc_feature 1..20: note = Target: FXN; (-) strand; PAM type: YTN; PAM sequence: CTG
  source 1..20: mol_type = other DNA
gggtttcaaggcccagcaat

SEQ ID NO: 22537 - DNA, 20 bp, synthetic construct
  misc_feature 1..20: note = Description of Artificial Sequence: Synthetic oligonucleotide
  misc_feature 1..20: note = Target: FXN; (-) strand; PAM type: YTN; PAM sequence: CTC
  source 1..20: mol_type = other DNA
tggggtttcaaggcccagca

SEQ ID NO: 22538 - DNA, 20 bp, synthetic construct
  misc_feature 1..20: note = Description of Artificial Sequence: Synthetic oligonucleotide
  misc_feature 1..20: note = Target: FXN; (-) strand; PAM type: YTN; PAM sequence: CTG
  source 1..20: mol_type = other DNA
aatcagaatctctggggttt

SEQ ID NO: 22539 - DNA, 20 bp, synthetic construct
  misc_feature 1..20: note = Description of Artificial Sequence: Synthetic oligonucleotide
  misc_feature 1..20: note = Target: FXN; (-) strand; PAM type: YTN; PAM sequence: CTA
  source 1..20: mol_type = other DNA
ctgaatcagaatctctgggg

SEQ ID NO: 22540 - DNA, 20 bp, synthetic construct
  misc_feature 1..20: note = Description of Artificial Sequence: Synthetic oligonucleotide
  misc_feature 1..20: note = Target: FXN; (-) strand; PAM type: YTN; PAM sequence: CTC
  source 1..20: mol_type = other DNA
gatctactgaatcagaatct

SEQ ID NO: 22541 - DNA, 20 bp, synthetic construct
  misc_feature 1..20: note = Description of Artificial Sequence: Synthetic oligonucleotide
  misc_feature 1..20: note = Target: FXN; (-) strand; PAM type: YTN; PAM sequence: TTC
  source 1..20: mol_type = other DNA
tcgatctactgaatcagaat

SEQ ID NO: 22542 - DNA, 20 bp, synthetic construct
  misc_feature 1..20: note = Description of Artificial Sequence: Synthetic oligonucleotide
  misc_feature 1..20: note = Target: FXN; (-) strand; PAM type: YTN; PAM sequence: CTA
  source 1..20: mol_type = other DNA
ttctcgatctactgaatcag

SEQ ID NO: 22543 - DNA, 20 bp, synthetic construct
  misc_feature 1..20: note = Description of Artificial Sequence: Synthetic oligonucleotide
  misc_feature 1..20: note = Target: FXN; (-) strand; PAM type: YTN; PAM sequence: CTC
  source 1..20: mol_type = other DNA
aggccctattctcgatctac

SEQ ID NO: 22544 - DNA, 20 bp, synthetic construct
  misc_feature 1..20: note = Description of Artificial Sequence: Synthetic oligonucleotide
  misc_feature 1..20: note = Target: FXN; (-) strand; PAM type: YTN; PAM sequence: TTC
  source 1..20: mol_type = other DNA
tcaggccctattctcgatct

SEQ ID NO: 22545 - DNA, 20 bp, synthetic construct
  misc_feature 1..20: note = Description of Artificial Sequence: Synthetic oligonucleotide
  misc_feature 1..20: note = Target: FXN; (-) strand; PAM type: YTN; PAM sequence: TTA
  source 1..20: mol_type = other DNA
gaaatacaaattctcaggcc

SEQ ID NO: 22546 - DNA, 20 bp, synthetic construct
  misc_feature 1..20: note = Description of Artificial Sequence: Synthetic oligonucleotide
  misc_feature 1..20: note = Target: FXN; (-) strand; PAM type: YTN; PAM sequence: TTG
  source 1..20: mol_type = other DNA
ttagaaatacaaattctcag

SEQ ID NO: 22547 - DNA, 20 bp, synthetic construct
  misc_feature 1..20: note = Description of Artificial Sequence: Synthetic oligonucleotide
  misc_feature 1..20: note = Target: FXN; (-) strand; PAM type: YTN; PAM sequence: CTT
  source 1..20: mol_type = other DNA
gttagaaatacaaattctca

SEQ ID NO: 22548 - DNA, 20 bp, synthetic construct
  misc_feature 1..20: note = Description of Artificial Sequence: Synthetic oligonucleotide
  misc_feature 1..20: note = Target: FXN; (-) strand; PAM type: YTN; PAM sequence: CTG
  source 1..20: mol_type = other DNA
gaaacttgttagaaatacaa

SEQ ID NO: 22549 - DNA, 20 bp, synthetic construct
  misc_feature 1..20: note = Description of Artificial Sequence: Synthetic oligonucleotide
  misc_feature 1..20: note = Target: FXN; (-) strand; PAM type: YTN; PAM sequence: CTC
  source 1..20: mol_type = other DNA
agcatcacctggaaacttgt

SEQ ID NO: 22550 - DNA, 20 bp, synthetic construct
  misc_feature 1..20: note = Description of Artificial Sequence: Synthetic oligonucleotide
  misc_feature 1..20: note = Target: FXN; (-) strand; PAM type: YTN; PAM sequence: CTG
  source 1..20: mol_type = other DNA
ggccagcagcctcagcatca

SEQ ID NO: 22551 - DNA, 20 bp, synthetic construct
  misc_feature 1..20: note = Description of Artificial Sequence: Synthetic oligonucleotide
  misc_feature 1..20: note = Target: FXN; (-) strand; PAM type: YTN; PAM sequence: TTA
  source 1..20: mol_type = other DNA
tcaaatgtggtcgctgggcc

SEQ ID NO: 22552 - DNA, 20 bp, synthetic construct
  misc_feature 1..20: note = Description of Artificial Sequence: Synthetic oligonucleotide
  misc_feature 1..20: note = Target: FXN; (-) strand; PAM type: YTN; PAM sequence: CTA
  source 1..20: mol_type = other DNA
tgattatcaaatgtggtcgc

SEQ ID NO: 22553 - DNA, 20 bp, synthetic construct
  misc_feature 1..20: note = Description of Artificial Sequence: Synthetic oligonucleotide
  misc_feature 1..20: note = Target: FXN; (-) strand; PAM type: YTN; PAM sequence: TTA
  source 1..20: mol_type = other DNA
tcagagggctatgattatca

SEQ ID NO: 22554 - DNA, 20 bp, synthetic construct
  misc_feature 1..20: note = Description of Artificial Sequence: Synthetic oligonucleotide
  misc_feature 1..20: note = Target: FXN; (-) strand; PAM type: YTN; PAM sequence: TTT
  source 1..20: mol_type = other DNA
atcagagggctatgattatc

SEQ ID NO: 22555 - DNA, 20 bp, synthetic construct
  misc_feature 1..20: note = Description of Artificial Sequence: Synthetic oligonucleotide
  misc_feature 1..20: note = Target: FXN; (-) strand; PAM type: YTN; PAM sequence: TTG
  source 1..20: mol_type = other DNA
ataggatttatcagagggct

SEQ ID NO: 22556 - DNA, 20 bp, synthetic construct
  misc_feature 1..20: note = Description of Artificial Sequence: Synthetic oligonucleotide
  misc_feature 1..20: note = Target: FXN; (-) strand; PAM type: YTN; PAM sequence: TTT
  source 1..20: mol_type = other DNA
gataggatttatcagagggc

SEQ ID NO: 22557 - DNA, 20 bp, synthetic construct
  misc_feature 1..20: note = Description of Artificial Sequence: Synthetic oligonucleotide
  misc_feature 1..20: note = Target: FXN; (-) strand; PAM type: YTN; PAM sequence: TTT
  source 1..20: mol_type = other DNA
tgataggatttatcagaggg

SEQ ID NO: 22558 - DNA, 20 bp, synthetic construct
  misc_feature 1..20: note = Description of Artificial Sequence: Synthetic oligonucleotide
  misc_feature 1..20: note = Target: FXN; (-) strand; PAM type: YTN; PAM sequence: TTA
  source 1..20: mol_type = other DNA
ggatattttgataggattta

SEQ ID NO: 22559 - DNA, 20 bp, synthetic construct
  misc_feature 1..20: note = Description of Artificial Sequence: Synthetic oligonucleotide
  misc_feature 1..20: note = Target: FXN; (-) strand; PAM type: YTN; PAM sequence: CTG
  source 1..20: mol_type = other DNA
ccattaggatattttgatag

SEQ ID NO: 22560 - DNA, 20 bp, synthetic construct
  misc_feature 1..20: note = Description of Artificial Sequence: Synthetic oligonucleotide
  misc_feature 1..20: note = Target: FXN; (-) strand; PAM type: YTN; PAM sequence: CTC
  source 1..20: mol_type = other DNA
tgccattaggatattttgat

SEQ ID NO: 22561 - DNA, 20 bp, synthetic construct
  misc_feature 1..20: note = Description of Artificial Sequence: Synthetic oligonucleotide
  misc_feature 1..20: note = Target: FXN; (-) strand; PAM type: YTN; PAM sequence: TTG
  source 1..20: mol_type = other DNA
ctctgccattaggatatttt

SEQ ID NO: 22562 - DNA, 20 bp, synthetic construct
  misc_feature 1..20: note = Description of Artificial Sequence: Synthetic oligonucleotide
  misc_feature 1..20: note = Target: FXN; (-) strand; PAM type: YTN; PAM sequence: CTT
  source 1..20: mol_type = other DNA
gctctgccattaggatattt

SEQ ID NO: 22563 - DNA, 20 bp, synthetic construct
  misc_feature 1..20: note = Description of Artificial Sequence: Synthetic oligonucleotide
  misc_feature 1..20: note = Target: FXN; (-) strand; PAM type: YTN; PAM sequence: TTC
  source 1..20: mol_type = other DNA
ccttgctctgccattaggat

SEQ ID NO: 22564 - DNA, 20 bp, synthetic construct
  misc_feature 1..20: note = Description of Artificial Sequence: Synthetic oligonucleotide
  misc_feature 1..20: note = Target: FXN; (-) strand; PAM type: YTN; PAM sequence: TTA
  source 1..20: mol_type = other DNA
tgggtaggggaggatatcac

SEQ ID NO: 22565 - DNA, 20 bp, synthetic construct
  misc_feature 1..20: note = Description of Artificial Sequence: Synthetic oligonucleotide
  misc_feature 1..20: note = Target: FXN; (-) strand; PAM type: YTN; PAM sequence: CTG
  source 1..20: mol_type = other DNA
tcaggttatgggtaggggag

SEQ ID NO: 22566 - DNA, 20 bp, synthetic construct
  misc_feature 1..20: note = Description of Artificial Sequence: Synthetic oligonucleotide
  misc_feature 1..20: note = Target: FXN; (-) strand; PAM type: YTN; PAM sequence: CTA
  source 1..20: mol_type = other DNA
atagctgtcaggttatgggt

SEQ ID NO: 22567 - DNA, 20 bp, synthetic construct
  misc_feature 1..20: note = Description of Artificial Sequence: Synthetic oligonucleotide
  misc_feature 1..20: note = Target: FXN; (-) strand; PAM type: YTN; PAM sequence: CTC
  source 1..20: mol_type = other DNA
aagtaggcagatcctaatag

SEQ ID NO: 22568 - DNA, 20 bp, synthetic construct
  misc_feature 1..20: note = Description of Artificial Sequence: Synthetic oligonucleotide
  misc_feature 1..20: note = Target: FXN; (-) strand; PAM type: YTN; PAM sequence: TTA
  source 1..20: mol_type = other DNA
gcctcaagtaggcagatcct

SEQ ID NO: 22569 - DNA, 20 bp, synthetic construct
  misc_feature 1..20: note = Description of Artificial Sequence: Synthetic oligonucleotide
  misc_feature 1..20: note = Target: FXN; (-) strand; PAM type: YTN; PAM sequence: TTT
  source 1..20: mol_type = other DNA
agcctcaagtaggcagatcc

SEQ ID NO: 22570 - DNA, 20 bp, synthetic construct
  misc_feature 1..20: note = Description of Artificial Sequence: Synthetic oligonucleotide
  misc_feature 1..20: note = Target: FXN; (-) strand; PAM type: YTN; PAM sequence: TTT
  source 1..20: mol_type = other DNA
tagcctcaagtaggcagatc

SEQ ID NO: 22571 - DNA, 20 bp, synthetic construct
  misc_feature 1..20: note = Description of Artificial Sequence: Synthetic oligonucleotide
  misc_feature 1..20: note = Target: FXN; (-) strand; PAM type: YTN; PAM sequence: CTT
  source 1..20: mol_type = other DNA
ttagcctcaagtaggcagat

SEQ ID NO: 22572 - DNA, 20 bp, synthetic construct
  misc_feature 1..20: note = Description of Artificial Sequence: Synthetic oligonucleotide
  misc_feature 1..20: note = Target: FXN; (-) strand; PAM type: YTN; PAM sequence: TTG
  source 1..20: mol_type = other DNA
cttttagcctcaagtaggca

SEQ ID NO: 22573 - DNA, 20 bp, synthetic construct
  misc_feature 1..20: note = Description of Artificial Sequence: Synthetic oligonucleotide
  misc_feature 1..20: note = Target: FXN; (-) strand; PAM type: YTN; PAM sequence: TTG
  source 1..20: mol_type = other DNA
gttgcttttagcctcaagta

SEQ ID NO: 22574 - DNA, 20 bp, synthetic construct
  misc_feature 1..20: note = Description of Artificial Sequence: Synthetic oligonucleotide
  misc_feature 1..20: note = Target: FXN; (-) strand; PAM type: YTN; PAM sequence: CTT
  source 1..20: mol_type = other DNA
ggttgcttttagcctcaagt

SEQ ID NO: 22575 - DNA, 20 bp, synthetic construct
  misc_feature 1..20: note = Description of Artificial Sequence: Synthetic oligonucleotide
  misc_feature 1..20: note = Target: FXN; (-) strand; PAM type: YTN; PAM sequence: CTC
  source 1..20: mol_type = other DNA
ttggttgcttttagcctcaa

SEQ ID NO: 22576 - DNA, 20 bp, synthetic construct
  misc_feature 1..20: note = Description of Artificial Sequence: Synthetic oligonucleotide
  misc_feature 1..20: note = Target: FXN; (-) strand; PAM type: YTN; PAM sequence: CTC
  source 1..20: mol_type = other DNA
tcttggttgcttttagcctc

SEQ ID NO: 22577 - DNA, 20 bp, synthetic construct
  misc_feature 1..20: note = Description of Artificial Sequence: Synthetic oligonucleotide
  misc_feature 1..20: note = Target: FXN; (-) strand; PAM type: YTN; PAM sequence: TTC
  source 1..20: mol_type = other DNA
ctctcttggttgcttttagc

SEQ ID NO: 22578 - DNA, 20 bp, synthetic construct
  misc_feature 1..20: note = Description of Artificial Sequence: Synthetic oligonucleotide
  misc_feature 1..20: note = Target: FXN; (-) strand; PAM type: YTN; PAM sequence: CTG
  source 1..20: mol_type = other DNA
ttcctctcttggttgctttt

SEQ ID NO: 22579 - DNA, 20 bp, synthetic construct
  misc_feature 1..20: note = Description of Artificial Sequence: Synthetic oligonucleotide
  misc_feature 1..20: note = Target: FXN; (-) strand; PAM type: YTN; PAM sequence: CTG
  source 1..20: mol_type = other DNA
tagctgttcctctcttggtt

SEQ ID NO: 22580 - DNA, 20 bp, synthetic construct
  misc_feature 1..20: note = Description of Artificial Sequence: Synthetic oligonucleotide
  misc_feature 1..20: note = Target: FXN; (-) strand; PAM type: YTN; PAM sequence: CTG
  source 1..20: mol_type = other DNA
tggtacactgtagctgttcc

SEQ ID NO: 22581 - DNA, 20 bp, synthetic construct
  misc_feature 1..20: note = Description of Artificial Sequence: Synthetic oligonucleotide
  misc_feature 1..20: note = Target: FXN; (-) strand; PAM type: YTN; PAM sequence: CTC
  source 1..20: mol_type = other DNA
tgtggtacactgtagctgtt

SEQ ID NO: 22582 - DNA, 20 bp, synthetic construct
  misc_feature 1..20: note = Description of Artificial Sequence: Synthetic oligonucleotide
  misc_feature 1..20: note = Target: FXN; (-) strand; PAM type: YTN; PAM sequence: TTG
  source 1..20: mol_type = other DNA
agggactctgtggtacactg

SEQ ID NO: 22583 - DNA, 20 bp, synthetic construct
  misc_feature 1..20: note = Description of Artificial Sequence: Synthetic oligonucleotide
  misc_feature 1..20: note = Target: FXN; (-) strand; PAM type: YTN; PAM sequence: CTG
  source 1..20: mol_type = other DNA
gggcaccgtggcgtgggcaa

SEQ ID NO: 22584 - DNA, 20 bp, synthetic construct
  misc_feature 1..20: note = Description of Artificial Sequence: Synthetic oligonucleotide
  misc_feature 1..20: note = Target: FXN; (-) strand; PAM type: YTN; PAM sequence: TTG
  source 1..20: mol_type = other DNA
gtaagaagctggggcaccgt

SEQ ID NO: 22585 - DNA, 20 bp, synthetic construct
  misc_feature 1..20: note = Description of Artificial Sequence: Synthetic oligonucleotide
  misc_feature 1..20: note = Target: FXN; (-) strand; PAM type: YTN; PAM sequence: CTT
  source 1..20: mol_type = other DNA
ggtaagaagctggggcaccg

SEQ ID NO: 22586 - DNA, 20 bp, synthetic construct
  misc_feature 1..20: note = Description of Artificial Sequence: Synthetic oligonucleotide
  misc_feature 1..20: note = Target: FXN; (-) strand; PAM type: YTN; PAM sequence: TTG
  source 1..20: mol_type = other DNA
gaggtagtcaagaggaatca

SEQ ID NO: 22587 - DNA, 20 bp, synthetic construct
  misc_feature 1..20: note = Description of Artificial Sequence: Synthetic oligonucleotide
  misc_feature 1..20: note = Target: FXN; (-) strand; PAM type: YTN; PAM sequence: CTT
  source 1..20: mol_type = other DNA
ggaggtagtcaagaggaatc

SEQ ID NO: 22588 - DNA, 20 bp, synthetic construct
  misc_feature 1..20: note = Description of Artificial Sequence: Synthetic oligonucleotide
  misc_feature 1..20: note = Target: FXN; (-) strand; PAM type: YTN; PAM sequence: TTC
  source 1..20: mol_type = other DNA
cttggaggtagtcaagagga

SEQ ID NO: 22589 - DNA, 20 bp, synthetic construct
  misc_feature 1..20: note = Description of Artificial Sequence: Synthetic oligonucleotide
  misc_feature 1..20: note = Target: FXN; (-) strand; PAM type: YTN; PAM sequence: CTT
  source 1..20: mol_type = other DNA
ccttggaggtagtcaagagg

SEQ ID NO: 22590 - DNA, 20 bp, synthetic construct
  misc_feature 1..20: note = Description of Artificial Sequence: Synthetic oligonucleotide
  misc_feature 1..20: note = Target: FXN; (-) strand; PAM type: YTN; PAM sequence: CTC
  source 1..20: mol_type = other DNA
cacttccttggaggtagtca

SEQ ID NO: 22591 - DNA, 20 bp, synthetic construct
  misc_feature 1..20: note = Description of Artificial Sequence: Synthetic oligonucleotide
  misc_feature 1..20: note = Target: FXN; (-) strand; PAM type: YTN; PAM sequence: TTC
  source 1..20: mol_type = other DNA
tccacttccttggaggtagt

SEQ ID NO: 22592 - DNA, 20 bp, synthetic construct
  misc_feature 1..20: note = Description of Artificial Sequence: Synthetic oligonucleotide
  misc_feature 1..20: note = Target: FXN; (-) strand; PAM type: YTN; PAM sequence: TTT
  source 1..20: mol_type = other DNA
ctccacttccttggaggtag

SEQ ID NO: 22593 - DNA, 20 bp, synthetic construct
  misc_feature 1..20: note = Description of Artificial Sequence: Synthetic oligonucleotide
  misc_feature 1..20: note = Target: FXN; (-) strand; PAM type: YTN; PAM sequence: CTT
  source 1..20: mol_type = other DNA
tctccacttccttggaggta

SEQ ID NO: 22594 - DNA, 20 bp, synthetic construct
  misc_feature 1..20: note = Description of Artificial Sequence: Synthetic oligonucleotide
  misc_feature 1..20: note = Target: FXN; (-) strand; PAM type: YTN; PAM sequence: TTG
  source 1..20: mol_type = other DNA
tctttctccacttccttgga

SEQ ID NO: 22595 - DNA, 20 bp, synthetic construct
  misc_feature 1..20: note = Description of Artificial Sequence: Synthetic oligonucleotide
  misc_feature 1..20: note = Target: FXN; (-) strand; PAM type: YTN; PAM sequence: CTT
  source 1..20: mol_type = other DNA
gtctttctccacttccttgg

SEQ ID NO: 22596 - DNA, 20 bp, synthetic construct
  misc_feature 1..20: note = Description of Artificial Sequence: Synthetic oligonucleotide
  misc_feature 1..20: note = Target: FXN; (-) strand; PAM type: YTN; PAM sequence: TTC
  source 1..20: mol_type = other DNA
gcaagaacttgtctttctcc

SEQ ID NO: 22597 - DNA, 20 bp, synthetic construct
  misc_feature 1..20: note = Description of Artificial Sequence: Synthetic oligonucleotide
  misc_feature 1..20: note = Target: FXN; (-) strand; PAM type: YTN; PAM sequence: CTT
  source 1..20: mol_type = other DNA
cgcaagaacttgtctttctc

SEQ ID NO: 22598 - DNA, 20 bp, synthetic construct
  misc_feature 1..20: note = Description of Artificial Sequence: Synthetic oligonucleotide
  misc_feature 1..20: note = Target: FXN; (-) strand; PAM type: YTN; PAM sequence: TTG
  source 1..20: mol_type = other DNA
gccaaagaaatagacataga

SEQ ID NO: 22599 - DNA, 20 bp, synthetic construct
  misc_feature 1..20: note = Description of Artificial Sequence: Synthetic oligonucleotide
  misc_feature 1..20: note = Target: FXN; (-) strand; PAM type: YTN; PAM sequence: TTT
  source 1..20: mol_type = other DNA
ggccaaagaaatagacatag

SEQ ID NO: 22600 - DNA, 20 bp, synthetic construct
  misc_feature 1..20: note = Description of Artificial Sequence: Synthetic oligonucleotide
  misc_feature 1..20: note = Target: FXN; (-) strand; PAM type: YTN; PAM sequence: TTT
  source 1..20: mol_type = other DNA
tggccaaagaaatagacata

SEQ ID NO: 22601 - DNA, 20 bp, synthetic construct
  misc_feature 1..20: note = Description of Artificial Sequence: Synthetic oligonucleotide
  misc_feature 1..20: note = Target: FXN; (-) strand; PAM type: YTN; PAM sequence: TTT
  source 1..20: mol_type = other DNA
ttggccaaagaaatagacat

SEQ ID NO: 22602 - DNA, 20 bp, synthetic construct
  misc_feature 1..20: note = Description of Artificial Sequence: Synthetic oligonucleotide
  misc_feature 1..20: note = Target: FXN; (-) strand; PAM type: YTN; PAM sequence: CTT
  source 1..20: mol_type = other DNA
tttggccaaagaaatagaca

SEQ ID NO: 22603 - DNA, 20 bp, synthetic construct
  misc_feature 1..20: note = Description of Artificial Sequence: Synthetic oligonucleotide
  misc_feature 1..20: note = Target: FXN; (-) strand; PAM type: YTN; PAM sequence: TTG
  source 1..20: mol_type = other DNA
ccccatctttttggccaaag

SEQ ID NO: 22604 - DNA, 20 bp, synthetic construct
  misc_feature 1..20: note = Description of Artificial Sequence: Synthetic oligonucleotide
  misc_feature 1..20: note = Target: FXN; (-) strand; PAM type: YTN; PAM sequence: TTG
  source 1..20: mol_type = other DNA
atatcattgccccatctttt

SEQ ID NO: 22605 - DNA, 20 bp, synthetic construct
  misc_feature 1..20: note = Description of Artificial Sequence: Synthetic oligonucleotide
  misc_feature 1..20: note = Target: FXN; (-) strand; PAM type: YTN; PAM sequence: CTG
  source 1..20: mol_type = other DNA
caaagttgatatcattgccc

SEQ ID NO: 22606 - DNA, 20 bp, synthetic construct
  misc_feature 1..20: note = Description of Artificial Sequence: Synthetic oligonucleotide
  misc_feature 1..20: note = Target: FXN; (-) strand; PAM type: YTN; PAM sequence: CTC
  source 1..20: mol_type = other DNA
cctgcaaagttgatatcatt

SEQ ID NO: 22607 - DNA, 20 bp, synthetic construct
  misc_feature 1..20: note = Description of Artificial Sequence: Synthetic oligonucleotide
  misc_feature 1..20: note = Target: FXN; (-) strand; PAM type: YTN; PAM sequence: CTC
  source 1..20: mol_type = other DNA
cagctccctgcaaagttgat

SEQ ID NO: 22608 - DNA, 20 bp, synthetic construct
  misc_feature 1..20: note = Description of Artificial Sequence: Synthetic oligonucleotide
  misc_feature 1..20: note = Target: FXN; (-) strand; PAM type: YTN; PAM sequence: CTA
  source 1..20: mol_type = other DNA
gcaaatgctccagctccctg

SEQ ID NO: 22609 - DNA, 20 bp, synthetic construct
  misc_feature 1..20: note = Description of Artificial Sequence: Synthetic oligonucleotide
  misc_feature 1..20: note = Target: FXN; (-) strand; PAM type: YTN; PAM sequence: CTG
  source 1..20: mol_type = other DNA
gcatagaaaggtcactagca

SEQ ID NO: 22610 - DNA, 20 bp, synthetic construct
  misc_feature 1..20: note = Description of Artificial Sequence: Synthetic oligonucleotide
  misc_feature 1..20: note = Target: FXN; (-) strand; PAM type: YTN; PAM sequence: TTC
  source 1..20: mol_type = other DNA
tggcatagaaaggtcactag

SEQ ID NO: 22611 - DNA, 20 bp, synthetic construct
  misc_feature 1..20: note = Description of Artificial Sequence: Synthetic oligonucleotide
  misc_feature 1..20: note = Target: FXN; (-) strand; PAM type: YTN; PAM sequence: TTA
  source 1..20: mol_type = other DNA
gcaagttctggcatagaaag

SEQ ID NO: 22612 - DNA, 20 bp, synthetic construct
  misc_feature 1..20: note = Description of Artificial Sequence: Synthetic oligonucleotide
  misc_feature 1..20: note = Target: FXN; (-) strand; PAM type: YTN; PAM sequence: CTT
  source 1..20: mol_type = other DNA
agcaagttctggcatagaaa

SEQ ID NO: 22613 - DNA, 20 bp, synthetic construct
  misc_feature 1..20: note = Description of Artificial Sequence: Synthetic oligonucleotide
  misc_feature 1..20: note = Target: FXN; (-) strand; PAM type: YTN; PAM sequence: CTA
  source 1..20: mol_type = other DNA
gcatgcttagcaagttctgg

SEQ ID NO: 22614 - DNA, 20 bp, synthetic construct
  misc_feature 1..20: note = Description of Artificial Sequence: Synthetic oligonucleotide
  misc_feature 1..20: note = Target: FXN; (-) strand; PAM type: YTN; PAM sequence: TTA
  source 1..20: mol_type = other DNA
gctagcatgcttagcaagtt

SEQ ID NO: 22615 - DNA, 20 bp, synthetic construct
  misc_feature 1..20: note = Description of Artificial Sequence: Synthetic oligonucleotide
  misc_feature 1..20: note = Target: FXN; (-) strand; PAM type: YTN; PAM sequence: TTA
  source 1..20: mol_type = other DNA
ttagctagcatgcttagcaa

SEQ ID NO: 22616 - DNA, 20 bp, synthetic construct
  misc_feature 1..20: note = Description of Artificial Sequence: Synthetic oligonucleotide
  misc_feature 1..20: note = Target: FXN; (-) strand; PAM type: YTN; PAM sequence: CTA
  source 1..20: mol_type = other DNA
catcattattagctagcatg

SEQ ID NO: 22617 - DNA, 20 bp, synthetic construct
  misc_feature 1..20: note = Description of Artificial Sequence: Synthetic oligonucleotide
  misc_feature 1..20: note = Target: FXN; (-) strand; PAM type: YTN; PAM sequence: CTG
  source 1..20: mol_type = other DNA
tgctacatcattattagcta

SEQ ID NO: 22618 - DNA, 20 bp, synthetic construct
  misc_feature 1..20: note = Description of Artificial Sequence: Synthetic oligonucleotide
  misc_feature 1..20: note = Target: FXN; (-) strand; PAM type: YTN; PAM sequence: TTA
  source 1..20: mol_type = other DNA
caggcgtgagccaccgcacc

SEQ ID NO: 22619 - DNA, 20 bp, synthetic construct
  misc_feature 1..20: note = Description of Artificial Sequence: Synthetic oligonucleotide
  misc_feature 1..20: note = Target: FXN; (-) strand; PAM type: YTN; PAM sequence: CTG
  source 1..20: mol_type = other DNA
agattacaggcgtgagccac

SEQ ID NO: 22620 - DNA, 20 bp, synthetic construct
  misc_feature 1..20: note = Description of Artificial Sequence: Synthetic oligonucleotide
  misc_feature 1..20: note = Target: FXN; (-) strand; PAM type: YTN; PAM sequence: CTC
  source 1..20: mol_type = other DNA
ggccgcccaaagtgctgaga

SEQ ID NO: 22621 - DNA, 20 bp, synthetic construct
  misc_feature 1..20: note = Description of Artificial Sequence: Synthetic oligonucleotide
  misc_feature 1..20: note = Target: FXN; (-) strand; PAM type: YTN; PAM sequence: CTC
  source 1..20: mol_type = other DNA
aggtgatccgcccgcctcgg

SEQ ID NO: 22622 - DNA, 20 bp, synthetic construct
  misc_feature 1..20: note = Description of Artificial Sequence: Synthetic oligonucleotide
  misc_feature 1..20: note = Target: FXN; (-) strand; PAM type: YTN; PAM sequence: CTG
  source 1..20: mol_type = other DNA
acctcaggtgatccgcccgc

SEQ ID NO: 22623 - DNA, 20 bp, synthetic construct
  misc_feature 1..20: note = Description of Artificial Sequence: Synthetic oligonucleotide
  misc_feature 1..20: note = Target: FXN; (-) strand; PAM type: YTN; PAM sequence: CTC
  source 1..20: mol_type = other DNA
ctgacctcaggtgatccgcc

SEQ ID NO: 22624 - DNA, 20 bp, synthetic construct
  misc_feature 1..20: note = Description of Artificial Sequence: Synthetic oligonucleotide
  misc_feature 1..20: note = Target: FXN; (-) strand; PAM type: YTN; PAM sequence: CTC
  source 1..20: mol_type = other DNA
gaactcctgacctcaggtga

SEQ ID NO: 22625 - DNA, 20 bp, synthetic construct
  misc_feature 1..20: note = Description of Artificial Sequence: Synthetic oligonucleotide
  misc_feature 1..20: note = Target: FXN; (-) strand; PAM type: YTN; PAM sequence: CTG
  source 1..20: mol_type = other DNA
gtctcgaactcctgacctca

SEQ ID NO: 22626 - DNA, 20 bp, synthetic construct
  misc_feature 1..20: note = Description of Artificial Sequence: Synthetic oligonucleotide
  misc_feature 1..20: note = Target: FXN; (-) strand; PAM type: YTN; PAM sequence: TTG
  source 1..20: mol_type = other DNA
gccaggctggtctcgaactc

SEQ ID NO: 22627 - DNA, 20 bp, synthetic construct
  misc_feature 1..20: note = Description of Artificial Sequence: Synthetic oligonucleotide
  misc_feature 1..20: note = Target: FXN; (-) strand; PAM type: YTN; PAM sequence: TTC
  source 1..20: mol_type = other DNA
atcatgttggccaggctggt

SEQ ID NO: 22628 - DNA, 20 bp, synthetic construct
  misc_feature 1..20: note = Description of Artificial Sequence: Synthetic oligonucleotide
  misc_feature 1..20: note = Target: FXN; (-) strand; PAM type: YTN; PAM sequence: TTT
  source 1..20: mol_type = other DNA
catcatgttggccaggctgg

SEQ ID NO: 22629 - DNA, 20 bp, synthetic construct
  misc_feature 1..20: note = Description of Artificial Sequence: Synthetic oligonucleotide
  misc_feature 1..20: note = Target: FXN; (-) strand; PAM type: YTN; PAM sequence: TTA
  source 1..20: mol_type = other DNA
gtagagatggggtttcatca

SEQ ID NO: 22630 - DNA, 20 bp, synthetic construct
  misc_feature 1..20: note = Description of Artificial Sequence: Synthetic oligonucleotide
  misc_feature 1..20: note = Target: FXN; (-) strand; PAM type: YTN; PAM sequence: TTT
  source 1..20: mol_type = other DNA
agtagagatggggtttcatc

SEQ ID NO: 22631 - DNA, 20 bp, synthetic construct
  misc_feature 1..20: note = Description of Artificial Sequence: Synthetic oligonucleotide
  misc_feature 1..20: note = Target: FXN; (-) strand; PAM type: YTN; PAM sequence: TTT
  source 1..20: mol_type = other DNA
tagtagagatggggtttcat

SEQ ID NO: 22632 - DNA, 20 bp, synthetic construct
  misc_feature 1..20: note = Description of Artificial Sequence: Synthetic oligonucleotide
  misc_feature 1..20: note = Target: FXN; (-) strand; PAM type: YTN; PAM sequence: TTT
  source 1..20: mol_type = other DNA
ttagtagagatggggtttca

SEQ ID NO: 22633 - DNA, 20 bp, synthetic construct
  misc_feature 1..20: note = Description of Artificial Sequence: Synthetic oligonucleotide
  misc_feature 1..20: note = Target: FXN; (-) strand; PAM type: YTN; PAM sequence: TTG
  source 1..20: mol_type = other DNA
tatttttagtagagatgggg

SEQ ID NO: 22634 - DNA, 20 bp, synthetic construct
  misc_feature 1..20: note = Description of Artificial Sequence: Synthetic oligonucleotide
  misc_feature 1..20: note = Target: FXN; (-) strand; PAM type: YTN; PAM sequence: TTT
  source 1..20: mol_type = other DNA
gtatttttagtagagatggg

SEQ ID NO: 22635 - DNA, 20 bp, synthetic construct
  misc_feature 1..20: note = Description of Artificial Sequence: Synthetic oligonucleotide
  misc_feature 1..20: note = Target: FXN; (-) strand; PAM type: YTN; PAM sequence: TTT
  source 1..20: mol_type = other DNA
tgtatttttagtagagatgg

SEQ ID NO: 22636 - DNA, 20 bp, synthetic construct
  misc_feature 1..20: note = Description of Artificial Sequence: Synthetic oligonucleotide
  misc_feature 1..20: note = Target: FXN; (-) strand; PAM type: YTN; PAM sequence: TTT
  source 1..20: mol_type = other DNA
ttgtatttttagtagagatg

SEQ ID NO: 22637 - DNA, 20 bp, synthetic construct
  misc_feature 1..20: note = Description of Artificial Sequence: Synthetic oligonucleotide
  misc_feature 1..20: note = Target: FXN; (-) strand; PAM type: YTN; PAM sequence: CTA
  source 1..20: mol_type = other DNA
atttttgtatttttagtaga

SEQ ID NO: 22638 - DNA, 20 bp, synthetic construct
  misc_feature 1..20: note = Description of Artificial Sequence: Synthetic oligonucleotide
  misc_feature 1..20: note = Target: FXN; (-) strand; PAM type: YTN; PAM sequence: CTG
  source 1..20: mol_type = other DNA
gctaatttttgtatttttag

SEQ ID NO: 22639 - DNA, 20 bp, synthetic construct
  misc_feature 1..20: note = Description of Artificial Sequence: Synthetic oligonucleotide
  misc_feature 1..20: note = Target: FXN; (-) strand; PAM type: YTN; PAM sequence: TTG
  source 1..20: mol_type = other DNA
caggtgcccaccaccacgcc

SEQ ID NO: 22640 - DNA, 20 bp, synthetic construct
  misc_feature 1..20: note = Description of Artificial Sequence: Synthetic oligonucleotide
  misc_feature 1..20: note = Target: FXN; (-) strand; PAM type: YTN; PAM sequence: CTG
  source 1..20: mol_type = other DNA
ggattgcaggtgcccaccac

SEQ ID NO: 22641 - DNA, 20 bp, synthetic construct
  misc_feature 1..20: note = Description of Artificial Sequence: Synthetic oligonucleotide
  misc_feature 1..20: note = Target: FXN; (-) strand; PAM type: YTN; PAM sequence: CTC
  source 1..20: mol_type = other DNA
cagagtagctgggattgcag

SEQ ID NO: 22642 - DNA, 20 bp, synthetic construct
  misc_feature 1..20: note = Description of Artificial Sequence: Synthetic oligonucleotide
  misc_feature 1..20: note = Target: FXN; (-) strand; PAM type: YTN; PAM sequence: CTC
  source 1..20: mol_type = other DNA
agcctccagagtagctggga

SEQ ID NO: 22643 - DNA, 20 bp, synthetic construct
  misc_feature 1..20: note = Description of Artificial Sequence: Synthetic oligonucleotide
  misc_feature 1..20: note = Target: FXN; (-) strand; PAM type: YTN; PAM sequence: CTG
  source 1..20: mol_type = other DNA
tctcagcctccagagtagct

SEQ ID NO: 22644 - DNA, 20 bp, synthetic construct
  misc_feature 1..20: note = Description of Artificial Sequence: Synthetic oligonucleotide
  misc_feature 1..20: note = Target: FXN; (-) strand; PAM type: YTN; PAM sequence: TTC
  source 1..20: mol_type = other DNA
tgtctcagcctccagagtag

SEQ ID NO: 22645 - DNA, 20 bp, synthetic construct
  misc_feature 1..20: note = Description of Artificial Sequence: Synthetic oligonucleotide
  misc_feature 1..20: note = Target: FXN; (-) strand; PAM type: YTN; PAM sequence: TTC
  source 1..20: mol_type = other DNA
aagagattctgtctcagcct

SEQ ID NO: 22646 - DNA, 20 bp, synthetic construct
  misc_feature 1..20: note = Description of Artificial Sequence: Synthetic oligonucleotide
  misc_feature 1..20: note = Target: FXN; (-) strand; PAM type: YTN; PAM sequence: CTG
  source 1..20: mol_type = other DNA
ggttcaagagattctgtctc

SEQ ID NO: 22647 - DNA, 20 bp, synthetic construct
  misc_feature 1..20: note = Description of Artificial Sequence: Synthetic oligonucleotide
  misc_feature 1..20: note = Target: FXN; (-) strand; PAM type: YTN; PAM sequence: CTC
  source 1..20: mol_type = other DNA
ctgggttcaagagattctgt

SEQ ID NO: 22648 - DNA, 20 bp, synthetic construct
  misc_feature 1..20: note = Description of Artificial Sequence: Synthetic oligonucleotide
  misc_feature 1..20: note = Target: FXN; (-) strand; PAM type: YTN; PAM sequence: CTC
  source 1..20: mol_type = other DNA
cacctcctgggttcaagaga

SEQ ID NO: 22649 - DNA, 20 bp, synthetic construct
  misc_feature 1..20: note = Description of Artificial Sequence: Synthetic oligonucleotide
  misc_feature 1..20: note = Target: FXN; (-) strand; PAM type: YTN; PAM sequence: CTG
  source 1..20: mol_type = other DNA
caatctccacctcctgggtt

SEQ ID NO: 22650 - DNA, 20 bp, synthetic construct
  misc_feature 1..20: note = Description of Artificial Sequence: Synthetic oligonucleotide
  misc_feature 1..20: note = Target: FXN; (-) strand; PAM type: YTN; PAM sequence: CTC
  source 1..20: mol_type = other DNA
actgcaatctccacctcctg

SEQ ID NO: 22651 - DNA, 20 bp, synthetic construct
  misc_feature 1..20: note = Description of Artificial Sequence: Synthetic oligonucleotide
  misc_feature 1..20: note = Target: FXN; (-) strand; PAM type: YTN; PAM sequence: CTG
  source 1..20: mol_type = other DNA
ctcactgcaatctccacctc

SEQ ID NO: 22652 - DNA, 20 bp, synthetic construct
  misc_feature 1..20: note = Description of Artificial Sequence: Synthetic oligonucleotide
  misc_feature 1..20: note = Target: FXN; (-) strand; PAM type: YTN; PAM sequence: CTC
  source 1..20: mol_type = other DNA
tgctcactgcaatctccacc

SEQ ID NO: 22653 - DNA, 20 bp, synthetic construct
  misc_feature 1..20: note = Description of Artificial Sequence: Synthetic oligonucleotide
  misc_feature 1..20: note = Target: FXN; (-) strand; PAM type: YTN; PAM sequence: CTG
  source 1..20: mol_type = other DNA
gaatgcagtggtgccatctc

SEQ ID NO: 22654 - DNA, 20 bp, synthetic construct
  misc_feature 1..20: note = Description of Artificial Sequence: Synthetic oligonucleotide
  misc_feature 1..20: note = Target: FXN; (-) strand; PAM type: YTN; PAM sequence: TTG
  source 1..20: mol_type = other DNA
cccaggctggaatgcagtgg

SEQ ID NO: 22655 - DNA, 20 bp, synthetic construct
  misc_feature 1..20: note = Description of Artificial Sequence: Synthetic oligonucleotide
  misc_feature 1..20: note = Target: FXN; (-) strand; PAM type: YTN; PAM sequence: TTG
  source 1..20: mol_type = other DNA
ttgcccaggctggaatgcag

SEQ ID NO: 22656 - DNA, 20 bp, synthetic construct
  misc_feature 1..20: note = Description of Artificial Sequence: Synthetic oligonucleotide
  misc_feature 1..20: note = Target: FXN; (-) strand; PAM type: YTN; PAM sequence: TTT
  source 1..20: mol_type = other DNA
gttgcccaggctggaatgca

SEQ ID NO: 22657 - DNA, 20 bp, synthetic construct
  misc_feature 1..20: note = Description of Artificial Sequence: Synthetic oligonucleotide
  misc_feature 1..20: note = Target: FXN; (-) strand; PAM type: YTN; PAM sequence: CTT
  source 1..20: mol_type = other DNA
tgttgcccaggctggaatgc

SEQ ID NO: 22658 - DNA, 20 bp, synthetic construct
  misc_feature 1..20: note = Description of Artificial Sequence: Synthetic oligonucleotide
  misc_feature 1..20: note = Target: FXN; (-) strand; PAM type: YTN; PAM sequence: TTG
  source 1..20: mol_type = other DNA
ctttgttgcccaggctggaa

SEQ ID NO: 22659 - DNA, 20 bp, synthetic construct
  misc_feature 1..20: note = Description of Artificial Sequence: Synthetic oligonucleotide
  misc_feature 1..20: note = Target: FXN; (-) strand; PAM type: YTN; PAM sequence: CTT
  source 1..20: mol_type = other DNA
gctttgttgcccaggctgga

SEQ ID NO: 22660 - DNA, 20 bp, synthetic construct
  misc_feature 1..20: note = Description of Artificial Sequence: Synthetic oligonucleotide
  misc_feature 1..20: note = Target: FXN; (-) strand; PAM type: YTN; PAM sequence: TTG
  source 1..20: mol_type = other DNA
agacagagtcttgctttgtt

SEQ ID NO: 22661 - DNA, 20 bp, synthetic construct
  misc_feature 1..20: note = Description of Artificial Sequence: Synthetic oligonucleotide
  misc_feature 1..20: note = Target: FXN; (-) strand; PAM type: YTN; PAM sequence: TTT
  source 1..20: mol_type = other DNA
gagacagagtcttgctttgt

SEQ ID NO: 22662 - DNA, 20 bp, synthetic construct
  misc_feature 1..20: note = Description of Artificial Sequence: Synthetic oligonucleotide
  misc_feature 1..20: note = Target: FXN; (-) strand; PAM type: YTN; PAM sequence: TTA
  source 1..20: mol_type = other DNA
tttgagacagagtcttgctt

SEQ ID NO: 22663 - DNA, 20 bp, synthetic construct
  misc_feature 1..20: note = Description of Artificial Sequence: Synthetic oligonucleotide
  misc_feature 1..20: note = Target: FXN; (-) strand; PAM type: YTN; PAM sequence: TTA
  source 1..20: mol_type = other DNA
ttatttgagacagagtcttg

SEQ ID NO: 22664 - DNA, 20 bp, synthetic construct
  misc_feature 1..20: note = Description of Artificial Sequence: Synthetic oligonucleotide
  misc_feature 1..20: note = Target: FXN; (-) strand; PAM type: YTN; PAM sequence: TTA
  source 1..20: mol_type = other DNA
ttattatttgagacagagtc

SEQ ID NO: 22665 - DNA, 20 bp, synthetic construct
  misc_feature 1..20: note = Description of Artificial Sequence: Synthetic oligonucleotide
  misc_feature 1..20: note = Target: FXN; (-) strand; PAM type: YTN; PAM sequence: TTA
  source 1..20: mol_type = other DNA
ttattattatttgagacaga

SEQ ID NO: 22666 - DNA, 20 bp, synthetic construct
  misc_feature 1..20: note = Description of Artificial Sequence: Synthetic oligonucleotide
  misc_feature 1..20: note = Target: FXN; (-) strand; PAM type: YTN; PAM sequence: TTA
  source 1..20: mol_type = other DNA
ttattattattatttgagac

SEQ ID NO: 22667 - DNA, 20 bp, synthetic construct
  misc_feature 1..20: note = Description of Artificial Sequence: Synthetic oligonucleotide
  misc_feature 1..20: note = Target: FXN; (-) strand; PAM type: YTN; PAM sequence: TTA
  source 1..20: mol_type = other DNA
ttattattattattatttga

SEQ ID NO: 22668 - DNA, 20 bp, synthetic construct
  misc_feature 1..20: note = Description of Artificial Sequence: Synthetic oligonucleotide
  misc_feature 1..20: note = Target: FXN; (-) strand; PAM type: YTN; PAM sequence: TTA
  source 1..20: mol_type = other DNA
gttattattattattattat

SEQ ID NO: 22669 - DNA, 20 bp, synthetic construct
  misc_feature 1..20: note = Description of Artificial Sequence: Synthetic oligonucleotide
  misc_feature 1..20: note = Target: FXN; (-) strand; PAM type: YTN; PAM sequence: CTG
  source 1..20: mol_type = other DNA
catcattagttattattatt

SEQ ID NO: 22670 - DNA, 20 bp, synthetic construct
  misc_feature 1..20: note = Description of Artificial Sequence: Synthetic oligonucleotide
  misc_feature 1..20: note = Target: FXN; (-) strand; PAM type: YTN; PAM sequence: CTC
  source 1..20: mol_type = other DNA
agagagagaaagctgcatca

SEQ ID NO: 22671 - DNA, 20 bp, synthetic construct
  misc_feature 1..20: note = Description of Artificial Sequence: Synthetic oligonucleotide
  misc_feature 1..20: note = Target: FXN; (-) strand; PAM type: YTN; PAM sequence: TTA
  source 1..20: mol_type = other DNA
tatactcagagagagaaagc

SEQ ID NO: 22672 - DNA, 20 bp, synthetic construct
  misc_feature 1..20: note = Description of Artificial Sequence: Synthetic oligonucleotide
  misc_feature 1..20: note = Target: FXN; (-) strand; PAM type: YTN; PAM sequence: CTG
  source 1..20: mol_type = other DNA
cattatatactcagagagag

SEQ ID NO: 22673 - DNA, 20 bp, synthetic construct
  misc_feature 1..20: note = Description of Artificial Sequence: Synthetic oligonucleotide
  misc_feature 1..20: note = Target: FXN; (-) strand; PAM type: YTN; PAM sequence: CTC
  source 1..20: mol_type = other DNA
acatcatcagaactgcatta

SEQ ID NO: 22674 - DNA, 20 bp, synthetic construct
  misc_feature 1..20: note = Description of Artificial Sequence: Synthetic oligonucleotide
  misc_feature 1..20: note = Target: FXN; (-) strand; PAM type: YTN; PAM sequence: TTC
  source 1..20: mol_type = other DNA
ctcacatcatcagaactgca

SEQ ID NO: 22675 - DNA, 20 bp, synthetic construct
  misc_feature 1..20: note = Description of Artificial Sequence: Synthetic oligonucleotide
  misc_feature 1..20: note = Target: FXN; (-) strand; PAM type: YTN; PAM sequence: CTT
  source 1..20: mol_type = other DNA
cctcacatcatcagaactgc

SEQ ID NO: 22676 - DNA, 20 bp, synthetic construct
  misc_feature 1..20: note = Description of Artificial Sequence: Synthetic oligonucleotide
  misc_feature 1..20: note = Target: FXN; (-) strand; PAM type: YTN; PAM sequence: CTG
  source 1..20: mol_type = other DNA
ccacaccaacagtgaggccc

SEQ ID NO: 22677 - DNA, 20 bp, synthetic construct
  misc_feature 1..20: note = Description of Artificial Sequence: Synthetic oligonucleotide
  misc_feature 1..20: note = Target: FXN; (-) strand; PAM type: YTN; PAM sequence: CTC
  source 1..20: mol_type = other DNA
tgccacaccaacagtgaggc

SEQ ID NO: 22678 - DNA, 20 bp, synthetic construct
  misc_feature 1..20: note = Description of Artificial Sequence: Synthetic oligonucleotide
  misc_feature 1..20: note = Target: FXN; (-) strand; PAM type: YTN; PAM sequence: CTC
  source 1..20: mol_type = other DNA
agactctgccacaccaacag

SEQ ID NO: 22679 - DNA, 20 bp, synthetic construct
  misc_feature 1..20: note = Description of Artificial Sequence: Synthetic oligonucleotide
  misc_feature 1..20: note = Target: FXN; (-) strand; PAM type: YTN; PAM sequence: TTG
  source 1..20: mol_type = other DNA
ccagccatggtctcagactc

SEQ ID NO: 22680 - DNA, 20 bp, synthetic construct
  misc_feature 1..20: note = Description of Artificial Sequence: Synthetic oligonucleotide
  misc_feature 1..20: note = Target: FXN; (-) strand; PAM type: YTN; PAM sequence: TTC
  source 1..20: mol_type = other DNA
attgccagccatggtctcag

SEQ ID NO: 22681 - DNA, 20 bp, synthetic construct
  misc_feature 1..20: note = Description of Artificial Sequence: Synthetic oligonucleotide
  misc_feature 1..20: note = Target: FXN; (-) strand; PAM type: YTN; PAM sequence: TTT
  source 1..20: mol_type = other DNA
cattgccagccatggtctca

SEQ ID NO: 22682 - DNA, 20 bp, synthetic construct
  misc_feature 1..20: note = Description of Artificial Sequence: Synthetic oligonucleotide
  misc_feature 1..20: note = Target: FXN; (-) strand; PAM type: YTN; PAM sequence: TTT
  source 1..20: mol_type = other DNA
tcattgccagccatggtctc

SEQ ID NO: 22683 - DNA, 20 bp, synthetic construct
  misc_feature 1..20: note = Description of Artificial Sequence: Synthetic oligonucleotide
  misc_feature 1..20: note = Target: FXN; (-) strand; PAM type: YTN; PAM sequence: TTG
  source 1..20: mol_type = other DNA
aaaccataaagggagagccc

SEQ ID NO: 22684 - DNA, 20 bp, synthetic construct
  misc_feature 1..20: note = Description of Artificial Sequence: Synthetic oligonucleotide
  misc_feature 1..20: note = Target: FXN; (-) strand; PAM type: YTN; PAM sequence: CTT
  source 1..20: mol_type = other DNA
gaaaccataaagggagagcc

SEQ ID NO: 22685 - DNA, 20 bp, synthetic construct
  misc_feature 1..20: note = Description of Artificial Sequence: Synthetic oligonucleotide
  misc_feature 1..20: note = Target: FXN; (-) strand; PAM type: YTN; PAM sequence: CTC
  source 1..20: mol_type = other DNA
cttgaaaccataaagggaga

SEQ ID NO: 22686 - DNA, 20 bp, synthetic construct
  misc_feature 1..20: note = Description of Artificial Sequence: Synthetic oligonucleotide
  misc_feature 1..20: note = Target: FXN; (-) strand; PAM type: YTN; PAM sequence: TTG
  source 1..20: mol_type = other DNA
agaagccctccttgaaacca

SEQ ID NO: 22687 - DNA, 20 bp, synthetic construct
  misc_feature 1..20: note = Description of Artificial Sequence: Synthetic oligonucleotide
  misc_feature 1..20: note = Target: FXN; (-) strand; PAM type: YTN; PAM sequence: CTG
  source 1..20: mol_type = other DNA
ccaagattgagaagccctcc

SEQ ID NO: 22688 - DNA, 20 bp, synthetic construct
  misc_feature 1..20: note = Description of Artificial Sequence: Synthetic oligonucleotide
  misc_feature 1..20: note = Target: FXN; (-) strand; PAM type: YTN; PAM sequence: TTC
  source 1..20: mol_type = other DNA
tgccaagattgagaagccct

SEQ ID NO: 22689 - DNA, 20 bp, synthetic construct
  misc_feature 1..20: note = Description of Artificial Sequence: Synthetic oligonucleotide
  misc_feature 1..20: note = Target: FXN; (-) strand; PAM type: YTN; PAM sequence: CTA
  source 1..20: mol_type = other DNA
tccagtccaaaattctgcca

SEQ ID NO: 22690 - DNA, 20 bp, synthetic construct
  misc_feature 1..20: note = Description of Artificial Sequence: Synthetic oligonucleotide
  misc_feature 1..20: note = Target: FXN; (-) strand; PAM type: YTN; PAM sequence: CTG
  source 1..20: mol_type = other DNA
tgcaacaaagaactatccag

SEQ ID NO: 22691 - DNA, 20 bp, synthetic construct
  misc_feature 1..20: note = Description of Artificial Sequence: Synthetic oligonucleotide
  misc_feature 1..20: note = Target: FXN; (-) strand; PAM type: YTN; PAM sequence: CTG
  source 1..20: mol_type = other DNA
tgatgtgcaggacagccccc

SEQ ID NO: 22692 - DNA, 20 bp, synthetic construct
  misc_feature 1..20: note = Description of Artificial Sequence: Synthetic oligonucleotide
  misc_feature 1..20: note = Target: FXN; (-) strand; PAM type: YTN; PAM sequence: CTA
  source 1..20: mol_type = other DNA
gtaggtagaggccagggatg

SEQ ID NO: 22693 - DNA, 20 bp, synthetic construct
  misc_feature 1..20: note = Description of Artificial Sequence: Synthetic oligonucleotide
  misc_feature 1..20: note = Target: FXN; (-) strand; PAM type: YTN; PAM sequence: CTG
  source 1..20: mol_type = other DNA
gcatctagtaggtagaggcc

SEQ ID NO: 22694 - DNA, 20 bp, synthetic construct
  misc_feature 1..20: note = Description of Artificial Sequence: Synthetic oligonucleotide
  misc_feature 1..20: note = Target: FXN; (-) strand; PAM type: YTN; PAM sequence: CTA
  source 1..20: mol_type = other DNA
ctggcatctagtaggtagag

SEQ ID NO: 22695 - DNA, 20 bp, synthetic construct
  misc_feature 1..20: note = Description of Artificial Sequence: Synthetic oligonucleotide
  misc_feature 1..20: note = Target: FXN; (-) strand; PAM type: YTN; PAM sequence: TTC
  source 1..20: mol_type = other DNA
tactggcatctagtaggtag

SEQ ID NO: 22696 - DNA, 20 bp, synthetic construct
  misc_feature 1..20: note = Description of Artificial Sequence: Synthetic oligonucleotide
  misc_feature 1..20: note = Target: FXN; (-) strand; PAM type: YTN; PAM sequence: CTG
  source 1..20: mol_type = other DNA
tggggtgggtatgttctact

SEQ ID NO: 22697 - DNA, 20 bp, synthetic construct
  misc_feature 1..20: note = Description of Artificial Sequence: Synthetic oligonucleotide
  misc_feature 1..20: note = Target: FXN; (-) strand; PAM type: YTN; PAM sequence: TTG
  source 1..20: mol_type = other DNA
tcacaacaggcagctgtggg

SEQ ID NO: 22698 - DNA, 20 bp, synthetic construct
  misc_feature 1..20: note = Description of Artificial Sequence: Synthetic oligonucleotide
  misc_feature 1..20: note = Target: FXN; (-) strand; PAM type: YTN; PAM sequence: TTG
  source 1..20: mol_type = other DNA
attgtcacaacaggcagctg

SEQ ID NO: 22699 - DNA, 20 bp, synthetic construct
  misc_feature 1..20: note = Description of Artificial Sequence: Synthetic oligonucleotide
  misc_feature 1..20: note = Target: FXN; (-) strand; PAM type: YTN; PAM sequence: TTT
  source 1..20: mol_type = other DNA
gattgtcacaacaggcagct

SEQ ID NO: 22700 - DNA, 20 bp, synthetic construct
  misc_feature 1..20: note = Description of Artificial Sequence: Synthetic oligonucleotide
  misc_feature 1..20: note = Target: FXN; (-) strand; PAM type: YTN; PAM sequence: TTT
  source 1..20: mol_type = other DNA
tgattgtcacaacaggcagc

SEQ ID NO: 22701 - DNA, 20 bp, synthetic construct
  misc_feature 1..20: note = Description of Artificial Sequence: Synthetic oligonucleotide
  misc_feature 1..20: note = Target: FXN; (-) strand; PAM type: YTN; PAM sequence: CTT
  source 1..20: mol_type = other DNA
ttgattgtcacaacaggcag

SEQ ID NO: 22702 - DNA, 20 bp, synthetic construct
  misc_feature 1..20: note = Description of Artificial Sequence: Synthetic oligonucleotide
  misc_feature 1..20: note = Target: FXN; (-) strand; PAM type: YTN; PAM sequence: CTG
  source 1..20: mol_type = other DNA
gagatgcttttgattgtcac

SEQ ID NO: 22703 - DNA, 20 bp, synthetic construct
  misc_feature 1..20: note = Description of Artificial Sequence: Synthetic oligonucleotide
  misc_feature 1..20: note = Target: FXN; (-) strand; PAM type: YTN; PAM sequence: CTG
  source 1..20: mol_type = other DNA
caaagtatctggagatgctt

SEQ ID NO: 22704 - DNA, 20 bp, synthetic construct
  misc_feature 1..20: note = Description of Artificial Sequence: Synthetic oligonucleotide
  misc_feature 1..20: note = Target: FXN; (-) strand; PAM type: YTN; PAM sequence: TTC
  source 1..20: mol_type = other DNA
cccctgcaaagtatctggag

SEQ ID NO: 22705 - DNA, 20 bp, synthetic construct
  misc_feature 1..20: note = Description of Artificial Sequence: Synthetic oligonucleotide
  misc_feature 1..20: note = Target: FXN; (-) strand; PAM type: YTN; PAM sequence: TTT
  source 1..20: mol_type = other DNA
ccccctgcaaagtatctgga

SEQ ID NO: 22706 - DNA, 20 bp, synthetic construct
  misc_feature 1..20: note = Description of Artificial Sequence: Synthetic oligonucleotide
  misc_feature 1..20: note = Target: FXN; (-) strand; PAM type: YTN; PAM sequence: TTT
  source 1..20: mol_type = other DNA
tccccctgcaaagtatctgg

SEQ ID NO: 22707 - DNA, 20 bp, synthetic construct
  misc_feature 1..20: note = Description of Artificial Sequence: Synthetic oligonucleotide
  misc_feature 1..20: note = Target: FXN; (-) strand; PAM type: YTN; PAM sequence: CTG
  source 1..20: mol_type = other DNA
gagaaatcattttccccctg

SEQ ID NO: 22708 - DNA, 20 bp, synthetic construct
  misc_feature 1..20: note = Description of Artificial Sequence: Synthetic oligonucleotide
  misc_feature 1..20: note = Target: FXN; (-) strand; PAM type: YTN; PAM sequence: TTA
  source 1..20: mol_type = other DNA
tgtatatgccaggcctggag

SEQ ID NO: 22709 - DNA, 20 bp, synthetic construct
  misc_feature 1..20: note = Description of Artificial Sequence: Synthetic oligonucleotide
  misc_feature 1..20: note = Target: FXN; (-) strand; PAM type: YTN; PAM sequence: CTG
  source 1..20: mol_type = other DNA
ttatgtatatgccaggcctg

SEQ ID NO: 22710 - DNA, 20 bp, synthetic construct
  misc_feature 1..20: note = Description of Artificial Sequence: Synthetic oligonucleotide
  misc_feature 1..20: note = Target: FXN; (-) strand; PAM type: YTN; PAM sequence: TTA
  source 1..20: mol_type = other DNA
aatactgttatgtatatgcc

SEQ ID NO: 22711 - DNA, 20 bp, synthetic construct
  misc_feature 1..20: note = Description of Artificial Sequence: Synthetic oligonucleotide
  misc_feature 1..20: note = Target: FXN; (-) strand; PAM type: YTN; PAM sequence: CTT
  source 1..20: mol_type = other DNA
aaatactgttatgtatatgc

SEQ ID NO: 22712 - DNA, 20 bp, synthetic construct
  misc_feature 1..20: note = Description of Artificial Sequence: Synthetic oligonucleotide
  misc_feature 1..20: note = Target: FXN; (-) strand; PAM type: YTN; PAM sequence: CTG
  source 1..20: mol_type = other DNA
cttaaatactgttatgtata

SEQ ID NO: 22713 - DNA, 20 bp, synthetic construct
  misc_feature 1..20: note = Description of Artificial Sequence: Synthetic oligonucleotide
  misc_feature 1..20: note = Target: FXN; (-) strand; PAM type: YTN; PAM sequence: CTA
  source 1..20: mol_type = other DNA
ggcagctgcttaaatactgt

SEQ ID NO: 22714 - DNA, 20 bp, synthetic construct
  misc_feature 1..20: note = Description of Artificial Sequence: Synthetic oligonucleotide
  misc_feature 1..20: note = Target: FXN; (-) strand; PAM type: YTN; PAM sequence: TTC
  source 1..20: mol_type = other DNA
taggcagctgcttaaatact

SEQ ID NO: 22715 - DNA, 20 bp, synthetic construct
  misc_feature 1..20: note = Description of Artificial Sequence: Synthetic oligonucleotide
  misc_feature 1..20: note = Target: FXN; (-) strand; PAM type: YTN; PAM sequence: TTA
  source 1..20: mol_type = other DNA
attctaggcagctgcttaaa

SEQ ID NO: 22716 - DNA, 20 bp, synthetic construct
  misc_feature 1..20: note = Description of Artificial Sequence: Synthetic oligonucleotide
  misc_feature 1..20: note = Target: FXN; (-) strand; PAM type: YTN; PAM sequence: TTA
  source 1..20: mol_type = other DNA
attaattctaggcagctgct

SEQ ID NO: 22717 - DNA, 20 bp, synthetic construct
  misc_feature 1..20: note = Description of Artificial Sequence: Synthetic oligonucleotide
  misc_feature 1..20: note = Target: FXN; (-) strand; PAM type: YTN; PAM sequence: TTT
  source 1..20: mol_type = other DNA
aattaattctaggcagctgc

SEQ ID NO: 22718 - DNA, 20 bp, synthetic construct
  misc_feature 1..20: note = Description of Artificial Sequence: Synthetic oligonucleotide
  misc_feature 1..20: note = Target: FXN; (-) strand; PAM type: YTN; PAM sequence: CTG
  source 1..20: mol_type = other DNA
tgtttaattaattctaggca

SEQ ID NO: 22719 - DNA, 20 bp, synthetic construct
  misc_feature 1..20: note = Description of Artificial Sequence: Synthetic oligonucleotide
  misc_feature 1..20: note = Target: FXN; (-) strand; PAM type: YTN; PAM sequence: TTC
  source 1..20: mol_type = other DNA
tgtgtttaattaattctagg

SEQ ID NO: 22720 - DNA, 20 bp, synthetic construct
  misc_feature 1..20: note = Description of Artificial Sequence: Synthetic oligonucleotide
  misc_feature 1..20: note = Target: FXN; (-) strand; PAM type: YTN; PAM sequence: CTT
  source 1..20: mol_type = other DNA
ctgtgtttaattaattctag

SEQ ID NO: 22721 - DNA, 20 bp, synthetic construct
  misc_feature 1..20: note = Description of Artificial Sequence: Synthetic oligonucleotide
  misc_feature 1..20: note = Target: FXN; (-) strand; PAM type: YTN; PAM sequence: CTG
  source 1..20: mol_type = other DNA
gatgagagacatccttctgt

SEQ ID NO: 22722 - DNA, 20 bp, synthetic construct
  misc_feature 1..20: note = Description of Artificial Sequence: Synthetic oligonucleotide
  misc_feature 1..20: note = Target: FXN; (-) strand; PAM type: YTN; PAM sequence: TTC
  source 1..20: mol_type = other DNA
tggatgagagacatccttct

SEQ ID NO: 22723 - DNA, 20 bp, synthetic construct
  misc_feature 1..20: note = Description of Artificial Sequence: Synthetic oligonucleotide
  misc_feature 1..20: note = Target: FXN; (-) strand; PAM type: YTN; PAM sequence: CTA
  source 1..20: mol_type = other DNA
tcaaagaggtggtccagggc

SEQ ID NO: 22724 - DNA, 20 bp, synthetic construct
  misc_feature 1..20: note = Description of Artificial Sequence: Synthetic oligonucleotide
  misc_feature 1..20: note = Target: FXN; (-) strand; PAM type: YTN; PAM sequence: TTG
  source 1..20: mol_type = other DNA
cctatcaaagaggtggtcca

SEQ ID NO: 22725 - DNA, 20 bp, synthetic construct
  misc_feature 1..20: note = Description of Artificial Sequence: Synthetic oligonucleotide
  misc_feature 1..20: note = Target: FXN; (-) strand; PAM type: YTN; PAM sequence: CTG
  source 1..20: mol_type = other DNA
attgcctatcaaagaggtgg

SEQ ID NO: 22726 - DNA, 20 bp, synthetic construct
  misc_feature 1..20: note = Description of Artificial Sequence: Synthetic oligonucleotide
  misc_feature 1..20: note = Target: FXN; (-) strand; PAM type: YTN; PAM sequence: TTC
  source 1..20: mol_type = other DNA
aaaaatagggtggaggaggt

SEQ ID NO: 22727 - DNA, 20 bp, synthetic construct
  misc_feature 1..20: note = Description of Artificial Sequence: Synthetic oligonucleotide
  misc_feature 1..20: note = Target: FXN; (-) strand; PAM type: YTN; PAM sequence: CTT
  source 1..20: mol_type = other DNA
caaaaatagggtggaggagg

SEQ ID NO: 22728 - DNA, 20 bp, synthetic construct
  misc_feature 1..20: note = Description of Artificial Sequence: Synthetic oligonucleotide
  misc_feature 1..20: note = Target: FXN; (-) strand; PAM type: YTN; PAM sequence: TTG
  source 1..20: mol_type = other DNA
gcacagggccttcaaaaata

SEQ ID NO: 22729 - DNA, 20 bp, synthetic construct
  misc_feature 1..20: note = Description of Artificial Sequence: Synthetic oligonucleotide
  misc_feature 1..20: note = Target: FXN; (-) strand; PAM type: YTN; PAM sequence: TTC
  source 1..20: mol_type = other DNA
atggaagaagtggtgttggc

SEQ ID NO: 22730 - DNA, 20 bp, synthetic construct
  misc_feature 1..20: note = Description of Artificial Sequence: Synthetic oligonucleotide
  misc_feature 1..20: note = Target: FXN; (-) strand; PAM type: YTN; PAM sequence: CTA
  source 1..20: mol_type = other DNA
gggatgggggaatcaaggaa

SEQ ID NO: 22731 - DNA, 20 bp, synthetic construct
  misc_feature 1..20: note = Description of Artificial Sequence: Synthetic oligonucleotide
  misc_feature 1..20: note = Target: FXN; (-) strand; PAM type: YTN; PAM sequence: TTA
  source 1..20: mol_type = other DNA
tatagagctagggatggggg

SEQ ID NO: 22732 - DNA, 20 bp, synthetic construct
  misc_feature 1..20: note = Description of Artificial Sequence: Synthetic oligonucleotide
  misc_feature 1..20: note = Target: FXN; (-) strand; PAM type: YTN; PAM sequence: TTT
  source 1..20: mol_type = other DNA
atatagagctagggatgggg

SEQ ID NO: 22733 - DNA, 20 bp, synthetic construct
  misc_feature 1..20: note = Description of Artificial Sequence: Synthetic oligonucleotide
  misc_feature 1..20: note = Target: FXN; (-) strand; PAM type: YTN; PAM sequence: TTG
  source 1..20: mol_type = other DNA
agtgggagatttatatagag

SEQ ID NO: 22734 - DNA, 20 bp, synthetic construct
  misc_feature 1..20: note = Description of Artificial Sequence: Synthetic oligonucleotide
  misc_feature 1..20: note = Target: FXN; (-) strand; PAM type: YTN; PAM sequence: CTA
  source 1..20: mol_type = other DNA
acaggtgtgagtgttgagtg

SEQ ID NO: 22735 - DNA, 20 bp, synthetic construct
  misc_feature 1..20: note = Description of Artificial Sequence: Synthetic oligonucleotide
  misc_feature 1..20: note = Target: FXN; (-) strand; PAM type: YTN; PAM sequence: CTA
  source 1..20: mol_type = other DNA
aatgacaagtgtcaagagga

SEQ ID NO: 22736 - DNA, 20 bp, synthetic construct
  misc_feature 1..20: note = Description of Artificial Sequence: Synthetic oligonucleotide
  misc_feature 1..20: note = Target: FXN; (-) strand; PAM type: YTN; PAM sequence: TTA
  source 1..20: mol_type = other DNA
ggatgctaaatgacaagtgt

SEQ ID NO: 22737 - DNA, 20 bp, synthetic construct
  misc_feature 1..20: note = Description of Artificial Sequence: Synthetic oligonucleotide
  misc_feature 1..20: note = Target: FXN; (-) strand; PAM type: YTN; PAM sequence: CTT
  source 1..20: mol_type = other DNA
aggatgctaaatgacaagtg

SEQ ID NO: 22738 - DNA, 20 bp, synthetic construct
  misc_feature 1..20: note = Description of Artificial Sequence: Synthetic oligonucleotide
  misc_feature 1..20: note = Target: FXN; (-) strand; PAM type: YTN; PAM sequence: TTA
  source 1..20: mol_type = other DNA
catacttaggatgctaaatg

SEQ ID NO: 22739 - DNA, 20 bp, synthetic construct
  misc_feature 1..20: note = Description of Artificial Sequence: Synthetic oligonucleotide
  misc_feature 1..20: note = Target: FXN; (-) strand; PAM type: YTN; PAM sequence: TTT
  source 1..20: mol_type = other DNA
acatacttaggatgctaaat

SEQ ID NO: 22740 - DNA, 20 bp, synthetic construct
  misc_feature 1..20: note = Description of Artificial Sequence: Synthetic oligonucleotide
  misc_feature 1..20: note = Target: FXN; (-) strand; PAM type: YTN; PAM sequence: TTG
  source 1..20: mol_type = other DNA
tgaatcgtgaagagagacat

SEQ ID NO: 22741 - DNA, 20 bp, synthetic construct
  misc_feature 1..20: note = Description of Artificial Sequence: Synthetic oligonucleotide
  misc_feature 1..20: note = Target: FXN; (-) strand; PAM type: YTN; PAM sequence: TTT
  source 1..20: mol_type = other DNA
gtgaatcgtgaagagagaca

SEQ ID NO: 22742 - DNA, 20 bp, synthetic construct
  misc_feature 1..20: note = Description of Artificial Sequence: Synthetic oligonucleotide
  misc_feature 1..20: note = Target: FXN; (-) strand; PAM type: YTN; PAM sequence: CTT
  source 1..20: mol_type = other DNA
tgtgaatcgtgaagagagac

SEQ ID NO: 22743 - DNA, 20 bp, synthetic construct
  misc_feature 1..20: note = Description of Artificial Sequence: Synthetic oligonucleotide
  misc_feature 1..20: note = Target: FXN; (-) strand; PAM type: YTN; PAM sequence: TTC
  source 1..20: mol_type = other DNA
caaagccactttgtgaatcg

SEQ ID NO: 22744 - DNA, 20 bp, synthetic construct
  misc_feature 1..20: note = Description of Artificial Sequence: Synthetic oligonucleotide
  misc_feature 1..20: note = Target: FXN; (-) strand; PAM type: YTN; PAM sequence: CTT
  source 1..20: mol_type = other DNA
ccaaagccactttgtgaatc

SEQ ID NO: 22745 - DNA, 20 bp, synthetic construct
  misc_feature 1..20: note = Description of Artificial Sequence: Synthetic oligonucleotide
  misc_feature 1..20: note = Target: FXN; (-) strand; PAM type: YTN; PAM sequence: TTC
  source 1..20: mol_type = other DNA
ttccaaagccactttgtgaa

SEQ ID NO: 22746 - DNA, 20 bp, synthetic construct
  misc_feature 1..20: note = Description of Artificial Sequence: Synthetic oligonucleotide
  misc_feature 1..20: note = Target: FXN; (-) strand; PAM type: YTN; PAM sequence: CTA
  source 1..20: mol_type = other DNA
aagttcttccaaagccactt

SEQ ID NO: 22747 - DNA, 20 bp, synthetic construct
  misc_feature 1..20: note = Description of Artificial Sequence: Synthetic oligonucleotide
  misc_feature 1..20: note = Target: FXN; (-) strand; PAM type: YTN; PAM sequence: TTC
  source 1..20: mol_type = other DNA
catggcagagaagatgggaa

SEQ ID NO: 22748 - DNA, 20 bp, synthetic construct
  misc_feature 1..20: note = Description of Artificial Sequence: Synthetic oligonucleotide
  misc_feature 1..20: note = Target: FXN; (-) strand; PAM type: YTN; PAM sequence: TTT
  source 1..20: mol_type = other DNA
ccatggcagagaagatggga

SEQ ID NO: 22749 - DNA, 20 bp, synthetic construct
  misc_feature 1..20: note = Description of Artificial Sequence: Synthetic oligonucleotide
  misc_feature 1..20: note = Target: FXN; (-) strand; PAM type: YTN; PAM sequence: CTT
  source 1..20: mol_type = other DNA
tccatggcagagaagatggg

SEQ ID NO: 22750 - DNA, 20 bp, synthetic construct
  misc_feature 1..20: note = Description of Artificial Sequence: Synthetic oligonucleotide
  misc_feature 1..20: note = Target: FXN; (-) strand; PAM type: YTN; PAM sequence: TTG
  source 1..20: mol_type = other DNA
tgtacactttccatggcaga

SEQ ID NO: 22751 - DNA, 20 bp, synthetic construct
  misc_feature 1..20: note = Description of Artificial Sequence: Synthetic oligonucleotide
  misc_feature 1..20: note = Target: FXN; (-) strand; PAM type: YTN; PAM sequence: TTA
  source 1..20: mol_type = other DNA
aaaaaaaagaaaatgtcagt

SEQ ID NO: 22752 - DNA, 20 bp, synthetic construct
  misc_feature 1..20: note = Description of Artificial Sequence: Synthetic oligonucleotide
  misc_feature 1..20: note = Target: FXN; (-) strand; PAM type: YTN; PAM sequence: CTT
  source 1..20: mol_type = other DNA
aaaaaaaaagaaaatgtcag

SEQ ID NO: 22753 - DNA, 20 bp, synthetic construct
  misc_feature 1..20: note = Description of Artificial Sequence: Synthetic oligonucleotide
  misc_feature 1..20: note = Target: FXN; (-) strand; PAM type: YTN; PAM sequence: CTG
  source 1..20: mol_type = other DNA
tcttaaaaaaaaagaaaatg

SEQ ID NO: 22754 - DNA, 20 bp, synthetic construct
  misc_feature 1..20: note = Description of Artificial Sequence: Synthetic oligonucleotide
  misc_feature 1..20: note = Target: FXN; (-) strand; PAM type: YTN; PAM sequence: TTC
  source 1..20: mol_type = other DNA
cagcccggccatcatagcaa

SEQ ID NO: 22755 - DNA, 20 bp, synthetic construct
  misc_feature 1..20: note = Description of Artificial Sequence: Synthetic oligonucleotide
  misc_feature 1..20: note = Target: FXN; (-) strand; PAM type: YTN; PAM sequence: CTG
  source 1..20: mol_type = other DNA
tgaatagccacagcattcca

SEQ ID NO: 22756 - DNA, 20 bp, synthetic construct
  misc_feature 1..20: note = Description of Artificial Sequence: Synthetic oligonucleotide
  misc_feature 1..20: note = Target: FXN; (-) strand; PAM type: YTN; PAM sequence: TTG
  source 1..20: mol_type = other DNA
tgcctgtgaatagccacagc

SEQ ID NO: 22757 - DNA, 20 bp, synthetic construct
  misc_feature 1..20: note = Description of Artificial Sequence: Synthetic oligonucleotide
  misc_feature 1..20: note = Target: FXN; (-) strand; PAM type: YTN; PAM sequence: CTA
  source 1..20: mol_type = other DNA
tgattgtgcctgtgaatagc

SEQ ID NO: 22758 - DNA, 20 bp, synthetic construct
  misc_feature 1..20: note = Description of Artificial Sequence: Synthetic oligonucleotide
  misc_feature 1..20: note = Target: FXN; (-) strand; PAM type: YTN; PAM sequence: CTG
  source 1..20: mol_type = other DNA
cagtgagctatgattgtgcc

SEQ ID NO: 22759 - DNA, 20 bp, synthetic construct
  misc_feature 1..20: note = Description of Artificial Sequence: Synthetic oligonucleotide
  misc_feature 1..20: note = Target: FXN; (-) strand; PAM type: YTN; PAM sequence: CTC
  source 1..20: mol_type = other DNA
aaggctgcagtgagctatga

SEQ ID NO: 22760 - DNA, 20 bp, synthetic construct
  misc_feature 1..20: note = Description of Artificial Sequence: Synthetic oligonucleotide
  misc_feature 1..20: note = Target: FXN; (-) strand; PAM type: YTN; PAM sequence: CTG
  source 1..20: mol_type = other DNA
ggagctcaaggctgcagtga

SEQ ID NO: 22761 - DNA, 20 bp, synthetic construct
  misc_feature 1..20: note = Description of Artificial Sequence: Synthetic oligonucleotide
  misc_feature 1..20: note = Target: FXN; (-) strand; PAM type: YTN; PAM sequence: TTG
  source 1..20: mol_type = other DNA
agcctgggagctcaaggctg

SEQ ID NO: 22762 - DNA, 20 bp, synthetic construct
  misc_feature 1..20: note = Description of Artificial Sequence: Synthetic oligonucleotide
  misc_feature 1..20: note = Target: FXN; (-) strand; PAM type: YTN; PAM sequence: CTT
  source 1..20: mol_type = other DNA
gagcctgggagctcaaggct

SEQ ID NO: 22763 - DNA, 20 bp, synthetic construct
  misc_feature 1..20: note = Description of Artificial Sequence: Synthetic oligonucleotide
  misc_feature 1..20: note = Target: FXN; (-) strand; PAM type: YTN; PAM sequence: CTG
  source 1..20: mol_type = other DNA
aggcgggaggatcacttgag

SEQ ID NO: 22764 - DNA, 20 bp, synthetic construct
  misc_feature 1..20: note = Description of Artificial Sequence: Synthetic oligonucleotide
  misc_feature 1..20: note = Target: FXN; (-) strand; PAM type: YTN; PAM sequence: CTC
  source 1..20: mol_type = other DNA
aggaggctgaggcgggagga

SEQ ID NO: 22765 - DNA, 20 bp, synthetic construct
  misc_feature 1..20: note = Description of Artificial Sequence: Synthetic oligonucleotide
  misc_feature 1..20: note = Target: FXN; (-) strand; PAM type: YTN; PAM sequence: CTA
  source 1..20: mol_type = other DNA
ctcaggaggctgaggcggga

SEQ ID NO: 22766 - DNA, 20 bp, synthetic construct
  misc_feature 1..20: note = Description of Artificial Sequence: Synthetic oligonucleotide
  misc_feature 1..20: note = Target: FXN; (-) strand; PAM type: YTN; PAM sequence: CTC
  source 1..20: mol_type = other DNA
agctactcaggaggctgagg

SEQ ID NO: 22767 - DNA, 20 bp, synthetic construct
  misc_feature 1..20: note = Description of Artificial Sequence: Synthetic oligonucleotide
  misc_feature 1..20: note = Target: FXN; (-) strand; PAM type: YTN; PAM sequence: CTG
  source 1..20: mol_type = other DNA
tgatctcagctactcaggag

SEQ ID NO: 22768 - DNA, 20 bp, synthetic construct
  misc_feature 1..20: note = Description of Artificial Sequence: Synthetic oligonucleotide
  misc_feature 1..20: note = Target: FXN; (-) strand; PAM type: YTN; PAM sequence: TTA
  source 1..20: mol_type = other DNA
gaggatgtcaaatgtgagcc

SEQ ID NO: 22769 - DNA, 20 bp, synthetic construct
  misc_feature 1..20: note = Description of Artificial Sequence: Synthetic oligonucleotide
  misc_feature 1..20: note = Target: FXN; (-) strand; PAM type: YTN; PAM sequence: TTT
  source 1..20: mol_type = other DNA
agaggatgtcaaatgtgagc

SEQ ID NO: 22770 - DNA, 20 bp, synthetic construct
  misc_feature 1..20: note = Description of Artificial Sequence: Synthetic oligonucleotide
  misc_feature 1..20: note = Target: FXN; (-) strand; PAM type: YTN; PAM sequence: CTT
  source 1..20: mol_type = other DNA
tagaggatgtcaaatgtgag

SEQ ID NO: 22771 - DNA, 20 bp, synthetic construct
  misc_feature 1..20: note = Description of Artificial Sequence: Synthetic oligonucleotide
  misc_feature 1..20: note = Target: FXN; (-) strand; PAM type: YTN; PAM sequence: TTA
  source 1..20: mol_type = other DNA
tatatgctttagaggatgtc

SEQ ID NO: 22772 - DNA, 20 bp, synthetic construct
  misc_feature 1..20: note = Description of Artificial Sequence: Synthetic oligonucleotide
  misc_feature 1..20: note = Target: FXN; (-) strand; PAM type: YTN; PAM sequence: TTT
  source 1..20: mol_type = other DNA
atatatgctttagaggatgt

SEQ ID NO: 22773 - DNA, 20 bp, synthetic construct
  misc_feature 1..20: note = Description of Artificial Sequence: Synthetic oligonucleotide
  misc_feature 1..20: note = Target: FXN; (-) strand; PAM type: YTN; PAM sequence: TTT
  source 1..20: mol_type = other DNA
tatatatgctttagaggatg

SEQ ID NO: 22774 - DNA, 20 bp, synthetic construct
  misc_feature 1..20: note = Description of Artificial Sequence: Synthetic oligonucleotide
  misc_feature 1..20: note = Target: FXN; (-) strand; PAM type: YTN; PAM sequence: TTC
  source 1..20: mol_type = other DNA
acattttatatatgctttag

SEQ ID NO: 22775 - DNA, 20 bp, synthetic construct
  misc_feature 1..20: note = Description of Artificial Sequence: Synthetic oligonucleotide
  misc_feature 1..20: note = Target: FXN; (-) strand; PAM type: YTN; PAM sequence: CTT
  source 1..20: mol_type = other DNA
cacattttatatatgcttta

SEQ ID NO: 22776 - DNA, 20 bp, synthetic construct
  misc_feature 1..20: note = Description of Artificial Sequence: Synthetic oligonucleotide
  misc_feature 1..20: note = Target: FXN; (-) strand; PAM type: YTN; PAM sequence: TTC
  source 1..20: mol_type = other DNA
ttcacattttatatatgctt

SEQ ID NO: 22777 - DNA, 20 bp, synthetic construct
  misc_feature 1..20: note = Description of Artificial Sequence: Synthetic oligonucleotide
  misc_feature 1..20: note = Target: FXN; (-) strand; PAM type: YTN; PAM sequence: TTT
  source 1..20: mol_type = other DNA
cttcacattttatatatgct

SEQ ID NO: 22778 - DNA, 20 bp, synthetic construct
  misc_feature 1..20: note = Description of Artificial Sequence: Synthetic oligonucleotide
  misc_feature 1..20: note = Target: FXN; (-) strand; PAM type: YTN; PAM sequence: TTT
  source 1..20: mol_type = other DNA
tcttcacattttatatatgc

SEQ ID NO: 22779 - DNA, 20 bp, synthetic construct
  misc_feature 1..20: note = Description of Artificial Sequence: Synthetic oligonucleotide
  misc_feature 1..20: note = Target: FXN; (-) strand; PAM type: YTN; PAM sequence: TTG
  source 1..20: mol_type = other DNA
tgaaagttttcttcacattt

SEQ ID NO: 22780 - DNA, 20 bp, synthetic construct
  misc_feature 1..20: note = Description of Artificial Sequence: Synthetic oligonucleotide
  misc_feature 1..20: note = Target: FXN; (-) strand; PAM type: YTN; PAM sequence: TTA
  source 1..20: mol_type = other DNA
caaagggatgcaaattgtga

SEQ ID NO: 22781 - DNA, 20 bp, synthetic construct
  misc_feature 1..20: note = Description of Artificial Sequence: Synthetic oligonucleotide
  misc_feature 1..20: note = Target: FXN; (-) strand; PAM type: YTN; PAM sequence: TTA
  source 1..20: mol_type = other DNA
catattacaaagggatgcaa

SEQ ID NO: 22782 - DNA, 20 bp, synthetic construct
  misc_feature 1..20: note = Description of Artificial Sequence: Synthetic oligonucleotide
  misc_feature 1..20: note = Target: FXN; (-) strand; PAM type: YTN; PAM sequence: CTG
  source 1..20: mol_type = other DNA
ttacatattacaaagggatg

SEQ ID NO: 22783 - DNA, 20 bp, synthetic construct
  misc_feature 1..20: note = Description of Artificial Sequence: Synthetic oligonucleotide
  misc_feature 1..20: note = Target: FXN; (-) strand; PAM type: YTN; PAM sequence: TTC
  source 1..20: mol_type = other DNA
tgttacatattacaaaggga

SEQ ID NO: 22784 - DNA, 20 bp, synthetic construct
  misc_feature 1..20: note = Description of Artificial Sequence: Synthetic oligonucleotide
  misc_feature 1..20: note = Target: FXN; (-) strand; PAM type: YTN; PAM sequence: TTT
  source 1..20: mol_type = other DNA
ctgttacatattacaaaggg

SEQ ID NO: 22785 - DNA, 20 bp, synthetic construct
  misc_feature 1..20: note = Description of Artificial Sequence: Synthetic oligonucleotide
  misc_feature 1..20: note = Target: FXN; (-) strand; PAM type: YTN; PAM sequence: TTA
  source 1..20: mol_type = other DNA
tttctgttacatattacaaa

SEQ ID NO: 22786 - DNA, 20 bp, synthetic construct
  misc_feature 1..20: note = Description of Artificial Sequence: Synthetic oligonucleotide
  misc_feature 1..20: note = Target: FXN; (-) strand; PAM type: YTN; PAM sequence: TTT
  source 1..20: mol_type = other DNA
atttctgttacatattacaa

SEQ ID NO: 22787 - DNA, 20 bp, synthetic construct
  misc_feature 1..20: note = Description of Artificial Sequence: Synthetic oligonucleotide
  misc_feature 1..20: note = Target: FXN; (-) strand; PAM type: YTN; PAM sequence: TTT
  source 1..20: mol_type = other DNA
tatttctgttacatattaca

SEQ ID NO: 22788 - DNA, 20 bp, synthetic construct
  misc_feature 1..20: note = Description of Artificial Sequence: Synthetic oligonucleotide
  misc_feature 1..20: note = Target: FXN; (-) strand; PAM type: YTN; PAM sequence: TTA
  source 1..20: mol_type = other DNA
aaagagaattttatttctgt

SEQ ID NO: 22789 - DNA, 20 bp, synthetic construct
  misc_feature 1..20: note = Description of Artificial Sequence: Synthetic oligonucleotide
  misc_feature 1..20: note = Target: FXN; (-) strand; PAM type: YTN; PAM sequence: TTT
  source 1..20: mol_type = other DNA
aaaagagaattttatttctg

SEQ ID NO: 22790 - DNA, 20 bp, synthetic construct
  misc_feature 1..20: note = Description of Artificial Sequence: Synthetic oligonucleotide
  misc_feature 1..20: note = Target: FXN; (-) strand; PAM type: YTN; PAM sequence: TTT
  source 1..20: mol_type = other DNA
taaaagagaattttatttct

SEQ ID NO: 22791 - DNA, 20 bp, synthetic construct
  misc_feature 1..20: note = Description of Artificial Sequence: Synthetic oligonucleotide
  misc_feature 1..20: note = Target: FXN; (-) strand; PAM type: YTN; PAM sequence: TTG
  source 1..20: mol_type = other DNA
atagattttaaaagagaatt

SEQ ID NO: 22792 - DNA, 20 bp, synthetic construct
  misc_feature 1..20: note = Description of Artificial Sequence: Synthetic oligonucleotide
  misc_feature 1..20: note = Target: FXN; (-) strand; PAM type: YTN; PAM sequence: TTG
  source 1..20: mol_type = other DNA
ttgatagattttaaaagaga

SEQ ID NO: 22793 - DNA, 20 bp, synthetic construct
  misc_feature 1..20: note = Description of Artificial Sequence: Synthetic oligonucleotide
  misc_feature 1..20: note = Target: FXN; (-) strand; PAM type: YTN; PAM sequence: CTA
  source 1..20: mol_type = other DNA
ttgttgatagattttaaaag

SEQ ID NO: 22794 - DNA, 20 bp, synthetic construct
  misc_feature 1..20: note = Description of Artificial Sequence: Synthetic oligonucleotide
  misc_feature 1..20: note = Target: FXN; (-) strand; PAM type: YTN; PAM sequence: TTG
  source 1..20: mol_type = other DNA
cctattgttgatagatttta

SEQ ID NO: 22795 - DNA, 20 bp, synthetic construct
  misc_feature 1..20: note = Description of Artificial Sequence: Synthetic oligonucleotide
  misc_feature 1..20: note = Target: FXN; (-) strand; PAM type: YTN; PAM sequence: CTT
  source 1..20: mol_type = other DNA
gcctattgttgatagatttt

SEQ ID NO: 22796 - DNA, 20 bp, synthetic construct
  misc_feature 1..20: note = Description of Artificial Sequence: Synthetic oligonucleotide
  misc_feature 1..20: note = Target: FXN; (-) strand; PAM type: YTN; PAM sequence: CTG
  source 1..20: mol_type = other DNA
agacgacaggcgtgagccac

SEQ ID NO: 22797 - DNA, 20 bp, synthetic construct
  misc_feature 1..20: note = Description of Artificial Sequence: Synthetic oligonucleotide
  misc_feature 1..20: note = Target: FXN; (-) strand; PAM type: YTN; PAM sequence: CTC
  source 1..20: mol_type = other DNA
acaaagtgctgagacgacag

SEQ ID NO: 22798 - DNA, 20 bp, synthetic construct
  misc_feature 1..20: note = Description of Artificial Sequence: Synthetic oligonucleotide
  misc_feature 1..20: note = Target: FXN; (-) strand; PAM type: YTN; PAM sequence: CTG
  source 1..20: mol_type = other DNA
ggcctcacaaagtgctgaga

SEQ ID NO: 22799 - DNA, 20 bp, synthetic construct
  misc_feature 1..20: note = Description of Artificial Sequence: Synthetic oligonucleotide
  misc_feature 1..20: note = Target: FXN; (-) strand; PAM type: YTN; PAM sequence: CTG
  source 1..20: mol_type = other DNA
cccgcctgggcctcacaaag

SEQ ID NO: 22800 - DNA, 20 bp, synthetic construct
  misc_feature 1..20: note = Description of Artificial Sequence: Synthetic oligonucleotide
  misc_feature 1..20: note = Target: FXN; (-) strand; PAM type: YTN; PAM sequence: CTC
  source 1..20: mol_type = other DNA
aaacgatctgcccgcctggg

SEQ ID NO: 22801 - DNA, 20 bp, synthetic construct
  misc_feature 1..20: note = Description of Artificial Sequence: Synthetic oligonucleotide
  misc_feature 1..20: note = Target: FXN; (-) strand; PAM type: YTN; PAM sequence: CTA
  source 1..20: mol_type = other DNA
ggctcaaacgatctgcccgc

SEQ ID NO: 22802 - DNA, 20 bp, synthetic construct
  misc_feature 1..20: note = Description of Artificial Sequence: Synthetic oligonucleotide
  misc_feature 1..20: note = Target: FXN; (-) strand; PAM type: YTN; PAM sequence: TTC
  source 1..20: mol_type = other DNA
taggctcaaacgatctgccc

SEQ ID NO: 22803 - DNA, 20 bp, synthetic construct
  misc_feature 1..20: note = Description of Artificial Sequence: Synthetic oligonucleotide
  misc_feature 1..20: note = Target: FXN; (-) strand; PAM type: YTN; PAM sequence: CTT
  source 1..20: mol_type = other DNA
ctaggctcaaacgatctgcc

SEQ ID NO: 22804 - DNA, 20 bp, synthetic construct
  misc_feature 1..20: note = Description of Artificial Sequence: Synthetic oligonucleotide
  misc_feature 1..20: note = Target: FXN; (-) strand; PAM type: YTN; PAM sequence: TTG
  source 1..20: mol_type = other DNA
aacttctaggctcaaacgat

SEQ ID NO: 22805 - DNA, 20 bp, synthetic construct
  misc_feature 1..20: note = Description of Artificial Sequence: Synthetic oligonucleotide
  misc_feature 1..20: note = Target: FXN; (-) strand; PAM type: YTN; PAM sequence: CTT
  source 1..20: mol_type = other DNA
gaacttctaggctcaaacga

SEQ ID NO: 22806 - DNA, 20 bp, synthetic construct
  misc_feature 1..20: note = Description of Artificial Sequence: Synthetic oligonucleotide
  misc_feature 1..20: note = Target: FXN; (-) strand; PAM type: YTN; PAM sequence: TTG
  source 1..20: mol_type = other DNA
cccagggtggtcttgaactt

SEQ ID NO: 22807 - DNA, 20 bp, synthetic construct
  misc_feature 1..20: note = Description of Artificial Sequence: Synthetic oligonucleotide
  misc_feature 1..20: note = Target: FXN; (-) strand; PAM type: YTN; PAM sequence: CTA
  source 1..20: mol_type = other DNA
tgttgcccagggtggtcttg

SEQ ID NO: 22808 - DNA, 20 bp, synthetic construct
  misc_feature 1..20: note = Description of Artificial Sequence: Synthetic oligonucleotide
  misc_feature 1..20: note = Target: FXN; (-) strand; PAM type: YTN; PAM sequence: TTC
  source 1..20: mol_type = other DNA
gctatgttgcccagggtggt

SEQ ID NO: 22809 - DNA, 20 bp, synthetic construct
  misc_feature 1..20: note = Description of Artificial Sequence: Synthetic oligonucleotide
  misc_feature 1..20: note = Target: FXN; (-) strand; PAM type: YTN; PAM sequence: TTT
  source 1..20: mol_type = other DNA
cgctatgttgcccagggtgg

SEQ ID NO: 22810 - DNA, 20 bp, synthetic construct
  misc_feature 1..20: note = Description of Artificial Sequence: Synthetic oligonucleotide
  misc_feature 1..20: note = Target: FXN; (-) strand; PAM type: YTN; PAM sequence: TTG
  source 1..20: mol_type = other DNA
tagaaagggggtttcgctat

SEQ ID NO: 22811 - DNA, 20 bp, synthetic construct
  misc_feature 1..20: note = Description of Artificial Sequence: Synthetic oligonucleotide
  misc_feature 1..20: note = Target: FXN; (-) strand; PAM type: YTN; PAM sequence: TTT
  source 1..20: mol_type = other DNA
gtagaaagggggtttcgcta

SEQ ID NO: 22812 - DNA, 20 bp, synthetic construct
  misc_feature 1..20: note = Description of Artificial Sequence: Synthetic oligonucleotide
  misc_feature 1..20: note = Target: FXN; (-) strand; PAM type: YTN; PAM sequence: TTT
  source 1..20: mol_type = other DNA
tgtagaaagggggtttcgct

SEQ ID NO: 22813 - DNA, 20 bp, synthetic construct
  misc_feature 1..20: note = Description of Artificial Sequence: Synthetic oligonucleotide
  misc_feature 1..20: note = Target: FXN; (-) strand; PAM type: YTN; PAM sequence: TTT
  source 1..20: mol_type = other DNA
ttgtagaaagggggtttcgc

SEQ ID NO: 22814 - DNA, 20 bp, synthetic construct
  misc_feature 1..20: note = Description of Artificial Sequence: Synthetic oligonucleotide
  misc_feature 1..20: note = Target: FXN; (-) strand; PAM type: YTN; PAM sequence: TTT
  source 1..20: mol_type = other DNA
tttgtagaaagggggtttcg

SEQ ID NO: 22815 - DNA, 20 bp, synthetic construct
  misc_feature 1..20: note = Description of Artificial Sequence: Synthetic oligonucleotide
  misc_feature 1..20: note = Target: FXN; (-) strand; PAM type: YTN; PAM sequence: TTG
  source 1..20: mol_type = other DNA
tattttttgtagaaaggggg

SEQ ID NO: 22816 - DNA, 20 bp, synthetic construct
  misc_feature 1..20: note = Description of Artificial Sequence: Synthetic oligonucleotide
  misc_feature 1..20: note = Target: FXN; (-) strand; PAM type: YTN; PAM sequence: TTT
  source 1..20: mol_type = other DNA
gtattttttgtagaaagggg

SEQ ID NO: 22817 - DNA, 20 bp, synthetic construct
  misc_feature 1..20: note = Description of Artificial Sequence: Synthetic oligonucleotide
  misc_feature 1..20: note = Target: FXN; (-) strand; PAM type: YTN; PAM sequence: TTT
  source 1..20: mol_type = other DNA
tgtattttttgtagaaaggg

SEQ ID NO: 22818 - DNA, 20 bp, synthetic construct
  misc_feature 1..20: note = Description of Artificial Sequence: Synthetic oligonucleotide
  misc_feature 1..20: note = Target: FXN; (-) strand; PAM type: YTN; PAM sequence: TTT
  source 1..20: mol_type = other DNA
ttgtattttttgtagaaagg

SEQ ID NO: 22819 - DNA, 20 bp, synthetic construct
  misc_feature 1..20: note = Description of Artificial Sequence: Synthetic oligonucleotide
  misc_feature 1..20: note = Target: FXN; (-) strand; PAM type: YTN; PAM sequence: CTA
  source 1..20: mol_type = other DNA
gtttttgtattttttgtaga

SEQ ID NO: 22820 - DNA, 20 bp, synthetic construct
  misc_feature 1..20: note = Description of Artificial Sequence: Synthetic oligonucleotide
  misc_feature 1..20: note = Target: FXN; (-) strand; PAM type: YTN; PAM sequence: CTA
  source 1..20: mol_type = other DNA
caggtgtgcaccaccacacc

SEQ ID NO: 22821 - DNA, 20 bp, synthetic construct
  misc_feature 1..20: note = Description of Artificial Sequence: Synthetic oligonucleotide
  misc_feature 1..20: note = Target: FXN; (-) strand; PAM type: YTN; PAM sequence: CTG
  source 1..20: mol_type = other DNA
ggactacaggtgtgcaccac

SEQ ID NO: 22822 - DNA, 20 bp, synthetic construct
  misc_feature 1..20: note = Description of Artificial Sequence: Synthetic oligonucleotide
  misc_feature 1..20: note = Target: FXN; (-) strand; PAM type: YTN; PAM sequence: TTC
  source 1..20: mol_type = other DNA
caagtagctgggactacagg

SEQ ID NO: 22823 - DNA, 20 bp, synthetic construct
  misc_feature 1..20: note = Description of Artificial Sequence: Synthetic oligonucleotide
  misc_feature 1..20: note = Target: FXN; (-) strand; PAM type: YTN; PAM sequence: CTT
  source 1..20: mol_type = other DNA
ccaagtagctgggactacag

SEQ ID NO: 22824 - DNA, 20 bp, synthetic construct
  misc_feature 1..20: note = Description of Artificial Sequence: Synthetic oligonucleotide
  misc_feature 1..20: note = Target: FXN; (-) strand; PAM type: YTN; PAM sequence: TTC
  source 1..20: mol_type = other DNA
agccttccaagtagctggga

SEQ ID NO: 22825 - DNA, 20 bp, synthetic construct
  misc_feature 1..20: note = Description of Artificial Sequence: Synthetic oligonucleotide
  misc_feature 1..20: note = Target: FXN; (-) strand; PAM type: YTN; PAM sequence: TTT
  source 1..20: mol_type = other DNA
cagccttccaagtagctggg

SEQ ID NO: 22826 - DNA, 20 bp, synthetic construct
  misc_feature 1..20: note = Description of Artificial Sequence: Synthetic oligonucleotide
  misc_feature 1..20: note = Target: FXN; (-) strand; PAM type: YTN; PAM sequence: TTC
  source 1..20: mol_type = other DNA
ccatttcagccttccaagta

SEQ ID NO: 22827 - DNA, 20 bp, synthetic construct
  misc_feature 1..20: note = Description of Artificial Sequence: Synthetic oligonucleotide
  misc_feature 1..20: note = Target: FXN; (-) strand; PAM type: YTN; PAM sequence: CTT
  source 1..20: mol_type = other DNA
cccatttcagccttccaagt

SEQ ID NO: 22828 - DNA, 20 bp, synthetic construct
  misc_feature 1..20: note = Description of Artificial Sequence: Synthetic oligonucleotide
  misc_feature 1..20: note = Target: FXN; (-) strand; PAM type: YTN; PAM sequence: CTC
  source 1..20: mol_type = other DNA
aagcagtcttcccatttcag

SEQ ID NO: 22829 - DNA, 20 bp, synthetic construct
  misc_feature 1..20: note = Description of Artificial Sequence: Synthetic oligonucleotide
  misc_feature 1..20: note = Target: FXN; (-) strand; PAM type: YTN; PAM sequence: CTC
  source 1..20: mol_type = other DNA
ccgggctcaagcagtcttcc

SEQ ID NO: 22830 - DNA, 20 bp, synthetic construct
  misc_feature 1..20: note = Description of Artificial Sequence: Synthetic oligonucleotide
  misc_feature 1..20: note = Target: FXN; (-) strand; PAM type: YTN; PAM sequence: CTC
  source 1..20: mol_type = other DNA
cctcccgggctcaagcagtc

SEQ ID NO: 22831 - DNA, 20 bp, synthetic construct
  misc_feature 1..20: note = Description of Artificial Sequence: Synthetic oligonucleotide
  misc_feature 1..20: note = Target: FXN; (-) strand; PAM type: YTN; PAM sequence: TTC
  source 1..20: mol_type = other DNA
tccctcccgggctcaagcag

SEQ ID NO: 22832 - DNA, 20 bp, synthetic construct
  misc_feature 1..20: note = Description of Artificial Sequence: Synthetic oligonucleotide
  misc_feature 1..20: note = Target: FXN; (-) strand; PAM type: YTN; PAM sequence: CTT
  source 1..20: mol_type = other DNA
ctccctcccgggctcaagca

SEQ ID NO: 22833 - DNA, 20 bp, synthetic construct
  misc_feature 1..20: note = Description of Artificial Sequence: Synthetic oligonucleotide
  misc_feature 1..20: note = Target: FXN; (-) strand; PAM type: YTN; PAM sequence: CTG
  source 1..20: mol_type = other DNA
caacttctccctcccgggct

SEQ ID NO: 22834 - DNA, 20 bp, synthetic construct
  misc_feature 1..20: note = Description of Artificial Sequence: Synthetic oligonucleotide
  misc_feature 1..20: note = Target: FXN; (-) strand; PAM type: YTN; PAM sequence: TTA
  source 1..20: mol_type = other DNA
ctgcaacttctccctcccgg

SEQ ID NO: 22835 - DNA, 20 bp, synthetic construct
  misc_feature 1..20: note = Description of Artificial Sequence: Synthetic oligonucleotide
  misc_feature 1..20: note = Target: FXN; (-) strand; PAM type: YTN; PAM sequence: CTT
  source 1..20: mol_type = other DNA
actgcaacttctccctcccg

SEQ ID NO: 22836 - DNA, 20 bp, synthetic construct
  misc_feature 1..20: note = Description of Artificial Sequence: Synthetic oligonucleotide
  misc_feature 1..20: note = Target: FXN; (-) strand; PAM type: YTN; PAM sequence: CTG
  source 1..20: mol_type = other DNA
gcttactgcaacttctccct

SEQ ID NO: 22837 - DNA, 20 bp, synthetic construct
  misc_feature 1..20: note = Description of Artificial Sequence: Synthetic oligonucleotide
  misc_feature 1..20: note = Target: FXN; (-) strand; PAM type: YTN; PAM sequence: CTG
  source 1..20: mol_type = other DNA
gagtgcagtggtgtggtcct

SEQ ID NO: 22838 - DNA, 20 bp, synthetic construct
  misc_feature 1..20: note = Description of Artificial Sequence: Synthetic oligonucleotide
  misc_feature 1..20: note = Target: FXN; (-) strand; PAM type: YTN; PAM sequence: TTG
  source 1..20: mol_type = other DNA
cccaggctggagtgcagtgg

SEQ ID NO: 22839 - DNA, 20 bp, synthetic construct
  misc_feature 1..20: note = Description of Artificial Sequence: Synthetic oligonucleotide
  misc_feature 1..20: note = Target: FXN; (-) strand; PAM type: YTN; PAM sequence: CTG
  source 1..20: mol_type = other DNA
ttgcccaggctggagtgcag

SEQ ID NO: 22840 - DNA, 20 bp, synthetic construct
  misc_feature 1..20: note = Description of Artificial Sequence: Synthetic oligonucleotide
  misc_feature 1..20: note = Target: FXN; (-) strand; PAM type: YTN; PAM sequence: CTC
  source 1..20: mol_type = other DNA
tgttgcccaggctggagtgc

SEQ ID NO: 22841 - DNA, 20 bp, synthetic construct
  misc_feature 1..20: note = Description of Artificial Sequence: Synthetic oligonucleotide
  misc_feature 1..20: note = Target: FXN; (-) strand; PAM type: YTN; PAM sequence: CTC
  source 1..20: mol_type = other DNA
actctgttgcccaggctgga

SEQ ID NO: 22842 - DNA, 20 bp, synthetic construct
  misc_feature 1..20: note = Description of Artificial Sequence: Synthetic oligonucleotide
  misc_feature 1..20: note = Target: FXN; (-) strand; PAM type: YTN; PAM sequence: TTG
  source 1..20: mol_type = other DNA
agacagagtctcactctgtt

SEQ ID NO: 22843 - DNA, 20 bp, synthetic construct
  misc_feature 1..20: note = Description of Artificial Sequence: Synthetic oligonucleotide
  misc_feature 1..20: note = Target: FXN; (-) strand; PAM type: YTN; PAM sequence: TTT
  source 1..20: mol_type = other DNA
gagacagagtctcactctgt

SEQ ID NO: 22844 - DNA, 20 bp, synthetic construct
  misc_feature 1..20: note = Description of Artificial Sequence: Synthetic oligonucleotide
  misc_feature 1..20: note = Target: FXN; (-) strand; PAM type: YTN; PAM sequence: TTG
  source 1..20: mol_type = other DNA
tttgagacagagtctcactc

SEQ ID NO: 22845 - DNA, 20 bp, synthetic construct
  misc_feature 1..20: note = Description of Artificial Sequence: Synthetic oligonucleotide
  misc_feature 1..20: note = Target: FXN; (-) strand; PAM type: YTN; PAM sequence: TTT
  source 1..20: mol_type = other DNA
gtttgagacagagtctcact

SEQ ID NO: 22846 - DNA, 20 bp, synthetic construct
  misc_feature 1..20: note = Description of Artificial Sequence: Synthetic oligonucleotide
  misc_feature 1..20: note = Target: FXN; (-) strand; PAM type: YTN; PAM sequence: TTG
  source 1..20: mol_type = other DNA
tttgtttgagacagagtctc

SEQ ID NO: 22847 - DNA, 20 bp, synthetic construct
  misc_feature 1..20: note = Description of Artificial Sequence: Synthetic oligonucleotide
  misc_feature 1..20: note = Target: FXN; (-) strand; PAM type: YTN; PAM sequence: TTT
  source 1..20: mol_type = other DNA
gtttgtttgagacagagtct

SEQ ID NO: 22848 - DNA, 20 bp, synthetic construct
  misc_feature 1..20: note = Description of Artificial Sequence: Synthetic oligonucleotide
  misc_feature 1..20: note = Target: FXN; (-) strand; PAM type: YTN; PAM sequence: TTA
  source 1..20: mol_type = other DNA
tttgtttgtttgagacagag

SEQ ID NO: 22849 - DNA, 20 bp, synthetic construct
  misc_feature 1..20: note = Description of Artificial Sequence: Synthetic oligonucleotide
  misc_feature 1..20: note = Target: FXN; (-) strand; PAM type: YTN; PAM sequence: TTT
  source 1..20: mol_type = other DNA
atttgtttgtttgagacaga

SEQ ID NO: 22850 - DNA, 20 bp, synthetic construct
  misc_feature 1..20: note = Description of Artificial Sequence: Synthetic oligonucleotide
  misc_feature 1..20: note = Target: FXN; (-) strand; PAM type: YTN; PAM sequence: CTC
  source 1..20: mol_type = other DNA
atttatttgtttgtttgaga

SEQ ID NO: 22851 - DNA, 20 bp, synthetic construct
  misc_feature 1..20: note = Description of Artificial Sequence: Synthetic oligonucleotide
  misc_feature 1..20: note = Target: FXN; (-) strand; PAM type: YTN; PAM sequence: CTC
  source 1..20: mol_type = other DNA
gtgatccacccgcctcattt

SEQ ID NO: 22852 - DNA, 20 bp, synthetic construct
  misc_feature 1..20: note = Description of Artificial Sequence: Synthetic oligonucleotide
  misc_feature 1..20: note = Target: FXN; (-) strand; PAM type: YTN; PAM sequence: CTG
  source 1..20: mol_type = other DNA
acctcgtgatccacccgcct

SEQ ID NO: 22853 - DNA, 20 bp, synthetic construct
  misc_feature 1..20: note = Description of Artificial Sequence: Synthetic oligonucleotide
  misc_feature 1..20: note = Target: FXN; (-) strand; PAM type: YTN; PAM sequence: CTA
  source 1..20: mol_type = other DNA
ctgacctcgtgatccacccg

SEQ ID NO: 22854 - DNA, 20 bp, synthetic construct
  misc_feature 1..20: note = Description of Artificial Sequence: Synthetic oligonucleotide
  misc_feature 1..20: note = Target: FXN; (-) strand; PAM type: YTN; PAM sequence: CTC
  source 1..20: mol_type = other DNA
gatctactgacctcgtgatc

SEQ ID NO: 22855 - DNA, 20 bp, synthetic construct
  misc_feature 1..20: note = Description of Artificial Sequence: Synthetic oligonucleotide
  misc_feature 1..20: note = Target: FXN; (-) strand; PAM type: YTN; PAM sequence: TTA
  source 1..20: mol_type = other DNA
gccaggatggtctcgatcta

SEQ ID NO: 22856 - DNA, 20 bp, synthetic construct
  misc_feature 1..20: note = Description of Artificial Sequence: Synthetic oligonucleotide
  misc_feature 1..20: note = Target: FXN; (-) strand; PAM type: YTN; PAM sequence: TTC
  source 1..20: mol_type = other DNA
accgtgttagccaggatggt

SEQ ID NO: 22857 - DNA, 20 bp, synthetic construct
  misc_feature 1..20: note = Description of Artificial Sequence: Synthetic oligonucleotide
  misc_feature 1..20: note = Target: FXN; (-) strand; PAM type: YTN; PAM sequence: TTT
  source 1..20: mol_type = other DNA
caccgtgttagccaggatgg

SEQ ID NO: 22858 - DNA, 20 bp, synthetic construct
  misc_feature 1..20: note = Description of Artificial Sequence: Synthetic oligonucleotide
  misc_feature 1..20: note = Target: FXN; (-) strand; PAM type: YTN; PAM sequence: TTA
  source 1..20: mol_type = other DNA
gtagagacgggtttcaccgt

SEQ ID NO: 22859 - DNA, 20 bp, synthetic construct
  misc_feature 1..20: note = Description of Artificial Sequence: Synthetic oligonucleotide
  misc_feature 1..20: note = Target: FXN; (-) strand; PAM type: YTN; PAM sequence: TTT
  source 1..20: mol_type = other DNA
agtagagacgggtttcaccg

SEQ ID NO: 22860 - DNA, 20 bp, synthetic construct
  misc_feature 1..20: note = Description of Artificial Sequence: Synthetic oligonucleotide
  misc_feature 1..20: note = Target: FXN; (-) strand; PAM type: YTN; PAM sequence: TTT
  source 1..20: mol_type = other DNA
tagtagagacgggtttcacc

SEQ ID NO: 22861 - DNA, 20 bp, synthetic construct
  misc_feature 1..20: note = Description of Artificial Sequence: Synthetic oligonucleotide
  misc_feature 1..20: note = Target: FXN; (-) strand; PAM type: YTN; PAM sequence: TTT
  source 1..20: mol_type = other DNA
ttagtagagacgggtttcac

SEQ ID NO: 22862 - DNA, 20 bp, synthetic construct
  misc_feature 1..20: note = Description of Artificial Sequence: Synthetic oligonucleotide
  misc_feature 1..20: note = Target: FXN; (-) strand; PAM type: YTN; PAM sequence: TTT
  source 1..20: mol_type = other DNA
tttagtagagacgggtttca

SEQ ID NO: 22863 - DNA, 20 bp, synthetic construct
  misc_feature 1..20: note = Description of Artificial Sequence: Synthetic oligonucleotide
  misc_feature 1..20: note = Target: FXN; (-) strand; PAM type: YTN; PAM sequence: TTT
  source 1..20: mol_type = other DNA
ttttagtagagacgggtttc

SEQ ID NO: 22864 - DNA, 20 bp, synthetic construct
  misc_feature 1..20: note = Description of Artificial Sequence: Synthetic oligonucleotide
  misc_feature 1..20: note = Target: FXN; (-) strand; PAM type: YTN; PAM sequence: TTT
  source 1..20: mol_type = other DNA
tttttagtagagacgggttt

SEQ ID NO: 22865 - DNA, 20 bp, synthetic construct
  misc_feature 1..20: note = Description of Artificial Sequence: Synthetic oligonucleotide
  misc_feature 1..20: note = Target: FXN; (-) strand; PAM type: YTN; PAM sequence: TTT
  source 1..20: mol_type = other DNA
ttttttagtagagacgggtt

SEQ ID NO: 22866 - DNA, 20 bp, synthetic construct
  misc_feature 1..20: note = Description of Artificial Sequence: Synthetic oligonucleotide
  misc_feature 1..20: note = Target: FXN; (-) strand; PAM type: YTN; PAM sequence: TTT
  source 1..20: mol_type = other DNA
tttttttagtagagacgggt

SEQ ID NO: 22867 - DNA, 20 bp, synthetic construct
  misc_feature 1..20: note = Description of Artificial Sequence: Synthetic oligonucleotide
  misc_feature 1..20: note = Target: FXN; (-) strand; PAM type: YTN; PAM sequence: TTT
  source 1..20: mol_type = other DNA
ttttttttagtagagacggg

SEQ ID NO: 22868 - DNA, 20 bp, synthetic construct
  misc_feature 1..20: note = Description of Artificial Sequence: Synthetic oligonucleotide
  misc_feature 1..20: note = Target: FXN; (-) strand; PAM type: YTN; PAM sequence: TTT
  source 1..20: mol_type = other DNA
tttttttttagtagagacgg

SEQ ID NO: 22869 - DNA, 20 bp, synthetic construct
  misc_feature 1..20: note = Description of Artificial Sequence: Synthetic oligonucleotide
  misc_feature 1..20: note = Target: FXN; (-) strand; PAM type: YTN; PAM sequence: TTT
  source 1..20: mol_type = other DNA
ttttttttttagtagagacg

SEQ ID NO: 22870 - DNA, 20 bp, synthetic construct
  misc_feature 1..20: note = Description of Artificial Sequence: Synthetic oligonucleotide
  misc_feature 1..20: note = Target: FXN; (-) strand; PAM type: YTN; PAM sequence: TTT
  source 1..20: mol_type = other DNA
tttttttttttagtagagac

SEQ ID NO: 22871 - DNA, 20 bp, synthetic construct
  misc_feature 1..20: note = Description of Artificial Sequence: Synthetic oligonucleotide
  misc_feature 1..20: note = Target: FXN; (-) strand; PAM type: YTN; PAM sequence: TTT
  source 1..20: mol_type = other DNA
ttttttttttttagtagaga

SEQ ID NO: 22872 - DNA, 20 bp, synthetic construct
  misc_feature 1..20: note = Description of Artificial Sequence: Synthetic oligonucleotide
  misc_feature 1..20: note = Target: FXN; (-) strand; PAM type: YTN; PAM sequence: TTG
  source 1..20: mol_type = other DNA
tatttttttttttttttagt

SEQ ID NO: 22873 - DNA, 20 bp, synthetic construct
  misc_feature 1..20: note = Description of Artificial Sequence: Synthetic oligonucleotide
  misc_feature 1..20: note = Target: FXN; (-) strand; PAM type: YTN; PAM sequence: TTT
  source 1..20: mol_type = other DNA
gtatttttttttttttttag

SEQ ID NO: 22874 - DNA, 20 bp, synthetic construct
  misc_feature 1..20: note = Description of Artificial Sequence: Synthetic oligonucleotide
  misc_feature 1..20: note = Target: FXN; (-) strand; PAM type: YTN; PAM sequence: TTT
  source 1..20: mol_type = other DNA
tgtattttttttttttttta

SEQ ID NO: 22875 - DNA, 20 bp, synthetic construct
  misc_feature 1..20: note = Description of Artificial Sequence: Synthetic oligonucleotide
  misc_feature 1..20: note = Target: FXN; (-) strand; PAM type: YTN; PAM sequence: TTT
  source 1..20: mol_type = other DNA
ttgtattttttttttttttt

SEQ ID NO: 22876 - DNA, 20 bp, synthetic construct
  misc_feature 1..20: note = Description of Artificial Sequence: Synthetic oligonucleotide
  misc_feature 1..20: note = Target: FXN; (-) strand; PAM type: YTN; PAM sequence: TTT
  source 1..20: mol_type = other DNA
tttgtatttttttttttttt

SEQ ID NO: 22877 - DNA, 20 bp, synthetic construct
  misc_feature 1..20: note = Description of Artificial Sequence: Synthetic oligonucleotide
  misc_feature 1..20: note = Target: FXN; (-) strand; PAM type: YTN; PAM sequence: CTA
  source 1..20: mol_type = other DNA
attttttgtatttttttttt

SEQ ID NO: 22878 - DNA, 20 bp, synthetic construct
  misc_feature 1..20: note = Description of Artificial Sequence: Synthetic oligonucleotide
  misc_feature 1..20: note = Target: FXN; (-) strand; PAM type: YTN; PAM sequence: CTG
  source 1..20: mol_type = other DNA
gctaattttttgtatttttt

SEQ ID NO: 22879 - DNA, 20 bp, synthetic construct
  misc_feature 1..20: note = Description of Artificial Sequence: Synthetic oligonucleotide
  misc_feature 1..20: note = Target: FXN; (-) strand; PAM type: YTN; PAM sequence: CTA
  source 1..20: mol_type = other DNA
caggcgcccgccaccatgcc

SEQ ID NO: 22880 - DNA, 20 bp, synthetic construct
  misc_feature 1..20: note = Description of Artificial Sequence: Synthetic oligonucleotide
  misc_feature 1..20: note = Target: FXN; (-) strand; PAM type: YTN; PAM sequence: CTG
  source 1..20: mol_type = other DNA
ggactacaggcgcccgccac

SEQ ID NO: 22881 - DNA, 20 bp, synthetic construct
  misc_feature 1..20: note = Description of Artificial Sequence: Synthetic oligonucleotide
  misc_feature 1..20: note = Target: FXN; (-) strand; PAM type: YTN; PAM sequence: CTC
  source 1..20: mol_type = other DNA
ccgagtaactgggactacag

SEQ ID NO: 22882 - DNA, 20 bp, synthetic construct
  misc_feature 1..20: note = Description of Artificial Sequence: Synthetic oligonucleotide
  misc_feature 1..20: note = Target: FXN; (-) strand; PAM type: YTN; PAM sequence: CTC
  source 1..20: mol_type = other DNA
agcctcccgagtaactggga

SEQ ID NO: 22883 - DNA, 20 bp, synthetic construct
  misc_feature 1..20: note = Description of Artificial Sequence: Synthetic oligonucleotide
  misc_feature 1..20: note = Target: FXN; (-) strand; PAM type: YTN; PAM sequence: CTG
  source 1..20: mol_type = other DNA
cctcagcctcccgagtaact

SEQ ID NO: 22884 - DNA, 20 bp, synthetic construct
  misc_feature 1..20: note = Description of Artificial Sequence: Synthetic oligonucleotide
  misc_feature 1..20: note = Target: FXN; (-) strand; PAM type: YTN; PAM sequence: CTC
  source 1..20: mol_type = other DNA
ctgcctcagcctcccgagta

SEQ ID NO: 22885 - DNA, 20 bp, synthetic construct
  misc_feature 1..20: note = Description of Artificial Sequence: Synthetic oligonucleotide
  misc_feature 1..20: note = Target: FXN; (-) strand; PAM type: YTN; PAM sequence: TTC
  source 1..20: mol_type = other DNA
tcctgcctcagcctcccgag

SEQ ID NO: 22886 - DNA, 20 bp, synthetic construct
  misc_feature 1..20: note = Description of Artificial Sequence: Synthetic oligonucleotide
  misc_feature 1..20: note = Target: FXN; (-) strand; PAM type: YTN; PAM sequence: TTC
  source 1..20: mol_type = other DNA
acgccattctcctgcctcag

SEQ ID NO: 22887 - DNA, 20 bp, synthetic construct
  misc_feature 1..20: note = Description of Artificial Sequence: Synthetic oligonucleotide
  misc_feature 1..20: note = Target: FXN; (-) strand; PAM type: YTN; PAM sequence: TTT
  source 1..20: mol_type = other DNA
cacgccattctcctgcctca

SEQ ID NO: 22888 - DNA, 20 bp, synthetic construct
  misc_feature 1..20: note = Description of Artificial Sequence: Synthetic oligonucleotide
  misc_feature 1..20: note = Target: FXN; (-) strand; PAM type: YTN; PAM sequence: CTC
  source 1..20: mol_type = other DNA
ccggtttcacgccattctcc

SEQ ID NO: 22889 - DNA, 20 bp, synthetic construct
  misc_feature 1..20: note = Description of Artificial Sequence: Synthetic oligonucleotide
  misc_feature 1..20: note = Target: FXN; (-) strand; PAM type: YTN; PAM sequence: CTG
  source 1..20: mol_type = other DNA
cctcccggtttcacgccatt

SEQ ID NO: 22890 - DNA, 20 bp, synthetic construct
  misc_feature 1..20: note = Description of Artificial Sequence: Synthetic oligonucleotide
  misc_feature 1..20: note = Target: FXN; (-) strand; PAM type: YTN; PAM sequence: CTC
  source 1..20: mol_type = other DNA
tgcctcccggtttcacgcca

SEQ ID NO: 22891 - DNA, 20 bp, synthetic construct
  misc_feature 1..20: note = Description of Artificial Sequence: Synthetic oligonucleotide
  misc_feature 1..20: note = Target: FXN; (-) strand; PAM type: YTN; PAM sequence: CTG
  source 1..20: mol_type = other DNA
caagctctgcctcccggttt

SEQ ID NO: 22892 - DNA, 20 bp, synthetic construct
  misc_feature 1..20: note = Description of Artificial Sequence: Synthetic oligonucleotide
  misc_feature 1..20: note = Target: FXN; (-) strand; PAM type: YTN; PAM sequence: CTC
  source 1..20: mol_type = other DNA
actgcaagctctgcctcccg

SEQ ID NO: 22893 - DNA, 20 bp, synthetic construct
  misc_feature 1..20: note = Description of Artificial Sequence: Synthetic oligonucleotide
  misc_feature 1..20: note = Target: FXN; (-) strand; PAM type: YTN; PAM sequence: CTC
  source 1..20: mol_type = other DNA
ggctcactgcaagctctgcc

SEQ ID NO: 22894 - DNA, 20 bp, synthetic construct
  misc_feature 1..20: note = Description of Artificial Sequence: Synthetic oligonucleotide
  misc_feature 1..20: note = Target: FXN; (-) strand; PAM type: YTN; PAM sequence: CTG
  source 1..20: mol_type = other DNA
gagggcagtggtgcgatctc

SEQ ID NO: 22895 - DNA, 20 bp, synthetic construct
  misc_feature 1..20: note = Description of Artificial Sequence: Synthetic oligonucleotide
  misc_feature 1..20: note = Target: FXN; (-) strand; PAM type: YTN; PAM sequence: CTG
  source 1..20: mol_type = other DNA
tcgcccaggctggagggcag

SEQ ID NO: 22896 - DNA, 20 bp, synthetic construct
  misc_feature 1..20: note = Description of Artificial Sequence: Synthetic oligonucleotide
  misc_feature 1..20: note = Target: FXN; (-) strand; PAM type: YTN; PAM sequence: CTC
  source 1..20: mol_type = other DNA
tgtcgcccaggctggagggc

SEQ ID NO: 22897 - DNA, 20 bp, synthetic construct
  misc_feature 1..20: note = Description of Artificial Sequence: Synthetic oligonucleotide
  misc_feature 1..20: note = Target: FXN; (-) strand; PAM type: YTN; PAM sequence: CTC
  source 1..20: mol_type = other DNA
gctctgtcgcccaggctgga

SEQ ID NO: 22898 - DNA, 20 bp, synthetic construct
  misc_feature 1..20: note = Description of Artificial Sequence: Synthetic oligonucleotide
  misc_feature 1..20: note = Target: FXN; (-) strand; PAM type: YTN; PAM sequence: TTG
  source 1..20: mol_type = other DNA
agacggagtctcgctctgtc

SEQ ID NO: 22899 - DNA, 20 bp, synthetic construct
  misc_feature 1..20: note = Description of Artificial Sequence: Synthetic oligonucleotide
  misc_feature 1..20: note = Target: FXN; (-) strand; PAM type: YTN; PAM sequence: TTG
  source 1..20: mol_type = other DNA
attgagacggagtctcgctc

SEQ ID NO: 22900 - DNA, 20 bp, synthetic construct
  misc_feature 1..20: note = Description of Artificial Sequence: Synthetic oligonucleotide
  misc_feature 1..20: note = Target: FXN; (-) strand; PAM type: YTN; PAM sequence: TTG
  source 1..20: mol_type = other DNA
attgattgagacggagtctc

SEQ ID NO: 22901 - DNA, 20 bp, synthetic construct
  misc_feature 1..20: note = Description of Artificial Sequence: Synthetic oligonucleotide
  misc_feature 1..20: note = Target: FXN; (-) strand; PAM type: YTN; PAM sequence: TTG
  source 1..20: mol_type = other DNA
attgattgattgagacggag

SEQ ID NO: 22902 - DNA, 20 bp, synthetic construct
  misc_feature 1..20: note = Description of Artificial Sequence: Synthetic oligonucleotide
  misc_feature 1..20: note = Target: FXN; (-) strand; PAM type: YTN; PAM sequence: TTG
  source 1..20: mol_type = other DNA
attgattgattgattgagac

SEQ ID NO: 22903 - DNA, 20 bp, synthetic construct
  misc_feature 1..20: note = Description of Artificial Sequence: Synthetic oligonucleotide
  misc_feature 1..20: note = Target: FXN; (-) strand; PAM type: YTN; PAM sequence: TTA
  source 1..20: mol_type = other DNA
ttgattgattgattgattga

SEQ ID NO: 22904 - DNA, 20 bp, synthetic construct
  misc_feature 1..20: note = Description of Artificial Sequence: Synthetic oligonucleotide
  misc_feature 1..20: note = Target: FXN; (-) strand; PAM type: YTN; PAM sequence: TTT
  source 1..20: mol_type = other DNA
attgattgattgattgattg

SEQ ID NO: 22905 - DNA, 20 bp, synthetic construct
  misc_feature 1..20: note = Description of Artificial Sequence: Synthetic oligonucleotide
  misc_feature 1..20: note = Target: FXN; (-) strand; PAM type: YTN; PAM sequence: TTT
  source 1..20: mol_type = other DNA
tattgattgattgattgatt

SEQ ID NO: 22906 - DNA, 20 bp, synthetic construct
  misc_feature 1..20: note = Description of Artificial Sequence: Synthetic oligonucleotide
  misc_feature 1..20: note = Target: FXN; (-) strand; PAM type: YTN; PAM sequence: TTA
  source 1..20: mol_type = other DNA
atagattttattgattgatt

SEQ ID NO: 22907 - DNA, 20 bp, synthetic construct
  misc_feature 1..20: note = Description of Artificial Sequence: Synthetic oligonucleotide
  misc_feature 1..20: note = Target: FXN; (-) strand; PAM type: YTN; PAM sequence: TTG
  source 1..20: mol_type = other DNA
ttaatagattttattgattg

SEQ ID NO: 22908 - DNA, 20 bp, synthetic construct
  misc_feature 1..20: note = Description of Artificial Sequence: Synthetic oligonucleotide
  misc_feature 1..20: note = Target: FXN; (-) strand; PAM type: YTN; PAM sequence: TTA
  source 1..20: mol_type = other DNA
agtgcacaataaatattgtt

SEQ ID NO: 22909 - DNA, 20 bp, synthetic construct
  misc_feature 1..20: note = Description of Artificial Sequence: Synthetic oligonucleotide
  misc_feature 1..20: note = Target: FXN; (-) strand; PAM type: YTN; PAM sequence: CTG
  source 1..20: mol_type = other DNA
ttaagtgcacaataaatatt

SEQ ID NO: 22910 - DNA, 20 bp, synthetic construct
  misc_feature 1..20: note = Description of Artificial Sequence: Synthetic oligonucleotide
  misc_feature 1..20: note = Target: FXN; (-) strand; PAM type: YTN; PAM sequence: TTC
  source 1..20: mol_type = other DNA
ctgttaagtgcacaataaat

SEQ ID NO: 22911 - DNA, 20 bp, synthetic construct
  misc_feature 1..20: note = Description of Artificial Sequence: Synthetic oligonucleotide
  misc_feature 1..20: note = Target: FXN; (-) strand; PAM type: YTN; PAM sequence: TTG
  source 1..20: mol_type = other DNA
gacagggcatgttcctgtta

SEQ ID NO: 22912 - DNA, 20 bp, synthetic construct
  misc_feature 1..20: note = Description of Artificial Sequence: Synthetic oligonucleotide
  misc_feature 1..20: note = Target: FXN; (-) strand; PAM type: YTN; PAM sequence: TTT
  source 1..20: mol_type = other DNA
ggacagggcatgttcctgtt

SEQ ID NO: 22913 - DNA, 20 bp, synthetic construct
  misc_feature 1..20: note = Description of Artificial Sequence: Synthetic oligonucleotide
  misc_feature 1..20: note = Target: FXN; (-) strand; PAM type: YTN; PAM sequence: TTT
  source 1..20: mol_type = other DNA
tggacagggcatgttcctgt

SEQ ID NO: 22914 - DNA, 20 bp, synthetic construct
  misc_feature 1..20: note = Description of Artificial Sequence: Synthetic oligonucleotide
  misc_feature 1..20: note = Target: FXN; (-) strand; PAM type: YTN; PAM sequence: TTT
  source 1..20: mol_type = other DNA
ttggacagggcatgttcctg

SEQ ID NO: 22915 - DNA, 20 bp, synthetic construct
  misc_feature 1..20: note = Description of Artificial Sequence: Synthetic oligonucleotide
  misc_feature 1..20: note = Target: FXN; (-) strand; PAM type: YTN; PAM sequence: TTT
  source 1..20: mol_type = other DNA
tttggacagggcatgttcct

SEQ ID NO: 22916 - DNA, 20 bp, synthetic construct
  misc_feature 1..20: note = Description of Artificial Sequence: Synthetic oligonucleotide
  misc_feature 1..20: note = Target: FXN; (-) strand; PAM type: YTN; PAM sequence: TTT
  source 1..20: mol_type = other DNA
ttttggacagggcatgttcc

SEQ ID NO: 22917 - DNA, 20 bp, synthetic construct
  misc_feature 1..20: note = Description of Artificial Sequence: Synthetic oligonucleotide
  misc_feature 1..20: note = Target: FXN; (-) strand; PAM type: YTN; PAM sequence: TTT
  source 1..20: mol_type = other DNA
tttttggacagggcatgttc

SEQ ID NO: 22918 - DNA, 20 bp, synthetic construct
  misc_feature 1..20: note = Description of Artificial Sequence: Synthetic oligonucleotide
  misc_feature 1..20: note = Target: FXN; (-) strand; PAM type: YTN; PAM sequence: CTG
  source 1..20: mol_type = other DNA
taaagttttttttggacagg

SEQ ID NO: 22919 - DNA, 20 bp, synthetic construct
  misc_feature 1..20: note = Description of Artificial Sequence: Synthetic oligonucleotide
  misc_feature 1..20: note = Target: FXN; (-) strand; PAM type: YTN; PAM sequence: TTA
  source 1..20: mol_type = other DNA
agccctgtaaagtttttttt

SEQ ID NO: 22920 - DNA, 20 bp, synthetic construct
  misc_feature 1..20: note = Description of Artificial Sequence: Synthetic oligonucleotide
  misc_feature 1..20: note = Target: FXN; (-) strand; PAM type: YTN; PAM sequence: TTG
  source 1..20: mol_type = other DNA
tggtaaggataaaatgagtt

SEQ ID NO: 22921 - DNA, 20 bp, synthetic construct
  misc_feature 1..20: note = Description of Artificial Sequence: Synthetic oligonucleotide
  misc_feature 1..20: note = Target: FXN; (-) strand; PAM type: YTN; PAM sequence: TTC
  source 1..20: mol_type = other DNA
ataggattgtggtaaggata

SEQ ID NO: 22922 - DNA, 20 bp, synthetic construct
  misc_feature 1..20: note = Description of Artificial Sequence: Synthetic oligonucleotide
  misc_feature 1..20: note = Target: FXN; (-) strand; PAM type: YTN; PAM sequence: CTT
  source 1..20: mol_type = other DNA
cataggattgtggtaaggat

SEQ ID NO: 22923 - DNA, 20 bp, synthetic construct
  misc_feature 1..20: note = Description of Artificial Sequence: Synthetic oligonucleotide
  misc_feature 1..20: note = Target: FXN; (-) strand; PAM type: YTN; PAM sequence: CTA
  source 1..20: mol_type = other DNA
cttcataggattgtggtaag

SEQ ID NO: 22924 - DNA, 20 bp, synthetic construct
  misc_feature 1..20: note = Description of Artificial Sequence: Synthetic oligonucleotide
  misc_feature 1..20: note = Target: FXN; (-) strand; PAM type: YTN; PAM sequence: TTC
  source 1..20: mol_type = other DNA
ctacttcataggattgtggt

SEQ ID NO: 22925 - DNA, 20 bp, synthetic construct
  misc_feature 1..20: note = Description of Artificial Sequence: Synthetic oligonucleotide
  misc_feature 1..20: note = Target: FXN; (-) strand; PAM type: YTN; PAM sequence: TTA
  source 1..20: mol_type = other DNA
taaaagttcctacttcatag

SEQ ID NO: 22926 - DNA, 20 bp, synthetic construct
  misc_feature 1..20: note = Description of Artificial Sequence: Synthetic oligonucleotide
  misc_feature 1..20: note = Target: FXN; (-) strand; PAM type: YTN; PAM sequence: TTT
  source 1..20: mol_type = other DNA
ataaaagttcctacttcata

SEQ ID NO: 22927 - DNA, 20 bp, synthetic construct
  misc_feature 1..20: note = Description of Artificial Sequence: Synthetic oligonucleotide
  misc_feature 1..20: note = Target: FXN; (-) strand; PAM type: YTN; PAM sequence: TTT
  source 1..20: mol_type = other DNA
tataaaagttcctacttcat

SEQ ID NO: 22928 - DNA, 20 bp, synthetic construct
  misc_feature 1..20: note = Description of Artificial Sequence: Synthetic oligonucleotide
  misc_feature 1..20: note = Target: FXN; (-) strand; PAM type: YTN; PAM sequence: TTA
  source 1..20: mol_type = other DNA
taaaatgcgttttataaaag

SEQ ID NO: 22929 - DNA, 20 bp, synthetic construct
  misc_feature 1..20: note = Description of Artificial Sequence: Synthetic oligonucleotide
  misc_feature 1..20: note = Target: FXN; (-) strand; PAM type: YTN; PAM sequence: TTT
  source 1..20: mol_type = other DNA
ataaaatgcgttttataaaa

SEQ ID NO: 22930 - DNA, 20 bp, synthetic construct
  misc_feature 1..20: note = Description of Artificial Sequence: Synthetic oligonucleotide
  misc_feature 1..20: note = Target: FXN; (-) strand; PAM type: YTN; PAM sequence: TTG
  source 1..20: mol_type = other DNA
tttataaaatgcgttttata

SEQ ID NO: 22931 - DNA, 20 bp, synthetic construct
  misc_feature 1..20: note = Description of Artificial Sequence: Synthetic oligonucleotide
  misc_feature 1..20: note = Target: FXN; (-) strand; PAM type: YTN; PAM sequence: CTT
  source 1..20: mol_type = other DNA
gtttataaaatgcgttttat

SEQ ID NO: 22932 - DNA, 20 bp, synthetic construct
  misc_feature 1..20: note = Description of Artificial Sequence: Synthetic oligonucleotide
  misc_feature 1..20: note = Target: FXN; (-) strand; PAM type: YTN; PAM sequence: CTG
  source 1..20: mol_type = other DNA
tgccttgtttataaaatgcg

SEQ ID NO: 22933 - DNA, 20 bp, synthetic construct
  misc_feature 1..20: note = Description of Artificial Sequence: Synthetic oligonucleotide
  misc_feature 1..20: note = Target: FXN; (-) strand; PAM type: YTN; PAM sequence: CTC
  source 1..20: mol_type = other DNA
tgtgccttgtttataaaatg

SEQ ID NO: 22934 - DNA, 20 bp, synthetic construct
  misc_feature 1..20: note = Description of Artificial Sequence: Synthetic oligonucleotide
  misc_feature 1..20: note = Target: FXN; (-) strand; PAM type: YTN; PAM sequence: CTC
  source 1..20: mol_type = other DNA
tctgtgccttgtttataaaa

SEQ ID NO: 22935 - DNA, 20 bp, synthetic construct
  misc_feature 1..20: note = Description of Artificial Sequence: Synthetic oligonucleotide
  misc_feature 1..20: note = Target: FXN; (-) strand; PAM type: YTN; PAM sequence: TTA
  source 1..20: mol_type = other DNA
acctctctgtgccttgttta

SEQ ID NO: 22936 - DNA, 20 bp, synthetic construct
  misc_feature 1..20: note = Description of Artificial Sequence: Synthetic oligonucleotide
  misc_feature 1..20: note = Target: FXN; (-) strand; PAM type: YTN; PAM sequence: TTA
  source 1..20: mol_type = other DNA
attaacctctctgtgccttg

SEQ ID NO: 22937 - DNA, 20 bp, synthetic construct
  misc_feature 1..20: note = Description of Artificial Sequence: Synthetic oligonucleotide
  misc_feature 1..20: note = Target: FXN; (-) strand; PAM type: YTN; PAM sequence: CTG
  source 1..20: mol_type = other DNA
tgtgaccagagggcaagtta

SEQ ID NO: 22938 - DNA, 20 bp, synthetic construct
  misc_feature 1..20: note = Description of Artificial Sequence: Synthetic oligonucleotide
  misc_feature 1..20: note = Target: FXN; (-) strand; PAM type: YTN; PAM sequence: CTA
  source 1..20: mol_type = other DNA
gctgtgtgaccagagggcaa

SEQ ID NO: 22939 - DNA, 20 bp, synthetic construct
  misc_feature 1..20: note = Description of Artificial Sequence: Synthetic oligonucleotide
  misc_feature 1..20: note = Target: FXN; (-) strand; PAM type: YTN; PAM sequence: TTC
  source 1..20: mol_type = other DNA
ctagctgtgtgaccagaggg

SEQ ID NO: 22940 - DNA, 20 bp, synthetic construct
  misc_feature 1..20: note = Description of Artificial Sequence: Synthetic oligonucleotide
  misc_feature 1..20: note = Target: FXN; (-) strand; PAM type: YTN; PAM sequence: CTT
  source 1..20: mol_type = other DNA
cctagctgtgtgaccagagg

SEQ ID NO: 22941 - DNA, 20 bp, synthetic construct
  misc_feature 1..20: note = Description of Artificial Sequence: Synthetic oligonucleotide
  misc_feature 1..20: note = Target: FXN; (-) strand; PAM type: YTN; PAM sequence: CTG
  source 1..20: mol_type = other DNA
cccacttcctagctgtgtga

SEQ ID NO: 22942 - DNA, 20 bp, synthetic construct
  misc_feature 1..20: note = Description of Artificial Sequence: Synthetic oligonucleotide
  misc_feature 1..20: note = Target: FXN; (-) strand; PAM type: YTN; PAM sequence: CTC
  source 1..20: mol_type = other DNA
tgcccacttcctagctgtgt

SEQ ID NO: 22943 - DNA, 20 bp, synthetic construct
  misc_feature 1..20: note = Description of Artificial Sequence: Synthetic oligonucleotide
  misc_feature 1..20: note = Target: FXN; (-) strand; PAM type: YTN; PAM sequence: CTG
  source 1..20: mol_type = other DNA
tactctgcccacttcctagc

SEQ ID NO: 22944 - DNA, 20 bp, synthetic construct
  misc_feature 1..20: note = Description of Artificial Sequence: Synthetic oligonucleotide
  misc_feature 1..20: note = Target: FXN; (-) strand; PAM type: YTN; PAM sequence: TTG
  source 1..20: mol_type = other DNA
tgtaaatctgtactctgccc

SEQ ID NO: 22945 - DNA, 20 bp, synthetic construct
  misc_feature 1..20: note = Description of Artificial Sequence: Synthetic oligonucleotide
  misc_feature 1..20: note = Target: FXN; (-) strand; PAM type: YTN; PAM sequence: CTT
  source 1..20: mol_type = other DNA
gtgtaaatctgtactctgcc

SEQ ID NO: 22946 - DNA, 20 bp, synthetic construct
  misc_feature 1..20: note = Description of Artificial Sequence: Synthetic oligonucleotide
  misc_feature 1..20: note = Target: FXN; (-) strand; PAM type: YTN; PAM sequence: TTG
  source 1..20: mol_type = other DNA
ggtatgtggggccaggagac

SEQ ID NO: 22947 - DNA, 20 bp, synthetic construct
  misc_feature 1..20: note = Description of Artificial Sequence: Synthetic oligonucleotide
  misc_feature 1..20: note = Target: FXN; (-) strand; PAM type: YTN; PAM sequence: TTA
  source 1..20: mol_type = other DNA
cagcagttgggtatgtgggg

SEQ ID NO: 22948 - DNA, 20 bp, synthetic construct
  misc_feature 1..20: note = Description of Artificial Sequence: Synthetic oligonucleotide
  misc_feature 1..20: note = Target: FXN; (-) strand; PAM type: YTN; PAM sequence: TTT
  source 1..20: mol_type = other DNA
acagcagttgggtatgtggg

SEQ ID NO: 22949 - DNA, 20 bp, synthetic construct
  misc_feature 1..20: note = Description of Artificial Sequence: Synthetic oligonucleotide
  misc_feature 1..20: note = Target: FXN; (-) strand; PAM type: YTN; PAM sequence: TTG
  source 1..20: mol_type = other DNA
gccgccggtatgggtttaca

SEQ ID NO: 22950 - DNA, 20 bp, synthetic construct
  misc_feature 1..20: note = Description of Artificial Sequence: Synthetic oligonucleotide
  misc_feature 1..20: note = Target: FXN; (-) strand; PAM type: YTN; PAM sequence: CTT
  source 1..20: mol_type = other DNA
ggccgccggtatgggtttac

SEQ ID NO: 22951 - DNA, 20 bp, synthetic construct
  misc_feature 1..20: note = Description of Artificial Sequence: Synthetic oligonucleotide
  misc_feature 1..20: note = Target: FXN; (-) strand; PAM type: YTN; PAM sequence: CTG
  source 1..20: mol_type = other DNA
cttggccgccggtatgggtt

SEQ ID NO: 22952 - DNA, 20 bp, synthetic construct
  misc_feature 1..20: note = Description of Artificial Sequence: Synthetic oligonucleotide
  misc_feature 1..20: note = Target: FXN; (-) strand; PAM type: YTN; PAM sequence: TTG
  source 1..20: mol_type = other DNA
aggctgcttggccgccggta

SEQ ID NO: 22953 - DNA, 20 bp, synthetic construct
  misc_feature 1..20: note = Description of Artificial Sequence: Synthetic oligonucleotide
  misc_feature 1..20: note = Target: FXN; (-) strand; PAM type: YTN; PAM sequence: CTG
  source 1..20: mol_type = other DNA
ggaagtgggtgcatgcacaa

SEQ ID NO: 22954 - DNA, 20 bp, synthetic construct
  misc_feature 1..20: note = Description of Artificial Sequence: Synthetic oligonucleotide
  misc_feature 1..20: note = Target: FXN; (-) strand; PAM type: YTN; PAM sequence: TTG
  source 1..20: mol_type = other DNA
ctgggaagtgggtgcatgca

SEQ ID NO: 22955 - DNA, 20 bp, synthetic construct
  misc_feature 1..20: note = Description of Artificial Sequence: Synthetic oligonucleotide
  misc_feature 1..20: note = Target: FXN; (-) strand; PAM type: YTN; PAM sequence: CTT
  source 1..20: mol_type = other DNA
gctgggaagtgggtgcatgc

SEQ ID NO: 22956 - DNA, 20 bp, synthetic construct
  misc_feature 1..20: note = Description of Artificial Sequence: Synthetic oligonucleotide
  misc_feature 1..20: note = Target: FXN; (-) strand; PAM type: YTN; PAM sequence: CTG
  source 1..20: mol_type = other DNA
tcttgctgggaagtgggtgc

SEQ ID NO: 22957 - DNA, 20 bp, synthetic construct
  misc_feature 1..20: note = Description of Artificial Sequence: Synthetic oligonucleotide
  misc_feature 1..20: note = Target: FXN; (-) strand; PAM type: YTN; PAM sequence: CTG
  source 1..20: mol_type = other DNA
ctgtcttgctgggaagtggg

SEQ ID NO: 22958 - DNA, 20 bp, synthetic construct
  misc_feature 1..20: note = Description of Artificial Sequence: Synthetic oligonucleotide
  misc_feature 1..20: note = Target: FXN; (-) strand; PAM type: YTN; PAM sequence: TTG
  source 1..20: mol_type = other DNA
ggagctgctgtcttgctggg

SEQ ID NO: 22959 - DNA, 20 bp, synthetic construct
  misc_feature 1..20: note = Description of Artificial Sequence: Synthetic oligonucleotide
  misc_feature 1..20: note = Target: FXN; (-) strand; PAM type: YTN; PAM sequence: CTT
  source 1..20: mol_type = other DNA
gggagctgctgtcttgctgg

SEQ ID NO: 22960 - DNA, 20 bp, synthetic construct
  misc_feature 1..20: note = Description of Artificial Sequence: Synthetic oligonucleotide
  misc_feature 1..20: note = Target: FXN; (-) strand; PAM type: YTN; PAM sequence: CTA
  source 1..20: mol_type = other DNA
aacaggaggaacttgggagc

SEQ ID NO: 22961 - DNA, 20 bp, synthetic construct
  misc_feature 1..20: note = Description of Artificial Sequence: Synthetic oligonucleotide
  misc_feature 1..20: note = Target: FXN; (-) strand; PAM type: YTN; PAM sequence: TTC
  source 1..20: mol_type = other DNA
taaacaggaggaacttggga

SEQ ID NO: 22962 - DNA, 20 bp, synthetic construct
  misc_feature 1..20: note = Description of Artificial Sequence: Synthetic oligonucleotide
  misc_feature 1..20: note = Target: FXN; (-) strand; PAM type: YTN; PAM sequence: CTA
  source 1..20: mol_type = other DNA
aaattctaaacaggaggaac

SEQ ID NO: 22963 - DNA, 20 bp, synthetic construct
  misc_feature 1..20: note = Description of Artificial Sequence: Synthetic oligonucleotide
  misc_feature 1..20: note = Target: FXN; (-) strand; PAM type: YTN; PAM sequence: TTC
  source 1..20: mol_type = other DNA
taaaattctaaacaggagga

SEQ ID NO: 22964 - DNA, 20 bp, synthetic construct
  misc_feature 1..20: note = Description of Artificial Sequence: Synthetic oligonucleotide
  misc_feature 1..20: note = Target: FXN; (-) strand; PAM type: YTN; PAM sequence: CTT
  source 1..20: mol_type = other DNA
ctaaaattctaaacaggagg

SEQ ID NO: 22965 - DNA, 20 bp, synthetic construct
  misc_feature 1..20: note = Description of Artificial Sequence: Synthetic oligonucleotide
  misc_feature 1..20: note = Target: FXN; (-) strand; PAM type: YTN; PAM sequence: CTG
  source 1..20: mol_type = other DNA
gtggcccgccgcttctaaaa

SEQ ID NO: 22966 - DNA, 20 bp, synthetic construct
  misc_feature 1..20: note = Description of Artificial Sequence: Synthetic oligonucleotide
  misc_feature 1..20: note = Target: FXN; (-) strand; PAM type: YTN; PAM sequence: CTG
  source 1..20: mol_type = other DNA
cagcctggtggcccgccgct

SEQ ID NO: 22967 - DNA, 20 bp, synthetic construct
  misc_feature 1..20: note = Description of Artificial Sequence: Synthetic oligonucleotide
  misc_feature 1..20: note = Target: FXN; (-) strand; PAM type: YTN; PAM sequence: CTG
  source 1..20: mol_type = other DNA
acccaagggagactgcagcc

SEQ ID NO: 22968 - DNA, 20 bp, synthetic construct
  misc_feature 1..20: note = Description of Artificial Sequence: Synthetic oligonucleotide
  misc_feature 1..20: note = Target: FXN; (-) strand; PAM type: YTN; PAM sequence: TTG
  source 1..20: mol_type = other DNA
tgcaaagcacggagtgcaac

SEQ ID NO: 22969 - DNA, 20 bp, synthetic construct
  misc_feature 1..20: note = Description of Artificial Sequence: Synthetic oligonucleotide
  misc_feature 1..20: note = Target: FXN; (-) strand; PAM type: YTN; PAM sequence: TTT
  source 1..20: mol_type = other DNA
gtgcaaagcacggagtgcaa

SEQ ID NO: 22970 - DNA, 20 bp, synthetic construct
  misc_feature 1..20: note = Description of Artificial Sequence: Synthetic oligonucleotide
  misc_feature 1..20: note = Target: FXN; (-) strand; PAM type: YTN; PAM sequence: CTT
  source 1..20: mol_type = other DNA
tgtgcaaagcacggagtgca

SEQ ID NO: 22971 - DNA, 20 bp, synthetic construct
  misc_feature 1..20: note = Description of Artificial Sequence: Synthetic oligonucleotide
  misc_feature 1..20: note = Target: FXN; (-) strand; PAM type: YTN; PAM sequence: CTG
  source 1..20: mol_type = other DNA
ctttgtgcaaagcacggagt

SEQ ID NO: 22972 - DNA, 20 bp, synthetic construct
  misc_feature 1..20: note = Description of Artificial Sequence: Synthetic oligonucleotide
  misc_feature 1..20: note = Target: FXN; (-) strand; PAM type: YTN; PAM sequence: TTA
  source 1..20: mol_type = other DNA
acaaaaatggagagcctgct

SEQ ID NO: 22973 - DNA, 20 bp, synthetic construct
  misc_feature 1..20: note = Description of Artificial Sequence: Synthetic oligonucleotide
  misc_feature 1..20: note = Target: FXN; (-) strand; PAM type: YTN; PAM sequence: TTT
  source 1..20: mol_type = other DNA
aacaaaaatggagagcctgc

SEQ ID NO: 22974 - DNA, 20 bp, synthetic construct
  misc_feature 1..20: note = Description of Artificial Sequence: Synthetic oligonucleotide
  misc_feature 1..20: note = Target: FXN; (-) strand; PAM type: YTN; PAM sequence: TTC
  source 1..20: mol_type = other DNA
gtgcatttaacaaaaatgga

SEQ ID NO: 22975 - DNA, 20 bp, synthetic construct
  misc_feature 1..20: note = Description of Artificial Sequence: Synthetic oligonucleotide
  misc_feature 1..20: note = Target: FXN; (-) strand; PAM type: YTN; PAM sequence: CTA
  source 1..20: mol_type = other DNA
ttcgtgcatttaacaaaaat

SEQ ID NO: 22976 - DNA, 20 bp, synthetic construct
  misc_feature 1..20: note = Description of Artificial Sequence: Synthetic oligonucleotide
  misc_feature 1..20: note = Target: FXN; (-) strand; PAM type: YTN; PAM sequence: TTA
  source 1..20: mol_type = other DNA
gcactattcgtgcatttaac

SEQ ID NO: 22977 - DNA, 20 bp, synthetic construct
  misc_feature 1..20: note = Description of Artificial Sequence: Synthetic oligonucleotide
  misc_feature 1..20: note = Target: FXN; (-) strand; PAM type: YTN; PAM sequence: CTT
  source 1..20: mol_type = other DNA
agcactattcgtgcatttaa

SEQ ID NO: 22978 - DNA, 20 bp, synthetic construct
  misc_feature 1..20: note = Description of Artificial Sequence: Synthetic oligonucleotide
  misc_feature 1..20: note = Target: FXN; (-) strand; PAM type: YTN; PAM sequence: TTC
  source 1..20: mol_type = other DNA
ccagcttagcactattcgtg

SEQ ID NO: 22979 - DNA, 20 bp, synthetic construct
  misc_feature 1..20: note = Description of Artificial Sequence: Synthetic oligonucleotide
  misc_feature 1..20: note = Target: FXN; (-) strand; PAM type: YTN; PAM sequence: CTT
  source 1..20: mol_type = other DNA
cccagcttagcactattcgt

SEQ ID NO: 22980 - DNA, 20 bp, synthetic construct
  misc_feature 1..20: note = Description of Artificial Sequence: Synthetic oligonucleotide
  misc_feature 1..20: note = Target: FXN; (-) strand; PAM type: YTN; PAM sequence: CTC
  source 1..20: mol_type = other DNA
aggaagaacttcccagctta

SEQ ID NO: 22981 - DNA, 20 bp, synthetic construct
  misc_feature 1..20: note = Description of Artificial Sequence: Synthetic oligonucleotide
  misc_feature 1..20: note = Target: FXN; (-) strand; PAM type: YTN; PAM sequence: TTA
  source 1..20: mol_type = other DNA
gacctcaggaagaacttccc

SEQ ID NO: 22982 - DNA, 20 bp, synthetic construct
  misc_feature 1..20: note = Description of Artificial Sequence: Synthetic oligonucleotide
  misc_feature 1..20: note = Target: FXN; (-) strand; PAM type: YTN; PAM sequence: CTA
  source 1..20: mol_type = other DNA
gaggttagacctcaggaaga

SEQ ID NO: 22983 - DNA, 20 bp, synthetic construct
  misc_feature 1..20: note = Description of Artificial Sequence: Synthetic oligonucleotide
  misc_feature 1..20: note = Target: FXN; (-) strand; PAM type: YTN; PAM sequence: CTG
  source 1..20: mol_type = other DNA
tgggggagcagctagaggtt

SEQ ID NO: 22984 - DNA, 20 bp, synthetic construct
  misc_feature 1..20: note = Description of Artificial Sequence: Synthetic oligonucleotide
  misc_feature 1..20: note = Target: FXN; (-) strand; PAM type: YTN; PAM sequence: TTC
  source 1..20: mol_type = other DNA
tgtgggggagcagctagagg

SEQ ID NO: 22985 - DNA, 20 bp, synthetic construct
  misc_feature 1..20: note = Description of Artificial Sequence: Synthetic oligonucleotide
  misc_feature 1..20: note = Target: FXN; (-) strand; PAM type: YTN; PAM sequence: CTT
  source 1..20: mol_type = other DNA
ctgtgggggagcagctagag

SEQ ID NO: 22986 - DNA, 20 bp, synthetic construct
  misc_feature 1..20: note = Description of Artificial Sequence: Synthetic oligonucleotide
  misc_feature 1..20: note = Target: FXN; (-) strand; PAM type: YTN; PAM sequence: CTC
  source 1..20: mol_type = other DNA
ttctgtgggggagcagctag

SEQ ID NO: 22987 - DNA, 20 bp, synthetic construct
  misc_feature 1..20: note = Description of Artificial Sequence: Synthetic oligonucleotide
  misc_feature 1..20: note = Target: FXN; (-) strand; PAM type: YTN; PAM sequence: CTG
  source 1..20: mol_type = other DNA
gccgcaggcactcttctgtg

SEQ ID NO: 22988 - DNA, 20 bp, synthetic construct
  misc_feature 1..20: note = Description of Artificial Sequence: Synthetic oligonucleotide
  misc_feature 1..20: note = Target: FXN; (-) strand; PAM type: YTN; PAM sequence: CTG
  source 1..20: mol_type = other DNA
gtggccactggccgcaggca

SEQ ID NO: 22989 - DNA, 20 bp, synthetic construct
  misc_feature 1..20: note = Description of Artificial Sequence: Synthetic oligonucleotide
  misc_feature 1..20: note = Target: FXN; (-) strand; PAM type: YTN; PAM sequence: CTG
  source 1..20: mol_type = other DNA
cggcgacccctggtggccac

SEQ ID NO: 22990 - DNA, 20 bp, synthetic construct
  misc_feature 1..20: note = Description of Artificial Sequence: Synthetic oligonucleotide
  misc_feature 1..20: note = Target: FXN; (-) strand; PAM type: YTN; PAM sequence: CTG
  source 1..20: mol_type = other DNA
ggtgctgcggcgacccctgg

SEQ ID NO: 22991 - DNA, 20 bp, synthetic construct
  misc_feature 1..20: note = Description of Artificial Sequence: Synthetic oligonucleotide
  misc_feature 1..20: note = Target: FXN; (-) strand; PAM type: YTN; PAM sequence: CTC
  source 1..20: mol_type = other DNA
cagcgctgggtgctgcggcg

SEQ ID NO: 22992 - DNA, 20 bp, synthetic construct
  misc_feature 1..20: note = Description of Artificial Sequence: Synthetic oligonucleotide
  misc_feature 1..20: note = Target: FXN; (-) strand; PAM type: YTN; PAM sequence: CTC
  source 1..20: mol_type = other DNA
cgccctccagcgctgggtgc

SEQ ID NO: 22993 - DNA, 20 bp, synthetic construct
  misc_feature 1..20: note = Description of Artificial Sequence: Synthetic oligonucleotide
  misc_feature 1..20: note = Target: FXN; (-) strand; PAM type: YTN; PAM sequence: CTG
  source 1..20: mol_type = other DNA
ccgcccgctccgccctccag

SEQ ID NO: 22994 - DNA, 20 bp, synthetic construct
  misc_feature 1..20: note = Description of Artificial Sequence: Synthetic oligonucleotide
  misc_feature 1..20: note = Target: FXN; (-) strand; PAM type: YTN; PAM sequence: CTC
  source 1..20: mol_type = other DNA
cgggtctgccgcccgctccg

SEQ ID NO: 22995 - DNA, 20 bp, synthetic construct
  misc_feature 1..20: note = Description of Artificial Sequence: Synthetic oligonucleotide
  misc_feature 1..20: note = Target: FXN; (-) strand; PAM type: YTN; PAM sequence: CTG
  source 1..20: mol_type = other DNA
ctccgggtctgccgcccgct

SEQ ID NO: 22996 - DNA, 20 bp, synthetic construct
  misc_feature 1..20: note = Description of Artificial Sequence: Synthetic oligonucleotide
  misc_feature 1..20: note = Target: FXN; (-) strand; PAM type: YTN; PAM sequence: CTG
  source 1..20: mol_type = other DNA
cgcggcgcccgagagtccac

SEQ ID NO: 22997 - DNA, 20 bp, synthetic construct
  misc_feature 1..20: note = Description of Artificial Sequence: Synthetic oligonucleotide
  misc_feature 1..20: note = Target: FXN; (-) strand; PAM type: YTN; PAM sequence: CTA
  source 1..20: mol_type = other DNA
ctgcgcggcgcccgagagtc

SEQ ID NO: 22998 - DNA, 20 bp, synthetic construct
  misc_feature 1..20: note = Description of Artificial Sequence: Synthetic oligonucleotide
  misc_feature 1..20: note = Target: FXN; (-) strand; PAM type: YTN; PAM sequence: CTG
  source 1..20: mol_type = other DNA
ggtgacgccaggaggccggc

SEQ ID NO: 22999 - DNA, 20 bp, synthetic construct
  misc_feature 1..20: note = Description of Artificial Sequence: Synthetic oligonucleotide
  misc_feature 1..20: note = Target: FXN; (-) strand; PAM type: YTN; PAM sequence: CTG
  source 1..20: mol_type = other DNA
ggctgggtgacgccaggagg

SEQ ID NO: 23000 - DNA, 20 bp, synthetic construct
  misc_feature 1..20: note = Description of Artificial Sequence: Synthetic oligonucleotide
  misc_feature 1..20: note = Target: FXN; (-) strand; PAM type: YTN; PAM sequence: CTG
  source 1..20: mol_type = other DNA
ggctgggctgggtgacgcca

SEQ ID NO: 23001 - DNA, 20 bp, synthetic construct
  misc_feature 1..20: note = Description of Artificial Sequence: Synthetic oligonucleotide
  misc_feature 1..20: note = Target: FXN; (-) strand; PAM type: YTN; PAM sequence: CTG
  source 1..20: mol_type = other DNA
ggcctgggctgggctgggtg

SEQ ID NO: 23002 - DNA, 20 bp, synthetic construct
  misc_feature 1..20: note = Description of Artificial Sequence: Synthetic oligonucleotide
  misc_feature 1..20: note = Target: FXN; (-) strand; PAM type: YTN; PAM sequence: CTG
  source 1..20: mol_type = other DNA
ccggccgcgggacccgggtg

SEQ ID NO: 23003 - DNA, 20 bp, synthetic construct
  misc_feature 1..20: note = Description of Artificial Sequence: Synthetic oligonucleotide
  misc_feature 1..20: note = Target: FXN; (-) strand; PAM type: YTN; PAM sequence: CTC
  source 1..20: mol_type = other DNA
tgccggccgcgggacccggg

SEQ ID NO: 23004 - DNA, 20 bp, synthetic construct
  misc_feature 1..20: note = Description of Artificial Sequence: Synthetic oligonucleotide
  misc_feature 1..20: note = Target: FXN; (-) strand; PAM type: YTN; PAM sequence: CTG
  source 1..20: mol_type = other DNA
cgcggcggggcgtgcaggtc

SEQ ID NO: 23005 - DNA, 20 bp, synthetic construct
  misc_feature 1..20: note = Description of Artificial Sequence: Synthetic oligonucleotide
  misc_feature 1..20: note = Target: FXN; (-) strand; PAM type: YTN; PAM sequence: TTA
  source 1..20: mol_type = other DNA
ctgcgcggcggggcgtgcag

SEQ ID NO: 23006 - DNA, 20 bp, synthetic construct
  misc_feature 1..20: note = Description of Artificial Sequence: Synthetic oligonucleotide
  misc_feature 1..20: note = Target: FXN; (-) strand; PAM type: YTN; PAM sequence: CTT
  source 1..20: mol_type = other DNA
actgcgcggcggggcgtgca

SEQ ID NO: 23007 - DNA, 20 bp, synthetic construct
  misc_feature 1..20: note = Description of Artificial Sequence: Synthetic oligonucleotide
  misc_feature 1..20: note = Target: FXN; (-) strand; PAM type: YTN; PAM sequence: TTC
  source 1..20: mol_type = other DNA
ccggcgcggatacttactgc

SEQ ID NO: 23008 - DNA, 20 bp, synthetic construct
  misc_feature 1..20: note = Description of Artificial Sequence: Synthetic oligonucleotide
  misc_feature 1..20: note = Target: FXN; (-) strand; PAM type: YTN; PAM sequence: CTG
  source 1..20: mol_type = other DNA
ttcccggcgcggatacttac

SEQ ID NO: 23009 - DNA, 20 bp, synthetic construct
  misc_feature 1..20: note = Description of Artificial Sequence: Synthetic oligonucleotide
  misc_feature 1..20: note = Target: FXN; (-) strand; PAM type: YTN; PAM sequence: CTG
  source 1..20: mol_type = other DNA
cgcaggcgtgcggcgtgcgg

SEQ ID NO: 23010 - DNA, 20 bp, synthetic construct
  misc_feature 1..20: note = Description of Artificial Sequence: Synthetic oligonucleotide
  misc_feature 1..20: note = Target: FXN; (-) strand; PAM type: YTN; PAM sequence: CTC
  source 1..20: mol_type = other DNA
cctgcgcaggcgtgcggcgt

SEQ ID NO: 23011 - DNA, 20 bp, synthetic construct
  misc_feature 1..20: note = Description of Artificial Sequence: Synthetic oligonucleotide
  misc_feature 1..20: note = Target: FXN; (-) strand; PAM type: YTN; PAM sequence: CTA
  source 1..20: mol_type = other DNA
gtccagcgcgcgtacccgga

SEQ ID NO: 23012 - DNA, 20 bp, synthetic construct
  misc_feature 1..20: note = Description of Artificial Sequence: Synthetic oligonucleotide
  misc_feature 1..20: note = Target: FXN; (-) strand; PAM type: YTN; PAM sequence: CTG
  source 1..20: mol_type = other DNA
agaaggagcggggtgagcta

SEQ ID NO: 23013 - DNA, 20 bp, synthetic construct
  misc_feature 1..20: note = Description of Artificial Sequence: Synthetic oligonucleotide
  misc_feature 1..20: note = Target: FXN; (-) strand; PAM type: YTN; PAM sequence: TTC
  source 1..20: mol_type = other DNA
cgccgggccgccctgagaag

SEQ ID NO: 23014 - DNA, 20 bp, synthetic construct
  misc_feature 1..20: note = Description of Artificial Sequence: Synthetic oligonucleotide
  misc_feature 1..20: note = Target: FXN; (-) strand; PAM type: YTN; PAM sequence: CTT
  source 1..20: mol_type = other DNA
ccgccgggccgccctgagaa

SEQ ID NO: 23015 - DNA, 20 bp, synthetic construct
  misc_feature 1..20: note = Description of Artificial Sequence: Synthetic oligonucleotide
  misc_feature 1..20: note = Target: FXN; (-) strand; PAM type: YTN; PAM sequence: TTG
  source 1..20: mol_type = other DNA
caaggccgcttccgccgggc

SEQ ID NO: 23016 - DNA, 20 bp, synthetic construct
  misc_feature 1..20: note = Description of Artificial Sequence: Synthetic oligonucleotide
  misc_feature 1..20: note = Target: FXN; (-) strand; PAM type: YTN; PAM sequence: TTC
  source 1..20: mol_type = other DNA
ggaaagcagaagccagtgta

SEQ ID NO: 23017 - DNA, 20 bp, synthetic construct
  misc_feature 1..20: note = Description of Artificial Sequence: Synthetic oligonucleotide
  misc_feature 1..20: note = Target: FXN; (-) strand; PAM type: YTN; PAM sequence: CTT
  source 1..20: mol_type = other DNA
cggaaagcagaagccagtgt

SEQ ID NO: 23018 - DNA, 20 bp, synthetic construct
  misc_feature 1..20: note = Description of Artificial Sequence: Synthetic oligonucleotide
  misc_feature 1..20: note = Target: FXN; (-) strand; PAM type: YTN; PAM sequence: TTC
  source 1..20: mol_type = other DNA
cttcggaaagcagaagccag

SEQ ID NO: 23019 - DNA, 20 bp, synthetic construct
  misc_feature 1..20: note = Description of Artificial Sequence: Synthetic oligonucleotide
  misc_feature 1..20: note = Target: FXN; (-) strand; PAM type: YTN; PAM sequence: TTT
  source 1..20: mol_type = other DNA
ccttcggaaagcagaagcca

SEQ ID NO: 23020 - DNA, 20 bp, synthetic construct
  misc_feature 1..20: note = Description of Artificial Sequence: Synthetic oligonucleotide
  misc_feature 1..20: note = Target: FXN; (-) strand; PAM type: YTN; PAM sequence: TTT
  source 1..20: mol_type = other DNA
tccttcggaaagcagaagcc

SEQ ID NO: 23021 - DNA, 20 bp, synthetic construct
  misc_feature 1..20: note = Description of Artificial Sequence: Synthetic oligonucleotide
  misc_feature 1..20: note = Target: FXN; (-) strand; PAM type: YTN; PAM sequence: CTT
  source 1..20: mol_type = other DNA
ttccttcggaaagcagaagc

SEQ ID NO: 23022 - DNA, 20 bp, synthetic construct
  misc_feature 1..20: note = Description of Artificial Sequence: Synthetic oligonucleotide
  misc_feature 1..20: note = Target: FXN; (-) strand; PAM type: YTN; PAM sequence: TTG
  source 1..20: mol_type = other DNA
acccgcagtcgcaccgcagg

SEQ ID NO: 23023 - DNA, 20 bp, synthetic construct
  misc_feature 1..20: note = Description of Artificial Sequence: Synthetic oligonucleotide
  misc_feature 1..20: note = Target: FXN; (-) strand; PAM type: YTN; PAM sequence: CTT
  source 1..20: mol_type = other DNA
gacccgcagtcgcaccgcag

SEQ ID NO: 23024 - DNA, 20 bp, synthetic construct
  misc_feature 1..20: note = Description of Artificial Sequence: Synthetic oligonucleotide
  misc_feature 1..20: note = Target: FXN; (-) strand; PAM type: YTN; PAM sequence: TTC
  source 1..20: mol_type = other DNA
gcccgtgccttgacccgcag

SEQ ID NO: 23025 - DNA, 20 bp, synthetic construct
  misc_feature 1..20: note = Description of Artificial Sequence: Synthetic oligonucleotide
  misc_feature 1..20: note = Target: FXN; (-) strand; PAM type: YTN; PAM sequence: CTT
  source 1..20: mol_type = other DNA
cgcccgtgccttgacccgca

SEQ ID NO: 23026 - DNA, 20 bp, synthetic construct
  misc_feature 1..20: note = Description of Artificial Sequence: Synthetic oligonucleotide
  misc_feature 1..20: note = Target: FXN; (-) strand; PAM type: YTN; PAM sequence: CTG
  source 1..20: mol_type = other DNA
ccttcgcccgtgccttgacc

SEQ ID NO: 23027 - DNA, 20 bp, synthetic construct
  misc_feature 1..20: note = Description of Artificial Sequence: Synthetic oligonucleotide
  misc_feature 1..20: note = Target: FXN; (-) strand; PAM type: YTN; PAM sequence: CTG
  source 1..20: mol_type = other DNA
ccctgccttcgcccgtgcct

SEQ ID NO: 23028 - DNA, 20 bp, synthetic construct
  misc_feature 1..20: note = Description of Artificial Sequence: Synthetic oligonucleotide
  misc_feature 1..20: note = Target: FXN; (-) strand; PAM type: YTN; PAM sequence: CTC
  source 1..20: mol_type = other DNA
caccagcctgccctgccttc

SEQ ID NO: 23029 - DNA, 20 bp, synthetic construct
  misc_feature 1..20: note = Description of Artificial Sequence: Synthetic oligonucleotide
  misc_feature 1..20: note = Target: FXN; (-) strand; PAM type: YTN; PAM sequence: CTC
  source 1..20: mol_type = other DNA
ggaaccggtcccctccacca

SEQ ID NO: 23030 - DNA, 20 bp, synthetic construct
  misc_feature 1..20: note = Description of Artificial Sequence: Synthetic oligonucleotide
  misc_feature 1..20: note = Target: FXN; (-) strand; PAM type: YTN; PAM sequence: TTA
  source 1..20: mol_type = other DNA
tcgcagagaagtgacaagca

SEQ ID NO: 23031 - DNA, 20 bp, synthetic construct
  misc_feature 1..20: note = Description of Artificial Sequence: Synthetic oligonucleotide
  misc_feature 1..20: note = Target: FXN; (-) strand; PAM type: YTN; PAM sequence: CTG
  source 1..20: mol_type = other DNA
aaacaagttatcgcagagaa

SEQ ID NO: 23032 - DNA, 20 bp, synthetic construct
  misc_feature 1..20: note = Description of Artificial Sequence: Synthetic oligonucleotide
  misc_feature 1..20: note = Target: FXN; (-) strand; PAM type: YTN; PAM sequence: TTA
  source 1..20: mol_type = other DNA
ctgaaacaagttatcgcaga

SEQ ID NO: 23033 - DNA, 20 bp, synthetic construct
  misc_feature 1..20: note = Description of Artificial Sequence: Synthetic oligonucleotide
  misc_feature 1..20: note = Target: FXN; (-) strand; PAM type: YTN; PAM sequence: TTA
  source 1..20: mol_type = other DNA
atattactgaaacaagttat

SEQ ID NO: 23034 - DNA, 20 bp, synthetic construct
  misc_feature 1..20: note = Description of Artificial Sequence: Synthetic oligonucleotide
  misc_feature 1..20: note = Target: FXN; (-) strand; PAM type: YTN; PAM sequence: CTA
  source 1..20: mol_type = other DNA
ttaatattactgaaacaagt

SEQ ID NO: 23035 - DNA, 20 bp, synthetic construct
  misc_feature 1..20: note = Description of Artificial Sequence: Synthetic oligonucleotide
  misc_feature 1..20: note = Target: FXN; (-) strand; PAM type: YTN; PAM sequence: CTA
  source 1..20: mol_type = other DNA
gcagataccatctattaata

SEQ ID NO: 23036 - DNA, 20 bp, synthetic construct
  misc_feature 1..20: note = Description of Artificial Sequence: Synthetic oligonucleotide
  misc_feature 1..20: note = Target: FXN; (-) strand; PAM type: YTN; PAM sequence: TTA
  source 1..20: mol_type = other DNA
tgtgtatgtatatactagca

SEQ ID NO: 23037 - DNA, 20 bp, synthetic construct
  misc_feature 1..20: note = Description of Artificial Sequence: Synthetic oligonucleotide
  misc_feature 1..20: note = Target: FXN; (-) strand; PAM type: YTN; PAM sequence: CTA
  source 1..20: mol_type = other DNA
tatacagatacacacagaca

SEQ ID NO: 23038 - DNA, 20 bp, synthetic construct
  misc_feature 1..20: note = Description of Artificial Sequence: Synthetic oligonucleotide
  misc_feature 1..20: note = Target: FXN; (-) strand; PAM type: YTN; PAM sequence: TTA
  source 1..20: mol_type = other DNA
ggtgtgcgcgcgcccgtgcg

SEQ ID NO: 23039 - DNA, 20 bp, synthetic construct
  misc_feature 1..20: note = Description of Artificial Sequence: Synthetic oligonucleotide
  misc_feature 1..20: note = Target: FXN; (-) strand; PAM type: YTN; PAM sequence: TTG
  source 1..20: mol_type = other DNA
aaaatattaggtgtgcgcgc

SEQ ID NO: 23040 - DNA, 20 bp, synthetic construct
  misc_feature 1..20: note = Description of Artificial Sequence: Synthetic oligonucleotide
  misc_feature 1..20: note = Target: FXN; (-) strand; PAM type: YTN; PAM sequence: CTT
  source 1..20: mol_type = other DNA
gaaaatattaggtgtgcgcg

SEQ ID NO: 23041 - DNA, 20 bp, synthetic construct
  misc_feature 1..20: note = Description of Artificial Sequence: Synthetic oligonucleotide
  misc_feature 1..20: note = Target: FXN; (-) strand; PAM type: YTN; PAM sequence: TTC
  source 1..20: mol_type = other DNA
aaaaaaatccagccttgaaa

SEQ ID NO: 23042 - DNA, 20 bp, synthetic construct
  misc_feature 1..20: note = Description of Artificial Sequence: Synthetic oligonucleotide
  misc_feature 1..20: note = Target: FXN; (-) strand; PAM type: YTN; PAM sequence: TTC
  source 1..20: mol_type = other DNA
gttcaaaaaaatccagcctt

SEQ ID NO: 23043 - DNA, 20 bp, synthetic construct
  misc_feature 1..20: note = Description of Artificial Sequence: Synthetic oligonucleotide
  misc_feature 1..20: note = Target: FXN; (-) strand; PAM type: YTN; PAM sequence: TTT
  source 1..20: mol_type = other DNA
cgttcaaaaaaatccagcct

SEQ ID NO: 23044 - DNA, 20 bp, synthetic construct
  misc_feature 1..20: note = Description of Artificial Sequence: Synthetic oligonucleotide
  misc_feature 1..20: note = Target: FXN; (-) strand; PAM type: YTN; PAM sequence: TTC
  source 1..20: mol_type = other DNA
caggaaagcatttcgttcaa

SEQ ID NO: 23045 - DNA, 20 bp, synthetic construct
  misc_feature 1..20: note = Description of Artificial Sequence: Synthetic oligonucleotide
  misc_feature 1..20: note = Target: FXN; (-) strand; PAM type: YTN; PAM sequence: CTC
  source 1..20: mol_type = other DNA
gttccaggaaagcatttcgt

SEQ ID NO: 23046 - DNA, 20 bp, synthetic construct
  misc_feature 1..20: note = Description of Artificial Sequence: Synthetic oligonucleotide
  misc_feature 1..20: note = Target: FXN; (-) strand; PAM type: YTN; PAM sequence: TTC
  source 1..20: mol_type = other DNA
acctcgttccaggaaagcat

SEQ ID NO: 23047 - DNA, 20 bp, synthetic construct
  misc_feature 1..20: note = Description of Artificial Sequence: Synthetic oligonucleotide
  misc_feature 1..20: note = Target: FXN; (-) strand; PAM type: YTN; PAM sequence: TTT
  source 1..20: mol_type = other DNA
cacctcgttccaggaaagca

SEQ ID NO: 23048 - DNA, 20 bp, synthetic construct
  misc_feature 1..20: note = Description of Artificial Sequence: Synthetic oligonucleotide
  misc_feature 1..20: note = Target: FXN; (-) strand; PAM type: YTN; PAM sequence: CTG
  source 1..20: mol_type = other DNA
aaagtttcacctcgttccag

SEQ ID NO: 23049 - DNA, 20 bp, synthetic construct
  misc_feature 1..20: note = Description of Artificial Sequence: Synthetic oligonucleotide
  misc_feature 1..20: note = Target: FXN; (-) strand; PAM type: YTN; PAM sequence: CTC
  source 1..20: mol_type = other DNA
tgaaagtttcacctcgttcc

SEQ ID NO: 23050 - DNA, 20 bp, synthetic construct
  misc_feature 1..20: note = Description of Artificial Sequence: Synthetic oligonucleotide
  misc_feature 1..20: note = Target: FXN; (-) strand; PAM type: YTN; PAM sequence: CTG
  source 1..20: mol_type = other DNA
cagctctgaaagtttcacct

SEQ ID NO: 23051 - DNA, 20 bp, synthetic construct
  misc_feature 1..20: note = Description of Artificial Sequence: Synthetic oligonucleotide
  misc_feature 1..20: note = Target: FXN; (-) strand; PAM type: YTN; PAM sequence: TTC
  source 1..20: mol_type = other DNA
tgcagctctgaaagtttcac

SEQ ID NO: 23052 - DNA, 20 bp, synthetic construct
  misc_feature 1..20: note = Description of Artificial Sequence: Synthetic oligonucleotide
  misc_feature 1..20: note = Target: FXN; (-) strand; PAM type: YTN; PAM sequence: CTA
  source 1..20: mol_type = other DNA
ttctgcagctctgaaagttt

SEQ ID NO: 23053 - DNA, 20 bp, synthetic construct
  misc_feature 1..20: note = Description of Artificial Sequence: Synthetic oligonucleotide
  misc_feature 1..20: note = Target: FXN; (-) strand; PAM type: YTN; PAM sequence: CTA
  source 1..20: mol_type = other DNA
gctattctgcagctctgaaa

SEQ ID NO: 23054 - DNA, 20 bp, synthetic construct
  misc_feature 1..20: note = Description of Artificial Sequence: Synthetic oligonucleotide
  misc_feature 1..20: note = Target: FXN; (-) strand; PAM type: YTN; PAM sequence: CTC
  source 1..20: mol_type = other DNA
tagctattctgcagctctga

SEQ ID NO: 23055 - DNA, 20 bp, synthetic construct
  misc_feature 1..20: note = Description of Artificial Sequence: Synthetic oligonucleotide
  misc_feature 1..20: note = Target: FXN; (-) strand; PAM type: YTN; PAM sequence: CTG
  source 1..20: mol_type = other DNA
ctctagctattctgcagctc

SEQ ID NO: 23056 - DNA, 20 bp, synthetic construct
  misc_feature 1..20: note = Description of Artificial Sequence: Synthetic oligonucleotide
  misc_feature 1..20: note = Target: FXN; (-) strand; PAM type: YTN; PAM sequence: CTG
  source 1..20: mol_type = other DNA
ctgctctagctattctgcag

SEQ ID NO: 23057 - DNA, 20 bp, synthetic construct
  misc_feature 1..20: note = Description of Artificial Sequence: Synthetic oligonucleotide
  misc_feature 1..20: note = Target: FXN; (-) strand; PAM type: YTN; PAM sequence: TTC
  source 1..20: mol_type = other DNA
caaaagccagggcccctgct

SEQ ID NO: 23058 - DNA, 20 bp, synthetic construct
  misc_feature 1..20: note = Description of Artificial Sequence: Synthetic oligonucleotide
  misc_feature 1..20: note = Target: FXN; (-) strand; PAM type: YTN; PAM sequence: TTT
  source 1..20: mol_type = other DNA
ccaaaagccagggcccctgc

SEQ ID NO: 23059 - DNA, 20 bp, synthetic construct
  misc_feature 1..20: note = Description of Artificial Sequence: Synthetic oligonucleotide
  misc_feature 1..20: note = Target: FXN; (-) strand; PAM type: YTN; PAM sequence: CTG
  source 1..20: mol_type = other DNA
gaataaaggtcgggtcagtt

SEQ ID NO: 23060 - DNA, 20 bp, synthetic construct
  misc_feature 1..20: note = Description of Artificial Sequence: Synthetic oligonucleotide
  misc_feature 1..20: note = Target: FXN; (-) strand; PAM type: YTN; PAM sequence: CTG
  source 1..20: mol_type = other DNA
cggagtggggcagaatctgg

SEQ ID NO: 23061 - DNA, 20 bp, synthetic construct
  misc_feature 1..20: note = Description of Artificial Sequence: Synthetic oligonucleotide
  misc_feature 1..20: note = Target: FXN; (-) strand; PAM type: YTN; PAM sequence: CTC
  source 1..20: mol_type = other DNA
tgcggagtggggcagaatct

SEQ ID NO: 23062 - DNA, 20 bp, synthetic construct
  misc_feature 1..20: note = Description of Artificial Sequence: Synthetic oligonucleotide
  misc_feature 1..20: note = Target: FXN; (-) strand; PAM type: YTN; PAM sequence: TTA
  source 1..20: mol_type = other DNA
ggggaatcccccaaggtcac

SEQ ID NO: 23063 - DNA, 20 bp, synthetic construct
  misc_feature 1..20: note = Description of Artificial Sequence: Synthetic oligonucleotide
  misc_feature 1..20: note = Target: FXN; (-) strand; PAM type: YTN; PAM sequence: CTC
  source 1..20: mol_type = other DNA
agagaggttaggggaatccc

SEQ ID NO: 23064 - DNA, 20 bp, synthetic construct
  misc_feature 1..20: note = Description of Artificial Sequence: Synthetic oligonucleotide
  misc_feature 1..20: note = Target: FXN; (-) strand; PAM type: YTN; PAM sequence: CTA
  source 1..20: mol_type = other DNA
cagaaaacaaagccacgtct

SEQ ID NO: 23065 - DNA, 20 bp, synthetic construct
  misc_feature 1..20: note = Description of Artificial Sequence: Synthetic oligonucleotide
  misc_feature 1..20: note = Target: FXN; (-) strand; PAM type: YTN; PAM sequence: CTC
  source 1..20: mol_type = other DNA
cctacagaaaacaaagccac

SEQ ID NO: 23066 - DNA, 20 bp, synthetic construct
  misc_feature 1..20: note = Description of Artificial Sequence: Synthetic oligonucleotide
  misc_feature 1..20: note = Target: FXN; (-) strand; PAM type: YTN; PAM sequence: TTC
  source 1..20: mol_type = other DNA
tccctacagaaaacaaagcc

SEQ ID NO: 23067 - DNA, 20 bp, synthetic construct
  misc_feature 1..20: note = Description of Artificial Sequence: Synthetic oligonucleotide
  misc_feature 1..20: note = Target: FXN; (-) strand; PAM type: YTN; PAM sequence: CTT
  source 1..20: mol_type = other DNA
ctccctacagaaaacaaagc

SEQ ID NO: 23068 - DNA, 20 bp, synthetic construct
  misc_feature 1..20: note = Description of Artificial Sequence: Synthetic oligonucleotide
  misc_feature 1..20: note = Target: FXN; (-) strand; PAM type: YTN; PAM sequence: TTA
  source 1..20: mol_type = other DNA
tcttctccctacagaaaaca

SEQ ID NO: 23069 - DNA, 20 bp, synthetic construct
  misc_feature 1..20: note = Description of Artificial Sequence: Synthetic oligonucleotide
  misc_feature 1..20: note = Target: FXN; (-) strand; PAM type: YTN; PAM sequence: TTT
  source 1..20: mol_type = other DNA
atcttctccctacagaaaac

SEQ ID NO: 23070 - DNA, 20 bp, synthetic construct
  misc_feature 1..20: note = Description of Artificial Sequence: Synthetic oligonucleotide
  misc_feature 1..20: note = Target: FXN; (-) strand; PAM type: YTN; PAM sequence: CTT
  source 1..20: mol_type = other DNA
tatcttctccctacagaaaa

SEQ ID NO: 23071 - DNA, 20 bp, synthetic construct
  misc_feature 1..20: note = Description of Artificial Sequence: Synthetic oligonucleotide
  misc_feature 1..20: note = Target: FXN; (-) strand; PAM type: YTN; PAM sequence: CTC
  source 1..20: mol_type = other DNA
acaccaggtccgcaaaatgg

SEQ ID NO: 23072 - DNA, 20 bp, synthetic construct
  misc_feature 1..20: note = Description of Artificial Sequence: Synthetic oligonucleotide
  misc_feature 1..20: note = Target: FXN; (-) strand; PAM type: YTN; PAM sequence: TTA
  source 1..20: mol_type = other DNA
atcctcacaccaggtccgca

SEQ ID NO: 23073 - DNA, 20 bp, synthetic construct
  misc_feature 1..20: note = Description of Artificial Sequence: Synthetic oligonucleotide
  misc_feature 1..20: note = Target: FXN; (-) strand; PAM type: YTN; PAM sequence: TTT
  source 1..20: mol_type = other DNA
aatcctcacaccaggtccgc

SEQ ID NO: 23074 - DNA, 20 bp, synthetic construct
  misc_feature 1..20: note = Description of Artificial Sequence: Synthetic oligonucleotide
  misc_feature 1..20: note = Target: FXN; (-) strand; PAM type: YTN; PAM sequence: TTC
  source 1..20: mol_type = other DNA
ccatttaatcctcacaccag

SEQ ID NO: 23075 - DNA, 20 bp, synthetic construct
  misc_feature 1..20: note = Description of Artificial Sequence: Synthetic oligonucleotide
  misc_feature 1..20: note = Target: FXN; (-) strand; PAM type: YTN; PAM sequence: TTA
  source 1..20: mol_type = other DNA
ttcccatttaatcctcacac

SEQ ID NO: 23076 - DNA, 20 bp, synthetic construct
  misc_feature 1..20: note = Description of Artificial Sequence: Synthetic oligonucleotide
  misc_feature 1..20: note = Target: FXN; (-) strand; PAM type: YTN; PAM sequence: CTA
  source 1..20: mol_type = other DNA
tgttattcccatttaatcct

SEQ ID NO: 23077 - DNA, 20 bp, synthetic construct
  misc_feature 1..20: note = Description of Artificial Sequence: Synthetic oligonucleotide
  misc_feature 1..20: note = Target: FXN; (-) strand; PAM type: YTN; PAM sequence: TTA
  source 1..20: mol_type = other DNA
tctatgttattcccatttaa

SEQ ID NO: 23078 - DNA, 20 bp, synthetic construct
  misc_feature 1..20: note = Description of Artificial Sequence: Synthetic oligonucleotide
  misc_feature 1..20: note = Target: FXN; (-) strand; PAM type: YTN; PAM sequence: TTT
  source 1..20: mol_type = other DNA
atctatgttattcccattta

SEQ ID NO: 23079 - DNA, 20 bp, synthetic construct
  misc_feature 1..20: note = Description of Artificial Sequence: Synthetic oligonucleotide
  misc_feature 1..20: note = Target: FXN; (-) strand; PAM type: YTN; PAM sequence: CTT
  source 1..20: mol_type = other DNA
tatctatgttattcccattt

SEQ ID NO: 23080 - DNA, 20 bp, synthetic construct
  misc_feature 1..20: note = Description of Artificial Sequence: Synthetic oligonucleotide
  misc_feature 1..20: note = Target: FXN; (-) strand; PAM type: YTN; PAM sequence: CTG
  source 1..20: mol_type = other DNA
aagactttatctatgttatt

SEQ ID NO: 23081 - DNA, 20 bp, synthetic construct
  misc_feature 1..20: note = Description of Artificial Sequence: Synthetic oligonucleotide
  misc_feature 1..20: note = Target: FXN; (-) strand; PAM type: YTN; PAM sequence: TTC
  source 1..20: mol_type = other DNA
tgaagactttatctatgtta

SEQ ID NO: 23082 - DNA, 20 bp, synthetic construct
  misc_feature 1..20: note = Description of Artificial Sequence: Synthetic oligonucleotide
  misc_feature 1..20: note = Target: FXN; (-) strand; PAM type: YTN; PAM sequence: TTG
  source 1..20: mol_type = other DNA
aagttctgaagactttatct

SEQ ID NO: 23083 - DNA, 20 bp, synthetic construct
  misc_feature 1..20: note = Description of Artificial Sequence: Synthetic oligonucleotide
  misc_feature 1..20: note = Target: FXN; (-) strand; PAM type: YTN; PAM sequence: TTT
  source 1..20: mol_type = other DNA
gaagttctgaagactttatc

SEQ ID NO: 23084 - DNA, 20 bp, synthetic construct
  misc_feature 1..20: note = Description of Artificial Sequence: Synthetic oligonucleotide
  misc_feature 1..20: note = Target: FXN; (-) strand; PAM type: YTN; PAM sequence: CTA
  source 1..20: mol_type = other DNA
atttgaagttctgaagactt

SEQ ID NO: 23085 - DNA, 20 bp, synthetic construct
  misc_feature 1..20: note = Description of Artificial Sequence: Synthetic oligonucleotide
  misc_feature 1..20: note = Target: FXN; (-) strand; PAM type: YTN; PAM sequence: TTG
  source 1..20: mol_type = other DNA
taccccccaaaggaagaaag

SEQ ID NO: 23086 - DNA, 20 bp, synthetic construct
  misc_feature 1..20: note = Description of Artificial Sequence: Synthetic oligonucleotide
  misc_feature 1..20: note = Target: FXN; (-) strand; PAM type: YTN; PAM sequence: TTT
  source 1..20: mol_type = other DNA
gtaccccccaaaggaagaaa

SEQ ID NO: 23087 - DNA, 20 bp, synthetic construct
  misc_feature 1..20: note = Description of Artificial Sequence: Synthetic oligonucleotide
  misc_feature 1..20: note = Target: FXN; (-) strand; PAM type: YTN; PAM sequence: CTT
  source 1..20: mol_type = other DNA
tgtaccccccaaaggaagaa

SEQ ID NO: 23088 - DNA, 20 bp, synthetic construct
  misc_feature 1..20: note = Description of Artificial Sequence: Synthetic oligonucleotide
  misc_feature 1..20: note = Target: FXN; (-) strand; PAM type: YTN; PAM sequence: TTC
  source 1..20: mol_type = other DNA
tttgtaccccccaaaggaag

SEQ ID NO: 23089 - DNA, 20 bp, synthetic construct
  misc_feature 1..20: note = Description of Artificial Sequence: Synthetic oligonucleotide
  misc_feature 1..20: note = Target: FXN; (-) strand; PAM type: YTN; PAM sequence: TTT
  source 1..20: mol_type = other DNA
ctttgtaccccccaaaggaa

SEQ ID NO: 23090 - DNA, 20 bp, synthetic construct
  misc_feature 1..20: note = Description of Artificial Sequence: Synthetic oligonucleotide
  misc_feature 1..20: note = Target: FXN; (-) strand; PAM type: YTN; PAM sequence: CTG
  source 1..20: mol_type = other DNA
ggtcagatatttctttgtac

SEQ ID NO: 23091 - DNA, 20 bp, synthetic construct
  misc_feature 1..20: note = Description of Artificial Sequence: Synthetic oligonucleotide
  misc_feature 1..20: note = Target: FXN; (-) strand; PAM type: YTN; PAM sequence: TTC
  source 1..20: mol_type = other DNA
aagccgtggcgtaactgggt

SEQ ID NO: 23092 - DNA, 20 bp, synthetic construct
  misc_feature 1..20: note = Description of Artificial Sequence: Synthetic oligonucleotide
  misc_feature 1..20: note = Target: FXN; (-) strand; PAM type: YTN; PAM sequence: TTT
  source 1..20: mol_type = other DNA
caagccgtggcgtaactggg

SEQ ID NO: 23093 - DNA, 20 bp, synthetic construct
  misc_feature 1..20: note = Description of Artificial Sequence: Synthetic oligonucleotide
  misc_feature 1..20: note = Target: FXN; (-) strand; PAM type: YTN; PAM sequence: CTT
  source 1..20: mol_type = other DNA
tcaagccgtggcgtaactgg

SEQ ID NO: 23094 - DNA, 20 bp, synthetic construct
  misc_feature 1..20: note = Description of Artificial Sequence: Synthetic oligonucleotide
  misc_feature 1..20: note = Target: FXN; (-) strand; PAM type: YTN; PAM sequence: CTC
  source 1..20: mol_type = other DNA
ctttcaagccgtggcgtaac

SEQ ID NO: 23095 - DNA, 20 bp, synthetic construct
  misc_feature 1..20: note = Description of Artificial Sequence: Synthetic oligonucleotide
  misc_feature 1..20: note = Target: FXN; (-) strand; PAM type: YTN; PAM sequence: TTC
  source 1..20: mol_type = other DNA
ctcctttcaagccgtggcgt

SEQ ID NO: 23096 - DNA, 20 bp, synthetic construct
  misc_feature 1..20: note = Description of Artificial Sequence: Synthetic oligonucleotide
  misc_feature 1..20: note = Target: FXN; (-) strand; PAM type: YTN; PAM sequence: TTT
  source 1..20: mol_type = other DNA
cctcctttcaagccgtggcg

SEQ ID NO: 23097 - DNA, 20 bp, synthetic construct
  misc_feature 1..20: note = Description of Artificial Sequence: Synthetic oligonucleotide
  misc_feature 1..20: note = Target: FXN; (-) strand; PAM type: YTN; PAM sequence: TTG
  source 1..20: mol_type = other DNA
ggtttcctcctttcaagccg

SEQ ID NO: 23098 - DNA, 20 bp, synthetic construct
  misc_feature 1..20: note = Description of Artificial Sequence: Synthetic oligonucleotide
  misc_feature 1..20: note = Target: FXN; (-) strand; PAM type: YTN; PAM sequence: TTT
  source 1..20: mol_type = other DNA
gggtttcctcctttcaagcc

SEQ ID NO: 23099 - DNA, 20 bp, synthetic construct
  misc_feature 1..20: note = Description of Artificial Sequence: Synthetic oligonucleotide
  misc_feature 1..20: note = Target: FXN; (-) strand; PAM type: YTN; PAM sequence: CTT
  source 1..20: mol_type = other DNA
tgggtttcctcctttcaagc

SEQ ID NO: 23100 - DNA, 20 bp, synthetic construct
  misc_feature 1..20: note = Description of Artificial Sequence: Synthetic oligonucleotide
  misc_feature 1..20: note = Target: FXN; (-) strand; PAM type: YTN; PAM sequence: TTC
  source 1..20: mol_type = other DNA
tttgggtttcctcctttcaa

SEQ ID NO: 23101 - DNA, 20 bp, synthetic construct
  misc_feature 1..20: note = Description of Artificial Sequence: Synthetic oligonucleotide
  misc_feature 1..20: note = Target: FXN; (-) strand; PAM type: YTN; PAM sequence: CTC
  source 1..20: mol_type = other DNA
atccccacagccattctttg

SEQ ID NO: 23102 - DNA, 20 bp, synthetic construct
  misc_feature 1..20: note = Description of Artificial Sequence: Synthetic oligonucleotide
  misc_feature 1..20: note = Target: FXN; (-) strand; PAM type: YTN; PAM sequence: TTC
  source 1..20: mol_type = other DNA
ctcatccccacagccattct

SEQ ID NO: 23103 - DNA, 20 bp, synthetic construct
  misc_feature 1..20: note = Description of Artificial Sequence: Synthetic oligonucleotide
  misc_feature 1..20: note = Target: FXN; (-) strand; PAM type: YTN; PAM sequence: CTT
  source 1..20: mol_type = other DNA
cctcatccccacagccattc

SEQ ID NO: 23104 - DNA, 20 bp, synthetic construct
  misc_feature 1..20: note = Description of Artificial Sequence: Synthetic oligonucleotide
  misc_feature 1..20: note = Target: FXN; (-) strand; PAM type: YTN; PAM sequence: TTG
  source 1..20: mol_type = other DNA
aggaatcttcctcatcccca

SEQ ID NO: 23105 - DNA, 20 bp, synthetic construct
  misc_feature 1..20: note = Description of Artificial Sequence: Synthetic oligonucleotide
  misc_feature 1..20: note = Target: FXN; (-) strand; PAM type: YTN; PAM sequence: CTT
  source 1..20: mol_type = other DNA
gaggaatcttcctcatcccc

SEQ ID NO: 23106 - DNA, 20 bp, synthetic construct
  misc_feature 1..20: note = Description of Artificial Sequence: Synthetic oligonucleotide
  misc_feature 1..20: note = Target: FXN; (-) strand; PAM type: YTN; PAM sequence: CTC
  source 1..20: mol_type = other DNA
cccttgaggaatcttcctca

SEQ ID NO: 23107 - DNA, 20 bp, synthetic construct
  misc_feature 1..20: note = Description of Artificial Sequence: Synthetic oligonucleotide
  misc_feature 1..20: note = Target: FXN; (-) strand; PAM type: YTN; PAM sequence: TTA
  source 1..20: mol_type = other DNA
aataccatgtcctccccttg

SEQ ID NO: 23108 - DNA, 20 bp, synthetic construct
  misc_feature 1..20: note = Description of Artificial Sequence: Synthetic oligonucleotide
  misc_feature 1..20: note = Target: FXN; (-) strand; PAM type: YTN; PAM sequence: CTC
  source 1..20: mol_type = other DNA
attaaataccatgtcctccc

SEQ ID NO: 23109 - DNA, 20 bp, synthetic construct
  misc_feature 1..20: note = Description of Artificial Sequence: Synthetic oligonucleotide
  misc_feature 1..20: note = Target: FXN; (-) strand; PAM type: YTN; PAM sequence: TTC
  source 1..20: mol_type = other DNA
aagaccctcattaaatacca

SEQ ID NO: 23110 - DNA, 20 bp, synthetic construct
  misc_feature 1..20: note = Description of Artificial Sequence: Synthetic oligonucleotide
  misc_feature 1..20: note = Target: FXN; (-) strand; PAM type: YTN; PAM sequence: CTT
  source 1..20: mol_type = other DNA
caagaccctcattaaatacc

SEQ ID NO: 23111 - DNA, 20 bp, synthetic construct
  misc_feature 1..20: note = Description of Artificial Sequence: Synthetic oligonucleotide
  misc_feature 1..20: note = Target: FXN; (-) strand; PAM type: YTN; PAM sequence: TTG
  source 1..20: mol_type = other DNA
gcatcttcaagaccctcatt

SEQ ID NO: 23112 - DNA, 20 bp, synthetic construct
  misc_feature 1..20: note = Description of Artificial Sequence: Synthetic oligonucleotide
  misc_feature 1..20: note = Target: FXN; (-) strand; PAM type: YTN; PAM sequence: CTT
  source 1..20: mol_type = other DNA
ggcatcttcaagaccctcat

SEQ ID NO: 23113 - DNA, 20 bp, synthetic construct
  misc_feature 1..20: note = Description of Artificial Sequence: Synthetic oligonucleotide
  misc_feature 1..20: note = Target: FXN; (-) strand; PAM type: YTN; PAM sequence: TTC
  source 1..20: mol_type = other DNA
cttggcatcttcaagaccct

SEQ ID NO: 23114 - DNA, 20 bp, synthetic construct
  misc_feature 1..20: note = Description of Artificial Sequence: Synthetic oligonucleotide
  misc_feature 1..20: note = Target: FXN; (-) strand; PAM type: YTN; PAM sequence: CTT
  source 1..20: mol_type = other DNA
ccttggcatcttcaagaccc

SEQ ID NO: 23115 - DNA, 20 bp, synthetic construct
  misc_feature 1..20: note = Description of Artificial Sequence: Synthetic oligonucleotide
  misc_feature 1..20: note = Target: FXN; (-) strand; PAM type: YTN; PAM sequence: CTA
  source 1..20: mol_type = other DNA
ccacttccttggcatcttca

SEQ ID NO: 23116 - DNA, 20 bp, synthetic construct
  misc_feature 1..20: note = Description of Artificial Sequence: Synthetic oligonucleotide
  misc_feature 1..20: note = Target: FXN; (-) strand; PAM type: YTN; PAM sequence: CTC
  source 1..20: mol_type = other DNA
taccacttccttggcatctt

SEQ ID NO: 23117 - DNA, 20 bp, synthetic construct
  misc_feature 1..20: note = Description of Artificial Sequence: Synthetic oligonucleotide
  misc_feature 1..20: note = Target: FXN; (-) strand; PAM type: YTN; PAM sequence: CTC
  source 1..20: mol_type = other DNA
gtgaaacaccctctaccact

SEQ ID NO: 23118 - DNA, 20 bp, synthetic construct
  misc_feature 1..20: note = Description of Artificial Sequence: Synthetic oligonucleotide
  misc_feature 1..20: note = Target: FXN; (-) strand; PAM type: YTN; PAM sequence: CTC
  source 1..20: mol_type = other DNA
ctcgtgaaacaccctctacc

SEQ ID NO: 23119 - DNA, 20 bp, synthetic construct
  misc_feature 1..20: note = Description of Artificial Sequence: Synthetic oligonucleotide
  misc_feature 1..20: note = Target: FXN; (-) strand; PAM type: YTN; PAM sequence: TTC
  source 1..20: mol_type = other DNA
cctcctcgtgaaacaccctc

SEQ ID NO: 23120 - DNA, 20 bp, synthetic construct
  misc_feature 1..20: note = Description of Artificial Sequence: Synthetic oligonucleotide
  misc_feature 1..20: note = Target: FXN; (-) strand; PAM type: YTN; PAM sequence: TTG
  source 1..20: mol_type = other DNA
cccagacggttccctcctcg

SEQ ID NO: 23121 - DNA, 20 bp, synthetic construct
  misc_feature 1..20: note = Description of Artificial Sequence: Synthetic oligonucleotide
  misc_feature 1..20: note = Target: FXN; (-) strand; PAM type: YTN; PAM sequence: TTT
  source 1..20: mol_type = other DNA
gcccagacggttccctcctc

SEQ ID NO: 23122 - DNA, 20 bp, synthetic construct
  misc_feature 1..20: note = Description of Artificial Sequence: Synthetic oligonucleotide
  misc_feature 1..20: note = Target: FXN; (-) strand; PAM type: YTN; PAM sequence: CTT
  source 1..20: mol_type = other DNA
tgcccagacggttccctcct

SEQ ID NO: 23123 - DNA, 20 bp, synthetic construct
  misc_feature 1..20: note = Description of Artificial Sequence: Synthetic oligonucleotide
  misc_feature 1..20: note = Target: FXN; (-) strand; PAM type: YTN; PAM sequence: CTG
  source 1..20: mol_type = other DNA
gcctttgcccagacggttcc

SEQ ID NO: 23124 - DNA, 20 bp, synthetic construct
  misc_feature 1..20: note = Description of Artificial Sequence: Synthetic oligonucleotide
  misc_feature 1..20: note = Target: FXN; (-) strand; PAM type: YTN; PAM sequence: TTC
  source 1..20: mol_type = other DNA
ctggcctttgcccagacggt

SEQ ID NO: 23125 - DNA, 20 bp, synthetic construct
  misc_feature 1..20: note = Description of Artificial Sequence: Synthetic oligonucleotide
  misc_feature 1..20: note = Target: FXN; (-) strand; PAM type: YTN; PAM sequence: CTT
  source 1..20: mol_type = other DNA
cctggcctttgcccagacgg

SEQ ID NO: 23126 - DNA, 20 bp, synthetic construct
  misc_feature 1..20: note = Description of Artificial Sequence: Synthetic oligonucleotide
  misc_feature 1..20: note = Target: FXN; (-) strand; PAM type: YTN; PAM sequence: TTC
  source 1..20: mol_type = other DNA
cgccttcctggcctttgccc

SEQ ID NO: 23127 - DNA, 20 bp, synthetic construct
  misc_feature 1..20: note = Description of Artificial Sequence: Synthetic oligonucleotide
  misc_feature 1..20: note = Target: FXN; (-) strand; PAM type: YTN; PAM sequence: CTT
  source 1..20: mol_type = other DNA
ccgccttcctggcctttgcc

SEQ ID NO: 23128 - DNA, 20 bp, synthetic construct
  misc_feature 1..20: note = Description of Artificial Sequence: Synthetic oligonucleotide
  misc_feature 1..20: note = Target: FXN; (-) strand; PAM type: YTN; PAM sequence: CTG
  source 1..20: mol_type = other DNA
aagggatccccttccgcctt

SEQ ID NO: 23129 - DNA, 20 bp, synthetic construct
  misc_feature 1..20: note = Description of Artificial Sequence: Synthetic oligonucleotide
  misc_feature 1..20: note = Target: FXN; (-) strand; PAM type: YTN; PAM sequence: CTC
  source 1..20: mol_type = other DNA
tgaagggatccccttccgcc

SEQ ID NO: 23130 - DNA, 20 bp, synthetic construct
  misc_feature 1..20: note = Description of Artificial Sequence: Synthetic oligonucleotide
  misc_feature 1..20: note = Target: FXN; (-) strand; PAM type: YTN; PAM sequence: CTA
  source 1..20: mol_type = other DNA
atacatgcggcgtaccagcc

SEQ ID NO: 23131 - DNA, 20 bp, synthetic construct
  misc_feature 1..20: note = Description of Artificial Sequence: Synthetic oligonucleotide
  misc_feature 1..20: note = Target: FXN; (-) strand; PAM type: YTN; PAM sequence: CTC
  source 1..20: mol_type = other DNA
ccctaatacatgcggcgtac

SEQ ID NO: 23132 - DNA, 20 bp, synthetic construct
  misc_feature 1..20: note = Description of Artificial Sequence: Synthetic oligonucleotide
  misc_feature 1..20: note = Target: FXN; (-) strand; PAM type: YTN; PAM sequence: TTC
  source 1..20: mol_type = other DNA
atctcccctaatacatgcgg

SEQ ID NO: 23133 - DNA, 20 bp, synthetic construct
  misc_feature 1..20: note = Description of Artificial Sequence: Synthetic oligonucleotide
  misc_feature 1..20: note = Target: FXN; (-) strand; PAM type: YTN; PAM sequence: TTT
  source 1..20: mol_type = other DNA
catctcccctaatacatgcg

SEQ ID NO: 23134 - DNA, 20 bp, synthetic construct
  misc_feature 1..20: note = Description of Artificial Sequence: Synthetic oligonucleotide
  misc_feature 1..20: note = Target: FXN; (-) strand; PAM type: YTN; PAM sequence: CTT
  source 1..20: mol_type = other DNA
tcatctcccctaatacatgc

SEQ ID NO: 23135 - DNA, 20 bp, synthetic construct
  misc_feature 1..20: note = Description of Artificial Sequence: Synthetic oligonucleotide
  misc_feature 1..20: note = Target: FXN; (-) strand; PAM type: YTN; PAM sequence: CTC
  source 1..20: mol_type = other DNA
tttcatctcccctaatacat

SEQ ID NO: 23136 - DNA, 20 bp, synthetic construct
  misc_feature 1..20: note = Description of Artificial Sequence: Synthetic oligonucleotide
  misc_feature 1..20: note = Target: FXN; (-) strand; PAM type: YTN; PAM sequence: CTG
  source 1..20: mol_type = other DNA
cctctttcatctcccctaat

SEQ ID NO: 23137 - DNA, 20 bp, synthetic construct
  misc_feature 1..20: note = Description of Artificial Sequence: Synthetic oligonucleotide
  misc_feature 1..20: note = Target: FXN; (-) strand; PAM type: YTN; PAM sequence: TTG
  source 1..20: mol_type = other DNA
gacgtggcctgcctctttca

SEQ ID NO: 23138 - DNA, 20 bp, synthetic construct
  misc_feature 1..20: note = Description of Artificial Sequence: Synthetic oligonucleotide
  misc_feature 1..20: note = Target: FXN; (-) strand; PAM type: YTN; PAM sequence: CTT
  source 1..20: mol_type = other DNA
ggacgtggcctgcctctttc

SEQ ID NO: 23139 - DNA, 20 bp, synthetic construct
  misc_feature 1..20: note = Description of Artificial Sequence: Synthetic oligonucleotide
  misc_feature 1..20: note = Target: FXN; (-) strand; PAM type: YTN; PAM sequence: CTC
  source 1..20: mol_type = other DNA
cggagagcaacacaaatatg

SEQ ID NO: 23140 - DNA, 20 bp, synthetic construct
  misc_feature 1..20: note = Description of Artificial Sequence: Synthetic oligonucleotide
  misc_feature 1..20: note = Target: FXN; (-) strand; PAM type: YTN; PAM sequence: CTA
  source 1..20: mol_type = other DNA
aagtacaaactccggagagc

SEQ ID NO: 23141 - DNA, 20 bp, synthetic construct
  misc_feature 1..20: note = Description of Artificial Sequence: Synthetic oligonucleotide
  misc_feature 1..20: note = Target: FXN; (-) strand; PAM type: YTN; PAM sequence: TTC
  source 1..20: mol_type = other DNA
aagcctaaagtacaaactcc

SEQ ID NO: 23142 - DNA, 20 bp, synthetic construct
  misc_feature 1..20: note = Description of Artificial Sequence: Synthetic oligonucleotide
  misc_feature 1..20: note = Target: FXN; (-) strand; PAM type: YTN; PAM sequence: TTC
  source 1..20: mol_type = other DNA
aaacacaatgtgggccaaat

SEQ ID NO: 23143 - DNA, 20 bp, synthetic construct
  misc_feature 1..20: note = Description of Artificial Sequence: Synthetic oligonucleotide
  misc_feature 1..20: note = Target: FXN; (-) strand; PAM type: YTN; PAM sequence: CTT
  source 1..20: mol_type = other DNA
caaacacaatgtgggccaaa

SEQ ID NO: 23144 - DNA, 20 bp, synthetic construct
  misc_feature 1..20: note = Description of Artificial Sequence: Synthetic oligonucleotide
  misc_feature 1..20: note = Target: FXN; (-) strand; PAM type: YTN; PAM sequence: TTC
  source 1..20: mol_type = other DNA
ttcaaacacaatgtgggcca

SEQ ID NO: 23145 - DNA, 20 bp, synthetic construct
  misc_feature 1..20: note = Description of Artificial Sequence: Synthetic oligonucleotide
  misc_feature 1..20: note = Target: FXN; (-) strand; PAM type: YTN; PAM sequence: TTT
  source 1..20: mol_type = other DNA
cttcaaacacaatgtgggcc

SEQ ID NO: 23146 - DNA, 20 bp, synthetic construct
  misc_feature 1..20: note = Description of Artificial Sequence: Synthetic oligonucleotide
  misc_feature 1..20: note = Target: FXN; (-) strand; PAM type: YTN; PAM sequence: CTG
  source 1..20: mol_type = other DNA
gcaaccaatcccaaagtttc

SEQ ID NO: 23147 - DNA, 20 bp, synthetic construct
  misc_feature 1..20: note = Description of Artificial Sequence: Synthetic oligonucleotide
  misc_feature 1..20: note = Target: FXN; (-) strand; PAM type: YTN; PAM sequence: TTA
  source 1..20: mol_type = other DNA
agcactggcaaccaatccca

SEQ ID NO: 23148 - DNA, 20 bp, synthetic construct
  misc_feature 1..20: note = Description of Artificial Sequence: Synthetic oligonucleotide
  misc_feature 1..20: note = Target: FXN; (-) strand; PAM type: YTN; PAM sequence: TTT
  source 1..20: mol_type = other DNA
aagcactggcaaccaatccc

SEQ ID NO: 23149 - DNA, 20 bp, synthetic construct
  misc_feature 1..20: note = Description of Artificial Sequence: Synthetic oligonucleotide
  misc_feature 1..20: note = Target: FXN; (-) strand; PAM type: YTN; PAM sequence: TTT
  source 1..20: mol_type = other DNA
taagcactggcaaccaatcc

SEQ ID NO: 23150 - DNA, 20 bp, synthetic construct
  misc_feature 1..20: note = Description of Artificial Sequence: Synthetic oligonucleotide
  misc_feature 1..20: note = Target: FXN; (-) strand; PAM type: YTN; PAM sequence: CTT
  source 1..20: mol_type = other DNA
ttaagcactggcaaccaatc

SEQ ID NO: 23151 - DNA, 20 bp, synthetic construct
  misc_feature 1..20: note = Description of Artificial Sequence: Synthetic oligonucleotide
  misc_feature 1..20: note = Target: FXN; (-) strand; PAM type: YTN; PAM sequence: CTA
  source 1..20: mol_type = other DNA
acttttaagcactggcaacc

SEQ ID NO: 23152 - DNA, 20 bp, synthetic construct
  misc_feature 1..20: note = Description of Artificial Sequence: Synthetic oligonucleotide
  misc_feature 1..20: note = Target: FXN; (-) strand; PAM type: YTN; PAM sequence: CTA
  source 1..20: mol_type = other DNA
agtcctaacttttaagcact

SEQ ID NO: 23153 - DNA, 20 bp, synthetic construct
  misc_feature 1..20: note = Description of Artificial Sequence: Synthetic oligonucleotide
  misc_feature 1..20: note = Target: FXN; (-) strand; PAM type: YTN; PAM sequence: TTC
  source 1..20: mol_type = other DNA
taagtcctaacttttaagca

SEQ ID NO: 23154 - DNA, 20 bp, synthetic construct
  misc_feature 1..20: note = Description of Artificial Sequence: Synthetic oligonucleotide
  misc_feature 1..20: note = Target: FXN; (-) strand; PAM type: YTN; PAM sequence: TTT
  source 1..20: mol_type = other DNA
ctaagtcctaacttttaagc

SEQ ID NO: 23155 - DNA, 20 bp, synthetic construct
  misc_feature 1..20: note = Description of Artificial Sequence: Synthetic oligonucleotide
  misc_feature 1..20: note = Target: FXN; (-) strand; PAM type: YTN; PAM sequence: TTT
  source 1..20: mol_type = other DNA
tctaagtcctaacttttaag

SEQ ID NO: 23156 - DNA, 20 bp, synthetic construct
  misc_feature 1..20: note = Description of Artificial Sequence: Synthetic oligonucleotide
  misc_feature 1..20: note = Target: FXN; (-) strand; PAM type: YTN; PAM sequence: CTG
  source 1..20: mol_type = other DNA
ccaggaaatccattttctaa

SEQ ID NO: 23157 - DNA, 20 bp, synthetic construct
  misc_feature 1..20: note = Description of Artificial Sequence: Synthetic oligonucleotide
  misc_feature 1..20: note = Target: FXN; (-) strand; PAM type: YTN; PAM sequence: TTA
  source 1..20: mol_type = other DNA
tgggcatgagccaccgcgtc

SEQ ID NO: 23158 - DNA, 20 bp, synthetic construct
  misc_feature 1..20: note = Description of Artificial Sequence: Synthetic oligonucleotide
  misc_feature 1..20: note = Target: FXN; (-) strand; PAM type: YTN; PAM sequence: CTG
  source 1..20: mol_type = other DNA
agattatgggcatgagccac

SEQ ID NO: 23159 - DNA, 20 bp, synthetic construct
  misc_feature 1..20: note = Description of Artificial Sequence: Synthetic oligonucleotide
  misc_feature 1..20: note = Target: FXN; (-) strand; PAM type: YTN; PAM sequence: CTC
  source 1..20: mol_type = other DNA
ccaaagtgctgagattatgg

SEQ ID NO: 23160 - DNA, 20 bp, synthetic construct
  misc_feature 1..20: note = Description of Artificial Sequence: Synthetic oligonucleotide
  misc_feature 1..20: note = Target: FXN; (-) strand; PAM type: YTN; PAM sequence: CTA
  source 1..20: mol_type = other DNA
ggcctcccaaagtgctgaga

SEQ ID NO: 23161 - DNA, 20 bp, synthetic construct
  misc_feature 1..20: note = Description of Artificial Sequence: Synthetic oligonucleotide
  misc_feature 1..20: note = Target: FXN; (-) strand; PAM type: YTN; PAM sequence: TTC
  source 1..20: mol_type = other DNA
ctaggcctcccaaagtgctg

SEQ ID NO: 23162 - DNA, 20 bp, synthetic construct
  misc_feature 1..20: note = Description of Artificial Sequence: Synthetic oligonucleotide
  misc_feature 1..20: note = Target: FXN; (-) strand; PAM type: YTN; PAM sequence: CTT
  source 1..20: mol_type = other DNA
cctaggcctcccaaagtgct

SEQ ID NO: 23163 - DNA, 20 bp, synthetic construct
  misc_feature 1..20: note = Description of Artificial Sequence: Synthetic oligonucleotide
  misc_feature 1..20: note = Target: FXN; (-) strand; PAM type: YTN; PAM sequence: CTC
  source 1..20: mol_type = other DNA
aggtgatccaccttcctagg

SEQ ID NO: 23164 - DNA, 20 bp, synthetic construct
  misc_feature 1..20: note = Description of Artificial Sequence: Synthetic oligonucleotide
  misc_feature 1..20: note = Target: FXN; (-) strand; PAM type: YTN; PAM sequence: CTC
  source 1..20: mol_type = other DNA
cggacctcaggtgatccacc

SEQ ID NO: 23165 - DNA, 20 bp, synthetic construct
  misc_feature 1..20: note = Description of Artificial Sequence: Synthetic oligonucleotide
  misc_feature 1..20: note = Target: FXN; (-) strand; PAM type: YTN; PAM sequence: TTG
  source 1..20: mol_type = other DNA
aactccggacctcaggtgat

SEQ ID NO: 23166 - DNA, 20 bp, synthetic construct
  misc_feature 1..20: note = Description of Artificial Sequence: Synthetic oligonucleotide
  misc_feature 1..20: note = Target: FXN; (-) strand; PAM type: YTN; PAM sequence: CTT
  source 1..20: mol_type = other DNA
gaactccggacctcaggtga

SEQ ID NO: 23167 - DNA, 20 bp, synthetic construct
  misc_feature 1..20: note = Description of Artificial Sequence: Synthetic oligonucleotide
  misc_feature 1..20: note = Target: FXN; (-) strand; PAM type: YTN; PAM sequence: TTA
  source 1..20: mol_type = other DNA
gtcttgaactccggacctca

SEQ ID NO: 23168 - DNA, 20 bp, synthetic construct
  misc_feature 1..20: note = Description of Artificial Sequence: Synthetic oligonucleotide
  misc_feature 1..20: note = Target: FXN; (-) strand; PAM type: YTN; PAM sequence: TTG
  source 1..20: mol_type = other DNA
gccaggttagtcttgaactc

SEQ ID NO: 23169 - DNA, 20 bp, synthetic construct
  misc_feature 1..20: note = Description of Artificial Sequence: Synthetic oligonucleotide
  misc_feature 1..20: note = Target: FXN; (-) strand; PAM type: YTN; PAM sequence: TTC
  source 1..20: mol_type = other DNA
accatgttggccaggttagt

SEQ ID NO: 23170 - DNA, 20 bp, synthetic construct
  misc_feature 1..20: note = Description of Artificial Sequence: Synthetic oligonucleotide
  misc_feature 1..20: note = Target: FXN; (-) strand; PAM type: YTN; PAM sequence: TTT
  source 1..20: mol_type = other DNA
caccatgttggccaggttag

SEQ ID NO: 23171 - DNA, 20 bp, synthetic construct
  misc_feature 1..20: note = Description of Artificial Sequence: Synthetic oligonucleotide
  misc_feature 1..20: note = Target: FXN; (-) strand; PAM type: YTN; PAM sequence: CTG
  source 1..20: mol_type = other DNA
ggtttcaccatgttggccag

SEQ ID NO: 23172 - DNA, 20 bp, synthetic construct
  misc_feature 1..20: note = Description of Artificial Sequence: Synthetic oligonucleotide
  misc_feature 1..20: note = Target: FXN; (-) strand; PAM type: YTN; PAM sequence: TTA
  source 1..20: mol_type = other DNA
gtagatactgggtttcacca

SEQ ID NO: 23173 - DNA, 20 bp, synthetic construct
  misc_feature 1..20: note = Description of Artificial Sequence: Synthetic oligonucleotide
  misc_feature 1..20: note = Target: FXN; (-) strand; PAM type: YTN; PAM sequence: TTT
  source 1..20: mol_type = other DNA
agtagatactgggtttcacc

SEQ ID NO: 23174 - DNA, 20 bp, synthetic construct
  misc_feature 1..20: note = Description of Artificial Sequence: Synthetic oligonucleotide
  misc_feature 1..20: note = Target: FXN; (-) strand; PAM type: YTN; PAM sequence: TTT
  source 1..20: mol_type = other DNA
tagtagatactgggtttcac

SEQ ID NO: 23175 - DNA, 20 bp, synthetic construct
  misc_feature 1..20: note = Description of Artificial Sequence: Synthetic oligonucleotide
  misc_feature 1..20: note = Target: FXN; (-) strand; PAM type: YTN; PAM sequence: TTT
  source 1..20: mol_type = other DNA
ttagtagatactgggtttca

SEQ ID NO: 23176 - DNA, 20 bp, synthetic construct
  misc_feature 1..20: note = Description of Artificial Sequence: Synthetic oligonucleotide
  misc_feature 1..20: note = Target: FXN; (-) strand; PAM type: YTN; PAM sequence: TTT
  source 1..20: mol_type = other DNA
tttagtagatactgggtttc

SEQ ID NO: 23177 - DNA, 20 bp, synthetic construct
  misc_feature 1..20: note = Description of Artificial Sequence: Synthetic oligonucleotide
  misc_feature 1..20: note = Target: FXN; (-) strand; PAM type: YTN; PAM sequence: TTG
  source 1..20: mol_type = other DNA
tattttttagtagatactgg

SEQ ID NO: 23178 - DNA, 20 bp, synthetic construct
  misc_feature 1..20: note = Description of Artificial Sequence: Synthetic oligonucleotide
  misc_feature 1..20: note = Target: FXN; (-) strand; PAM type: YTN; PAM sequence: TTT
  source 1..20: mol_type = other DNA
gtattttttagtagatactg

SEQ ID NO: 23179 - DNA, 20 bp, synthetic construct
  misc_feature 1..20: note = Description of Artificial Sequence: Synthetic oligonucleotide
  misc_feature 1..20: note = Target: FXN; (-) strand; PAM type: YTN; PAM sequence: TTT
  source 1..20: mol_type = other DNA
tgtattttttagtagatact

SEQ ID NO: 23180 - DNA, 20 bp, synthetic construct
  misc_feature 1..20: note = Description of Artificial Sequence: Synthetic oligonucleotide
  misc_feature 1..20: note = Target: FXN; (-) strand; PAM type: YTN; PAM sequence: TTT
  source 1..20: mol_type = other DNA
ttgtattttttagtagatac

SEQ ID NO: 23181 - DNA, 20 bp, synthetic construct
  misc_feature 1..20: note = Description of Artificial Sequence: Synthetic oligonucleotide
  misc_feature 1..20: note = Target: FXN; (-) strand; PAM type: YTN; PAM sequence: TTT
  source 1..20: mol_type = other DNA
tttgtattttttagtagata

SEQ ID NO: 23182 - DNA, 20 bp, synthetic construct
  misc_feature 1..20: note = Description of Artificial Sequence: Synthetic oligonucleotide
  misc_feature 1..20: note = Target: FXN; (-) strand; PAM type: YTN; PAM sequence: TTT
  source 1..20: mol_type = other DNA
ttttgtattttttagtagat

SEQ ID NO: 23183 - DNA, 20 bp, synthetic construct
  misc_feature 1..20: note = Description of Artificial Sequence: Synthetic oligonucleotide
  misc_feature 1..20: note = Target: FXN; (-) strand; PAM type: YTN; PAM sequence: TTT
  source 1..20: mol_type = other DNA
tttttgtattttttagtaga

SEQ ID NO: 23184 - DNA, 20 bp, synthetic construct
  misc_feature 1..20: note = Description of Artificial Sequence: Synthetic oligonucleotide
  misc_feature 1..20: note = Target: FXN; (-) strand; PAM type: YTN; PAM sequence: TTT
  source 1..20: mol_type = other DNA
ttttttgtattttttagtag

SEQ ID NO: 23185 - DNA, 20 bp, synthetic construct
  misc_feature 1..20: note = Description of Artificial Sequence: Synthetic oligonucleotide
  misc_feature 1..20: note = Target: FXN; (-) strand; PAM type: YTN; PAM sequence: TTT
  source 1..20: mol_type = other DNA
tttttttgtattttttagta

SEQ ID NO: 23186 - DNA, 20 bp, synthetic construct
  misc_feature 1..20: note = Description of Artificial Sequence: Synthetic oligonucleotide
  misc_feature 1..20: note = Target: FXN; (-) strand; PAM type: YTN; PAM sequence: TTT
  source 1..20: mol_type = other DNA
ttttttttgtattttttagt

SEQ ID NO: 23187 - DNA, 20 bp, synthetic construct
  misc_feature 1..20: note = Description of Artificial Sequence: Synthetic oligonucleotide
  misc_feature 1..20: note = Target: FXN; (-) strand; PAM type: YTN; PAM sequence: TTT
  source 1..20: mol_type = other DNA
tttttttttgtattttttag

SEQ ID NO: 23188 - DNA, 20 bp, synthetic construct
  misc_feature 1..20: note = Description of Artificial Sequence: Synthetic oligonucleotide
  misc_feature 1..20: note = Target: FXN; (-) strand; PAM type: YTN; PAM sequence: TTT
  source 1..20: mol_type = other DNA
ttttttttttgtatttttta

SEQ ID NO: 23189 - DNA, 20 bp, synthetic construct
  misc_feature 1..20: note = Description of Artificial Sequence: Synthetic oligonucleotide
  misc_feature 1..20: note = Target: FXN; (-) strand; PAM type: YTN; PAM sequence: TTT
  source 1..20: mol_type = other DNA
tttttttttttgtatttttt

SEQ ID NO: 23190 - DNA, 20 bp, synthetic construct
  misc_feature 1..20: note = Description of Artificial Sequence: Synthetic oligonucleotide
  misc_feature 1..20: note = Target: FXN; (-) strand; PAM type: YTN; PAM sequence: TTT
  source 1..20: mol_type = other DNA
ttttttttttttgtattttt

SEQ ID NO: 23191 - DNA, 20 bp, synthetic construct
  misc_feature 1..20: note = Description of Artificial Sequence: Synthetic oligonucleotide
  misc_feature 1..20: note = Target: FXN; (-) strand; PAM type: YTN; PAM sequence: TTT
  source 1..20: mol_type = other DNA
tttttttttttttgtatttt

SEQ ID NO: 23192 - DNA, 20 bp, synthetic construct
  misc_feature 1..20: note = Description of Artificial Sequence: Synthetic oligonucleotide
  misc_feature 1..20: note = Target: FXN; (-) strand; PAM type: YTN; PAM sequence: CTT
  source 1..20: mol_type = other DNA
ttttttttttttttgtattt

SEQ ID NO: 23193 - DNA, 20 bp, synthetic construct
  misc_feature 1..20: note = Description of Artificial Sequence: Synthetic oligonucleotide
  misc_feature 1..20: note = Target: FXN; (-) strand; PAM type: YTN; PAM sequence: TTC
  source 1..20: mol_type = other DNA
ttttttttttttttttgtat

SEQ ID NO: 23194 - DNA, 20 bp, synthetic construct
  misc_feature 1..20: note = Description of Artificial Sequence: Synthetic oligonucleotide
  misc_feature 1..20: note = Target: FXN; (-) strand; PAM type: YTN; PAM sequence: CTT
  source 1..20: mol_type = other DNA
cttttttttttttttttgta

SEQ ID NO: 23195 - DNA, 20 bp, synthetic construct
  misc_feature 1..20: note = Description of Artificial Sequence: Synthetic oligonucleotide
  misc_feature 1..20: note = Target: FXN; (-) strand; PAM type: YTN; PAM sequence: TTC
  source 1..20: mol_type = other DNA
ttcttttttttttttttttg

SEQ ID NO: 23196 - DNA, 20 bp, synthetic construct
  misc_feature 1..20: note = Description of Artificial Sequence: Synthetic oligonucleotide
  misc_feature 1..20: note = Target: FXN; (-) strand; PAM type: YTN; PAM sequence: CTT
  source 1..20: mol_type = other DNA
cttctttttttttttttttt

SEQ ID NO: 23197 - DNA, 20 bp, synthetic construct
  misc_feature 1..20: note = Description of Artificial Sequence: Synthetic oligonucleotide
  misc_feature 1..20: note = Target: FXN; (-) strand; PAM type: YTN; PAM sequence: TTC
  source 1..20: mol_type = other DNA
ttcttctttttttttttttt

SEQ ID NO: 23198 - DNA, 20 bp, synthetic construct
  misc_feature 1..20: note = Description of Artificial Sequence: Synthetic oligonucleotide
  misc_feature 1..20: note = Target: FXN; (-) strand; PAM type: YTN; PAM sequence: CTT
  source 1..20: mol_type = other DNA
cttcttcttttttttttttt

SEQ ID NO: 23199 - DNA, 20 bp, synthetic construct
  misc_feature 1..20: note = Description of Artificial Sequence: Synthetic oligonucleotide
  misc_feature 1..20: note = Target: FXN; (-) strand; PAM type: YTN; PAM sequence: TTC
  source 1..20: mol_type = other DNA
ttcttcttcttttttttttt

SEQ ID NO: 23200 - DNA, 20 bp, synthetic construct
  misc_feature 1..20: note = Description of Artificial Sequence: Synthetic oligonucleotide
  misc_feature 1..20: note = Target: FXN; (-) strand; PAM type: YTN; PAM sequence: CTT
  source 1..20: mol_type = other DNA
cttcttcttctttttttttt

SEQ ID NO: 23201 - DNA, 20 bp, synthetic construct
  misc_feature 1..20: note = Description of Artificial Sequence: Synthetic oligonucleotide
  misc_feature 1..20: note = Target: FXN; (-) strand; PAM type: YTN; PAM sequence: TTC
  source 1..20: mol_type = other DNA
ttcttcttcttctttttttt

SEQ ID NO: 23202 - DNA, 20 bp, synthetic construct
  misc_feature 1..20: note = Description of Artificial Sequence: Synthetic oligonucleotide
  misc_feature 1..20: note = Target: FXN; (-) strand; PAM type: YTN; PAM sequence: CTT
  source 1..20: mol_type = other DNA
cttcttcttcttcttttttt

SEQ ID NO: 23203 - DNA, 20 bp, synthetic construct
  misc_feature 1..20: note = Description of Artificial Sequence: Synthetic oligonucleotide
  misc_feature 1..20: note = Target: FXN; (-) strand; PAM type: YTN; PAM sequence: TTC
  source 1..20: mol_type = other DNA
ttcttcttcttcttcttttt

SEQ ID NO: 23204 - DNA, 20 bp, synthetic construct
  misc_feature 1..20: note = Description of Artificial Sequence: Synthetic oligonucleotide
  misc_feature 1..20: note = Target: FXN; (-) strand; PAM type: YTN; PAM sequence: TTT
  source 1..20: mol_type = other DNA
cttcttcttcttcttctttt

SEQ ID NO: 23205 - DNA, 20 bp, synthetic construct
  misc_feature 1..20: note = Description of Artificial Sequence: Synthetic oligonucleotide
  misc_feature 1..20: note = Target: FXN; (-) strand; PAM type: YTN; PAM sequence: TTT
  source 1..20: mol_type = other DNA
tcttcttcttcttcttcttt

SEQ ID NO: 23206 - DNA, 20 bp, synthetic construct
  misc_feature 1..20: note = Description of Artificial Sequence: Synthetic oligonucleotide
  misc_feature 1..20: note = Target: FXN; (-) strand; PAM type: YTN; PAM sequence: TTA
  source 1..20: mol_type = other DNA
ttttcttcttcttcttcttc

SEQ ID NO: 23207 - DNA, 20 bp, synthetic construct
  misc_feature 1..20: note = Description of Artificial Sequence: Synthetic oligonucleotide
  misc_feature 1..20: note = Target: FXN; (-) strand; PAM type: YTN; PAM sequence: TTT
  source 1..20: mol_type = other DNA
attttcttcttcttcttctt

SEQ ID NO: 23208 - DNA, 20 bp, synthetic construct
  misc_feature 1..20: note = Description of Artificial Sequence: Synthetic oligonucleotide
  misc_feature 1..20: note = Target: FXN; (-) strand; PAM type: YTN; PAM sequence: CTT
  source 1..20: mol_type = other DNA
tattttcttcttcttcttct

SEQ ID NO: 23209 - DNA, 20 bp, synthetic construct
  misc_feature 1..20: note = Description of Artificial Sequence: Synthetic oligonucleotide
  misc_feature 1..20: note = Target: FXN; (-) strand; PAM type: YTN; PAM sequence: TTC
  source 1..20: mol_type = other DNA
tttattttcttcttcttctt

SEQ ID NO: 23210 - DNA, 20 bp, synthetic construct
  misc_feature 1..20: note = Description of Artificial Sequence: Synthetic oligonucleotide
  misc_feature 1..20: note = Target: FXN; (-) strand; PAM type: YTN; PAM sequence: TTT
  source 1..20: mol_type = other DNA
ctttattttcttcttcttct

SEQ ID NO: 23211 - DNA, 20 bp, synthetic construct
  misc_feature 1..20: note = Description of Artificial Sequence: Synthetic oligonucleotide
  misc_feature 1..20: note = Target: FXN; (-) strand; PAM type: YTN; PAM sequence: TTT
  source 1..20: mol_type = other DNA
tctttattttcttcttcttc

SEQ ID NO: 23212 - DNA, 20 bp, synthetic construct
  misc_feature 1..20: note = Description of Artificial Sequence: Synthetic oligonucleotide
  misc_feature 1..20: note = Target: FXN; (-) strand; PAM type: YTN; PAM sequence: CTT
  source 1..20: mol_type = other DNA
ttctttattttcttcttctt

SEQ ID NO: 23213 - DNA, 20 bp, synthetic construct
  misc_feature 1..20: note = Description of Artificial Sequence: Synthetic oligonucleotide
  misc_feature 1..20: note = Target: FXN; (-) strand; PAM type: YTN; PAM sequence: CTA
  source 1..20: mol_type = other DNA
acttttctttattttcttct

SEQ ID NO: 23214 - DNA, 20 bp, synthetic construct
  misc_feature 1..20: note = Description of Artificial Sequence: Synthetic oligonucleotide
  misc_feature 1..20: note = Target: FXN; (-) strand; PAM type: YTN; PAM sequence: TTA
  source 1..20: mol_type = other DNA
caggcgcgcgacaccacgcc

SEQ ID NO: 23215 - DNA, 20 bp, synthetic construct
  misc_feature 1..20: note = Description of Artificial Sequence: Synthetic oligonucleotide
  misc_feature 1..20: note = Target: FXN; (-) strand; PAM type: YTN; PAM sequence: CTG
  source 1..20: mol_type = other DNA
ggattacaggcgcgcgacac

SEQ ID NO: 23216 - DNA, 20 bp, synthetic construct
  misc_feature 1..20: note = Description of Artificial Sequence: Synthetic oligonucleotide
  misc_feature 1..20: note = Target: FXN; (-) strand; PAM type: YTN; PAM sequence: CTG
  source 1..20: mol_type = other DNA
gagtagctgggattacaggc

SEQ ID NO: 23217 - DNA, 20 bp, synthetic construct
  misc_feature 1..20: note = Description of Artificial Sequence: Synthetic oligonucleotide
  misc_feature 1..20: note = Target: FXN; (-) strand; PAM type: YTN; PAM sequence: CTC
  source 1..20: mol_type = other DNA
tggagtagctgggattacag

SEQ ID NO: 23218 - DNA, 20 bp, synthetic construct
  misc_feature 1..20: note = Description of Artificial Sequence: Synthetic oligonucleotide
  misc_feature 1..20: note = Target: FXN; (-) strand; PAM type: YTN; PAM sequence: CTG
  source 1..20: mol_type = other DNA
ccgcagcctctggagtagct

SEQ ID NO: 23219 - DNA, 20 bp, synthetic construct
  misc_feature 1..20: note = Description of Artificial Sequence: Synthetic oligonucleotide
  misc_feature 1..20: note = Target: FXN; (-) strand; PAM type: YTN; PAM sequence: CTC
  source 1..20: mol_type = other DNA
ctgccgcagcctctggagta

SEQ ID NO: 23220 - DNA, 20 bp, synthetic construct
  misc_feature 1..20: note = Description of Artificial Sequence: Synthetic oligonucleotide
  misc_feature 1..20: note = Target: FXN; (-) strand; PAM type: YTN; PAM sequence: TTC
  source 1..20: mol_type = other DNA
tcctgccgcagcctctggag

SEQ ID NO: 23221 - DNA, 20 bp, synthetic construct
  misc_feature 1..20: note = Description of Artificial Sequence: Synthetic oligonucleotide
  misc_feature 1..20: note = Target: FXN; (-) strand; PAM type: YTN; PAM sequence: CTC
  source 1..20: mol_type = other DNA
aagcgattctcctgccgcag

SEQ ID NO: 23222 - DNA, 20 bp, synthetic construct
  misc_feature 1..20: note = Description of Artificial Sequence: Synthetic oligonucleotide
  misc_feature 1..20: note = Target: FXN; (-) strand; PAM type: YTN; PAM sequence: CTC
  source 1..20: mol_type = other DNA
ccgggctcaagcgattctcc

SEQ ID NO: 23223 - DNA, 20 bp, synthetic construct
  misc_feature 1..20: note = Description of Artificial Sequence: Synthetic oligonucleotide
  misc_feature 1..20: note = Target: FXN; (-) strand; PAM type: YTN; PAM sequence: CTG
  source 1..20: mol_type = other DNA
cctcccgggctcaagcgatt

SEQ ID NO: 23224 - DNA, 20 bp, synthetic construct
  misc_feature 1..20: note = Description of Artificial Sequence: Synthetic oligonucleotide
  misc_feature 1..20: note = Target: FXN; (-) strand; PAM type: YTN; PAM sequence: CTC
  source 1..20: mol_type = other DNA
tgcctcccgggctcaagcga

SEQ ID NO: 23225 - DNA, 20 bp, synthetic construct
  misc_feature 1..20: note = Description of Artificial Sequence: Synthetic oligonucleotide
  misc_feature 1..20: note = Target: FXN; (-) strand; PAM type: YTN; PAM sequence: TTA
  source 1..20: mol_type = other DNA
atgcaacctctgcctcccgg

SEQ ID NO: 23226 - DNA, 20 bp, synthetic construct
  misc_feature 1..20: note = Description of Artificial Sequence: Synthetic oligonucleotide
  misc_feature 1..20: note = Target: FXN; (-) strand; PAM type: YTN; PAM sequence: CTT
  source 1..20: mol_type = other DNA
aatgcaacctctgcctcccg

SEQ ID NO: 23227 - DNA, 20 bp, synthetic construct
  misc_feature 1..20: note = Description of Artificial Sequence: Synthetic oligonucleotide
  misc_feature 1..20: note = Target: FXN; (-) strand; PAM type: YTN; PAM sequence: TTG
  source 1..20: mol_type = other DNA
gcttaatgcaacctctgcct

SEQ ID NO: 23228 - DNA, 20 bp, synthetic construct
  misc_feature 1..20: note = Description of Artificial Sequence: Synthetic oligonucleotide
  misc_feature 1..20: note = Target: FXN; (-) strand; PAM type: YTN; PAM sequence: CTT
  source 1..20: mol_type = other DNA
ggcttaatgcaacctctgcc

SEQ ID NO: 23229 - DNA, 20 bp, synthetic construct
  misc_feature 1..20: note = Description of Artificial Sequence: Synthetic oligonucleotide
  misc_feature 1..20: note = Target: FXN; (-) strand; PAM type: YTN; PAM sequence: TTG
  source 1..20: mol_type = other DNA
ggcgatcttggcttaatgca

SEQ ID NO: 23230 - DNA, 20 bp, synthetic construct
  misc_feature 1..20: note = Description of Artificial Sequence: Synthetic oligonucleotide
  misc_feature 1..20: note = Target: FXN; (-) strand; PAM type: YTN; PAM sequence: CTG
  source 1..20: mol_type = other DNA
tcgcccaggccggagtgcat

SEQ ID NO: 23231 - DNA, 20 bp, synthetic construct
  misc_feature 1..20: note = Description of Artificial Sequence: Synthetic oligonucleotide
  misc_feature 1..20: note = Target: FXN; (-) strand; PAM type: YTN; PAM sequence: CTC
  source 1..20: mol_type = other DNA
tgtcgcccaggccggagtgc

SEQ ID NO: 23232 - DNA, 20 bp, synthetic construct
  misc_feature 1..20: note = Description of Artificial Sequence: Synthetic oligonucleotide
  misc_feature 1..20: note = Target: FXN; (-) strand; PAM type: YTN; PAM sequence: TTG
  source 1..20: mol_type = other DNA
ctctgtcgcccaggccggag

SEQ ID NO: 23233 - DNA, 20 bp, synthetic construct
  misc_feature 1..20: note = Description of Artificial Sequence: Synthetic oligonucleotide
  misc_feature 1..20: note = Target: FXN; (-) strand; PAM type: YTN; PAM sequence: CTT
  source 1..20: mol_type = other DNA
gctctgtcgcccaggccgga

SEQ ID NO: 23234 - DNA, 20 bp, synthetic construct
  misc_feature 1..20: note = Description of Artificial Sequence: Synthetic oligonucleotide
  misc_feature 1..20: note = Target: FXN; (-) strand; PAM type: YTN; PAM sequence: TTG
  source 1..20: mol_type = other DNA
agacggagtcttgctctgtc

SEQ ID NO: 23235 - DNA, 20 bp, synthetic construct
  misc_feature 1..20: note = Description of Artificial Sequence: Synthetic oligonucleotide
  misc_feature 1..20: note = Target: FXN; (-) strand; PAM type: YTN; PAM sequence: TTT
  source 1..20: mol_type = other DNA
gagacggagtcttgctctgt

SEQ ID NO: 23236 - DNA, 20 bp, synthetic construct
  misc_feature 1..20: note = Description of Artificial Sequence: Synthetic oligonucleotide
  misc_feature 1..20: note = Target: FXN; (-) strand; PAM type: YTN; PAM sequence: TTT
  source 1..20: mol_type = other DNA
tgagacggagtcttgctctg

SEQ ID NO: 23237 - DNA, 20 bp, synthetic construct
  misc_feature 1..20: note = Description of Artificial Sequence: Synthetic oligonucleotide
  misc_feature 1..20: note = Target: FXN; (-) strand; PAM type: YTN; PAM sequence: TTT
  source 1..20: mol_type = other DNA
ttgagacggagtcttgctct

SEQ ID NO: 23238 - DNA, 20 bp, synthetic construct
  misc_feature 1..20: note = Description of Artificial Sequence: Synthetic oligonucleotide
  misc_feature 1..20: note = Target: FXN; (-) strand; PAM type: YTN; PAM sequence: TTT
  source 1..20: mol_type = other DNA
tttgagacggagtcttgctc

SEQ ID NO: 23239 - DNA, 20 bp, synthetic construct
  misc_feature 1..20: note = Description of Artificial Sequence: Synthetic oligonucleotide
  misc_feature 1..20: note = Target: FXN; (-) strand; PAM type: YTN; PAM sequence: TTA
  source 1..20: mol_type = other DNA
ttttttgagacggagtcttg

SEQ ID NO: 23240 - DNA, 20 bp, synthetic construct
  misc_feature 1..20: note = Description of Artificial Sequence: Synthetic oligonucleotide
  misc_feature 1..20: note = Target: FXN; (-) strand; PAM type: YTN; PAM sequence: TTA
  source 1..20: mol_type = other DNA
ttattttttgagacggagtc

SEQ ID NO: 23241 - DNA, 20 bp, synthetic construct
  misc_feature 1..20: note = Description of Artificial Sequence: Synthetic oligonucleotide
  misc_feature 1..20: note = Target: FXN; (-) strand; PAM type: YTN; PAM sequence: TTA
  source 1..20: mol_type = other DNA
ttattattttttgagacgga

SEQ ID NO: 23242 - DNA, 20 bp, synthetic construct
  misc_feature 1..20: note = Description of Artificial Sequence: Synthetic oligonucleotide
  misc_feature 1..20: note = Target: FXN; (-) strand; PAM type: YTN; PAM sequence: TTA
  source 1..20: mol_type = other DNA
ttattattattttttgagac

SEQ ID NO: 23243 - DNA, 20 bp, synthetic construct
  misc_feature 1..20: note = Description of Artificial Sequence: Synthetic oligonucleotide
  misc_feature 1..20: note = Target: FXN; (-) strand; PAM type: YTN; PAM sequence: TTT
  source 1..20: mol_type = other DNA
attattattattttttgaga

SEQ ID NO: 23244 - DNA, 20 bp, synthetic construct
  misc_feature 1..20: note = Description of Artificial Sequence: Synthetic oligonucleotide
  misc_feature 1..20: note = Target: FXN; (-) strand; PAM type: YTN; PAM sequence: TTA
  source 1..20: mol_type = other DNA
tttattattattattttttg

SEQ ID NO: 23245 - DNA, 20 bp, synthetic construct
  misc_feature 1..20: note = Description of Artificial Sequence: Synthetic oligonucleotide
  misc_feature 1..20: note = Target: FXN; (-) strand; PAM type: YTN; PAM sequence: TTT
  source 1..20: mol_type = other DNA
atttattattattatttttt

SEQ ID NO: 23246 - DNA, 20 bp, synthetic construct
  misc_feature 1..20: note = Description of Artificial Sequence: Synthetic oligonucleotide
  misc_feature 1..20: note = Target: FXN; (-) strand; PAM type: YTN; PAM sequence: TTT
  source 1..20: mol_type = other DNA
tatttattattattattttt

SEQ ID NO: 23247 - DNA, 20 bp, synthetic construct
  misc_feature 1..20: note = Description of Artificial Sequence: Synthetic oligonucleotide
  misc_feature 1..20: note = Target: FXN; (-) strand; PAM type: YTN; PAM sequence: TTT
  source 1..20: mol_type = other DNA
ttatttattattattatttt

SEQ ID NO: 23248 - DNA, 20 bp, synthetic construct
  misc_feature 1..20: note = Description of Artificial Sequence: Synthetic oligonucleotide
  misc_feature 1..20: note = Target: FXN; (-) strand; PAM type: YTN; PAM sequence: TTA
  source 1..20: mol_type = other DNA
tttttatttattattattat

SEQ ID NO: 23249 - DNA, 20 bp, synthetic construct
  misc_feature 1..20: note = Description of Artificial Sequence: Synthetic oligonucleotide
  misc_feature 1..20: note = Target: FXN; (-) strand; PAM type: YTN; PAM sequence: TTT
  source 1..20: mol_type = other DNA
atttttatttattattatta

SEQ ID NO: 23250 - DNA, 20 bp, synthetic construct
  misc_feature 1..20: note = Description of Artificial Sequence: Synthetic oligonucleotide
  misc_feature 1..20: note = Target: FXN; (-) strand; PAM type: YTN; PAM sequence: TTT
  source 1..20: mol_type = other DNA
tatttttatttattattatt

SEQ ID NO: 23251 - DNA, 20 bp, synthetic construct
  misc_feature 1..20: note = Description of Artificial Sequence: Synthetic oligonucleotide
  misc_feature 1..20: note = Target: FXN; (-) strand; PAM type: YTN; PAM sequence: TTT
  source 1..20: mol_type = other DNA
ttatttttatttattattat

SEQ ID NO: 23252 - DNA, 20 bp, synthetic construct
  misc_feature 1..20: note = Description of Artificial Sequence: Synthetic oligonucleotide
  misc_feature 1..20: note = Target: FXN; (-) strand; PAM type: YTN; PAM sequence: TTT
  source 1..20: mol_type = other DNA
tttatttttatttattatta

SEQ ID NO: 23253 - DNA, 20 bp, synthetic construct
  misc_feature 1..20: note = Description of Artificial Sequence: Synthetic oligonucleotide
  misc_feature 1..20: note = Target: FXN; (-) strand; PAM type: YTN; PAM sequence: TTA
  source 1..20: mol_type = other DNA
ttttttatttttatttatta

SEQ ID NO: 23254 - DNA, 20 bp, synthetic construct
  misc_feature 1..20: note = Description of Artificial Sequence: Synthetic oligonucleotide
  misc_feature 1..20: note = Target: FXN; (-) strand; PAM type: YTN; PAM sequence: TTT
  source 1..20: mol_type = other DNA
attttttatttttatttatt

SEQ ID NO: 23255 - DNA, 20 bp, synthetic construct
  misc_feature 1..20: note = Description of Artificial Sequence: Synthetic oligonucleotide
  misc_feature 1..20: note = Target: FXN; (-) strand; PAM type: YTN; PAM sequence: TTT
  source 1..20: mol_type = other DNA
tattttttatttttatttat

SEQ ID NO: 23256 - DNA, 20 bp, synthetic construct
  misc_feature 1..20: note = Description of Artificial Sequence: Synthetic oligonucleotide
  misc_feature 1..20: note = Target: FXN; (-) strand; PAM type: YTN; PAM sequence: CTG
  source 1..20: mol_type = other DNA
ggaaatccattttatttttt

SEQ ID NO: 23257 - DNA, 20 bp, synthetic construct
  misc_feature 1..20: note = Description of Artificial Sequence: Synthetic oligonucleotide
  misc_feature 1..20: note = Target: FXN; (-) strand; PAM type: YTN; PAM sequence: TTC
  source 1..20: mol_type = other DNA
cagagatgctgggaaatcca

SEQ ID NO: 23258 - DNA, 20 bp, synthetic construct
  misc_feature 1..20: note = Description of Artificial Sequence: Synthetic oligonucleotide
  misc_feature 1..20: note = Target: FXN; (-) strand; PAM type: YTN; PAM sequence: TTT
  source 1..20: mol_type = other DNA
ccagagatgctgggaaatcc

SEQ ID NO: 23259 - DNA, 20 bp, synthetic construct
  misc_feature 1..20: note = Description of Artificial Sequence: Synthetic oligonucleotide
  misc_feature 1..20: note = Target: FXN; (-) strand; PAM type: YTN; PAM sequence: TTT
  source 1..20: mol_type = other DNA
tccagagatgctgggaaatc

SEQ ID NO: 23260 - DNA, 20 bp, synthetic construct
  misc_feature 1..20: note = Description of Artificial Sequence: Synthetic oligonucleotide
  misc_feature 1..20: note = Target: FXN; (-) strand; PAM type: YTN; PAM sequence: TTT
  source 1..20: mol_type = other DNA
ttccagagatgctgggaaat

SEQ ID NO: 23261 - DNA, 20 bp, synthetic construct
  misc_feature 1..20: note = Description of Artificial Sequence: Synthetic oligonucleotide
  misc_feature 1..20: note = Target: FXN; (-) strand; PAM type: YTN; PAM sequence: CTA
  source 1..20: mol_type = other DNA
tttttccagagatgctggga

SEQ ID NO: 23262 - DNA, 20 bp, synthetic construct
  misc_feature 1..20: note = Description of Artificial Sequence: Synthetic oligonucleotide
  misc_feature 1..20: note = Target: FXN; (-) strand; PAM type: YTN; PAM sequence: TTG
  source 1..20: mol_type = other DNA
cctatttttccagagatgct

SEQ ID NO: 23263 - DNA, 20 bp, synthetic construct
  misc_feature 1..20: note = Description of Artificial Sequence: Synthetic oligonucleotide
  misc_feature 1..20: note = Target: FXN; (-) strand; PAM type: YTN; PAM sequence: CTT
  source 1..20: mol_type = other DNA
gcctatttttccagagatgc

SEQ ID NO: 23264 - DNA, 20 bp, synthetic construct
  misc_feature 1..20: note = Description of Artificial Sequence: Synthetic oligonucleotide
  misc_feature 1..20: note = Target: FXN; (-) strand; PAM type: YTN; PAM sequence: CTA
  source 1..20: mol_type = other DNA
aggaccatcatggccacact

SEQ ID NO: 23265 - DNA, 20 bp, synthetic construct
  misc_feature 1..20: note = Description of Artificial Sequence: Synthetic oligonucleotide
  misc_feature 1..20: note = Target: FXN; (-) strand; PAM type: YTN; PAM sequence: CTA
  source 1..20: mol_type = other DNA
gaggagatctaaggaccatc

SEQ ID NO: 23266 - DNA, 20 bp, synthetic construct
  misc_feature 1..20: note = Description of Artificial Sequence: Synthetic oligonucleotide
  misc_feature 1..20: note = Target: FXN; (-) strand; PAM type: YTN; PAM sequence: TTC
  source 1..20: mol_type = other DNA
ctagaggagatctaaggacc

SEQ ID NO: 23267 - DNA, 20 bp, synthetic construct
  misc_feature 1..20: note = Description of Artificial Sequence: Synthetic oligonucleotide
  misc_feature 1..20: note = Target: FXN; (-) strand; PAM type: YTN; PAM sequence: TTT
  source 1..20: mol_type = other DNA
cctagaggagatctaaggac

SEQ ID NO: 23268 - DNA, 20 bp, synthetic construct
  misc_feature 1..20: note = Description of Artificial Sequence: Synthetic oligonucleotide
  misc_feature 1..20: note = Target: FXN; (-) strand; PAM type: YTN; PAM sequence: CTT
  source 1..20: mol_type = other DNA
tcctagaggagatctaagga

SEQ ID NO: 23269 - DNA, 20 bp, synthetic construct
  misc_feature 1..20: note = Description of Artificial Sequence: Synthetic oligonucleotide
  misc_feature 1..20: note = Target: FXN; (-) strand; PAM type: YTN; PAM sequence: CTG
  source 1..20: mol_type = other DNA
ctttcctagaggagatctaa

SEQ ID NO: 23270 - DNA, 20 bp, synthetic construct
  misc_feature 1..20: note = Description of Artificial Sequence: Synthetic oligonucleotide
  misc_feature 1..20: note = Target: FXN; (-) strand; PAM type: YTN; PAM sequence: CTC
  source 1..20: mol_type = other DNA
agatagtgcacagaagccaa

SEQ ID NO: 23271 - DNA, 20 bp, synthetic construct
  misc_feature 1..20: note = Description of Artificial Sequence: Synthetic oligonucleotide
  misc_feature 1..20: note = Target: FXN; (-) strand; PAM type: YTN; PAM sequence: CTG
  source 1..20: mol_type = other DNA
tccacacaggcaggggtgga

SEQ ID NO: 23272 - DNA, 20 bp, synthetic construct
  misc_feature 1..20: note = Description of Artificial Sequence: Synthetic oligonucleotide
  misc_feature 1..20: note = Target: FXN; (-) strand; PAM type: YTN; PAM sequence: CTG
  source 1..20: mol_type = other DNA
acaacccatgctgtccacac

SEQ ID NO: 23273 - DNA, 20 bp, synthetic construct
  misc_feature 1..20: note = Description of Artificial Sequence: Synthetic oligonucleotide
  misc_feature 1..20: note = Target: FXN; (-) strand; PAM type: YTN; PAM sequence: CTG
  source 1..20: mol_type = other DNA
ctgacaacccatgctgtcca

SEQ ID NO: 23274 - DNA, 20 bp, synthetic construct
  misc_feature 1..20: note = Description of Artificial Sequence: Synthetic oligonucleotide
  misc_feature 1..20: note = Target: FXN; (-) strand; PAM type: YTN; PAM sequence: CTC
  source 1..20: mol_type = other DNA
tgctgacaacccatgctgtc

SEQ ID NO: 23275 - DNA, 20 bp, synthetic construct
  misc_feature 1..20: note = Description of Artificial Sequence: Synthetic oligonucleotide
  misc_feature 1..20: note = Target: FXN; (-) strand; PAM type: YTN; PAM sequence: CTC
  source 1..20: mol_type = other DNA
aaaaaaacaaaacaaaacac

SEQ ID NO: 23276 - DNA, 20 bp, synthetic construct
  misc_feature 1..20: note = Description of Artificial Sequence: Synthetic oligonucleotide
  misc_feature 1..20: note = Target: FXN; (-) strand; PAM type: YTN; PAM sequence: CTG
  source 1..20: mol_type = other DNA
tctcaaaaaaacaaaacaaa

SEQ ID NO: 23277 - DNA, 20 bp, synthetic construct
  misc_feature 1..20: note = Description of Artificial Sequence: Synthetic oligonucleotide
  misc_feature 1..20: note = Target: FXN; (-) strand; PAM type: YTN; PAM sequence: CTC
  source 1..20: mol_type = other DNA
tgtctcaaaaaaacaaaaca

SEQ ID NO: 23278 - DNA, 20 bp, synthetic construct
  misc_feature 1..20: note = Description of Artificial Sequence: Synthetic oligonucleotide
  misc_feature 1..20: note = Target: FXN; (-) strand; PAM type: YTN; PAM sequence: CTG
  source 1..20: mol_type = other DNA
ggcaacaagagggaaactct

SEQ ID NO: 23279 - DNA, 20 bp, synthetic construct
  misc_feature 1..20: note = Description of Artificial Sequence: Synthetic oligonucleotide
  misc_feature 1..20: note = Target: FXN; (-) strand; PAM type: YTN; PAM sequence: CTC
  source 1..20: mol_type = other DNA
cagcctgggcaacaagaggg

SEQ ID NO: 23280 - DNA, 20 bp, synthetic construct
  misc_feature 1..20: note = Description of Artificial Sequence: Synthetic oligonucleotide
  misc_feature 1..20: note = Target: FXN; (-) strand; PAM type: YTN; PAM sequence: CTG
  source 1..20: mol_type = other DNA
cactccagcctgggcaacaa

SEQ ID NO: 23281 - DNA, 20 bp, synthetic construct
  misc_feature 1..20: note = Description of Artificial Sequence: Synthetic oligonucleotide
  misc_feature 1..20: note = Target: FXN; (-) strand; PAM type: YTN; PAM sequence: CTG
  source 1..20: mol_type = other DNA
agccactgcactccagcctg

SEQ ID NO: 23282 - DNA, 20 bp, synthetic construct
  misc_feature 1..20: note = Description of Artificial Sequence: Synthetic oligonucleotide
  misc_feature 1..20: note = Target: FXN; (-) strand; PAM type: YTN; PAM sequence: CTG
  source 1..20: mol_type = other DNA
agactgagccactgcactcc

SEQ ID NO: 23283 - DNA, 20 bp, synthetic construct
  misc_feature 1..20: note = Description of Artificial Sequence: Synthetic oligonucleotide
  misc_feature 1..20: note = Target: FXN; (-) strand; PAM type: YTN; PAM sequence: TTG
  source 1..20: mol_type = other DNA
cagtgagctgagactgagcc

SEQ ID NO: 23284 - DNA, 20 bp, synthetic construct
  misc_feature 1..20: note = Description of Artificial Sequence: Synthetic oligonucleotide
  misc_feature 1..20: note = Target: FXN; (-) strand; PAM type: YTN; PAM sequence: TTG
  source 1..20: mol_type = other DNA
aacccaggaggcagaggttg

SEQ ID NO: 23285 - DNA, 20 bp, synthetic construct
  misc_feature 1..20: note = Description of Artificial Sequence: Synthetic oligonucleotide
  misc_feature 1..20: note = Target: FXN; (-) strand; PAM type: YTN; PAM sequence: CTT
  source 1..20: mol_type = other DNA
gaacccaggaggcagaggtt

SEQ ID NO: 23286 - DNA, 20 bp, synthetic construct
  misc_feature 1..20: note = Description of Artificial Sequence: Synthetic oligonucleotide
  misc_feature 1..20: note = Target: FXN; (-) strand; PAM type: YTN; PAM sequence: CTG
  source 1..20: mol_type = other DNA
aggcaggagaatcacttgaa

SEQ ID NO: 23287 - DNA, 20 bp, synthetic construct
  misc_feature 1..20: note = Description of Artificial Sequence: Synthetic oligonucleotide
  misc_feature 1..20: note = Target: FXN; (-) strand; PAM type: YTN; PAM sequence: CTC
  source 1..20: mol_type = other DNA
gggaggctgaggcaggagaa

SEQ ID NO: 23288 - DNA, 20 bp, synthetic construct
  misc_feature 1..20: note = Description of Artificial Sequence: Synthetic oligonucleotide
  misc_feature 1..20: note = Target: FXN; (-) strand; PAM type: YTN; PAM sequence: CTA
  source 1..20: mol_type = other DNA
ctcgggaggctgaggcagga

SEQ ID NO: 23289 - DNA, 20 bp, synthetic construct
  misc_feature 1..20: note = Description of Artificial Sequence: Synthetic oligonucleotide
  misc_feature 1..20: note = Target: FXN; (-) strand; PAM type: YTN; PAM sequence: TTA
  source 1..20: mol_type = other DNA
gccgataatcccagctactc

SEQ ID NO: 23290 - DNA, 20 bp, synthetic construct
  misc_feature 1..20: note = Description of Artificial Sequence: Synthetic oligonucleotide
  misc_feature 1..20: note = Target: FXN; (-) strand; PAM type: YTN; PAM sequence: CTA
  source 1..20: mol_type = other DNA
aaaatacaaaattagccgat

SEQ ID NO: 23291 - DNA, 20 bp, synthetic construct
  misc_feature 1..20: note = Description of Artificial Sequence: Synthetic oligonucleotide
  misc_feature 1..20: note = Target: FXN; (-) strand; PAM type: YTN; PAM sequence: CTA
  source 1..20: mol_type = other DNA
ctaaaaatacaaaattagcc

SEQ ID NO: 23292 - DNA, 20 bp, synthetic construct
  misc_feature 1..20: note = Description of Artificial Sequence: Synthetic oligonucleotide
  misc_feature 1..20: note = Target: FXN; (-) strand; PAM type: YTN; PAM sequence: CTC
  source 1..20: mol_type = other DNA
tactaaaaatacaaaattag

SEQ ID NO: 23293 - DNA, 20 bp, synthetic construct
  misc_feature 1..20: note = Description of Artificial Sequence: Synthetic oligonucleotide
  misc_feature 1..20: note = Target: FXN; (-) strand; PAM type: YTN; PAM sequence: CTG
  source 1..20: mol_type = other DNA
tctctactaaaaatacaaaa

SEQ ID NO: 23294 - DNA, 20 bp, synthetic construct
  misc_feature 1..20: note = Description of Artificial Sequence: Synthetic oligonucleotide
  misc_feature 1..20: note = Target: FXN; (-) strand; PAM type: YTN; PAM sequence: CTG
  source 1..20: mol_type = other DNA
accaacatggagaaatctgt

SEQ ID NO: 23295 - DNA, 20 bp, synthetic construct
  misc_feature 1..20: note = Description of Artificial Sequence: Synthetic oligonucleotide
  misc_feature 1..20: note = Target: FXN; (-) strand; PAM type: YTN; PAM sequence: TTC
  source 1..20: mol_type = other DNA
gagaccagcctgaccaacat

SEQ ID NO: 23296 - DNA, 20 bp, synthetic construct
  misc_feature 1..20: note = Description of Artificial Sequence: Synthetic oligonucleotide
  misc_feature 1..20: note = Target: FXN; (-) strand; PAM type: YTN; PAM sequence: TTG
  source 1..20: mol_type = other DNA
ggagttcgagaccagcctga

SEQ ID NO: 23297 - DNA, 20 bp, synthetic construct
  misc_feature 1..20: note = Description of Artificial Sequence: Synthetic oligonucleotide
  misc_feature 1..20: note = Target: FXN; (-) strand; PAM type: YTN; PAM sequence: CTG
  source 1..20: mol_type = other DNA
aggttgggagttcgagacca

SEQ ID NO: 23298 - DNA, 20 bp, synthetic construct
  misc_feature 1..20: note = Description of Artificial Sequence: Synthetic oligonucleotide
  misc_feature 1..20: note = Target: FXN; (-) strand; PAM type: YTN; PAM sequence: TTG
  source 1..20: mol_type = other DNA
ggagggcgaggtgggcggat

SEQ ID NO: 23299 - DNA, 20 bp, synthetic construct
  misc_feature 1..20: note = Description of Artificial Sequence: Synthetic oligonucleotide
  misc_feature 1..20: note = Target: FXN; (-) strand; PAM type: YTN; PAM sequence: TTT
  source 1..20: mol_type = other DNA
gggagggcgaggtgggcgga

SEQ ID NO: 23300 - DNA, 20 bp, synthetic construct
  misc_feature 1..20: note = Description of Artificial Sequence: Synthetic oligonucleotide
  misc_feature 1..20: note = Target: FXN; (-) strand; PAM type: YTN; PAM sequence: CTT
  source 1..20: mol_type = other DNA
tgggagggcgaggtgggcgg

SEQ ID NO: 23301 - DNA, 20 bp, synthetic construct
  misc_feature 1..20: note = Description of Artificial Sequence: Synthetic oligonucleotide
  misc_feature 1..20: note = Target: FXN; (-) strand; PAM type: YTN; PAM sequence: TTC
  source 1..20: mol_type = other DNA
cagcactttgggagggcgag

SEQ ID NO: 23302 - DNA, 20 bp, synthetic construct
  misc_feature 1..20: note = Description of Artificial Sequence: Synthetic oligonucleotide
  misc_feature 1..20: note = Target: FXN; (-) strand; PAM type: YTN; PAM sequence: CTG
  source 1..20: mol_type = other DNA
taattccagcactttgggag

SEQ ID NO: 23303 - DNA, 20 bp, synthetic construct
  misc_feature 1..20: note = Description of Artificial Sequence: Synthetic oligonucleotide
  misc_feature 1..20: note = Target: FXN; (-) strand; PAM type: YTN; PAM sequence: CTC
  source 1..20: mol_type = other DNA
acgcctgtaattccagcact

SEQ ID NO: 23304 - DNA, 20 bp, synthetic construct
  misc_feature 1..20: note = Description of Artificial Sequence: Synthetic oligonucleotide
  misc_feature 1..20: note = Target: FXN; (-) strand; PAM type: YTN; PAM sequence: CTG
  source 1..20: mol_type = other DNA
atggccagacgcggtggctc

SEQ ID NO: 23305 - DNA, 20 bp, synthetic construct
  misc_feature 1..20: note = Description of Artificial Sequence: Synthetic oligonucleotide
  misc_feature 1..20: note = Target: FXN; (-) strand; PAM type: YTN; PAM sequence: CTG
  source 1..20: mol_type = other DNA
ctgatggccagacgcggtgg

SEQ ID NO: 23306 - DNA, 20 bp, synthetic construct
  misc_feature 1..20: note = Description of Artificial Sequence: Synthetic oligonucleotide
  misc_feature 1..20: note = Target: FXN; (-) strand; PAM type: YTN; PAM sequence: CTC
  source 1..20: mol_type = other DNA
tgctgatggccagacgcggt

SEQ ID NO: 23307 - DNA, 20 bp, synthetic construct
  misc_feature 1..20: note = Description of Artificial Sequence: Synthetic oligonucleotide
  misc_feature 1..20: note = Target: FXN; (-) strand; PAM type: YTN; PAM sequence: TTA
  source 1..20: mol_type = other DNA
aaaactctgctgatggccag

SEQ ID NO: 23308 - DNA, 20 bp, synthetic construct
  misc_feature 1..20: note = Description of Artificial Sequence: Synthetic oligonucleotide
  misc_feature 1..20: note = Target: FXN; (-) strand; PAM type: YTN; PAM sequence: CTA
  source 1..20: mol_type = other DNA
aattaaaaactctgctgatg

SEQ ID NO: 23309 - DNA, 20 bp, synthetic construct
  misc_feature 1..20: note = Description of Artificial Sequence: Synthetic oligonucleotide
  misc_feature 1..20: note = Target: FXN; (-) strand; PAM type: YTN; PAM sequence: CTC
  source 1..20: mol_type = other DNA
ctaaattaaaaactctgctg

SEQ ID NO: 23310 - DNA, 20 bp, synthetic construct
  misc_feature 1..20: note = Description of Artificial Sequence: Synthetic oligonucleotide
  misc_feature 1..20: note = Target: FXN; (-) strand; PAM type: YTN; PAM sequence: TTC
  source 1..20: mol_type = other DNA
tcctaaattaaaaactctgc

SEQ ID NO: 23311 - DNA, 20 bp, synthetic construct
  misc_feature 1..20: note = Description of Artificial Sequence: Synthetic oligonucleotide
  misc_feature 1..20: note = Target: FXN; (-) strand; PAM type: YTN; PAM sequence: TTG
  source 1..20: mol_type = other DNA
tcattctcctaaattaaaaa

SEQ ID NO: 23312 - DNA, 20 bp, synthetic construct
  misc_feature 1..20: note = Description of Artificial Sequence: Synthetic oligonucleotide
  misc_feature 1..20: note = Target: FXN; (-) strand; PAM type: YTN; PAM sequence: CTT
  source 1..20: mol_type = other DNA
gtcattctcctaaattaaaa

SEQ ID NO: 23313 - DNA, 20 bp, synthetic construct
  misc_feature 1..20: note = Description of Artificial Sequence: Synthetic oligonucleotide
  misc_feature 1..20: note = Target: FXN; (-) strand; PAM type: YTN; PAM sequence: CTC
  source 1..20: mol_type = other DNA
ttgtcattctcctaaattaa

SEQ ID NO: 23314 - DNA, 20 bp, synthetic construct
  misc_feature 1..20: note = Description of Artificial Sequence: Synthetic oligonucleotide
  misc_feature 1..20: note = Target: FXN; (-) strand; PAM type: YTN; PAM sequence: CTG
  source 1..20: mol_type = other DNA
taccacctcttgtcattctc

SEQ ID NO: 23315 - DNA, 20 bp, synthetic construct
  misc_feature 1..20: note = Description of Artificial Sequence: Synthetic oligonucleotide
  misc_feature 1..20: note = Target: FXN; (-) strand; PAM type: YTN; PAM sequence: CTA
  source 1..20: mol_type = other DNA
aaaaactgtaccacctcttg

SEQ ID NO: 23316 - DNA, 20 bp, synthetic construct
  misc_feature 1..20: note = Description of Artificial Sequence: Synthetic oligonucleotide
  misc_feature 1..20: note = Target: FXN; (-) strand; PAM type: YTN; PAM sequence: TTA
  source 1..20: mol_type = other DNA
acagccaccaggtaccatct

SEQ ID NO: 23317 - DNA, 20 bp, synthetic construct
  misc_feature 1..20: note = Description of Artificial Sequence: Synthetic oligonucleotide
  misc_feature 1..20: note = Target: FXN; (-) strand; PAM type: YTN; PAM sequence: CTT
  source 1..20: mol_type = other DNA
aacagccaccaggtaccatc

SEQ ID NO: 23318 - DNA, 20 bp, synthetic construct
  misc_feature 1..20: note = Description of Artificial Sequence: Synthetic oligonucleotide
  misc_feature 1..20: note = Target: FXN; (-) strand; PAM type: YTN; PAM sequence: TTG
  source 1..20: mol_type = other DNA
tcagtcaatagcccttaaca

SEQ ID NO: 23319 - DNA, 20 bp, synthetic construct
  misc_feature 1..20: note = Description of Artificial Sequence: Synthetic oligonucleotide
  misc_feature 1..20: note = Target: FXN; (-) strand; PAM type: YTN; PAM sequence: TTT
  source 1..20: mol_type = other DNA
gtcagtcaatagcccttaac

SEQ ID NO: 23320 - DNA, 20 bp, synthetic construct
  misc_feature 1..20: note = Description of Artificial Sequence: Synthetic oligonucleotide
  misc_feature 1..20: note = Target: FXN; (-) strand; PAM type: YTN; PAM sequence: TTG
  source 1..20: mol_type = other DNA
ggtgtgtttgtcagtcaata

SEQ ID NO: 23321 - DNA, 20 bp, synthetic construct
  misc_feature 1..20: note = Description of Artificial Sequence: Synthetic oligonucleotide
  misc_feature 1..20: note = Target: FXN; (-) strand; PAM type: YTN; PAM sequence: CTG
  source 1..20: mol_type = other DNA
ggcggcagcgccaagttggg

SEQ ID NO: 23322 - DNA, 20 bp, synthetic construct
  misc_feature 1..20: note = Description of Artificial Sequence: Synthetic oligonucleotide
  misc_feature 1..20: note = Target: FXN; (-) strand; PAM type: YTN; PAM sequence: CTC
  source 1..20: mol_type = other DNA
ctgggcggcagcgccaagtt

SEQ ID NO: 23323 - DNA, 20 bp, synthetic construct
  misc_feature 1..20: note = Description of Artificial Sequence: Synthetic oligonucleotide
  misc_feature 1..20: note = Target: FXN; (-) strand; PAM type: YTN; PAM sequence: CTA
  source 1..20: mol_type = other DNA
tccagaaacccagtgtccac

SEQ ID NO: 23324 - DNA, 20 bp, synthetic construct
  misc_feature 1..20: note = Description of Artificial Sequence: Synthetic oligonucleotide
  misc_feature 1..20: note = Target: FXN; (-) strand; PAM type: YTN; PAM sequence: CTA
  source 1..20: mol_type = other DNA
accatctatccagaaaccca

SEQ ID NO: 23325 - DNA, 20 bp, synthetic construct
  misc_feature 1..20: note = Description of Artificial Sequence: Synthetic oligonucleotide
  misc_feature 1..20: note = Target: FXN; (-) strand; PAM type: YTN; PAM sequence: TTG
  source 1..20: mol_type = other DNA
ctaaccatctatccagaaac

SEQ ID NO: 23326 - DNA, 20 bp, synthetic construct
  misc_feature 1..20: note = Description of Artificial Sequence: Synthetic oligonucleotide
  misc_feature 1..20: note = Target: FXN; (-) strand; PAM type: YTN; PAM sequence: CTG
  source 1..20: mol_type = other DNA
gtgacagaggttgctaacca

SEQ ID NO: 23327 - DNA, 20 bp, synthetic construct
  misc_feature 1..20: note = Description of Artificial Sequence: Synthetic oligonucleotide
  misc_feature 1..20: note = Target: FXN; (-) strand; PAM type: YTN; PAM sequence: TTC
  source 1..20: mol_type = other DNA
agtatagaaaaaaagaggcc

SEQ ID NO: 23328 - DNA, 20 bp, synthetic construct
  misc_feature 1..20: note = Description of Artificial Sequence: Synthetic oligonucleotide
  misc_feature 1..20: note = Target: FXN; (-) strand; PAM type: YTN; PAM sequence: TTA
  source 1..20: mol_type = other DNA
attcagtatagaaaaaaaga

SEQ ID NO: 23329 - DNA, 20 bp, synthetic construct
  misc_feature 1..20: note = Description of Artificial Sequence: Synthetic oligonucleotide
  misc_feature 1..20: note = Target: FXN; (-) strand; PAM type: YTN; PAM sequence: TTA
  source 1..20: mol_type = other DNA
aacaaatgtgattaattcag

SEQ ID NO: 23330 - DNA, 20 bp, synthetic construct
  misc_feature 1..20: note = Description of Artificial Sequence: Synthetic oligonucleotide
  misc_feature 1..20: note = Target: FXN; (-) strand; PAM type: YTN; PAM sequence: CTA
  source 1..20: mol_type = other DNA
tggaacagacaggttaaaca

SEQ ID NO: 23331 - DNA, 20 bp, synthetic construct
  misc_feature 1..20: note = Description of Artificial Sequence: Synthetic oligonucleotide
  misc_feature 1..20: note = Target: FXN; (-) strand; PAM type: YTN; PAM sequence: CTC
  source 1..20: mol_type = other DNA
aaatacccaagatgtgcaag

SEQ ID NO: 23332 - DNA, 20 bp, synthetic construct
  misc_feature 1..20: note = Description of Artificial Sequence: Synthetic oligonucleotide
  misc_feature 1..20: note = Target: FXN; (-) strand; PAM type: YTN; PAM sequence: CTC
  source 1..20: mol_type = other DNA
ctcaaatacccaagatgtgc

SEQ ID NO: 23333 - DNA, 20 bp, synthetic construct
  misc_feature 1..20: note = Description of Artificial Sequence: Synthetic oligonucleotide
  misc_feature 1..20: note = Target: FXN; (-) strand; PAM type: YTN; PAM sequence: CTG
  source 1..20: mol_type = other DNA
ccacccacccaactcctcaa

SEQ ID NO: 23334 - DNA, 20 bp, synthetic construct
  misc_feature 1..20: note = Description of Artificial Sequence: Synthetic oligonucleotide
  misc_feature 1..20: note = Target: FXN; (-) strand; PAM type: YTN; PAM sequence: TTG
  source 1..20: mol_type = other DNA
ccactgccacccacccaact

SEQ ID NO: 23335 - DNA, 20 bp, synthetic construct
  misc_feature 1..20: note = Description of Artificial Sequence: Synthetic oligonucleotide
  misc_feature 1..20: note = Target: FXN; (-) strand; PAM type: YTN; PAM sequence: TTA
  source 1..20: mol_type = other DNA
aacaggatggtggccccagt

SEQ ID NO: 23336 - DNA, 20 bp, synthetic construct
  misc_feature 1..20: note = Description of Artificial Sequence: Synthetic oligonucleotide
  misc_feature 1..20: note = Target: FXN; (-) strand; PAM type: YTN; PAM sequence: TTA
  source 1..20: mol_type = other DNA
aaataattaaacaggatggt

SEQ ID NO: 23337 - DNA, 20 bp, synthetic construct
  misc_feature 1..20: note = Description of Artificial Sequence: Synthetic oligonucleotide
  misc_feature 1..20: note = Target: FXN; (-) strand; PAM type: YTN; PAM sequence: TTT
  source 1..20: mol_type = other DNA
aaaataattaaacaggatgg

SEQ ID NO: 23338 - DNA, 20 bp, synthetic construct
  misc_feature 1..20: note = Description of Artificial Sequence: Synthetic oligonucleotide
  misc_feature 1..20: note = Target: FXN; (-) strand; PAM type: YTN; PAM sequence: CTT
  source 1..20: mol_type = other DNA
taaaataattaaacaggatg

SEQ ID NO: 23339 - DNA, 20 bp, synthetic construct
  misc_feature 1..20: note = Description of Artificial Sequence: Synthetic oligonucleotide
  misc_feature 1..20: note = Target: FXN; (-) strand; PAM type: YTN; PAM sequence: TTA
  source 1..20: mol_type = other DNA
gggtcaatccaggacagtca

SEQ ID NO: 23340 - DNA, 20 bp, synthetic construct
  misc_feature 1..20: note = Description of Artificial Sequence: Synthetic oligonucleotide
  misc_feature 1..20: note = Target: FXN; (-) strand; PAM type: YTN; PAM sequence: CTT
  source 1..20: mol_type = other DNA
agggtcaatccaggacagtc

SEQ ID NO: 23341 - DNA, 20 bp, synthetic construct
  misc_feature 1..20: note = Description of Artificial Sequence: Synthetic oligonucleotide
  misc_feature 1..20: note = Target: FXN; (-) strand; PAM type: YTN; PAM sequence: TTG
  source 1..20: mol_type = other DNA
gagaccagggggagcttagg

SEQ ID NO: 23342 - DNA, 20 bp, synthetic construct
  misc_feature 1..20: note = Description of Artificial Sequence: Synthetic oligonucleotide
  misc_feature 1..20: note = Target: FXN; (-) strand; PAM type: YTN; PAM sequence: TTT
  source 1..20: mol_type = other DNA
ggagaccagggggagcttag

SEQ ID NO: 23343 - DNA, 20 bp, synthetic construct
  misc_feature 1..20: note = Description of Artificial Sequence: Synthetic oligonucleotide
  misc_feature 1..20: note = Target: FXN; (-) strand; PAM type: YTN; PAM sequence: TTT
  source 1..20: mol_type = other DNA
tggagaccagggggagctta

SEQ ID NO: 23344 - DNA, 20 bp, synthetic construct
  misc_feature 1..20: note = Description of Artificial Sequence: Synthetic oligonucleotide
  misc_feature 1..20: note = Target: FXN; (-) strand; PAM type: YTN; PAM sequence: CTG
  source 1..20: mol_type = other DNA
atgaattttggagaccaggg

SEQ ID NO: 23345 - DNA, 20 bp, synthetic construct
  misc_feature 1..20: note = Description of Artificial Sequence: Synthetic oligonucleotide
  misc_feature 1..20: note = Target: FXN; (-) strand; PAM type: YTN; PAM sequence: TTC
  source 1..20: mol_type = other DNA
tgatgaattttggagaccag

SEQ ID NO: 23346 - DNA, 20 bp, synthetic construct
  misc_feature 1..20: note = Description of Artificial Sequence: Synthetic oligonucleotide
  misc_feature 1..20: note = Target: FXN; (-) strand; PAM type: YTN; PAM sequence: TTT
  source 1..20: mol_type = other DNA
ctgatgaattttggagacca

SEQ ID NO: 23347 - DNA, 20 bp, synthetic construct
  misc_feature 1..20: note = Description of Artificial Sequence: Synthetic oligonucleotide
  misc_feature 1..20: note = Target: FXN; (-) strand; PAM type: YTN; PAM sequence: CTC
  source 1..20: mol_type = other DNA
agtttctgatgaattttgga

SEQ ID NO: 23348 - DNA, 20 bp, synthetic construct
  misc_feature 1..20: note = Description of Artificial Sequence: Synthetic oligonucleotide
  misc_feature 1..20: note = Target: FXN; (-) strand; PAM type: YTN; PAM sequence: TTC
  source 1..20: mol_type = other DNA
aagtgaactcagtttctgat

SEQ ID NO: 23349 - DNA, 20 bp, synthetic construct
  misc_feature 1..20: note = Description of Artificial Sequence: Synthetic oligonucleotide
  misc_feature 1..20: note = Target: FXN; (-) strand; PAM type: YTN; PAM sequence: CTT
  source 1..20: mol_type = other DNA
caagtgaactcagtttctga

SEQ ID NO: 23350 - DNA, 20 bp, synthetic construct
  misc_feature 1..20: note = Description of Artificial Sequence: Synthetic oligonucleotide
  misc_feature 1..20: note = Target: FXN; (-) strand; PAM type: YTN; PAM sequence: TTA
  source 1..20: mol_type = other DNA
gaagtagatgcaaggggtgg

SEQ ID NO: 23351 - DNA, 20 bp, synthetic construct
  misc_feature 1..20: note = Description of Artificial Sequence: Synthetic oligonucleotide
  misc_feature 1..20: note = Target: FXN; (-) strand; PAM type: YTN; PAM sequence: TTT
  source 1..20: mol_type = other DNA
agaagtagatgcaaggggtg

SEQ ID NO: 23352 - DNA, 20 bp, synthetic construct
  misc_feature 1..20: note = Description of Artificial Sequence: Synthetic oligonucleotide
  misc_feature 1..20: note = Target: FXN; (-) strand; PAM type: YTN; PAM sequence: CTT
  source 1..20: mol_type = other DNA
tagaagtagatgcaaggggt

SEQ ID NO: 23353 - DNA, 20 bp, synthetic construct
  misc_feature 1..20: note = Description of Artificial Sequence: Synthetic oligonucleotide
  misc_feature 1..20: note = Target: FXN; (-) strand; PAM type: YTN; PAM sequence: CTG
  source 1..20: mol_type = other DNA
ctttagaagtagatgcaagg

SEQ ID NO: 23354 - DNA, 20 bp, synthetic construct
  misc_feature 1..20: note = Description of Artificial Sequence: Synthetic oligonucleotide
  misc_feature 1..20: note = Target: FXN; (-) strand; PAM type: YTN; PAM sequence: TTG
  source 1..20: mol_type = other DNA
aacagctgctttagaagtag

SEQ ID NO: 23355 - DNA, 20 bp, synthetic construct
  misc_feature 1..20: note = Description of Artificial Sequence: Synthetic oligonucleotide
  misc_feature 1..20: note = Target: FXN; (-) strand; PAM type: YTN; PAM sequence: CTG
  source 1..20: mol_type = other DNA
ttgaacagctgctttagaag

SEQ ID NO: 23356 - DNA, 20 bp, synthetic construct
  misc_feature 1..20: note = Description of Artificial Sequence: Synthetic oligonucleotide
  misc_feature 1..20: note = Target: FXN; (-) strand; PAM type: YTN; PAM sequence: TTC
  source 1..20: mol_type = other DNA
tgttgaacagctgctttaga

SEQ ID NO: 23357 - DNA, 20 bp, synthetic construct
  misc_feature 1..20: note = Description of Artificial Sequence: Synthetic oligonucleotide
  misc_feature 1..20: note = Target: FXN; (-) strand; PAM type: YTN; PAM sequence: TTT
  source 1..20: mol_type = other DNA
ctgttgaacagctgctttag

SEQ ID NO: 23358 - DNA, 20 bp, synthetic construct
  misc_feature 1..20: note = Description of Artificial Sequence: Synthetic oligonucleotide
  misc_feature 1..20: note = Target: FXN; (-) strand; PAM type: YTN; PAM sequence: CTG
  source 1..20: mol_type = other DNA
tttctgttgaacagctgctt

SEQ ID NO: 23359 - DNA, 20 bp, synthetic construct
  misc_feature 1..20: note = Description of Artificial Sequence: Synthetic oligonucleotide
  misc_feature 1..20: note = Target: FXN; (-) strand; PAM type: YTN; PAM sequence: TTC
  source 1..20: mol_type = other DNA
tgtttctgttgaacagctgc

SEQ ID NO: 23360 - DNA, 20 bp, synthetic construct
  misc_feature 1..20: note = Description of Artificial Sequence: Synthetic oligonucleotide
  misc_feature 1..20: note = Target: FXN; (-) strand; PAM type: YTN; PAM sequence: CTC
  source 1..20: mol_type = other DNA
ccattctgtttctgttgaac

SEQ ID NO: 23361 - DNA, 20 bp, synthetic construct
  misc_feature 1..20: note = Description of Artificial Sequence: Synthetic oligonucleotide
  misc_feature 1..20: note = Target: FXN; (-) strand; PAM type: YTN; PAM sequence: TTA
  source 1..20: mol_type = other DNA
tgtgtgtggctcccattctg

SEQ ID NO: 23362 - DNA, 20 bp, synthetic construct
  misc_feature 1..20: note = Description of Artificial Sequence: Synthetic oligonucleotide
  misc_feature 1..20: note = Target: FXN; (-) strand; PAM type: YTN; PAM sequence: CTA
  source 1..20: mol_type = other DNA
gaaaatgtagaattatgtgt

SEQ ID NO: 23363 - DNA, 20 bp, synthetic construct
  misc_feature 1..20: note = Description of Artificial Sequence: Synthetic oligonucleotide
  misc_feature 1..20: note = Target: FXN; (-) strand; PAM type: YTN; PAM sequence: TTA
  source 1..20: mol_type = other DNA
actagaaaatgtagaattat

SEQ ID NO: 23364 - DNA, 20 bp, synthetic construct
  misc_feature 1..20: note = Description of Artificial Sequence: Synthetic oligonucleotide
  misc_feature 1..20: note = Target: FXN; (-) strand; PAM type: YTN; PAM sequence: TTT
  source 1..20: mol_type = other DNA
aactagaaaatgtagaatta

SEQ ID NO: 23365 - DNA, 20 bp, synthetic construct
  misc_feature 1..20: note = Description of Artificial Sequence: Synthetic oligonucleotide
  misc_feature 1..20: note = Target: FXN; (-) strand; PAM type: YTN; PAM sequence: TTT
  source 1..20: mol_type = other DNA
taactagaaaatgtagaatt

SEQ ID NO: 23366 - DNA, 20 bp, synthetic construct
  misc_feature 1..20: note = Description of Artificial Sequence: Synthetic oligonucleotide
  misc_feature 1..20: note = Target: FXN; (-) strand; PAM type: YTN; PAM sequence: TTT
  source 1..20: mol_type = other DNA
ttaactagaaaatgtagaat

SEQ ID NO: 23367 - DNA, 20 bp, synthetic construct
  misc_feature 1..20: note = Description of Artificial Sequence: Synthetic oligonucleotide
  misc_feature 1..20: note = Target: FXN; (-) strand; PAM type: YTN; PAM sequence: CTT
  source 1..20: mol_type = other DNA
tttaactagaaaatgtagaa

SEQ ID NO: 23368 - DNA, 20 bp, synthetic construct
  misc_feature 1..20: note = Description of Artificial Sequence: Synthetic oligonucleotide
  misc_feature 1..20: note = Target: FXN; (-) strand; PAM type: YTN; PAM sequence: TTC
  source 1..20: mol_type = other DNA
tttttaactagaaaatgtag

SEQ ID NO: 23369 - DNA, 20 bp, synthetic construct
  misc_feature 1..20: note = Description of Artificial Sequence: Synthetic oligonucleotide
  misc_feature 1..20: note = Target: FXN; (-) strand; PAM type: YTN; PAM sequence: TTT
  source 1..20: mol_type = other DNA
ctttttaactagaaaatgta

SEQ ID NO: 23370 - DNA, 20 bp, synthetic construct
  misc_feature 1..20: note = Description of Artificial Sequence: Synthetic oligonucleotide
  misc_feature 1..20: note = Target: FXN; (-) strand; PAM type: YTN; PAM sequence: TTT
  source 1..20: mol_type = other DNA
tctttttaactagaaaatgt

SEQ ID NO: 23371 - DNA, 20 bp, synthetic construct
  misc_feature 1..20: note = Description of Artificial Sequence: Synthetic oligonucleotide
  misc_feature 1..20: note = Target: FXN; (-) strand; PAM type: YTN; PAM sequence: TTT
  source 1..20: mol_type = other DNA
ttctttttaactagaaaatg

SEQ ID NO: 23372 - DNA, 20 bp, synthetic construct
  misc_feature 1..20: note = Description of Artificial Sequence: Synthetic oligonucleotide
  misc_feature 1..20: note = Target: FXN; (-) strand; PAM type: YTN; PAM sequence: TTT
  source 1..20: mol_type = other DNA
tttctttttaactagaaaat

SEQ ID NO: 23373 - DNA, 20 bp, synthetic construct
  misc_feature 1..20: note = Description of Artificial Sequence: Synthetic oligonucleotide
  misc_feature 1..20: note = Target: FXN; (-) strand; PAM type: YTN; PAM sequence: TTT
  source 1..20: mol_type = other DNA
ttttctttttaactagaaaa

SEQ ID NO: 23374 - DNA, 20 bp, synthetic construct
  misc_feature 1..20: note = Description of Artificial Sequence: Synthetic oligonucleotide
  misc_feature 1..20: note = Target: FXN; (-) strand; PAM type: YTN; PAM sequence: TTT
  source 1..20: mol_type = other DNA
tttttctttttaactagaaa

SEQ ID NO: 23375 - DNA, 20 bp, synthetic construct
  misc_feature 1..20: note = Description of Artificial Sequence: Synthetic oligonucleotide
  misc_feature 1..20: note = Target: FXN; (-) strand; PAM type: YTN; PAM sequence: TTT
  source 1..20: mol_type = other DNA
ttttttctttttaactagaa

SEQ ID NO: 23376 - DNA, 20 bp, synthetic construct
  misc_feature 1..20: note = Description of Artificial Sequence: Synthetic oligonucleotide
  misc_feature 1..20: note = Target: FXN; (-) strand; PAM type: YTN; PAM sequence: TTG
  source 1..20: mol_type = other DNA
aaaatgatttttttttcttt

SEQ ID NO: 23377 - DNA, 20 bp, synthetic construct
  misc_feature 1..20: note = Description of Artificial Sequence: Synthetic oligonucleotide
  misc_feature 1..20: note = Target: FXN; (-) strand; PAM type: YTN; PAM sequence: TTG
  source 1..20: mol_type = other DNA
ttgaaaatgatttttttttc

SEQ ID NO: 23378 - DNA, 20 bp, synthetic construct
  misc_feature 1..20: note = Description of Artificial Sequence: Synthetic oligonucleotide
  misc_feature 1..20: note = Target: FXN; (-) strand; PAM type: YTN; PAM sequence: TTG
  source 1..20: mol_type = other DNA
aataaatatattgttgaaaa

SEQ ID NO: 23379 - DNA, 20 bp, synthetic construct
  misc_feature 1..20: note = Description of Artificial Sequence: Synthetic oligonucleotide
  misc_feature 1..20: note = Target: FXN; (-) strand; PAM type: YTN; PAM sequence: CTA
  source 1..20: mol_type = other DNA
ggttgaataaatatattgtt

SEQ ID NO: 23380 - DNA, 20 bp, synthetic construct
  misc_feature 1..20: note = Description of Artificial Sequence: Synthetic oligonucleotide
  misc_feature 1..20: note = Target: FXN; (-) strand; PAM type: YTN; PAM sequence: TTG
  source 1..20: mol_type = other DNA
tatgtactaggttgaataaa

SEQ ID NO: 23381 - DNA, 20 bp, synthetic construct
  misc_feature 1..20: note = Description of Artificial Sequence: Synthetic oligonucleotide
  misc_feature 1..20: note = Target: FXN; (-) strand; PAM type: YTN; PAM sequence: TTT
  source 1..20: mol_type = other DNA
gtatgtactaggttgaataa

SEQ ID NO: 23382 - DNA, 20 bp, synthetic construct
  misc_feature 1..20: note = Description of Artificial Sequence: Synthetic oligonucleotide
  misc_feature 1..20: note = Target: FXN; (-) strand; PAM type: YTN; PAM sequence: TTT
  source 1..20: mol_type = other DNA
tgtatgtactaggttgaata

SEQ ID NO: 23383 - DNA, 20 bp, synthetic construct
  misc_feature 1..20: note = Description of Artificial Sequence: Synthetic oligonucleotide
  misc_feature 1..20: note = Target: FXN; (-) strand; PAM type: YTN; PAM sequence: TTG
  source 1..20: mol_type = other DNA
gaatgataatattttgtatg

SEQ ID NO: 23384 - DNA, 20 bp, synthetic construct
  misc_feature 1..20: note = Description of Artificial Sequence: Synthetic oligonucleotide
  misc_feature 1..20: note = Target: FXN; (-) strand; PAM type: YTN; PAM sequence: TTA
  source 1..20: mol_type = other DNA
catgttggaatgataatatt

SEQ ID NO: 23385 - DNA, 20 bp, synthetic construct
  misc_feature 1..20: note = Description of Artificial Sequence: Synthetic oligonucleotide
  misc_feature 1..20: note = Target: FXN; (-) strand; PAM type: YTN; PAM sequence: CTG
  source 1..20: mol_type = other DNA
attacatgttggaatgataa

SEQ ID NO: 23386 - DNA, 20 bp, synthetic construct
  misc_feature 1..20: note = Description of Artificial Sequence: Synthetic oligonucleotide
  misc_feature 1..20: note = Target: FXN; (-) strand; PAM type: YTN; PAM sequence: TTA
  source 1..20: mol_type = other DNA
aaatactgattacatgttgg

SEQ ID NO: 23387 - DNA, 20 bp, synthetic construct
  misc_feature 1..20: note = Description of Artificial Sequence: Synthetic oligonucleotide
  misc_feature 1..20: note = Target: FXN; (-) strand; PAM type: YTN; PAM sequence: TTT
  source 1..20: mol_type = other DNA
aaaatactgattacatgttg

SEQ ID NO: 23388 - DNA, 20 bp, synthetic construct
  misc_feature 1..20: note = Description of Artificial Sequence: Synthetic oligonucleotide
  misc_feature 1..20: note = Target: FXN; (-) strand; PAM type: YTN; PAM sequence: TTT
  source 1..20: mol_type = other DNA
taaaatactgattacatgtt

SEQ ID NO: 23389 - DNA, 20 bp, synthetic construct
  misc_feature 1..20: note = Description of Artificial Sequence: Synthetic oligonucleotide
  misc_feature 1..20: note = Target: FXN; (-) strand; PAM type: YTN; PAM sequence: TTT
  source 1..20: mol_type = other DNA
ttaaaatactgattacatgt

SEQ ID NO: 23390 - DNA, 20 bp, synthetic construct
  misc_feature 1..20: note = Description of Artificial Sequence: Synthetic oligonucleotide
  misc_feature 1..20: note = Target: FXN; (-) strand; PAM type: YTN; PAM sequence: CTG
  source 1..20: mol_type = other DNA
atttttaaaatactgattac

SEQ ID NO: 23391 - DNA, 20 bp, synthetic construct
  misc_feature 1..20: note = Description of Artificial Sequence: Synthetic oligonucleotide
  misc_feature 1..20: note = Target: FXN; (-) strand; PAM type: YTN; PAM sequence: TTA
  source 1..20: mol_type = other DNA
ctgatttttaaaatactgat

SEQ ID NO: 23392 - DNA, 20 bp, synthetic construct
  misc_feature 1..20: note = Description of Artificial Sequence: Synthetic oligonucleotide
  misc_feature 1..20: note = Target: FXN; (-) strand; PAM type: YTN; PAM sequence: CTC
  source 1..20: mol_type = other DNA
attactgatttttaaaatac

SEQ ID NO: 23393 - DNA, 20 bp, synthetic construct
  misc_feature 1..20: note = Description of Artificial Sequence: Synthetic oligonucleotide
  misc_feature 1..20: note = Target: FXN; (-) strand; PAM type: YTN; PAM sequence: CTG
  source 1..20: mol_type = other DNA
gtctcattactgatttttaa

SEQ ID NO: 23394 - DNA, 20 bp, synthetic construct
  misc_feature 1..20: note = Description of Artificial Sequence: Synthetic oligonucleotide
  misc_feature 1..20: note = Target: FXN; (-) strand; PAM type: YTN; PAM sequence: TTA
  source 1..20: mol_type = other DNA
cagtcgtgagccaccgtgcc

SEQ ID NO: 23395 - DNA, 20 bp, synthetic construct
  misc_feature 1..20: note = Description of Artificial Sequence: Synthetic oligonucleotide
  misc_feature 1..20: note = Target: FXN; (-) strand; PAM type: YTN; PAM sequence: CTG
  source 1..20: mol_type = other DNA
ggattacagtcgtgagccac

SEQ ID NO: 23396 - DNA, 20 bp, synthetic construct
  misc_feature 1..20: note = Description of Artificial Sequence: Synthetic oligonucleotide
  misc_feature 1..20: note = Target: FXN; (-) strand; PAM type: YTN; PAM sequence: CTC
  source 1..20: mol_type = other DNA
ccaaagtcctgggattacag

SEQ ID NO: 23397 - DNA, 20 bp, synthetic construct
  misc_feature 1..20: note = Description of Artificial Sequence: Synthetic oligonucleotide
  misc_feature 1..20: note = Target: FXN; (-) strand; PAM type: YTN; PAM sequence: CTC
  source 1..20: mol_type = other DNA
ggcctcccaaagtcctggga

SEQ ID NO: 23398 - DNA, 20 bp, synthetic construct
  misc_feature 1..20: note = Description of Artificial Sequence: Synthetic oligonucleotide
  misc_feature 1..20: note = Target: FXN; (-) strand; PAM type: YTN; PAM sequence: CTC
  source 1..20: mol_type = other DNA
gcctcggcctcccaaagtcc

SEQ ID NO: 23399 - DNA, 20 bp, synthetic construct
  misc_feature 1..20: note = Description of Artificial Sequence: Synthetic oligonucleotide
  misc_feature 1..20: note = Target: FXN; (-) strand; PAM type: YTN; PAM sequence: CTC
  source 1..20: mol_type = other DNA
agatgatccactcgcctcgg

SEQ ID NO: 23400 - DNA, 20 bp, synthetic construct
  misc_feature 1..20: note = Description of Artificial Sequence: Synthetic oligonucleotide
  misc_feature 1..20: note = Target: FXN; (-) strand; PAM type: YTN; PAM sequence: CTG
  source 1..20: mol_type = other DNA
atctcagatgatccactcgc

SEQ ID NO: 23401 - DNA, 20 bp, synthetic construct
  misc_feature 1..20: note = Description of Artificial Sequence: Synthetic oligonucleotide
  misc_feature 1..20: note = Target: FXN; (-) strand; PAM type: YTN; PAM sequence: CTC
  source 1..20: mol_type = other DNA
ctgatctcagatgatccact

SEQ ID NO: 23402 - DNA, 20 bp, synthetic construct
  misc_feature 1..20: note = Description of Artificial Sequence: Synthetic oligonucleotide
  misc_feature 1..20: note = Target: FXN; (-) strand; PAM type: YTN; PAM sequence: TTG
  source 1..20: mol_type = other DNA
aactcctgatctcagatgat

SEQ ID NO: 23403 - DNA, 20 bp, synthetic construct
  misc_feature 1..20: note = Description of Artificial Sequence: Synthetic oligonucleotide
  misc_feature 1..20: note = Target: FXN; (-) strand; PAM type: YTN; PAM sequence: CTT
  source 1..20: mol_type = other DNA
gaactcctgatctcagatga

SEQ ID NO: 23404 - DNA, 20 bp, synthetic construct
  misc_feature 1..20: note = Description of Artificial Sequence: Synthetic oligonucleotide
  misc_feature 1..20: note = Target: FXN; (-) strand; PAM type: YTN; PAM sequence: CTG
  source 1..20: mol_type = other DNA
gtcttgaactcctgatctca

SEQ ID NO: 23405 - DNA, 20 bp, synthetic construct
  misc_feature 1..20: note = Description of Artificial Sequence: Synthetic oligonucleotide
  misc_feature 1..20: note = Target: FXN; (-) strand; PAM type: YTN; PAM sequence: TTG
  source 1..20: mol_type = other DNA
gccaggctggtcttgaactc

SEQ ID NO: 23406 - DNA, 20 bp, synthetic construct
  misc_feature 1..20: note = Description of Artificial Sequence: Synthetic oligonucleotide
  misc_feature 1..20: note = Target: FXN; (-) strand; PAM type: YTN; PAM sequence: TTC
  source 1..20: mol_type = other DNA
accatgttggccaggctggt

SEQ ID NO: 23407 - DNA, 20 bp, synthetic construct
  misc_feature 1..20: note = Description of Artificial Sequence: Synthetic oligonucleotide
  misc_feature 1..20: note = Target: FXN; (-) strand; PAM type: YTN; PAM sequence: TTT
  source 1..20: mol_type = other DNA
caccatgttggccaggctgg

SEQ ID NO: 23408 - DNA, 20 bp, synthetic construct
  misc_feature 1..20: note = Description of Artificial Sequence: Synthetic oligonucleotide
  misc_feature 1..20: note = Target: FXN; (-) strand; PAM type: YTN; PAM sequence: TTA
  source 1..20: mol_type = other DNA
gtagagatggggtttcacca

SEQ ID NO: 23409 - DNA, 20 bp, synthetic construct
  misc_feature 1..20: note = Description of Artificial Sequence: Synthetic oligonucleotide
  misc_feature 1..20: note = Target: FXN; (-) strand; PAM type: YTN; PAM sequence: TTT
  source 1..20: mol_type = other DNA
agtagagatggggtttcacc

SEQ ID NO: 23410 - DNA, 20 bp, synthetic construct
  misc_feature 1..20: note = Description of Artificial Sequence: Synthetic oligonucleotide
  misc_feature 1..20: note = Target: FXN; (-) strand; PAM type: YTN; PAM sequence: TTT
  source 1..20: mol_type = other DNA
tagtagagatggggtttcac

SEQ ID NO: 23411 - DNA, 20 bp, synthetic construct
  misc_feature 1..20: note = Description of Artificial Sequence: Synthetic oligonucleotide
  misc_feature 1..20: note = Target: FXN; (-) strand; PAM type: YTN; PAM sequence: TTT
  source 1..20: mol_type = other DNA
ttagtagagatggggtttca

SEQ ID NO: 23412 - DNA, 20 bp, synthetic construct
  misc_feature 1..20: note = Description of Artificial Sequence: Synthetic oligonucleotide
  misc_feature 1..20: note = Target: FXN; (-) strand; PAM type: YTN; PAM sequence: CTA
  source 1..20: mol_type = other DNA
gtttttagtagagatggggt

SEQ ID NO: 23413 - DNA, 20 bp, synthetic construct
  misc_feature 1..20: note = Description of Artificial Sequence: Synthetic oligonucleotide
  misc_feature 1..20: note = Target: FXN; (-) strand; PAM type: YTN; PAM sequence: CTG
  source 1..20: mol_type = other DNA
agctagtttttagtagagat

SEQ ID NO: 23414 - DNA, 20 bp, synthetic construct
  misc_feature 1..20: note = Description of Artificial Sequence: Synthetic oligonucleotide
  misc_feature 1..20: note = Target: FXN; (-) strand; PAM type: YTN; PAM sequence: CTA
  source 1..20: mol_type = other DNA
caggcacccaccaccatgct

SEQ ID NO: 23415 - DNA, 20 bp, synthetic construct
  misc_feature 1..20: note = Description of Artificial Sequence: Synthetic oligonucleotide
  misc_feature 1..20: note = Target: FXN; (-) strand; PAM type: YTN; PAM sequence: CTG
  source 1..20: mol_type = other DNA
ggactacaggcacccaccac

SEQ ID NO: 23416 - DNA, 20 bp, synthetic construct
  misc_feature 1..20: note = Description of Artificial Sequence: Synthetic oligonucleotide
  misc_feature 1..20: note = Target: FXN; (-) strand; PAM type: YTN; PAM sequence: CTC
  source 1..20: mol_type = other DNA
ccgagtagctgggactacag

SEQ ID NO: 23417 - DNA, 20 bp, synthetic construct
  misc_feature 1..20: note = Description of Artificial Sequence: Synthetic oligonucleotide
  misc_feature 1..20: note = Target: FXN; (-) strand; PAM type: YTN; PAM sequence: CTC
  source 1..20: mol_type = other DNA
agcctcccgagtagctggga

SEQ ID NO: 23418 - DNA, 20 bp, synthetic construct
  misc_feature 1..20: note = Description of Artificial Sequence: Synthetic oligonucleotide
  misc_feature 1..20: note = Target: FXN; (-) strand; PAM type: YTN; PAM sequence: CTC
  source 1..20: mol_type = other DNA
atgcctcagcctcccgagta

SEQ ID NO: 23419 - DNA, 20 bp, synthetic construct
  misc_feature 1..20: note = Description of Artificial Sequence: Synthetic oligonucleotide
  misc_feature 1..20: note = Target: FXN; (-) strand; PAM type: YTN; PAM sequence: TTC
  source 1..20: mol_type = other DNA
tcatgcctcagcctcccgag

SEQ ID NO: 23420 - DNA, 20 bp, synthetic construct
  misc_feature 1..20: note = Description of Artificial Sequence: Synthetic oligonucleotide
  misc_feature 1..20: note = Target: FXN; (-) strand; PAM type: YTN; PAM sequence: CTC
  source 1..20: mol_type = other DNA
aagtgattctcatgcctcag

SEQ ID NO: 23421 - DNA, 20 bp, synthetic construct
  misc_feature 1..20: note = Description of Artificial Sequence: Synthetic oligonucleotide
  misc_feature 1..20: note = Target: FXN; (-) strand; PAM type: YTN; PAM sequence: CTG
  source 1..20: mol_type = other DNA
ggctcaagtgattctcatgc

SEQ ID NO: 23422 - DNA, 20 bp, synthetic construct
  misc_feature 1..20: note = Description of Artificial Sequence: Synthetic oligonucleotide
  misc_feature 1..20: note = Target: FXN; (-) strand; PAM type: YTN; PAM sequence: CTC
  source 1..20: mol_type = other DNA
ctgggctcaagtgattctca

SEQ ID NO: 23423 - DNA, 20 bp, synthetic construct
  misc_feature 1..20: note = Description of Artificial Sequence: Synthetic oligonucleotide
  misc_feature 1..20: note = Target: FXN; (-) strand; PAM type: YTN; PAM sequence: CTG
  source 1..20: mol_type = other DNA
cctcctgggctcaagtgatt

SEQ ID NO: 23424 - DNA, 20 bp, synthetic construct
  misc_feature 1..20: note = Description of Artificial Sequence: Synthetic oligonucleotide
  misc_feature 1..20: note = Target: FXN; (-) strand; PAM type: YTN; PAM sequence: CTC
  source 1..20: mol_type = other DNA
tgcctcctgggctcaagtga

SEQ ID NO: 23425 - DNA, 20 bp, synthetic construct
  misc_feature 1..20: note = Description of Artificial Sequence: Synthetic oligonucleotide
  misc_feature 1..20: note = Target: FXN; (-) strand; PAM type: YTN; PAM sequence: CTG
  source 1..20: mol_type = other DNA
caacctctgcctcctgggct

SEQ ID NO: 23426 - DNA, 20 bp, synthetic construct
  misc_feature 1..20: note = Description of Artificial Sequence: Synthetic oligonucleotide
  misc_feature 1..20: note = Target: FXN; (-) strand; PAM type: YTN; PAM sequence: CTC
  source 1..20: mol_type = other DNA
actgcaacctctgcctcctg

SEQ ID NO: 23427 - DNA, 20 bp, synthetic construct
  misc_feature 1..20: note = Description of Artificial Sequence: Synthetic oligonucleotide
  misc_feature 1..20: note = Target: FXN; (-) strand; PAM type: YTN; PAM sequence: TTG
  source 1..20: mol_type = other DNA
gctcactgcaacctctgcct

SEQ ID NO: 23428 - DNA, 20 bp, synthetic construct
  misc_feature 1..20: note = Description of Artificial Sequence: Synthetic oligonucleotide
  misc_feature 1..20: note = Target: FXN; (-) strand; PAM type: YTN; PAM sequence: CTT
  source 1..20: mol_type = other DNA
ggctcactgcaacctctgcc

SEQ ID NO: 23429 - DNA, 20 bp, synthetic construct
  misc_feature 1..20: note = Description of Artificial Sequence: Synthetic oligonucleotide
  misc_feature 1..20: note = Target: FXN; (-) strand; PAM type: YTN; PAM sequence: TTG
  source 1..20: mol_type = other DNA
tatgtcacagaatcccccaa

SEQ ID NO: 23430 - DNA, 20 bp, synthetic construct
  misc_feature 1..20: note = Description of Artificial Sequence: Synthetic oligonucleotide
  misc_feature 1..20: note = Target: FXN; (-) strand; PAM type: YTN; PAM sequence: TTT
  source 1..20: mol_type = other DNA
gtatgtcacagaatccccca

SEQ ID NO: 23431 - DNA, 20 bp, synthetic construct
  misc_feature 1..20: note = Description of Artificial Sequence: Synthetic oligonucleotide
  misc_feature 1..20: note = Target: FXN; (-) strand; PAM type: YTN; PAM sequence: TTT
  source 1..20: mol_type = other DNA
tgtatgtcacagaatccccc

SEQ ID NO: 23432 - DNA, 20 bp, synthetic construct
  misc_feature 1..20: note = Description of Artificial Sequence: Synthetic oligonucleotide
  misc_feature 1..20: note = Target: FXN; (-) strand; PAM type: YTN; PAM sequence: TTT
  source 1..20: mol_type = other DNA
ttgtatgtcacagaatcccc

SEQ ID NO: 23433 - DNA, 20 bp, synthetic construct
  misc_feature 1..20: note = Description of Artificial Sequence: Synthetic oligonucleotide
  misc_feature 1..20: note = Target: FXN; (-) strand; PAM type: YTN; PAM sequence: TTT
  source 1..20: mol_type = other DNA
tttgtatgtcacagaatccc

SEQ ID NO: 23434 - DNA, 20 bp, synthetic construct
  misc_feature 1..20: note = Description of Artificial Sequence: Synthetic oligonucleotide
  misc_feature 1..20: note = Target: FXN; (-) strand; PAM type: YTN; PAM sequence: TTT
  source 1..20: mol_type = other DNA
ttttgtatgtcacagaatcc

SEQ ID NO: 23435 - DNA, 20 bp, synthetic construct
  misc_feature 1..20: note = Description of Artificial Sequence: Synthetic oligonucleotide
  misc_feature 1..20: note = Target: FXN; (-) strand; PAM type: YTN; PAM sequence: TTT
  source 1..20: mol_type = other DNA
tttttgtatgtcacagaatc

SEQ ID NO: 23436 - DNA, 20 bp, synthetic construct
  misc_feature 1..20: note = Description of Artificial Sequence: Synthetic oligonucleotide
  misc_feature 1..20: note = Target: FXN; (-) strand; PAM type: YTN; PAM sequence: CTG
  source 1..20: mol_type = other DNA
attttttttgtatgtcacag

SEQ ID NO: 23437 - DNA, 20 bp, synthetic construct
  misc_feature 1..20: note = Description of Artificial Sequence: Synthetic oligonucleotide
  misc_feature 1..20: note = Target: FXN; (-) strand; PAM type: YTN; PAM sequence: TTA
  source 1..20: mol_type = other DNA
ctgattttttttgtatgtca

SEQ ID NO: 23438 - DNA, 20 bp, synthetic construct
  misc_feature 1..20: note = Description of Artificial Sequence: Synthetic oligonucleotide
  misc_feature 1..20: note = Target: FXN; (-) strand; PAM type: YTN; PAM sequence: TTA
  source 1..20: mol_type = other DNA
ttactgattttttttgtatg

SEQ ID NO: 23439 - DNA, 20 bp, synthetic construct
  misc_feature 1..20: note = Description of Artificial Sequence: Synthetic oligonucleotide
  misc_feature 1..20: note = Target: FXN; (-) strand; PAM type: YTN; PAM sequence: CTT
  source 1..20: mol_type = other DNA
attactgattttttttgtat

SEQ ID NO: 23440 - DNA, 20 bp, synthetic construct
  misc_feature 1..20: note = Description of Artificial Sequence: Synthetic oligonucleotide
  misc_feature 1..20: note = Target: FXN; (-) strand; PAM type: YTN; PAM sequence: CTG
  source 1..20: mol_type = other DNA
gaagtatatgagtacgaaaa

SEQ ID NO: 23441 - DNA, 20 bp, synthetic construct
  misc_feature 1..20: note = Description of Artificial Sequence: Synthetic oligonucleotide
  misc_feature 1..20: note = Target: FXN; (-) strand; PAM type: YTN; PAM sequence: TTG
  source 1..20: mol_type = other DNA
agatatgctggaagtatatg

SEQ ID NO: 23442 - DNA, 20 bp, synthetic construct
  misc_feature 1..20: note = Description of Artificial Sequence: Synthetic oligonucleotide
  misc_feature 1..20: note = Target: FXN; (-) strand; PAM type: YTN; PAM sequence: TTG
  source 1..20: mol_type = other DNA
tgaattgagatatgctggaa

SEQ ID NO: 23443 - DNA, 20 bp, synthetic construct
  misc_feature 1..20: note = Description of Artificial Sequence: Synthetic oligonucleotide
  misc_feature 1..20: note = Target: FXN; (-) strand; PAM type: YTN; PAM sequence: TTA
  source 1..20: mol_type = other DNA
gaaattgtgaattgagatat

SEQ ID NO: 23444 - DNA, 20 bp, synthetic construct
  misc_feature 1..20: note = Description of Artificial Sequence: Synthetic oligonucleotide
  misc_feature 1..20: note = Target: FXN; (-) strand; PAM type: YTN; PAM sequence: CTT
  source 1..20: mol_type = other DNA
agaaattgtgaattgagata

SEQ ID NO: 23445 - DNA, 20 bp, synthetic construct
  misc_feature 1..20: note = Description of Artificial Sequence: Synthetic oligonucleotide
  misc_feature 1..20: note = Target: FXN; (-) strand; PAM type: YTN; PAM sequence: TTA
  source 1..20: mol_type = other DNA
cttagaaattgtgaattgag

SEQ ID NO: 23446 - DNA, 20 bp, synthetic construct
  misc_feature 1..20: note = Description of Artificial Sequence: Synthetic oligonucleotide
  misc_feature 1..20: note = Target: FXN; (-) strand; PAM type: YTN; PAM sequence: TTT
  source 1..20: mol_type = other DNA
acttagaaattgtgaattga

SEQ ID NO: 23447 - DNA, 20 bp, synthetic construct
  misc_feature 1..20: note = Description of Artificial Sequence: Synthetic oligonucleotide
  misc_feature 1..20: note = Target: FXN; (-) strand; PAM type: YTN; PAM sequence: TTA
  source 1..20: mol_type = other DNA
taaaagtaaatacagataga

SEQ ID NO: 23448 - DNA, 20 bp, synthetic construct
  misc_feature 1..20: note = Description of Artificial Sequence: Synthetic oligonucleotide
  misc_feature 1..20: note = Target: FXN; (-) strand; PAM type: YTN; PAM sequence: TTT
  source 1..20: mol_type = other DNA
ataaaagtaaatacagatag

SEQ ID NO: 23449 - DNA, 20 bp, synthetic construct
  misc_feature 1..20: note = Description of Artificial Sequence: Synthetic oligonucleotide
  misc_feature 1..20: note = Target: FXN; (-) strand; PAM type: YTN; PAM sequence: TTT
  source 1..20: mol_type = other DNA
tataaaagtaaatacagata

SEQ ID NO: 23450 - DNA, 20 bp, synthetic construct
  misc_feature 1..20: note = Description of Artificial Sequence: Synthetic oligonucleotide
  misc_feature 1..20: note = Target: FXN; (-) strand; PAM type: YTN; PAM sequence: TTG
  source 1..20: mol_type = other DNA
tgaattttataaaagtaaat

SEQ ID NO: 23451 - DNA, 20 bp, synthetic construct
  misc_feature 1..20: note = Description of Artificial Sequence: Synthetic oligonucleotide
  misc_feature 1..20: note = Target: FXN; (-) strand; PAM type: YTN; PAM sequence: TTA
  source 1..20: mol_type = other DNA
attgtgaattttataaaagt

SEQ ID NO: 23452 - DNA, 20 bp, synthetic construct
  misc_feature 1..20: note = Description of Artificial Sequence: Synthetic oligonucleotide
  misc_feature 1..20: note = Target: FXN; (-) strand; PAM type: YTN; PAM sequence: TTT
  source 1..20: mol_type = other DNA
aattgtgaattttataaaag

SEQ ID NO: 23453 - DNA, 20 bp, synthetic construct
  misc_feature 1..20: note = Description of Artificial Sequence: Synthetic oligonucleotide
  misc_feature 1..20: note = Target: FXN; (-) strand; PAM type: YTN; PAM sequence: TTT
  source 1..20: mol_type = other DNA
taattgtgaattttataaaa

SEQ ID NO: 23454 - DNA, 20 bp, synthetic construct
  misc_feature 1..20: note = Description of Artificial Sequence: Synthetic oligonucleotide
  misc_feature 1..20: note = Target: FXN; (-) strand; PAM type: YTN; PAM sequence: TTT
  source 1..20: mol_type = other DNA
ttaattgtgaattttataaa

SEQ ID NO: 23455 - DNA, 20 bp, synthetic construct
  misc_feature 1..20: note = Description of Artificial Sequence: Synthetic oligonucleotide
  misc_feature 1..20: note = Target: FXN; (-) strand; PAM type: YTN; PAM sequence: TTC
  source 1..20: mol_type = other DNA
atttttaattgtgaatttta

SEQ ID NO: 23456 - DNA, 20 bp, synthetic construct
  misc_feature 1..20: note = Description of Artificial Sequence: Synthetic oligonucleotide
  misc_feature 1..20: note = Target: FXN; (-) strand; PAM type: YTN; PAM sequence: CTT
  source 1..20: mol_type = other DNA
catttttaattgtgaatttt

SEQ ID NO: 23457 - DNA, 20 bp, synthetic construct
  misc_feature 1..20: note = Description of Artificial Sequence: Synthetic oligonucleotide
  misc_feature 1..20: note = Target: FXN; (-) strand; PAM type: YTN; PAM sequence: CTA
  source 1..20: mol_type = other DNA
tgtgaaccttcatttttaat

SEQ ID NO: 23458 - DNA, 20 bp, synthetic construct
  misc_feature 1..20: note = Description of Artificial Sequence: Synthetic oligonucleotide
  misc_feature 1..20: note = Target: FXN; (-) strand; PAM type: YTN; PAM sequence: TTG
  source 1..20: mol_type = other DNA
actatgtgaaccttcatttt

SEQ ID NO: 23459 - DNA, 20 bp, synthetic construct
  misc_feature 1..20: note = Description of Artificial Sequence: Synthetic oligonucleotide
  misc_feature 1..20: note = Target: FXN; (-) strand; PAM type: YTN; PAM sequence: CTT
  source 1..20: mol_type = other DNA
gactatgtgaaccttcattt

SEQ ID NO: 23460 - DNA, 20 bp, synthetic construct
  misc_feature 1..20: note = Description of Artificial Sequence: Synthetic oligonucleotide
  misc_feature 1..20: note = Target: FXN; (-) strand; PAM type: YTN; PAM sequence: TTG
  source 1..20: mol_type = other DNA
gaacaacttgactatgtgaa

SEQ ID NO: 23461 - DNA, 20 bp, synthetic construct
  misc_feature 1..20: note = Description of Artificial Sequence: Synthetic oligonucleotide
  misc_feature 1..20: note = Target: FXN; (-) strand; PAM type: YTN; PAM sequence: TTT
  source 1..20: mol_type = other DNA
ggaacaacttgactatgtga

SEQ ID NO: 23462 - DNA, 20 bp, synthetic construct
  misc_feature 1..20: note = Description of Artificial Sequence: Synthetic oligonucleotide
  misc_feature 1..20: note = Target: FXN; (-) strand; PAM type: YTN; PAM sequence: TTA
  source 1..20: mol_type = other DNA
agtgtgtttggaacaacttg

SEQ ID NO: 23463 - DNA, 20 bp, synthetic construct
  misc_feature 1..20: note = Description of Artificial Sequence: Synthetic oligonucleotide
  misc_feature 1..20: note = Target: FXN; (-) strand; PAM type: YTN; PAM sequence: TTT
  source 1..20: mol_type = other DNA
aagtgtgtttggaacaactt

SEQ ID NO: 23464 - DNA, 20 bp, synthetic construct
  misc_feature 1..20: note = Description of Artificial Sequence: Synthetic oligonucleotide
  misc_feature 1..20: note = Target: FXN; (-) strand; PAM type: YTN; PAM sequence: CTA
  source 1..20: mol_type = other DNA
ggagacatttaagtgtgttt

SEQ ID NO: 23465 - DNA, 20 bp, synthetic construct
  misc_feature 1..20: note = Description of Artificial Sequence: Synthetic oligonucleotide
  misc_feature 1..20: note = Target: FXN; (-) strand; PAM type: YTN; PAM sequence: TTA
  source 1..20: mol_type = other DNA
caggtgtgagcaaccacacc

SEQ ID NO: 23466 - DNA, 20 bp, synthetic construct
  misc_feature 1..20: note = Description of Artificial Sequence: Synthetic oligonucleotide
  misc_feature 1..20: note = Target: FXN; (-) strand; PAM type: YTN; PAM sequence: CTG
  source 1..20: mol_type = other DNA
ggattacaggtgtgagcaac

SEQ ID NO: 23467 - DNA, 20 bp, synthetic construct
  misc_feature 1..20: note = Description of Artificial Sequence: Synthetic oligonucleotide
  misc_feature 1..20: note = Target: FXN; (-) strand; PAM type: YTN; PAM sequence: CTC
  source 1..20: mol_type = other DNA
ccaaagtgctgggattacag

SEQ ID NO: 23468 - DNA, 20 bp, synthetic construct
  misc_feature 1..20: note = Description of Artificial Sequence: Synthetic oligonucleotide
  misc_feature 1..20: note = Target: FXN; (-) strand; PAM type: YTN; PAM sequence: CTC
  source 1..20: mol_type = other DNA
agcctcccaaagtgctggga

SEQ ID NO: 23469 - DNA, 20 bp, synthetic construct
  misc_feature 1..20: note = Description of Artificial Sequence: Synthetic oligonucleotide
  misc_feature 1..20: note = Target: FXN; (-) strand; PAM type: YTN; PAM sequence: CTC
  source 1..20: mol_type = other DNA
aggtgatccgcccatctcag

SEQ ID NO: 23470 - DNA, 20 bp, synthetic construct
  misc_feature 1..20: note = Description of Artificial Sequence: Synthetic oligonucleotide
  misc_feature 1..20: note = Target: FXN; (-) strand; PAM type: YTN; PAM sequence: CTG
  source 1..20: mol_type = other DNA
acctcaggtgatccgcccat

SEQ ID NO: 23471 - DNA, 20 bp, synthetic construct
  misc_feature 1..20: note = Description of Artificial Sequence: Synthetic oligonucleotide
  misc_feature 1..20: note = Target: FXN; (-) strand; PAM type: YTN; PAM sequence: CTC
  source 1..20: mol_type = other DNA
ctgacctcaggtgatccgcc

SEQ ID NO: 23472 - DNA, 20 bp, synthetic construct
  misc_feature 1..20: note = Description of Artificial Sequence: Synthetic oligonucleotide
  misc_feature 1..20: note = Target: FXN; (-) strand; PAM type: YTN; PAM sequence: CTC
  source 1..20: mol_type = other DNA
aaactcctgacctcaggtga

SEQ ID NO: 23473 - DNA, 20 bp, synthetic construct
  misc_feature 1..20: note = Description of Artificial Sequence: Synthetic oligonucleotide
  misc_feature 1..20: note = Target: FXN; (-) strand; PAM type: YTN; PAM sequence: CTG
  source 1..20: mol_type = other DNA
gtctcaaactcctgacctca

SEQ ID NO: 23474 - DNA, 20 bp, synthetic construct
  misc_feature 1..20: note = Description of Artificial Sequence: Synthetic oligonucleotide
  misc_feature 1..20: note = Target: FXN; (-) strand; PAM type: YTN; PAM sequence: TTG
  source 1..20: mol_type = other DNA
gccaggctggtctcaaactc

SEQ ID NO: 23475 - DNA, 20 bp, synthetic construct
  misc_feature 1..20: note = Description of Artificial Sequence: Synthetic oligonucleotide
  misc_feature 1..20: note = Target: FXN; (-) strand; PAM type: YTN; PAM sequence: TTC
  source 1..20: mol_type = other DNA
accatgttggccaggctggt

SEQ ID NO: 23476 - DNA, 20 bp, synthetic construct
  misc_feature 1..20: note = Description of Artificial Sequence: Synthetic oligonucleotide
  misc_feature 1..20: note = Target: FXN; (-) strand; PAM type: YTN; PAM sequence: TTT
  source 1..20: mol_type = other DNA
caccatgttggccaggctgg

SEQ ID NO: 23477 - DNA, 20 bp, synthetic construct
  misc_feature 1..20: note = Description of Artificial Sequence: Synthetic oligonucleotide
  misc_feature 1..20: note = Target: FXN; (-) strand; PAM type: YTN; PAM sequence: TTA
  source 1..20: mol_type = other DNA
gtagagacggggtttcacca

SEQ ID NO: 23478 - DNA, 20 bp, synthetic construct
  misc_feature 1..20: note = Description of Artificial Sequence: Synthetic oligonucleotide
  misc_feature 1..20: note = Target: FXN; (-) strand; PAM type: YTN; PAM sequence: TTT
  source 1..20: mol_type = other DNA
agtagagacggggtttcacc

SEQ ID NO: 23479 - DNA, 20 bp, synthetic construct
  misc_feature 1..20: note = Description of Artificial Sequence: Synthetic oligonucleotide
  misc_feature 1..20: note = Target: FXN; (-) strand; PAM type: YTN; PAM sequence: TTT
  source 1..20: mol_type = other DNA
tagtagagacggggtttcac

SEQ ID NO: 23480 - DNA, 20 bp, synthetic construct
  misc_feature 1..20: note = Description of Artificial Sequence: Synthetic oligonucleotide
  misc_feature 1..20: note = Target: FXN; (-) strand; PAM type: YTN; PAM sequence: TTT
  source 1..20: mol_type = other DNA
ttagtagagacggggtttca

SEQ ID NO: 23481 - DNA, 20 bp, synthetic construct
  misc_feature 1..20: note = Description of Artificial Sequence: Synthetic oligonucleotide
  misc_feature 1..20: note = Target: FXN; (-) strand; PAM type: YTN; PAM sequence: TTG
  source 1..20: mol_type = other DNA
tatttttagtagagacgggg

SEQ ID NO: 23482 - DNA, 20 bp, synthetic construct
  misc_feature 1..20: note = Description of Artificial Sequence: Synthetic oligonucleotide
  misc_feature 1..20: note = Target: FXN; (-) strand; PAM type: YTN; PAM sequence: TTT
  source 1..20: mol_type = other DNA
gtatttttagtagagacggg

SEQ ID NO: 23483 - DNA, 20 bp, synthetic construct
  misc_feature 1..20: note = Description of Artificial Sequence: Synthetic oligonucleotide
  misc_feature 1..20: note = Target: FXN; (-) strand; PAM type: YTN; PAM sequence: TTT
  source 1..20: mol_type = other DNA
tgtatttttagtagagacgg

SEQ ID NO: 23484 - DNA, 20 bp, synthetic construct
  misc_feature 1..20: note = Description of Artificial Sequence: Synthetic oligonucleotide
  misc_feature 1..20: note = Target: FXN; (-) strand; PAM type: YTN; PAM sequence: TTT
  source 1..20: mol_type = other DNA
ttgtatttttagtagagacg

SEQ ID NO: 23485 - DNA, 20 bp, synthetic construct
  misc_feature 1..20: note = Description of Artificial Sequence: Synthetic oligonucleotide
  misc_feature 1..20: note = Target: FXN; (-) strand; PAM type: YTN; PAM sequence: CTA
  source 1..20: mol_type = other DNA
atttttgtatttttagtaga

SEQ ID NO: 23486 - DNA, 20 bp, synthetic construct
  misc_feature 1..20: note = Description of Artificial Sequence: Synthetic oligonucleotide
  misc_feature 1..20: note = Target: FXN; (-) strand; PAM type: YTN; PAM sequence: TTA
  source 1..20: mol_type = other DNA
caggtgagtgccaccacatc

SEQ ID NO: 23487 - DNA, 20 bp, synthetic construct
  misc_feature 1..20: note = Description of Artificial Sequence: Synthetic oligonucleotide
  misc_feature 1..20: note = Target: FXN; (-) strand; PAM type: YTN; PAM sequence: CTG
  source 1..20: mol_type = other DNA
ggattacaggtgagtgccac

SEQ ID NO: 23488 - DNA, 20 bp, synthetic construct
  misc_feature 1..20: note = Description of Artificial Sequence: Synthetic oligonucleotide
  misc_feature 1..20: note = Target: FXN; (-) strand; PAM type: YTN; PAM sequence: CTG
  source 1..20: mol_type = other DNA
agtagctgggattacaggtg

SEQ ID NO: 23489 - DNA, 20 bp, synthetic construct
  misc_feature 1..20: note = Description of Artificial Sequence: Synthetic oligonucleotide
  misc_feature 1..20: note = Target: FXN; (-) strand; PAM type: YTN; PAM sequence: CTC
  source 1..20: mol_type = other DNA
ctgagtagctgggattacag

SEQ ID NO: 23490 - DNA, 20 bp, synthetic construct
  misc_feature 1..20: note = Description of Artificial Sequence: Synthetic oligonucleotide
  misc_feature 1..20: note = Target: FXN; (-) strand; PAM type: YTN; PAM sequence: CTC
  source 1..20: mol_type = other DNA
agcctcctgagtagctggga

SEQ ID NO: 23491 - DNA, 20 bp, synthetic construct
  misc_feature 1..20: note = Description of Artificial Sequence: Synthetic oligonucleotide
  misc_feature 1..20: note = Target: FXN; (-) strand; PAM type: YTN; PAM sequence: CTG
  source 1..20: mol_type = other DNA
cctcagcctcctgagtagct

SEQ ID NO: 23492 - DNA, 20 bp, synthetic construct
  misc_feature 1..20: note = Description of Artificial Sequence: Synthetic oligonucleotide
  misc_feature 1..20: note = Target: FXN; (-) strand; PAM type: YTN; PAM sequence: TTA
  source 1..20: mol_type = other DNA
tcctgcctcagcctcctgag

SEQ ID NO: 23493 - DNA, 20 bp, synthetic construct
  misc_feature 1..20: note = Description of Artificial Sequence: Synthetic oligonucleotide
  misc_feature 1..20: note = Target: FXN; (-) strand; PAM type: YTN; PAM sequence: TTC
  source 1..20: mol_type = other DNA
aagcaattatcctgcctcag

SEQ ID NO: 23494 - DNA, 20 bp, synthetic construct
  misc_feature 1..20: note = Description of Artificial Sequence: Synthetic oligonucleotide
  misc_feature 1..20: note = Target: FXN; (-) strand; PAM type: YTN; PAM sequence: CTC
  source 1..20: mol_type = other DNA
ccgggttcaagcaattatcc

SEQ ID NO: 23495 - DNA, 20 bp, synthetic construct
  misc_feature 1..20: note = Description of Artificial Sequence: Synthetic oligonucleotide
  misc_feature 1..20: note = Target: FXN; (-) strand; PAM type: YTN; PAM sequence: CTC
  source 1..20: mol_type = other DNA
caccacctcccgggttcaag

SEQ ID NO: 23496 - DNA, 20 bp, synthetic construct
  misc_feature 1..20: note = Description of Artificial Sequence: Synthetic oligonucleotide
  misc_feature 1..20: note = Target: FXN; (-) strand; PAM type: YTN; PAM sequence: CTG
  source 1..20: mol_type = other DNA
caacctccaccacctcccgg

SEQ ID NO: 23497 - DNA, 20 bp, synthetic construct
  misc_feature 1..20: note = Description of Artificial Sequence: Synthetic oligonucleotide
  misc_feature 1..20: note = Target: FXN; (-) strand; PAM type: YTN; PAM sequence: CTC
  source 1..20: mol_type = other DNA
actgcaacctccaccacctc

SEQ ID NO: 23498 - DNA, 20 bp, synthetic construct
  misc_feature 1..20: note = Description of Artificial Sequence: Synthetic oligonucleotide
  misc_feature 1..20: note = Target: FXN; (-) strand; PAM type: YTN; PAM sequence: CTC
  source 1..20: mol_type = other DNA
ggctcactgcaacctccacc

SEQ ID NO: 23499 - DNA, 20 bp, synthetic construct
  misc_feature 1..20: note = Description of Artificial Sequence: Synthetic oligonucleotide
  misc_feature 1..20: note = Target: FXN; (-) strand; PAM type: YTN; PAM sequence: TTG
  source 1..20: mol_type = other DNA
gaaggcagtggtgcgatctc

SEQ ID NO: 23500 - DNA, 20 bp, synthetic construct
  misc_feature 1..20: note = Description of Artificial Sequence: Synthetic oligonucleotide
  misc_feature 1..20: note = Target: FXN; (-) strand; PAM type: YTN; PAM sequence: CTG
  source 1..20: mol_type = other DNA
tcgcccaggttggaaggcag

SEQ ID NO: 23501 - DNA, 20 bp, synthetic construct
  misc_feature 1..20: note = Description of Artificial Sequence: Synthetic oligonucleotide
  misc_feature 1..20: note = Target: FXN; (-) strand; PAM type: YTN; PAM sequence: CTC
  source 1..20: mol_type = other DNA
tgtcgcccaggttggaaggc

SEQ ID NO: 23502 - DNA, 20 bp, synthetic construct
  misc_feature 1..20: note = Description of Artificial Sequence: Synthetic oligonucleotide
  misc_feature 1..20: note = Target: FXN; (-) strand; PAM type: YTN; PAM sequence: CTC
  source 1..20: mol_type = other DNA
gctctgtcgcccaggttgga

SEQ ID NO: 23503 - DNA, 20 bp, synthetic construct
  misc_feature 1..20: note = Description of Artificial Sequence: Synthetic oligonucleotide
  misc_feature 1..20: note = Target: FXN; (-) strand; PAM type: YTN; PAM sequence: TTG
  source 1..20: mol_type = other DNA
agacggagtctcgctctgtc

SEQ ID NO: 23504 - DNA, 20 bp, synthetic construct
  misc_feature 1..20: note = Description of Artificial Sequence: Synthetic oligonucleotide
  misc_feature 1..20: note = Target: FXN; (-) strand; PAM type: YTN; PAM sequence: TTT
  source 1..20: mol_type = other DNA
gagacggagtctcgctctgt

SEQ ID NO: 23505 - DNA, 20 bp, synthetic construct
  misc_feature 1..20: note = Description of Artificial Sequence: Synthetic oligonucleotide
  misc_feature 1..20: note = Target: FXN; (-) strand; PAM type: YTN; PAM sequence: TTT
  source 1..20: mol_type = other DNA
tgagacggagtctcgctctg

SEQ ID NO: 23506 - DNA, 20 bp, synthetic construct
  misc_feature 1..20: note = Description of Artificial Sequence: Synthetic oligonucleotide
  misc_feature 1..20: note = Target: FXN; (-) strand; PAM type: YTN; PAM sequence: TTT
  source 1..20: mol_type = other DNA
ttgagacggagtctcgctct

SEQ ID NO: 23507 - DNA, 20 bp, synthetic construct
  misc_feature 1..20: note = Description of Artificial Sequence: Synthetic oligonucleotide
  misc_feature 1..20: note = Target: FXN; (-) strand; PAM type: YTN; PAM sequence: TTT
  source 1..20: mol_type = other DNA
tttgagacggagtctcgctc

SEQ ID NO: 23508 - DNA, 20 bp, synthetic construct
  misc_feature 1..20: note = Description of Artificial Sequence: Synthetic oligonucleotide
  misc_feature 1..20: note = Target: FXN; (-) strand; PAM type: YTN; PAM sequence: TTT
  source 1..20: mol_type = other DNA
ttttgagacggagtctcgct

SEQ ID NO: 23509 - DNA, 20 bp, synthetic construct
  misc_feature 1..20: note = Description of Artificial Sequence: Synthetic oligonucleotide
  misc_feature 1..20: note = Target: FXN; (-) strand; PAM type: YTN; PAM sequence: TTT
  source 1..20: mol_type = other DNA
tttttgagacggagtctcgc

SEQ ID NO: 23510 - DNA, 20 bp, synthetic construct
  misc_feature 1..20: note = Description of Artificial Sequence: Synthetic oligonucleotide
  misc_feature 1..20: note = Target: FXN; (-) strand; PAM type: YTN; PAM sequence: TTT
  source 1..20: mol_type = other DNA
ttttttgagacggagtctcg

SEQ ID NO: 23511 - DNA, 20 bp, synthetic construct
  misc_feature 1..20: note = Description of Artificial Sequence: Synthetic oligonucleotide
  misc_feature 1..20: note = Target: FXN; (-) strand; PAM type: YTN; PAM sequence: TTT
  source 1..20: mol_type = other DNA
tttttttgagacggagtctc

SEQ ID NO: 23512 - DNA, 20 bp, synthetic construct
  misc_feature 1..20: note = Description of Artificial Sequence: Synthetic oligonucleotide
  misc_feature 1..20: note = Target: FXN; (-) strand; PAM type: YTN; PAM sequence: TTT
  source 1..20: mol_type = other DNA
ttttttttgagacggagtct

SEQ ID NO: 23513 - DNA, 20 bp, synthetic construct
  misc_feature 1..20: note = Description of Artificial Sequence: Synthetic oligonucleotide
  misc_feature 1..20: note = Target: FXN; (-) strand; PAM type: YTN; PAM sequence: TTT
  source 1..20: mol_type = other DNA
tttttttttgagacggagtc

SEQ ID NO: 23514 - DNA, 20 bp, synthetic construct
  misc_feature 1..20: note = Description of Artificial Sequence: Synthetic oligonucleotide
  misc_feature 1..20: note = Target: FXN; (-) strand; PAM type: YTN; PAM sequence: TTT
  source 1..20: mol_type = other DNA
ttttttttttgagacggagt

SEQ ID NO: 23515 - DNA, 20 bp, synthetic construct
  misc_feature 1..20: note = Description of Artificial Sequence: Synthetic oligonucleotide
  misc_feature 1..20: note = Target: FXN; (-) strand; PAM type: YTN; PAM sequence: TTT
  source 1..20: mol_type = other DNA
tttttttttttgagacggag

SEQ ID NO: 23516 - DNA, 20 bp, synthetic construct
  misc_feature 1..20: note = Description of Artificial Sequence: Synthetic oligonucleotide
  misc_feature 1..20: note = Target: FXN; (-) strand; PAM type: YTN; PAM sequence: CTT
  source 1..20: mol_type = other DNA
ttttttttttttgagacgga

SEQ ID NO: 23517 - DNA, 20 bp, synthetic construct
  misc_feature 1..20: note = Description of Artificial Sequence: Synthetic oligonucleotide
  misc_feature 1..20: note = Target: FXN; (-) strand; PAM type: YTN; PAM sequence: TTA
  source 1..20: mol_type = other DNA
ggagcctttttttttttttt

SEQ ID NO: 23518 - DNA, 20 bp, synthetic construct
  misc_feature 1..20: note = Description of Artificial Sequence: Synthetic oligonucleotide
  misc_feature 1..20: note = Target: FXN; (-) strand; PAM type: YTN; PAM sequence: TTA
  source 1..20: mol_type = other DNA
ttaggagccttttttttttt

SEQ ID NO: 23519 - DNA, 20 bp, synthetic construct
  misc_feature 1..20: note = Description of Artificial Sequence: Synthetic oligonucleotide
  misc_feature 1..20: note = Target: FXN; (-) strand; PAM type: YTN; PAM sequence: TTG
  source 1..20: mol_type = other DNA
aggtgataataaagtaataa

SEQ ID NO: 23520 - DNA, 20 bp, synthetic construct
  misc_feature 1..20: note = Description of Artificial Sequence: Synthetic oligonucleotide
  misc_feature 1..20: note = Target: FXN; (-) strand; PAM type: YTN; PAM sequence: TTT
  source 1..20: mol_type = other DNA
gaggtgataataaagtaata

SEQ ID NO: 23521 - DNA, 20 bp, synthetic construct
  misc_feature 1..20: note = Description of Artificial Sequence: Synthetic oligonucleotide
  misc_feature 1..20: note = Target: FXN; (-) strand; PAM type: YTN; PAM sequence: TTA
  source 1..20: mol_type = other DNA
tttgaggtgataataaagta

SEQ ID NO: 23522 - DNA, 20 bp, synthetic construct
  misc_feature 1..20: note = Description of Artificial Sequence: Synthetic oligonucleotide
  misc_feature 1..20: note = Target: FXN; (-) strand; PAM type: YTN; PAM sequence: TTA
  source 1..20: mol_type = other DNA
attatttgaggtgataataa

SEQ ID NO: 23523 - DNA, 20 bp, synthetic construct
  misc_feature 1..20: note = Description of Artificial Sequence: Synthetic oligonucleotide
  misc_feature 1..20: note = Target: FXN; (-) strand; PAM type: YTN; PAM sequence: TTT
  source 1..20: mol_type = other DNA
aattatttgaggtgataata

SEQ ID NO: 23524 - DNA, 20 bp, synthetic construct
  misc_feature 1..20: note = Description of Artificial Sequence: Synthetic oligonucleotide
  misc_feature 1..20: note = Target: FXN; (-) strand; PAM type: YTN; PAM sequence: TTT
  source 1..20: mol_type = other DNA
taattatttgaggtgataat

SEQ ID NO: 23525 - DNA, 20 bp, synthetic construct
  misc_feature 1..20: note = Description of Artificial Sequence: Synthetic oligonucleotide
  misc_feature 1..20: note = Target: FXN; (-) strand; PAM type: YTN; PAM sequence: TTA
  source 1..20: mol_type = other DNA
attttaattatttgaggtga

SEQ ID NO: 23526 - DNA, 20 bp, synthetic construct
  misc_feature 1..20: note = Description of Artificial Sequence: Synthetic oligonucleotide
  misc_feature 1..20: note = Target: FXN; (-) strand; PAM type: YTN; PAM sequence: TTT
  source 1..20: mol_type = other DNA
aattttaattatttgaggtg

SEQ ID NO: 23527 - DNA, 20 bp, synthetic construct
  misc_feature 1..20: note = Description of Artificial Sequence: Synthetic oligonucleotide
  misc_feature 1..20: note = Target: FXN; (-) strand; PAM type: YTN; PAM sequence: TTC
  source 1..20: mol_type = other DNA
atttaattttaattatttga

SEQ ID NO: 23528 - DNA, 20 bp, synthetic construct
  misc_feature 1..20: note = Description of Artificial Sequence: Synthetic oligonucleotide
  misc_feature 1..20: note = Target: FXN; (-) strand; PAM type: YTN; PAM sequence: CTT
  source 1..20: mol_type = other DNA
catttaattttaattatttg

SEQ ID NO: 23529 - DNA, 20 bp, synthetic construct
  misc_feature 1..20: note = Description of Artificial Sequence: Synthetic oligonucleotide
  misc_feature 1..20: note = Target: FXN; (-) strand; PAM type: YTN; PAM sequence: TTC
  source 1..20: mol_type = other DNA
aacttcatttaattttaatt

SEQ ID NO: 23530 - DNA, 20 bp, synthetic construct
  misc_feature 1..20: note = Description of Artificial Sequence: Synthetic oligonucleotide
  misc_feature 1..20: note = Target: FXN; (-) strand; PAM type: YTN; PAM sequence: TTT
  source 1..20: mol_type = other DNA
caacttcatttaattttaat

SEQ ID NO: 23531 - DNA, 20 bp, synthetic construct
  misc_feature 1..20: note = Description of Artificial Sequence: Synthetic oligonucleotide
  misc_feature 1..20: note = Target: FXN; (-) strand; PAM type: YTN; PAM sequence: TTT
  source 1..20: mol_type = other DNA
tcaacttcatttaattttaa

SEQ ID NO: 23532 - DNA, 20 bp, synthetic construct
  misc_feature 1..20: note = Description of Artificial Sequence: Synthetic oligonucleotide
  misc_feature 1..20: note = Target: FXN; (-) strand; PAM type: YTN; PAM sequence: CTG
  source 1..20: mol_type = other DNA
gattttcaacttcatttaat

SEQ ID NO: 23533 - DNA, 20 bp, synthetic construct
  misc_feature 1..20: note = Description of Artificial Sequence: Synthetic oligonucleotide
  misc_feature 1..20: note = Target: FXN; (-) strand; PAM type: YTN; PAM sequence: CTG
  source 1..20: mol_type = other DNA
aggacctggattttcaactt

SEQ ID NO: 23534 - DNA, 20 bp, synthetic construct
  misc_feature 1..20: note = Description of Artificial Sequence: Synthetic oligonucleotide
  misc_feature 1..20: note = Target: FXN; (-) strand; PAM type: YTN; PAM sequence: CTA
  source 1..20: mol_type = other DNA
atgggactgaggacctggat

SEQ ID NO: 23535 - DNA, 20 bp, synthetic construct
  misc_feature 1..20: note = Description of Artificial Sequence: Synthetic oligonucleotide
  misc_feature 1..20: note = Target: FXN; (-) strand; PAM type: YTN; PAM sequence: CTA
  source 1..20: mol_type = other DNA
gaaatgtggctaatgggact

SEQ ID NO: 23536 - DNA, 20 bp, synthetic construct
  misc_feature 1..20: note = Description of Artificial Sequence: Synthetic oligonucleotide
  misc_feature 1..20: note = Target: FXN; (-) strand; PAM type: YTN; PAM sequence: CTG
  source 1..20: mol_type = other DNA
agcactagaaatgtggctaa

SEQ ID NO: 23537 - DNA, 20 bp, synthetic construct
  misc_feature 1..20: note = Description of Artificial Sequence: Synthetic oligonucleotide
  misc_feature 1..20: note = Target: FXN; (-) strand; PAM type: YTN; PAM sequence: CTA
  source 1..20: mol_type = other DNA
ctgagcactagaaatgtggc

SEQ ID NO: 23538 - DNA, 20 bp, synthetic construct
  misc_feature 1..20: note = Description of Artificial Sequence: Synthetic oligonucleotide
  misc_feature 1..20: note = Target: FXN; (-) strand; PAM type: YTN; PAM sequence: CTG
  source 1..20: mol_type = other DNA
tcccatgtggtggtcaccag

SEQ ID NO: 23539 - DNA, 20 bp, synthetic construct
  misc_feature 1..20: note = Description of Artificial Sequence: Synthetic oligonucleotide
  misc_feature 1..20: note = Target: FXN; (-) strand; PAM type: YTN; PAM sequence: CTA
  source 1..20: mol_type = other DNA
aatatgctgtcccatgtggt

SEQ ID NO: 23540 - DNA, 20 bp, synthetic construct
  misc_feature 1..20: note = Description of Artificial Sequence: Synthetic oligonucleotide
  misc_feature 1..20: note = Target: FXN; (-) strand; PAM type: YTN; PAM sequence: CTG
  source 1..20: mol_type = other DNA
agaaccaatgatcaggtact

SEQ ID NO: 23541 - DNA, 20 bp, synthetic construct
  misc_feature 1..20: note = Description of Artificial Sequence: Synthetic oligonucleotide
  misc_feature 1..20: note = Target: FXN; (-) strand; PAM type: YTN; PAM sequence: CTG
  source 1..20: mol_type = other DNA
agtagccagatctgagaacc

SEQ ID NO: 23542 - DNA, 20 bp, synthetic construct
  misc_feature 1..20: note = Description of Artificial Sequence: Synthetic oligonucleotide
  misc_feature 1..20: note = Target: FXN; (-) strand; PAM type: YTN; PAM sequence: CTG
  source 1..20: mol_type = other DNA
ctgagtagccagatctgaga

SEQ ID NO: 23543 - DNA, 20 bp, synthetic construct
  misc_feature 1..20: note = Description of Artificial Sequence: Synthetic oligonucleotide
  misc_feature 1..20: note = Target: FXN; (-) strand; PAM type: YTN; PAM sequence: TTC
  source 1..20: mol_type = other DNA
tgctgagtagccagatctga

SEQ ID NO: 23544 - DNA, 20 bp, synthetic construct
  misc_feature 1..20: note = Description of Artificial Sequence: Synthetic oligonucleotide
  misc_feature 1..20: note = Target: FXN; (-) strand; PAM type: YTN; PAM sequence: TTG
  source 1..20: mol_type = other DNA
gttctgctgagtagccagat

SEQ ID NO: 23545 - DNA, 20 bp, synthetic construct
  misc_feature 1..20: note = Description of Artificial Sequence: Synthetic oligonucleotide
  misc_feature 1..20: note = Target: FXN; (-) strand; PAM type: YTN; PAM sequence: CTT
  source 1..20: mol_type = other DNA
ggttctgctgagtagccaga

SEQ ID NO: 23546 - DNA, 20 bp, synthetic construct
  misc_feature 1..20: note = Description of Artificial Sequence: Synthetic oligonucleotide
  misc_feature 1..20: note = Target: FXN; (-) strand; PAM type: YTN; PAM sequence: TTC
  source 1..20: mol_type = other DNA
ttggttctgctgagtagcca

SEQ ID NO: 23547 - DNA, 20 bp, synthetic construct
  misc_feature 1..20: note = Description of Artificial Sequence: Synthetic oligonucleotide
  misc_feature 1..20: note = Target: FXN; (-) strand; PAM type: YTN; PAM sequence: CTG
  source 1..20: mol_type = other DNA
tggattcttggttctgctga

SEQ ID NO: 23548 - DNA, 20 bp, synthetic construct
  misc_feature 1..20: note = Description of Artificial Sequence: Synthetic oligonucleotide
  misc_feature 1..20: note = Target: FXN; (-) strand; PAM type: YTN; PAM sequence: TTC
  source 1..20: mol_type = other DNA
tgtggattcttggttctgct

SEQ ID NO: 23549 - DNA, 20 bp, synthetic construct
  misc_feature 1..20: note = Description of Artificial Sequence: Synthetic oligonucleotide
  misc_feature 1..20: note = Target: FXN; (-) strand; PAM type: YTN; PAM sequence: TTT
  source 1..20: mol_type = other DNA
ctgtggattcttggttctgc

SEQ ID NO: 23550 - DNA, 20 bp, synthetic construct
  misc_feature 1..20: note = Description of Artificial Sequence: Synthetic oligonucleotide
  misc_feature 1..20: note = Target: FXN; (-) strand; PAM type: YTN; PAM sequence: TTA
  source 1..20: mol_type = other DNA
aaagccgtttctgtggattc

SEQ ID NO: 23551 - DNA, 20 bp, synthetic construct
  misc_feature 1..20: note = Description of Artificial Sequence: Synthetic oligonucleotide
  misc_feature 1..20: note = Target: FXN; (-) strand; PAM type: YTN; PAM sequence: TTT
  source 1..20: mol_type = other DNA
aaaagccgtttctgtggatt

SEQ ID NO: 23552 - DNA, 20 bp, synthetic construct
  misc_feature 1..20: note = Description of Artificial Sequence: Synthetic oligonucleotide
  misc_feature 1..20: note = Target: FXN; (-) strand; PAM type: YTN; PAM sequence: TTT
  source 1..20: mol_type = other DNA
taaaagccgtttctgtggat

SEQ ID NO: 23553 - DNA, 20 bp, synthetic construct
  misc_feature 1..20: note = Description of Artificial Sequence: Synthetic oligonucleotide
  misc_feature 1..20: note = Target: FXN; (-) strand; PAM type: YTN; PAM sequence: CTT
  source 1..20: mol_type = other DNA
ttaaaagccgtttctgtgga

SEQ ID NO: 23554 - DNA, 20 bp, synthetic construct
  misc_feature 1..20: note = Description of Artificial Sequence: Synthetic oligonucleotide
  misc_feature 1..20: note = Target: FXN; (-) strand; PAM type: YTN; PAM sequence: CTG
  source 1..20: mol_type = other DNA
tgcttttaaaagccgtttct

SEQ ID NO: 23555 - DNA, 20 bp, synthetic construct
  misc_feature 1..20: note = Description of Artificial Sequence: Synthetic oligonucleotide
  misc_feature 1..20: note = Target: FXN; (-) strand; PAM type: YTN; PAM sequence: CTG
  source 1..20: mol_type = other DNA
tggggctgtgcttttaaaag

SEQ ID NO: 23556 - DNA, 20 bp, synthetic construct
  misc_feature 1..20: note = Description of Artificial Sequence: Synthetic oligonucleotide
  misc_feature 1..20: note = Target: FXN; (-) strand; PAM type: YTN; PAM sequence: CTG
  source 1..20: mol_type = other DNA
ggggctgtggggctgtgctt

SEQ ID NO: 23557 - DNA, 20 bp, synthetic construct
  misc_feature 1..20: note = Description of Artificial Sequence: Synthetic oligonucleotide
  misc_feature 1..20: note = Target: FXN; (-) strand; PAM type: YTN; PAM sequence: CTG
  source 1..20: mol_type = other DNA
gggctgggggctgtggggct

SEQ ID NO: 23558 - DNA, 20 bp, synthetic construct
  misc_feature 1..20: note = Description of Artificial Sequence: Synthetic oligonucleotide
  misc_feature 1..20: note = Target: FXN; (-) strand; PAM type: YTN; PAM sequence: CTC
  source 1..20: mol_type = other DNA
caggtaggtaaggctggggc

SEQ ID NO: 23559 - DNA, 20 bp, synthetic construct
  misc_feature 1..20: note = Description of Artificial Sequence: Synthetic oligonucleotide
  misc_feature 1..20: note = Target: FXN; (-) strand; PAM type: YTN; PAM sequence: TTC
  source 1..20: mol_type = other DNA
ccagcctccaggtaggtaag

SEQ ID NO: 23560 - DNA, 20 bp, synthetic construct
  misc_feature 1..20: note = Description of Artificial Sequence: Synthetic oligonucleotide
  misc_feature 1..20: note = Target: FXN; (-) strand; PAM type: YTN; PAM sequence: CTT
  source 1..20: mol_type = other DNA
cccagcctccaggtaggtaa

SEQ ID NO: 23561 - DNA, 20 bp, synthetic construct
  misc_feature 1..20: note = Description of Artificial Sequence: Synthetic oligonucleotide
  misc_feature 1..20: note = Target: FXN; (-) strand; PAM type: YTN; PAM sequence: CTC
  source 1..20: mol_type = other DNA
gtggaatcagagtccttccc

SEQ ID NO: 23562 - DNA, 20 bp, synthetic construct
  misc_feature 1..20: note = Description of Artificial Sequence: Synthetic oligonucleotide
  misc_feature 1..20: note = Target: FXN; (-) strand; PAM type: YTN; PAM sequence: CTG
  source 1..20: mol_type = other DNA
cctcgtggaatcagagtcct

SEQ ID NO: 23563 - DNA, 20 bp, synthetic construct
  misc_feature 1..20: note = Description of Artificial Sequence: Synthetic oligonucleotide
  misc_feature 1..20: note = Target: FXN; (-) strand; PAM type: YTN; PAM sequence: CTC
  source 1..20: mol_type = other DNA
catcaaaaaacataggctgc

SEQ ID NO: 23564 - DNA, 20 bp, synthetic construct
  misc_feature 1..20: note = Description of Artificial Sequence: Synthetic oligonucleotide
  misc_feature 1..20: note = Target: FXN; (-) strand; PAM type: YTN; PAM sequence: CTG
  source 1..20: mol_type = other DNA
tcacatccctccatcaaaaa

SEQ ID NO: 23565 - DNA, 20 bp, synthetic construct
  misc_feature 1..20: note = Description of Artificial Sequence: Synthetic oligonucleotide
  misc_feature 1..20: note = Target: FXN; (-) strand; PAM type: YTN; PAM sequence: TTA
  source 1..20: mol_type = other DNA
aagatgcagcccctgtcaca

SEQ ID NO: 23566 - DNA, 20 bp, synthetic construct
  misc_feature 1..20: note = Description of Artificial Sequence: Synthetic oligonucleotide
  misc_feature 1..20: note = Target: FXN; (-) strand; PAM type: YTN; PAM sequence: TTA
  source 1..20: mol_type = other DNA
agaggaaacgttaaagatgc

SEQ ID NO: 23567 - DNA, 20 bp, synthetic construct
  misc_feature 1..20: note = Description of Artificial Sequence: Synthetic oligonucleotide
  misc_feature 1..20: note = Target: FXN; (-) strand; PAM type: YTN; PAM sequence: TTT
  source 1..20: mol_type = other DNA
aagaggaaacgttaaagatg

SEQ ID NO: 23568 - DNA, 20 bp, synthetic construct
  misc_feature 1..20: note = Description of Artificial Sequence: Synthetic oligonucleotide
  misc_feature 1..20: note = Target: FXN; (-) strand; PAM type: YTN; PAM sequence: CTC
  source 1..20: mol_type = other DNA
cagtatttaagaggaaacgt

SEQ ID NO: 23569 - DNA, 20 bp, synthetic construct
  misc_feature 1..20: note = Description of Artificial Sequence: Synthetic oligonucleotide
  misc_feature 1..20: note = Target: FXN; (-) strand; PAM type: YTN; PAM sequence: CTG
  source 1..20: mol_type = other DNA
tctccagtatttaagaggaa

SEQ ID NO: 23570 - DNA, 20 bp, synthetic construct
  misc_feature 1..20: note = Description of Artificial Sequence: Synthetic oligonucleotide
  misc_feature 1..20: note = Target: FXN; (-) strand; PAM type: YTN; PAM sequence: CTC
  source 1..20: mol_type = other DNA
gaagctgtctccagtattta

SEQ ID NO: 23571 - DNA, 20 bp, synthetic construct
  misc_feature 1..20: note = Description of Artificial Sequence: Synthetic oligonucleotide
  misc_feature 1..20: note = Target: FXN; (-) strand; PAM type: YTN; PAM sequence: CTC
  source 1..20: mol_type = other DNA
ctcgaagctgtctccagtat

SEQ ID NO: 23572 - DNA, 20 bp, synthetic construct
  misc_feature 1..20: note = Description of Artificial Sequence: Synthetic oligonucleotide
  misc_feature 1..20: note = Target: FXN; (-) strand; PAM type: YTN; PAM sequence: CTC
  source 1..20: mol_type = other DNA
ctcctcgaagctgtctccag

SEQ ID NO: 23573 - DNA, 20 bp, synthetic construct
  misc_feature 1..20: note = Description of Artificial Sequence: Synthetic oligonucleotide
  misc_feature 1..20: note = Target: FXN; (-) strand; PAM type: YTN; PAM sequence: TTA
  source 1..20: mol_type = other DNA
tctcctcctcgaagctgtct

SEQ ID NO: 23574 - DNA, 20 bp, synthetic construct
  misc_feature 1..20: note = Description of Artificial Sequence: Synthetic oligonucleotide
  misc_feature 1..20: note = Target: FXN; (-) strand; PAM type: YTN; PAM sequence: CTA
  source 1..20: mol_type = other DNA
agacacatccagttatctcc

SEQ ID NO: 23575 - DNA, 20 bp, synthetic construct
  misc_feature 1..20: note = Description of Artificial Sequence: Synthetic oligonucleotide
  misc_feature 1..20: note = Target: FXN; (-) strand; PAM type: YTN; PAM sequence: CTC
  source 1..20: mol_type = other DNA
catcaaatggactaagacac

SEQ ID NO: 23576 - DNA, 20 bp, synthetic construct
  misc_feature 1..20: note = Description of Artificial Sequence: Synthetic oligonucleotide
  misc_feature 1..20: note = Target: FXN; (-) strand; PAM type: YTN; PAM sequence: TTA
  source 1..20: mol_type = other DNA
aagacgcagccccgtcacat

SEQ ID NO: 23577 - DNA, 20 bp, synthetic construct
  misc_feature 1..20: note = Description of Artificial Sequence: Synthetic oligonucleotide
  misc_feature 1..20: note = Target: FXN; (-) strand; PAM type: YTN; PAM sequence: TTA
  source 1..20: mol_type = other DNA
agaggaaacgttaaagacgc

SEQ ID NO: 23578 - DNA, 20 bp, synthetic construct
  misc_feature 1..20: note = Description of Artificial Sequence: Synthetic oligonucleotide
  misc_feature 1..20: note = Target: FXN; (-) strand; PAM type: YTN; PAM sequence: TTT
  source 1..20: mol_type = other DNA
aagaggaaacgttaaagacg

SEQ ID NO: 23579 - DNA, 20 bp, synthetic construct
  misc_feature 1..20: note = Description of Artificial Sequence: Synthetic oligonucleotide
  misc_feature 1..20: note = Target: FXN; (-) strand; PAM type: YTN; PAM sequence: CTC
  source 1..20: mol_type = other DNA
cggtatttaagaggaaacgt

SEQ ID NO: 23580 - DNA, 20 bp, synthetic construct
  misc_feature 1..20: note = Description of Artificial Sequence: Synthetic oligonucleotide
  misc_feature 1..20: note = Target: FXN; (-) strand; PAM type: YTN; PAM sequence: CTG
  source 1..20: mol_type = other DNA
tctccggtatttaagaggaa

SEQ ID NO: 23581 - DNA, 20 bp, synthetic construct
  misc_feature 1..20: note = Description of Artificial Sequence: Synthetic oligonucleotide
  misc_feature 1..20: note = Target: FXN; (-) strand; PAM type: YTN; PAM sequence: CTC
  source 1..20: mol_type = other DNA
gaagctgtctccggtattta

SEQ ID NO: 23582 - DNA, 20 bp, synthetic construct
  misc_feature 1..20: note = Description of Artificial Sequence: Synthetic oligonucleotide
  misc_feature 1..20: note = Target: FXN; (-) strand; PAM type: YTN; PAM sequence: TTC
  source 1..20: mol_type = other DNA
tcgaagctgtctccggtatt

SEQ ID NO: 23583 - DNA, 20 bp, synthetic construct
  misc_feature 1..20: note = Description of Artificial Sequence: Synthetic oligonucleotide
  misc_feature 1..20: note = Target: FXN; (-) strand; PAM type: YTN; PAM sequence: CTT
  source 1..20: mol_type = other DNA
ctcgaagctgtctccggtat

SEQ ID NO: 23584 - DNA, 20 bp, synthetic construct
  misc_feature 1..20: note = Description of Artificial Sequence: Synthetic oligonucleotide
  misc_feature 1..20: note = Target: FXN; (-) strand; PAM type: YTN; PAM sequence: CTC
  source 1..20: mol_type = other DNA
cttctcgaagctgtctccgg

SEQ ID NO: 23585 - DNA, 20 bp, synthetic construct
  misc_feature 1..20: note = Description of Artificial Sequence: Synthetic oligonucleotide
  misc_feature 1..20: note = Target: FXN; (-) strand; PAM type: YTN; PAM sequence: TTA
  source 1..20: mol_type = other DNA
tctccttctcgaagctgtct

SEQ ID NO: 23586 - DNA, 20 bp, synthetic construct
  misc_feature 1..20: note = Description of Artificial Sequence: Synthetic oligonucleotide
  misc_feature 1..20: note = Target: FXN; (-) strand; PAM type: YTN; PAM sequence: CTA
  source 1..20: mol_type = other DNA
agaaacatccagttatctcc

SEQ ID NO: 23587 - DNA, 20 bp, synthetic construct
  misc_feature 1..20: note = Description of Artificial Sequence: Synthetic oligonucleotide
  misc_feature 1..20: note = Target: FXN; (-) strand; PAM type: YTN; PAM sequence: CTG
  source 1..20: mol_type = other DNA
tcacaagcaacagaaaatgg

SEQ ID NO: 23588 - DNA, 20 bp, synthetic construct
  misc_feature 1..20: note = Description of Artificial Sequence: Synthetic oligonucleotide
  misc_feature 1..20: note = Target: FXN; (-) strand; PAM type: YTN; PAM sequence: TTC
  source 1..20: mol_type = other DNA
tgtcacaagcaacagaaaat

SEQ ID NO: 23589 - DNA, 20 bp, synthetic construct
  misc_feature 1..20: note = Description of Artificial Sequence: Synthetic oligonucleotide
  misc_feature 1..20: note = Target: FXN; (-) strand; PAM type: YTN; PAM sequence: TTC
  source 1..20: mol_type = other DNA
aggtattctgtcacaagcaa

SEQ ID NO: 23590 - DNA, 20 bp, synthetic construct
  misc_feature 1..20: note = Description of Artificial Sequence: Synthetic oligonucleotide
  misc_feature 1..20: note = Target: FXN; (-) strand; PAM type: YTN; PAM sequence: TTT
  source 1..20: mol_type = other DNA
caggtattctgtcacaagca

SEQ ID NO: 23591 - DNA, 20 bp, synthetic construct
  misc_feature 1..20: note = Description of Artificial Sequence: Synthetic oligonucleotide
  misc_feature 1..20: note = Target: FXN; (-) strand; PAM type: YTN; PAM sequence: TTG
  source 1..20: mol_type = other DNA
cccagtttcaggtattctgt

SEQ ID NO: 23592 - DNA, 20 bp, synthetic construct
  misc_feature 1..20: note = Description of Artificial Sequence: Synthetic oligonucleotide
  misc_feature 1..20: note = Target: FXN; (-) strand; PAM type: YTN; PAM sequence: TTA
  source 1..20: mol_type = other DNA
ccatataaattgcccagttt

SEQ ID NO: 23593 - DNA, 20 bp, synthetic construct
  misc_feature 1..20: note = Description of Artificial Sequence: Synthetic oligonucleotide
  misc_feature 1..20: note = Target: FXN; (-) strand; PAM type: YTN; PAM sequence: TTT
  source 1..20: mol_type = other DNA
accatataaattgcccagtt

SEQ ID NO: 23594 - DNA, 20 bp, synthetic construct
  misc_feature 1..20: note = Description of Artificial Sequence: Synthetic oligonucleotide
  misc_feature 1..20: note = Target: FXN; (-) strand; PAM type: YTN; PAM sequence: TTT
  source 1..20: mol_type = other DNA
taccatataaattgcccagt

SEQ ID NO: 23595 - DNA, 20 bp, synthetic construct
  misc_feature 1..20: note = Description of Artificial Sequence: Synthetic oligonucleotide
  misc_feature 1..20: note = Target: FXN; (-) strand; PAM type: YTN; PAM sequence: TTT
  source 1..20: mol_type = other DNA
ttaccatataaattgcccag

SEQ ID NO: 23596 - DNA, 20 bp, synthetic construct
  misc_feature 1..20: note = Description of Artificial Sequence: Synthetic oligonucleotide
  misc_feature 1..20: note = Target: FXN; (-) strand; PAM type: YTN; PAM sequence: TTT
  source 1..20: mol_type = other DNA
tttaccatataaattgccca

SEQ ID NO: 23597 - DNA, 20 bp, synthetic construct
  misc_feature 1..20: note = Description of Artificial Sequence: Synthetic oligonucleotide
  misc_feature 1..20: note = Target: FXN; (-) strand; PAM type: YTN; PAM sequence: CTC
  source 1..20: mol_type = other DNA
cagagcagtaagaagaaaat

SEQ ID NO: 23598 - DNA, 20 bp, synthetic construct
  misc_feature 1..20: note = Description of Artificial Sequence: Synthetic oligonucleotide
  misc_feature 1..20: note = Target: FXN; (-) strand; PAM type: YTN; PAM sequence: CTC
  source 1..20: mol_type = other DNA
agcctccagagcagtaagaa

SEQ ID NO: 23599 - DNA, 20 bp, synthetic construct
  misc_feature 1..20: note = Description of Artificial Sequence: Synthetic oligonucleotide
  misc_feature 1..20: note = Target: FXN; (-) strand; PAM type: YTN; PAM sequence: TTC
  source 1..20: mol_type = other DNA
tcagcctccagagcagtaag

SEQ ID NO: 23600 - DNA, 20 bp, synthetic construct
  misc_feature 1..20: note = Description of Artificial Sequence: Synthetic oligonucleotide
  misc_feature 1..20: note = Target: FXN; (-) strand; PAM type: YTN; PAM sequence: CTT
  source 1..20: mol_type = other DNA
ctcagcctccagagcagtaa

SEQ ID NO: 23601 - DNA, 20 bp, synthetic construct
  misc_feature 1..20: note = Description of Artificial Sequence: Synthetic oligonucleotide
  misc_feature 1..20: note = Target: FXN; (-) strand; PAM type: YTN; PAM sequence: TTG
  source 1..20: mol_type = other DNA
gacttctcagcctccagagc

SEQ ID NO: 23602 - DNA, 20 bp, synthetic construct
  misc_feature 1..20: note = Description of Artificial Sequence: Synthetic oligonucleotide
  misc_feature 1..20: note = Target: FXN; (-) strand; PAM type: YTN; PAM sequence: TTT
  source 1..20: mol_type = other DNA
ggacttctcagcctccagag

SEQ ID NO: 23603 - DNA, 20 bp, synthetic construct
  misc_feature 1..20: note = Description of Artificial Sequence: Synthetic oligonucleotide
  misc_feature 1..20: note = Target: FXN; (-) strand; PAM type: YTN; PAM sequence: CTT
  source 1..20: mol_type = other DNA
tggacttctcagcctccaga

SEQ ID NO: 23604 - DNA, 20 bp, synthetic construct
  misc_feature 1..20: note = Description of Artificial Sequence: Synthetic oligonucleotide
  misc_feature 1..20: note = Target: FXN; (-) strand; PAM type: YTN; PAM sequence: TTG
  source 1..20: mol_type = other DNA
actttggacttctcagcctc

SEQ ID NO: 23605 - DNA, 20 bp, synthetic construct
  misc_feature 1..20: note = Description of Artificial Sequence: Synthetic oligonucleotide
  misc_feature 1..20: note = Target: FXN; (-) strand; PAM type: YTN; PAM sequence: CTT
  source 1..20: mol_type = other DNA
gactttggacttctcagcct

SEQ ID NO: 23606 - DNA, 20 bp, synthetic construct
  misc_feature 1..20: note = Description of Artificial Sequence: Synthetic oligonucleotide
  misc_feature 1..20: note = Target: FXN; (-) strand; PAM type: YTN; PAM sequence: CTG
  source 1..20: mol_type = other DNA
caaagtccccaccagcaaga

SEQ ID NO: 23607 - DNA, 20 bp, synthetic construct
  misc_feature 1..20: note = Description of Artificial Sequence: Synthetic oligonucleotide
  misc_feature 1..20: note = Target: FXN; (-) strand; PAM type: YTN; PAM sequence: CTC
  source 1..20: mol_type = other DNA
tgcaaagtccccaccagcaa

SEQ ID NO: 23608 - DNA, 20 bp, synthetic construct
  misc_feature 1..20: note = Description of Artificial Sequence: Synthetic oligonucleotide
  misc_feature 1..20: note = Target: FXN; (-) strand; PAM type: YTN; PAM sequence: CTC
  source 1..20: mol_type = other DNA
aatactctgcaaagtcccca

SEQ ID NO: 23609 - DNA, 20 bp, synthetic construct
  misc_feature 1..20: note = Description of Artificial Sequence: Synthetic oligonucleotide
  misc_feature 1..20: note = Target: FXN; (-) strand; PAM type: YTN; PAM sequence: TTA
  source 1..20: mol_type = other DNA
ccatatgacgcccggtgccg

SEQ ID NO: 23610 - DNA, 20 bp, synthetic construct
  misc_feature 1..20: note = Description of Artificial Sequence: Synthetic oligonucleotide
  misc_feature 1..20: note = Target: FXN; (-) strand; PAM type: YTN; PAM sequence: CTT
  source 1..20: mol_type = other DNA
accatatgacgcccggtgcc

SEQ ID NO: 23611 - DNA, 20 bp, synthetic construct
  misc_feature 1..20: note = Description of Artificial Sequence: Synthetic oligonucleotide
  misc_feature 1..20: note = Target: FXN; (-) strand; PAM type: YTN; PAM sequence: CTC
  source 1..20: mol_type = other DNA
agccccttaccatatgacgc

SEQ ID NO: 23612 - DNA, 20 bp, synthetic construct
  misc_feature 1..20: note = Description of Artificial Sequence: Synthetic oligonucleotide
  misc_feature 1..20: note = Target: FXN; (-) strand; PAM type: YTN; PAM sequence: CTG
  source 1..20: mol_type = other DNA
aggtagcacactcagcccct

SEQ ID NO: 23613 - DNA, 20 bp, synthetic construct
  misc_feature 1..20: note = Description of Artificial Sequence: Synthetic oligonucleotide
  misc_feature 1..20: note = Target: FXN; (-) strand; PAM type: YTN; PAM sequence: TTA
  source 1..20: mol_type = other DNA
taagaaaagaaaaagacacc

SEQ ID NO: 23614 - DNA, 20 bp, synthetic construct
  misc_feature 1..20: note = Description of Artificial Sequence: Synthetic oligonucleotide
  misc_feature 1..20: note = Target: FXN; (-) strand; PAM type: YTN; PAM sequence: TTT
  source 1..20: mol_type = other DNA
ataagaaaagaaaaagacac

SEQ ID NO: 23615 - DNA, 20 bp, synthetic construct
  misc_feature 1..20: note = Description of Artificial Sequence: Synthetic oligonucleotide
  misc_feature 1..20: note = Target: FXN; (-) strand; PAM type: YTN; PAM sequence: CTT
  source 1..20: mol_type = other DNA
tataagaaaagaaaaagaca

SEQ ID NO: 23616 - DNA, 20 bp, synthetic construct
  misc_feature 1..20: note = Description of Artificial Sequence: Synthetic oligonucleotide
  misc_feature 1..20: note = Target: FXN; (-) strand; PAM type: YTN; PAM sequence: TTA
  source 1..20: mol_type = other DNA
ggctttataagaaaagaaaa

SEQ ID NO: 23617 - DNA, 20 bp, synthetic construct
  misc_feature 1..20: note = Description of Artificial Sequence: Synthetic oligonucleotide
  misc_feature 1..20: note = Target: FXN; (-) strand; PAM type: YTN; PAM sequence: CTA
  source 1..20: mol_type = other DNA
gttaggctttataagaaaag

SEQ ID NO: 23618 - DNA, 20 bp, synthetic construct
  misc_feature 1..20: note = Description of Artificial Sequence: Synthetic oligonucleotide
  misc_feature 1..20: note = Target: FXN; (-) strand; PAM type: YTN; PAM sequence: TTA
  source 1..20: mol_type = other DNA
tcatgggagtgaaactagtt

SEQ ID NO: 23619 - DNA, 20 bp, synthetic construct
  misc_feature 1..20: note = Description of Artificial Sequence: Synthetic oligonucleotide
  misc_feature 1..20: note = Target: FXN; (-) strand; PAM type: YTN; PAM sequence: TTA
  source 1..20: mol_type = other DNA
atgggttatcatgggagtga

SEQ ID NO: 23620 - DNA, 20 bp, synthetic construct
  misc_feature 1..20: note = Description of Artificial Sequence: Synthetic oligonucleotide
  misc_feature 1..20: note = Target: FXN; (-) strand; PAM type: YTN; PAM sequence: TTC
  source 1..20: mol_type = other DNA
atagattaatgggttatcat

SEQ ID NO: 23621 - DNA, 20 bp, synthetic construct
  misc_feature 1..20: note = Description of Artificial Sequence: Synthetic oligonucleotide
  misc_feature 1..20: note = Target: FXN; (-) strand; PAM type: YTN; PAM sequence: TTA
  source 1..20: mol_type = other DNA
atccattcatagattaatgg

SEQ ID NO: 23622 - DNA, 20 bp, synthetic construct
  misc_feature 1..20: note = Description of Artificial Sequence: Synthetic oligonucleotide
  misc_feature 1..20: note = Target: FXN; (-) strand; PAM type: YTN; PAM sequence: CTC
  source 1..20: mol_type = other DNA
aataatggattaatccattc

SEQ ID NO: 23623 - DNA, 20 bp, synthetic construct
  misc_feature 1..20: note = Description of Artificial Sequence: Synthetic oligonucleotide
  misc_feature 1..20: note = Target: FXN; (-) strand; PAM type: YTN; PAM sequence: TTC
  source 1..20: mol_type = other DNA
cctcaataatggattaatcc

SEQ ID NO: 23624 - DNA, 20 bp, synthetic construct
  misc_feature 1..20: note = Description of Artificial Sequence: Synthetic oligonucleotide
  misc_feature 1..20: note = Target: FXN; (-) strand; PAM type: YTN; PAM sequence: CTT
  source 1..20: mol_type = other DNA
ccctcaataatggattaatc

SEQ ID NO: 23625 - DNA, 20 bp, synthetic construct
  misc_feature 1..20: note = Description of Artificial Sequence: Synthetic oligonucleotide
  misc_feature 1..20: note = Target: FXN; (-) strand; PAM type: YTN; PAM sequence: TTC
  source 1..20: mol_type = other DNA
ttccctcaataatggattaa

SEQ ID NO: 23626 - DNA, 20 bp, synthetic construct
  misc_feature 1..20: note = Description of Artificial Sequence: Synthetic oligonucleotide
  misc_feature 1..20: note = Target: FXN; (-) strand; PAM type: YTN; PAM sequence: CTG
  source 1..20: mol_type = other DNA
ggtcatgaaggttcttccct

SEQ ID NO: 23627 - DNA, 20 bp, synthetic construct
  misc_feature 1..20: note = Description of Artificial Sequence: Synthetic oligonucleotide
  misc_feature 1..20: note = Target: FXN; (-) strand; PAM type: YTN; PAM sequence: TTA
  source 1..20: mol_type = other DNA
agcggtgactgggtcatgaa

SEQ ID NO: 23628 - DNA, 20 bp, synthetic construct
  misc_feature 1..20: note = Description of Artificial Sequence: Synthetic oligonucleotide
  misc_feature 1..20: note = Target: FXN; (-) strand; PAM type: YTN; PAM sequence: TTT
  source 1..20: mol_type = other DNA
aagcggtgactgggtcatga

SEQ ID NO: 23629 - DNA, 20 bp, synthetic construct
  misc_feature 1..20: note = Description of Artificial Sequence: Synthetic oligonucleotide
  misc_feature 1..20: note = Target: FXN; (-) strand; PAM type: YTN; PAM sequence: CTT
  source 1..20: mol_type = other DNA
taagcggtgactgggtcatg

SEQ ID NO: 23630 - DNA, 20 bp, synthetic construct
  misc_feature 1..20: note = Description of Artificial Sequence: Synthetic oligonucleotide
  misc_feature 1..20: note = Target: FXN; (-) strand; PAM type: YTN; PAM sequence: TTG
  source 1..20: mol_type = other DNA
agaggtggggcctttaagcg

SEQ ID NO: 23631 - DNA, 20 bp, synthetic construct
  misc_feature 1..20: note = Description of Artificial Sequence: Synthetic oligonucleotide
  misc_feature 1..20: note = Target: FXN; (-) strand; PAM type: YTN; PAM sequence: TTC
  source 1..20: mol_type = other DNA
ccgatgtggcagtattgaga

SEQ ID NO: 23632 - DNA, 20 bp, synthetic construct
  misc_feature 1..20: note = Description of Artificial Sequence: Synthetic oligonucleotide
  misc_feature 1..20: note = Target: FXN; (-) strand; PAM type: YTN; PAM sequence: TTA
  source 1..20: mol_type = other DNA
attcccgatgtggcagtatt

SEQ ID NO: 23633 - DNA, 20 bp, synthetic construct
  misc_feature 1..20: note = Description of Artificial Sequence: Synthetic oligonucleotide
  misc_feature 1..20: note = Target: FXN; (-) strand; PAM type: YTN; PAM sequence: CTT
  source 1..20: mol_type = other DNA
aattcccgatgtggcagtat

SEQ ID NO: 23634 - DNA, 20 bp, synthetic construct
  misc_feature 1..20: note = Description of Artificial Sequence: Synthetic oligonucleotide
  misc_feature 1..20: note = Target: FXN; (-) strand; PAM type: YTN; PAM sequence: TTG
  source 1..20: mol_type = other DNA
aaacttaattcccgatgtgg

SEQ ID NO: 23635 - DNA, 20 bp, synthetic construct
  misc_feature 1..20: note = Description of Artificial Sequence: Synthetic oligonucleotide
  misc_feature 1..20: note = Target: FXN; (-) strand; PAM type: YTN; PAM sequence: CTC
  source 1..20: mol_type = other DNA
atgttgaaacttaattcccg

SEQ ID NO: 23636 - DNA, 20 bp, synthetic construct
  misc_feature 1..20: note = Description of Artificial Sequence: Synthetic oligonucleotide
  misc_feature 1..20: note = Target: FXN; (-) strand; PAM type: YTN; PAM sequence: CTC
  source 1..20: mol_type = other DNA
cgaaactcatgttgaaactt

SEQ ID NO: 23637 - DNA, 20 bp, synthetic construct
  misc_feature 1..20: note = Description of Artificial Sequence: Synthetic oligonucleotide
  misc_feature 1..20: note = Target: FXN; (-) strand; PAM type: YTN; PAM sequence: TTG
  source 1..20: mol_type = other DNA
tcacctccgaaactcatgtt

SEQ ID NO: 23638 - DNA, 20 bp, synthetic construct
  misc_feature 1..20: note = Description of Artificial Sequence: Synthetic oligonucleotide
  misc_feature 1..20: note = Target: FXN; (-) strand; PAM type: YTN; PAM sequence: TTT
  source 1..20: mol_type = other DNA
gtcacctccgaaactcatgt

SEQ ID NO: 23639 - DNA, 20 bp, synthetic construct
  misc_feature 1..20: note = Description of Artificial Sequence: Synthetic oligonucleotide
  misc_feature 1..20: note = Target: FXN; (-) strand; PAM type: YTN; PAM sequence: TTG
  source 1..20: mol_type = other DNA
aatgtttgtcacctccgaaa

SEQ ID NO: 23640 - DNA, 20 bp, synthetic construct
  misc_feature 1..20: note = Description of Artificial Sequence: Synthetic oligonucleotide
  misc_feature 1..20: note = Target: FXN; (-) strand; PAM type: YTN; PAM sequence: TTT
  source 1..20: mol_type = other DNA
gaatgtttgtcacctccgaa

SEQ ID NO: 23641 - DNA, 20 bp, synthetic construct
  misc_feature 1..20: note = Description of Artificial Sequence: Synthetic oligonucleotide
  misc_feature 1..20: note = Target: FXN; (-) strand; PAM type: YTN; PAM sequence: CTA
  source 1..20: mol_type = other DNA
tggtttgaatgtttgtcacc

SEQ ID NO: 23642 - DNA, 20 bp, synthetic construct
  misc_feature 1..20: note = Description of Artificial Sequence: Synthetic oligonucleotide
  misc_feature 1..20: note = Target: FXN; (-) strand; PAM type: YTN; PAM sequence: TTA
  source 1..20: mol_type = other DNA
agagacagcatgctatggtt

SEQ ID NO: 23643 - DNA, 20 bp, synthetic construct
  misc_feature 1..20: note = Description of Artificial Sequence: Synthetic oligonucleotide
  misc_feature 1..20: note = Target: FXN; (-) strand; PAM type: YTN; PAM sequence: TTT
  source 1..20: mol_type = other DNA
aagagacagcatgctatggt

SEQ ID NO: 23644 - DNA, 20 bp, synthetic construct
  misc_feature 1..20: note = Description of Artificial Sequence: Synthetic oligonucleotide
  misc_feature 1..20: note = Target: FXN; (-) strand; PAM type: YTN; PAM sequence: TTG
  source 1..20: mol_type = other DNA
agtcatttaagagacagcat

SEQ ID NO: 23645 - DNA, 20 bp, synthetic construct
  misc_feature 1..20: note = Description of Artificial Sequence: Synthetic oligonucleotide
  misc_feature 1..20: note = Target: FXN; (-) strand; PAM type: YTN; PAM sequence: TTA
  source 1..20: mol_type = other DNA
ttgagtcatttaagagacag

SEQ ID NO: 23646 - DNA, 20 bp, synthetic construct
  misc_feature 1..20: note = Description of Artificial Sequence: Synthetic oligonucleotide
  misc_feature 1..20: note = Target: FXN; (-) strand; PAM type: YTN; PAM sequence: CTT
  source 1..20: mol_type = other DNA
attgagtcatttaagagaca

SEQ ID NO: 23647 - DNA, 20 bp, synthetic construct
  misc_feature 1..20: note = Description of Artificial Sequence: Synthetic oligonucleotide
  misc_feature 1..20: note = Target: FXN; (-) strand; PAM type: YTN; PAM sequence: CTG
  source 1..20: mol_type = other DNA
cccaaggcatgcagaagtgg

SEQ ID NO: 23648 - DNA, 20 bp, synthetic construct
  misc_feature 1..20: note = Description of Artificial Sequence: Synthetic oligonucleotide
  misc_feature 1..20: note = Target: FXN; (-) strand; PAM type: YTN; PAM sequence: CTA
  source 1..20: mol_type = other DNA
aaagctgcccaaggcatgca

SEQ ID NO: 23649 - DNA, 20 bp, synthetic construct
  misc_feature 1..20: note = Description of Artificial Sequence: Synthetic oligonucleotide
  misc_feature 1..20: note = Target: FXN; (-) strand; PAM type: YTN; PAM sequence: CTA
  source 1..20: mol_type = other DNA
ggaaaatggacagatgtcta

SEQ ID NO: 23650 - DNA, 20 bp, synthetic construct
  misc_feature 1..20: note = Description of Artificial Sequence: Synthetic oligonucleotide
  misc_feature 1..20: note = Target: FXN; (-) strand; PAM type: YTN; PAM sequence: CTC
  source 1..20: mol_type = other DNA
taggaaaatggacagatgtc

SEQ ID NO: 23651 - DNA, 20 bp, synthetic construct
  misc_feature 1..20: note = Description of Artificial Sequence: Synthetic oligonucleotide
  misc_feature 1..20: note = Target: FXN; (-) strand; PAM type: YTN; PAM sequence: TTG
  source 1..20: mol_type = other DNA
tccctctaggaaaatggaca

SEQ ID NO: 23652 - DNA, 20 bp, synthetic construct
  misc_feature 1..20: note = Description of Artificial Sequence: Synthetic oligonucleotide
  misc_feature 1..20: note = Target: FXN; (-) strand; PAM type: YTN; PAM sequence: CTT
  source 1..20: mol_type = other DNA
gtccctctaggaaaatggac

SEQ ID NO: 23653 - DNA, 20 bp, synthetic construct
  misc_feature 1..20: note = Description of Artificial Sequence: Synthetic oligonucleotide
  misc_feature 1..20: note = Target: FXN; (-) strand; PAM type: YTN; PAM sequence: CTA
  source 1..20: mol_type = other DNA
aagccaaaaggtcataggat

SEQ ID NO: 23654 - DNA, 20 bp, synthetic construct
  misc_feature 1..20: note = Description of Artificial Sequence: Synthetic oligonucleotide
  misc_feature 1..20: note = Target: FXN; (-) strand; PAM type: YTN; PAM sequence: TTA
  source 1..20: mol_type = other DNA
ggcctaaagccaaaaggtca

SEQ ID NO: 23655 - DNA, 20 bp, synthetic construct
  misc_feature 1..20: note = Description of Artificial Sequence: Synthetic oligonucleotide
  misc_feature 1..20: note = Target: FXN; (-) strand; PAM type: YTN; PAM sequence: TTG
  source 1..20: mol_type = other DNA
ttaggcctaaagccaaaagg

SEQ ID NO: 23656 - DNA, 20 bp, synthetic construct
  misc_feature 1..20: note = Description of Artificial Sequence: Synthetic oligonucleotide
  misc_feature 1..20: note = Target: FXN; (-) strand; PAM type: YTN; PAM sequence: CTT
  source 1..20: mol_type = other DNA
gttaggcctaaagccaaaag

SEQ ID NO: 23657 - DNA, 20 bp, synthetic construct
  misc_feature 1..20: note = Description of Artificial Sequence: Synthetic oligonucleotide
  misc_feature 1..20: note = Target: FXN; (-) strand; PAM type: YTN; PAM sequence: CTG
  source 1..20: mol_type = other DNA
cttgttaggcctaaagccaa

SEQ ID NO: 23658 - DNA, 20 bp, synthetic construct
  misc_feature 1..20: note = Description of Artificial Sequence: Synthetic oligonucleotide
  misc_feature 1..20: note = Target: FXN; (-) strand; PAM type: YTN; PAM sequence: TTG
  source 1..20: mol_type = other DNA
aaagtgagtgagggtataac

SEQ ID NO: 23659 - DNA, 20 bp, synthetic construct
  misc_feature 1..20: note = Description of Artificial Sequence: Synthetic oligonucleotide
  misc_feature 1..20: note = Target: FXN; (-) strand; PAM type: YTN; PAM sequence: TTT
  source 1..20: mol_type = other DNA
gaaagtgagtgagggtataa

SEQ ID NO: 23660 - DNA, 20 bp, synthetic construct
  misc_feature 1..20: note = Description of Artificial Sequence: Synthetic oligonucleotide
  misc_feature 1..20: note = Target: FXN; (-) strand; PAM type: YTN; PAM sequence: CTG
  source 1..20: mol_type = other DNA
caagacaataaaaatgattt

SEQ ID NO: 23661 - DNA, 20 bp, synthetic construct
  misc_feature 1..20: note = Description of Artificial Sequence: Synthetic oligonucleotide
  misc_feature 1..20: note = Target: FXN; (-) strand; PAM type: YTN; PAM sequence: TTG
  source 1..20: mol_type = other DNA
tctgcaagacaataaaaatg

SEQ ID NO: 23662 - DNA, 20 bp, synthetic construct
  misc_feature 1..20: note = Description of Artificial Sequence: Synthetic oligonucleotide
  misc_feature 1..20: note = Target: FXN; (-) strand; PAM type: YTN; PAM sequence: TTG
  source 1..20: mol_type = other DNA
tgtaaattgtctgcaagaca

SEQ ID NO: 23663 - DNA, 20 bp, synthetic construct
  misc_feature 1..20: note = Description of Artificial Sequence: Synthetic oligonucleotide
  misc_feature 1..20: note = Target: FXN; (-) strand; PAM type: YTN; PAM sequence: CTT
  source 1..20: mol_type = other DNA
gtgtaaattgtctgcaagac

SEQ ID NO: 23664 - DNA, 20 bp, synthetic construct
  misc_feature 1..20: note = Description of Artificial Sequence: Synthetic oligonucleotide
  misc_feature 1..20: note = Target: FXN; (-) strand; PAM type: YTN; PAM sequence: CTA
  source 1..20: mol_type = other DNA
tgtgtaaacttgtgtaaatt

SEQ ID NO: 23665 - DNA, 20 bp, synthetic construct
  misc_feature 1..20: note = Description of Artificial Sequence: Synthetic oligonucleotide
  misc_feature 1..20: note = Target: FXN; (-) strand; PAM type: YTN; PAM sequence: TTC
  source 1..20: mol_type = other DNA
tatgtgtaaacttgtgtaaa

SEQ ID NO: 23666 - DNA, 20 bp, synthetic construct
  misc_feature 1..20: note = Description of Artificial Sequence: Synthetic oligonucleotide
  misc_feature 1..20: note = Target: FXN; (-) strand; PAM type: YTN; PAM sequence: TTT
  source 1..20: mol_type = other DNA
ctatgtgtaaacttgtgtaa

SEQ ID NO: 23667 - DNA, 20 bp, synthetic construct
  misc_feature 1..20: note = Description of Artificial Sequence: Synthetic oligonucleotide
  misc_feature 1..20: note = Target: FXN; (-) strand; PAM type: YTN; PAM sequence: TTT
  source 1..20: mol_type = other DNA
tctatgtgtaaacttgtgta

SEQ ID NO: 23668 - DNA, 20 bp, synthetic construct
  misc_feature 1..20: note = Description of Artificial Sequence: Synthetic oligonucleotide
  misc_feature 1..20: note = Target: FXN; (-) strand; PAM type: YTN; PAM sequence: CTT
  source 1..20: mol_type = other DNA
ttctatgtgtaaacttgtgt

SEQ ID NO: 23669 - DNA, 20 bp, synthetic construct
  misc_feature 1..20: note = Description of Artificial Sequence: Synthetic oligonucleotide
  misc_feature 1..20: note = Target: FXN; (-) strand; PAM type: YTN; PAM sequence: TTA
  source 1..20: mol_type = other DNA
catatccttttctatgtgta

SEQ ID NO: 23670 - DNA, 20 bp, synthetic construct
  misc_feature 1..20: note = Description of Artificial Sequence: Synthetic oligonucleotide
  misc_feature 1..20: note = Target: FXN; (-) strand; PAM type: YTN; PAM sequence: TTT
  source 1..20: mol_type = other DNA
acatatccttttctatgtgt

SEQ ID NO: 23671 - DNA, 20 bp, synthetic construct
  misc_feature 1..20: note = Description of Artificial Sequence: Synthetic oligonucleotide
  misc_feature 1..20: note = Target: FXN; (-) strand; PAM type: YTN; PAM sequence: TTA
  source 1..20: mol_type = other DNA
caggcgtgagccaccgcgcc

SEQ ID NO: 23672 - DNA, 20 bp, synthetic construct
  misc_feature 1..20: note = Description of Artificial Sequence: Synthetic oligonucleotide
  misc_feature 1..20: note = Target: FXN; (-) strand; PAM type: YTN; PAM sequence: CTG
  source 1..20: mol_type = other DNA
ggattacaggcgtgagccac

SEQ ID NO: 23673 - DNA, 20 bp, synthetic construct
  misc_feature 1..20: note = Description of Artificial Sequence: Synthetic oligonucleotide
  misc_feature 1..20: note = Target: FXN; (-) strand; PAM type: YTN; PAM sequence: CTC
  source 1..20: mol_type = other DNA
ccaaagtgctgggattacag

SEQ ID NO: 23674 - DNA, 20 bp, synthetic construct
  misc_feature 1..20: note = Description of Artificial Sequence: Synthetic oligonucleotide
  misc_feature 1..20: note = Target: FXN; (-) strand; PAM type: YTN; PAM sequence: CTC
  source 1..20: mol_type = other DNA
ggcctcccaaagtgctggga

SEQ ID NO: 23675 - DNA, 20 bp, synthetic construct
  misc_feature 1..20: note = Description of Artificial Sequence: Synthetic oligonucleotide
  misc_feature 1..20: note = Target: FXN; (-) strand; PAM type: YTN; PAM sequence: CTG
  source 1..20: mol_type = other DNA
cctcggcctcccaaagtgct

SEQ ID NO: 23676 - DNA, 20 bp, synthetic construct
  misc_feature 1..20: note = Description of Artificial Sequence: Synthetic oligonucleotide
  misc_feature 1..20: note = Target: FXN; (-) strand; PAM type: YTN; PAM sequence: CTC
  source 1..20: mol_type = other DNA
gtgatccacctgcctcggcc

SEQ ID NO: 23677 - DNA, 20 bp, synthetic construct
  misc_feature 1..20: note = Description of Artificial Sequence: Synthetic oligonucleotide
  misc_feature 1..20: note = Target: FXN; (-) strand; PAM type: YTN; PAM sequence: CTG
  source 1..20: mol_type = other DNA
aactcgtgatccacctgcct

SEQ ID NO: 23678 - DNA, 20 bp, synthetic construct
  misc_feature 1..20: note = Description of Artificial Sequence: Synthetic oligonucleotide
  misc_feature 1..20: note = Target: FXN; (-) strand; PAM type: YTN; PAM sequence: CTC
  source 1..20: mol_type = other DNA
ctgaactcgtgatccacctg

SEQ ID NO: 23679 - DNA, 20 bp, synthetic construct
  misc_feature 1..20: note = Description of Artificial Sequence: Synthetic oligonucleotide
  misc_feature 1..20: note = Target: FXN; (-) strand; PAM type: YTN; PAM sequence: CTC
  source 1..20: mol_type = other DNA
catctcctgaactcgtgatc

SEQ ID NO: 23680 - DNA, 20 bp, synthetic construct
  misc_feature 1..20: note = Description of Artificial Sequence: Synthetic oligonucleotide
  misc_feature 1..20: note = Target: FXN; (-) strand; PAM type: YTN; PAM sequence: TTA
  source 1..20: mol_type = other DNA
gccaggatggtctccatctc

SEQ ID NO: 23681 - DNA, 20 bp, synthetic construct
  misc_feature 1..20: note = Description of Artificial Sequence: Synthetic oligonucleotide
  misc_feature 1..20: note = Target: FXN; (-) strand; PAM type: YTN; PAM sequence: TTC
  source 1..20: mol_type = other DNA
atcgtattagccaggatggt

SEQ ID NO: 23682 - DNA, 20 bp, synthetic construct
  misc_feature 1..20: note = Description of Artificial Sequence: Synthetic oligonucleotide
  misc_feature 1..20: note = Target: FXN; (-) strand; PAM type: YTN; PAM sequence: TTT
  source 1..20: mol_type = other DNA
catcgtattagccaggatgg

SEQ ID NO: 23683 - DNA, 20 bp, synthetic construct
  misc_feature 1..20: note = Description of Artificial Sequence: Synthetic oligonucleotide
  misc_feature 1..20: note = Target: FXN; (-) strand; PAM type: YTN; PAM sequence: TTA
  source 1..20: mol_type = other DNA
gtagagatggggtttcatcg

SEQ ID NO: 23684 - DNA, 20 bp, synthetic construct
  misc_feature 1..20: note = Description of Artificial Sequence: Synthetic oligonucleotide
  misc_feature 1..20: note = Target: FXN; (-) strand; PAM type: YTN; PAM sequence: TTT
  source 1..20: mol_type = other DNA
agtagagatggggtttcatc

SEQ ID NO: 23685 - DNA, 20 bp, synthetic construct
  misc_feature 1..20: note = Description of Artificial Sequence: Synthetic oligonucleotide
  misc_feature 1..20: note = Target: FXN; (-) strand; PAM type: YTN; PAM sequence: TTT
  source 1..20: mol_type = other DNA
tagtagagatggggtttcat

SEQ ID NO: 23686 - DNA, 20 bp, synthetic construct
  misc_feature 1..20: note = Description of Artificial Sequence: Synthetic oligonucleotide
  misc_feature 1..20: note = Target: FXN; (-) strand; PAM type: YTN; PAM sequence: TTT
  source 1..20: mol_type = other DNA
ttagtagagatggggtttca

SEQ ID NO: 23687 - DNA, 20 bp, synthetic construct
  misc_feature 1..20: note = Description of Artificial Sequence: Synthetic oligonucleotide
  misc_feature 1..20: note = Target: FXN; (-) strand; PAM type: YTN; PAM sequence: TTG
  source 1..20: mol_type = other DNA
tatttttagtagagatgggg

SEQ ID NO: 23688 - DNA, 20 bp, synthetic construct
  misc_feature 1..20: note = Description of Artificial Sequence: Synthetic oligonucleotide
  misc_feature 1..20: note = Target: FXN; (-) strand; PAM type: YTN; PAM sequence: TTT
  source 1..20: mol_type = other DNA
gtatttttagtagagatggg

SEQ ID NO: 23689 - DNA, 20 bp, synthetic construct
  misc_feature 1..20: note = Description of Artificial Sequence: Synthetic oligonucleotide
  misc_feature 1..20: note = Target: FXN; (-) strand; PAM type: YTN; PAM sequence: TTT
  source 1..20: mol_type = other DNA
tgtatttttagtagagatgg

SEQ ID NO: 23690 - DNA, 20 bp, synthetic construct
  misc_feature 1..20: note = Description of Artificial Sequence: Synthetic oligonucleotide
  misc_feature 1..20: note = Target: FXN; (-) strand; PAM type: YTN; PAM sequence: TTT
  source 1..20: mol_type = other DNA
ttgtatttttagtagagatg

SEQ ID NO: 23691 - DNA, 20 bp, synthetic construct
  misc_feature 1..20: note = Description of Artificial Sequence: Synthetic oligonucleotide
  misc_feature 1..20: note = Target: FXN; (-) strand; PAM type: YTN; PAM sequence: TTT
  source 1..20: mol_type = other DNA
tttgtatttttagtagagat

SEQ ID NO: 23692 - DNA, 20 bp, synthetic construct
  misc_feature 1..20: note = Description of Artificial Sequence: Synthetic oligonucleotide
  misc_feature 1..20: note = Target: FXN; (-) strand; PAM type: YTN; PAM sequence: CTA
  source 1..20: mol_type = other DNA
attttttgtatttttagtag

SEQ ID NO: 23693 - DNA, 20 bp, synthetic construct
  misc_feature 1..20: note = Description of Artificial Sequence: Synthetic oligonucleotide
  misc_feature 1..20: note = Target: FXN; (-) strand; PAM type: YTN; PAM sequence: CTA
  source 1..20: mol_type = other DNA
caggcacccgtcaccacgcc

SEQ ID NO: 23694 - DNA, 20 bp, synthetic construct
  misc_feature 1..20: note = Description of Artificial Sequence: Synthetic oligonucleotide
  misc_feature 1..20: note = Target: FXN; (-) strand; PAM type: YTN; PAM sequence: CTC
  source 1..20: mol_type = other DNA
agcgtcccgagtagtgggga

SEQ ID NO: 23695 - DNA, 20 bp, synthetic construct
  misc_feature 1..20: note = Description of Artificial Sequence: Synthetic oligonucleotide
  misc_feature 1..20: note = Target: FXN; (-) strand; PAM type: YTN; PAM sequence: CTG
  source 1..20: mol_type = other DNA
cctcagcgtcccgagtagtg

SEQ ID NO: 23696 - DNA, 20 bp, synthetic construct
  misc_feature 1..20: note = Description of Artificial Sequence: Synthetic oligonucleotide
  misc_feature 1..20: note = Target: FXN; (-) strand; PAM type: YTN; PAM sequence: CTC
  source 1..20: mol_type = other DNA
ctgcctcagcgtcccgagta

SEQ ID NO: 23697 - DNA, 20 bp, synthetic construct
  misc_feature 1..20: note = Description of Artificial Sequence: Synthetic oligonucleotide
  misc_feature 1..20: note = Target: FXN; (-) strand; PAM type: YTN; PAM sequence: TTC
  source 1..20: mol_type = other DNA
tcctgcctcagcgtcccgag

SEQ ID NO: 23698 - DNA, 20 bp, synthetic construct
  misc_feature 1..20: note = Description of Artificial Sequence: Synthetic oligonucleotide
  misc_feature 1..20: note = Target: FXN; (-) strand; PAM type: YTN; PAM sequence: TTC
  source 1..20: mol_type = other DNA
acgccattctcctgcctcag

SEQ ID NO: 23699 - DNA, 20 bp, synthetic construct
  misc_feature 1..20: note = Description of Artificial Sequence: Synthetic oligonucleotide
  misc_feature 1..20: note = Target: FXN; (-) strand; PAM type: YTN; PAM sequence: CTC
  source 1..20: mol_type = other DNA
ccgggttcacgccattctcc

SEQ ID NO: 23700 - DNA, 20 bp, synthetic construct
  misc_feature 1..20: note = Description of Artificial Sequence: Synthetic oligonucleotide
  misc_feature 1..20: note = Target: FXN; (-) strand; PAM type: YTN; PAM sequence: CTG
  source 1..20: mol_type = other DNA
cctcccgggttcacgccatt

SEQ ID NO: 23701 - DNA, 20 bp, synthetic construct
  misc_feature 1..20: note = Description of Artificial Sequence: Synthetic oligonucleotide
  misc_feature 1..20: note = Target: FXN; (-) strand; PAM type: YTN; PAM sequence: CTC
  source 1..20: mol_type = other DNA
tgcctcccgggttcacgcca

SEQ ID NO: 23702 - DNA, 20 bp, synthetic construct
  misc_feature 1..20: note = Description of Artificial Sequence: Synthetic oligonucleotide
  misc_feature 1..20: note = Target: FXN; (-) strand; PAM type: YTN; PAM sequence: CTG
  source 1..20: mol_type = other DNA
caagctctgcctcccgggtt

SEQ ID NO: 23703 - DNA, 20 bp, synthetic construct
  misc_feature 1..20: note = Description of Artificial Sequence: Synthetic oligonucleotide
  misc_feature 1..20: note = Target: FXN; (-) strand; PAM type: YTN; PAM sequence: CTC
  source 1..20: mol_type = other DNA
ggatcactgcaagctctgcc

SEQ ID NO: 23704 - DNA, 20 bp, synthetic construct
  misc_feature 1..20: note = Description of Artificial Sequence: Synthetic oligonucleotide
  misc_feature 1..20: note = Target: FXN; (-) strand; PAM type: YTN; PAM sequence: CTG
  source 1..20: mol_type = other DNA
gagtgcagtggcacgatctc

SEQ ID NO: 23705 - DNA, 20 bp, synthetic construct
  misc_feature 1..20: note = Description of Artificial Sequence: Synthetic oligonucleotide
  misc_feature 1..20: note = Target: FXN; (-) strand; PAM type: YTN; PAM sequence: CTG
  source 1..20: mol_type = other DNA
tcacccaggctggagtgcag

SEQ ID NO: 23706 - DNA, 20 bp, synthetic construct
  misc_feature 1..20: note = Description of Artificial Sequence: Synthetic oligonucleotide
  misc_feature 1..20: note = Target: FXN; (-) strand; PAM type: YTN; PAM sequence: CTC
  source 1..20: mol_type = other DNA
tgtcacccaggctggagtgc

SEQ ID NO: 23707 - DNA, 20 bp, synthetic construct
  misc_feature 1..20: note = Description of Artificial Sequence: Synthetic oligonucleotide
  misc_feature 1..20: note = Target: FXN; (-) strand; PAM type: YTN; PAM sequence: CTC
  source 1..20: mol_type = other DNA
gctctgtcacccaggctgga

SEQ ID NO: 23708 - DNA, 20 bp, synthetic construct
  misc_feature 1..20: note = Description of Artificial Sequence: Synthetic oligonucleotide
  misc_feature 1..20: note = Target: FXN; (-) strand; PAM type: YTN; PAM sequence: TTG
  source 1..20: mol_type = other DNA
agatgcagtctcgctctgtc

SEQ ID NO: 23709 - DNA, 20 bp, synthetic construct
  misc_feature 1..20: note = Description of Artificial Sequence: Synthetic oligonucleotide
  misc_feature 1..20: note = Target: FXN; (-) strand; PAM type: YTN; PAM sequence: TTT
  source 1..20: mol_type = other DNA
gagatgcagtctcgctctgt

SEQ ID NO: 23710 - DNA, 20 bp, synthetic construct
  misc_feature 1..20: note = Description of Artificial Sequence: Synthetic oligonucleotide
  misc_feature 1..20: note = Target: FXN; (-) strand; PAM type: YTN; PAM sequence: CTT
  source 1..20: mol_type = other DNA
tgagatgcagtctcgctctg

SEQ ID NO: 23711 - DNA, 20 bp, synthetic construct
  misc_feature 1..20: note = Description of Artificial Sequence: Synthetic oligonucleotide
  misc_feature 1..20: note = Target: FXN; (-) strand; PAM type: YTN; PAM sequence: TTC
  source 1..20: mol_type = other DNA
tttgagatgcagtctcgctc

SEQ ID NO: 23712 - DNA, 20 bp, synthetic construct
  misc_feature 1..20: note = Description of Artificial Sequence: Synthetic oligonucleotide
  misc_feature 1..20: note = Target: FXN; (-) strand; PAM type: YTN; PAM sequence: TTT
  source 1..20: mol_type = other DNA
ctttgagatgcagtctcgct

SEQ ID NO: 23713 - DNA, 20 bp, synthetic construct
  misc_feature 1..20: note = Description of Artificial Sequence: Synthetic oligonucleotide
  misc_feature 1..20: note = Target: FXN; (-) strand; PAM type: YTN; PAM sequence: TTT
  source 1..20: mol_type = other DNA
tctttgagatgcagtctcgc

SEQ ID NO: 23714 - DNA, 20 bp, synthetic construct
  misc_feature 1..20: note = Description of Artificial Sequence: Synthetic oligonucleotide
  misc_feature 1..20: note = Target: FXN; (-) strand; PAM type: YTN; PAM sequence: TTT
  source 1..20: mol_type = other DNA
ttctttgagatgcagtctcg

SEQ ID NO: 23715 - DNA, 20 bp, synthetic construct
  misc_feature 1..20: note = Description of Artificial Sequence: Synthetic oligonucleotide
  misc_feature 1..20: note = Target: FXN; (-) strand; PAM type: YTN; PAM sequence: TTT
  source 1..20: mol_type = other DNA
tttctttgagatgcagtctc

SEQ ID NO: 23716 - DNA, 20 bp, synthetic construct
  misc_feature 1..20: note = Description of Artificial Sequence: Synthetic oligonucleotide
  misc_feature 1..20: note = Target: FXN; (-) strand; PAM type: YTN; PAM sequence: TTT
  source 1..20: mol_type = other DNA
ttttctttgagatgcagtct

SEQ ID NO: 23717 - DNA, 20 bp, synthetic construct
  misc_feature 1..20: note = Description of Artificial Sequence: Synthetic oligonucleotide
  misc_feature 1..20: note = Target: FXN; (-) strand; PAM type: YTN; PAM sequence: TTA
  source 1..20: mol_type = other DNA
tttttttctttgagatgcag

SEQ ID NO: 23718 - DNA, 20 bp, synthetic construct
  misc_feature 1..20: note = Description of Artificial Sequence: Synthetic oligonucleotide
  misc_feature 1..20: note = Target: FXN; (-) strand; PAM type: YTN; PAM sequence: TTT
  source 1..20: mol_type = other DNA
atttttttctttgagatgca

SEQ ID NO: 23719 - DNA, 20 bp, synthetic construct
  misc_feature 1..20: note = Description of Artificial Sequence: Synthetic oligonucleotide
  misc_feature 1..20: note = Target: FXN; (-) strand; PAM type: YTN; PAM sequence: TTA
  source 1..20: mol_type = other DNA
tttatttttttctttgagat

SEQ ID NO: 23720 - DNA, 20 bp, synthetic construct
  misc_feature 1..20: note = Description of Artificial Sequence: Synthetic oligonucleotide
  misc_feature 1..20: note = Target: FXN; (-) strand; PAM type: YTN; PAM sequence: TTT
  source 1..20: mol_type = other DNA
atttatttttttctttgaga

SEQ ID NO: 23721 - DNA, 20 bp, synthetic construct
  misc_feature 1..20: note = Description of Artificial Sequence: Synthetic oligonucleotide
  misc_feature 1..20: note = Target: FXN; (-) strand; PAM type: YTN; PAM sequence: TTA
  source 1..20: mol_type = other DNA
tttatttatttttttctttg

SEQ ID NO: 23722 - DNA, 20 bp, synthetic construct
  misc_feature 1..20: note = Description of Artificial Sequence: Synthetic oligonucleotide
  misc_feature 1..20: note = Target: FXN; (-) strand; PAM type: YTN; PAM sequence: TTT
  source 1..20: mol_type = other DNA
atttatttatttttttcttt

SEQ ID NO: 23723 - DNA, 20 bp, synthetic construct
  misc_feature 1..20: note = Description of Artificial Sequence: Synthetic oligonucleotide
  misc_feature 1..20: note = Target: FXN; (-) strand; PAM type: YTN; PAM sequence: TTA
  source 1..20: mol_type = other DNA
tttatttatttatttttttc

SEQ ID NO: 23724 - DNA, 20 bp, synthetic construct
  misc_feature 1..20: note = Description of Artificial Sequence: Synthetic oligonucleotide
  misc_feature 1..20: note = Target: FXN; (-) strand; PAM type: YTN; PAM sequence: TTT
  source 1..20: mol_type = other DNA
atttatttatttattttttt

SEQ ID NO: 23725 - DNA, 20 bp, synthetic construct
  misc_feature 1..20: note = Description of Artificial Sequence: Synthetic oligonucleotide
  misc_feature 1..20: note = Target: FXN; (-) strand; PAM type: YTN; PAM sequence: TTA
  source 1..20: mol_type = other DNA
taagcagtataaatatttat

SEQ ID NO: 23726 - DNA, 20 bp, synthetic construct
  misc_feature 1..20: note = Description of Artificial Sequence: Synthetic oligonucleotide
  misc_feature 1..20: note = Target: FXN; (-) strand; PAM type: YTN; PAM sequence: TTT
  source 1..20: mol_type = other DNA
ataagcagtataaatattta

SEQ ID NO: 23727 - DNA, 20 bp, synthetic construct
  misc_feature 1..20: note = Description of Artificial Sequence: Synthetic oligonucleotide
  misc_feature 1..20: note = Target: FXN; (-) strand; PAM type: YTN; PAM sequence: TTA
  source 1..20: mol_type = other DNA
gtttataagcagtataaata

SEQ ID NO: 23728 - DNA, 20 bp, synthetic construct
  misc_feature 1..20: note = Description of Artificial Sequence: Synthetic oligonucleotide
  misc_feature 1..20: note = Target: FXN; (-) strand; PAM type: YTN; PAM sequence: TTA
  source 1..20: mol_type = other DNA
ttagtttataagcagtataa

SEQ ID NO: 23729 - DNA, 20 bp, synthetic construct
  misc_feature 1..20: note = Description of Artificial Sequence: Synthetic oligonucleotide
  misc_feature 1..20: note = Target: FXN; (-) strand; PAM type: YTN; PAM sequence: TTA
  source 1..20: mol_type = other DNA
ttattagtttataagcagta

SEQ ID NO: 23730 - DNA, 20 bp, synthetic construct
  misc_feature 1..20: note = Description of Artificial Sequence: Synthetic oligonucleotide
  misc_feature 1..20: note = Target: FXN; (-) strand; PAM type: YTN; PAM sequence: TTT
  source 1..20: mol_type = other DNA
attattagtttataagcagt

SEQ ID NO: 23731 - DNA, 20 bp, synthetic construct
  misc_feature 1..20: note = Description of Artificial Sequence: Synthetic oligonucleotide
  misc_feature 1..20: note = Target: FXN; (-) strand; PAM type: YTN; PAM sequence: TTA
  source 1..20: mol_type = other DNA
acatatgaatggtggggtga

SEQ ID NO: 23732 - DNA, 20 bp, synthetic construct
  misc_feature 1..20: note = Description of Artificial Sequence: Synthetic oligonucleotide
  misc_feature 1..20: note = Target: FXN; (-) strand; PAM type: YTN; PAM sequence: TTT
  source 1..20: mol_type = other DNA
aacatatgaatggtggggtg

SEQ ID NO: 23733 - DNA, 20 bp, synthetic construct
  misc_feature 1..20: note = Description of Artificial Sequence: Synthetic oligonucleotide
  misc_feature 1..20: note = Target: FXN; (-) strand; PAM type: YTN; PAM sequence: TTT
  source 1..20: mol_type = other DNA
taacatatgaatggtggggt

SEQ ID NO: 23734 - DNA, 20 bp, synthetic construct
  misc_feature 1..20: note = Description of Artificial Sequence: Synthetic oligonucleotide
  misc_feature 1..20: note = Target: FXN; (-) strand; PAM type: YTN; PAM sequence: TTA
  source 1..20: mol_type = other DNA
ggttttaacatatgaatggt

SEQ ID NO: 23735 - DNA, 20 bp, synthetic construct
  misc_feature 1..20: note = Description of Artificial Sequence: Synthetic oligonucleotide
  misc_feature 1..20: note = Target: FXN; (-) strand; PAM type: YTN; PAM sequence: TTG
  source 1..20: mol_type = other DNA
gtgattaggttttaacatat

SEQ ID NO: 23736 - DNA, 20 bp, synthetic construct
  misc_feature 1..20: note = Description of Artificial Sequence: Synthetic oligonucleotide
  misc_feature 1..20: note = Target: FXN; (-) strand; PAM type: YTN; PAM sequence: TTT
  source 1..20: mol_type = other DNA
ggtgattaggttttaacata

SEQ ID NO: 23737 - DNA, 20 bp, synthetic construct
  misc_feature 1..20: note = Description of Artificial Sequence: Synthetic oligonucleotide
  misc_feature 1..20: note = Target: FXN; (-) strand; PAM type: YTN; PAM sequence: CTT
  source 1..20: mol_type = other DNA
tggtgattaggttttaacat

SEQ ID NO: 23738 - DNA, 20 bp, synthetic construct
  misc_feature 1..20: note = Description of Artificial Sequence: Synthetic oligonucleotide
  misc_feature 1..20: note = Target: FXN; (-) strand; PAM type: YTN; PAM sequence: CTA
  source 1..20: mol_type = other DNA
atatcactttggtgattagg

SEQ ID NO: 23739 - DNA, 20 bp, synthetic construct
  misc_feature 1..20: note = Description of Artificial Sequence: Synthetic oligonucleotide
  misc_feature 1..20: note = Target: FXN; (-) strand; PAM type: YTN; PAM sequence: CTC
  source 1..20: mol_type = other DNA
ctaatatcactttggtgatt

SEQ ID NO: 23740 - DNA, 20 bp, synthetic construct
  misc_feature 1..20: note = Description of Artificial Sequence: Synthetic oligonucleotide
  misc_feature 1..20: note = Target: FXN; (-) strand; PAM type: YTN; PAM sequence: CTC
  source 1..20: mol_type = other DNA
ccaagggccccacctcctaa

SEQ ID NO: 23741 - DNA, 20 bp, synthetic construct
  misc_feature 1..20: note = Description of Artificial Sequence: Synthetic oligonucleotide
  misc_feature 1..20: note = Target: FXN; (-) strand; PAM type: YTN; PAM sequence: CTC
  source 1..20: mol_type = other DNA
atcacctcccaagggcccca

SEQ ID NO: 23742 - DNA, 20 bp, synthetic construct
  misc_feature 1..20: note = Description of Artificial Sequence: Synthetic oligonucleotide
  misc_feature 1..20: note = Target: FXN; (-) strand; PAM type: YTN; PAM sequence: CTC
  source 1..20: mol_type = other DNA
atacctcatcacctcccaag

SEQ ID NO: 23743 - DNA, 20 bp, synthetic construct
  misc_feature 1..20: note = Description of Artificial Sequence: Synthetic oligonucleotide
  misc_feature 1..20: note = Target: FXN; (-) strand; PAM type: YTN; PAM sequence: CTC
  source 1..20: mol_type = other DNA
caccctcatacctcatcacc

SEQ ID NO: 23744 - DNA, 20 bp, synthetic construct
  misc_feature 1..20: note = Description of Artificial Sequence: Synthetic oligonucleotide
  misc_feature 1..20: note = Target: FXN; (-) strand; PAM type: YTN; PAM sequence: CTA
  source 1..20: mol_type = other DNA
atcccaatcatatgggctcc

SEQ ID NO: 23745 - DNA, 20 bp, synthetic construct
  misc_feature 1..20: note = Description of Artificial Sequence: Synthetic oligonucleotide
  misc_feature 1..20: note = Target: FXN; (-) strand; PAM type: YTN; PAM sequence: TTA
  source 1..20: mol_type = other DNA
gaagggcactaatcccaatc

SEQ ID NO: 23746 - DNA, 20 bp, synthetic construct
  misc_feature 1..20: note = Description of Artificial Sequence: Synthetic oligonucleotide
  misc_feature 1..20: note = Target: FXN; (-) strand; PAM type: YTN; PAM sequence: TTT
  source 1..20: mol_type = other DNA
agaagggcactaatcccaat

SEQ ID NO: 23747 - DNA, 20 bp, synthetic construct
  misc_feature 1..20: note = Description of Artificial Sequence: Synthetic oligonucleotide
  misc_feature 1..20: note = Target: FXN; (-) strand; PAM type: YTN; PAM sequence: TTT
  source 1..20: mol_type = other DNA
tagaagggcactaatcccaa

SEQ ID NO: 23748 - DNA, 20 bp, synthetic construct
  misc_feature 1..20: note = Description of Artificial Sequence: Synthetic oligonucleotide
  misc_feature 1..20: note = Target: FXN; (-) strand; PAM type: YTN; PAM sequence: CTA
  source 1..20: mol_type = other DNA
ttttagaagggcactaatcc

SEQ ID NO: 23749 - DNA, 20 bp, synthetic construct
  misc_feature 1..20: note = Description of Artificial Sequence: Synthetic oligonucleotide
  misc_feature 1..20: note = Target: FXN; (-) strand; PAM type: YTN; PAM sequence: TTG
  source 1..20: mol_type = other DNA
ggctattttagaagggcact

SEQ ID NO: 23750 - DNA, 20 bp, synthetic construct
  misc_feature 1..20: note = Description of Artificial Sequence: Synthetic oligonucleotide
  misc_feature 1..20: note = Target: FXN; (-) strand; PAM type: YTN; PAM sequence: CTC
  source 1..20: mol_type = other DNA
cgttgggctattttagaagg

SEQ ID NO: 23751 - DNA, 20 bp, synthetic construct
  misc_feature 1..20: note = Description of Artificial Sequence: Synthetic oligonucleotide
  misc_feature 1..20: note = Target: FXN; (-) strand; PAM type: YTN; PAM sequence: CTG
  source 1..20: mol_type = other DNA
ggctccgttgggctatttta

SEQ ID NO: 23752 - DNA, 20 bp, synthetic construct
  misc_feature 1..20: note = Description of Artificial Sequence: Synthetic oligonucleotide
  misc_feature 1..20: note = Target: FXN; (-) strand; PAM type: YTN; PAM sequence: TTG
  source 1..20: mol_type = other DNA
tcactgggctccgttgggct

SEQ ID NO: 23753 - DNA, 20 bp, synthetic construct
  misc_feature 1..20: note = Description of Artificial Sequence: Synthetic oligonucleotide
  misc_feature 1..20: note = Target: FXN; (-) strand; PAM type: YTN; PAM sequence: CTT
  source 1..20: mol_type = other DNA
gtcactgggctccgttgggc

SEQ ID NO: 23754 - DNA, 20 bp, synthetic construct
  misc_feature 1..20: note = Description of Artificial Sequence: Synthetic oligonucleotide
  misc_feature 1..20: note = Target: FXN; (-) strand; PAM type: YTN; PAM sequence: TTC
  source 1..20: mol_type = other DNA
atagatgatgccttgtcact

SEQ ID NO: 23755 - DNA, 20 bp, synthetic construct
  misc_feature 1..20: note = Description of Artificial Sequence: Synthetic oligonucleotide
  misc_feature 1..20: note = Target: FXN; (-) strand; PAM type: YTN; PAM sequence: CTG
  source 1..20: mol_type = other DNA
gttcatagatgatgccttgt

SEQ ID NO: 23756 - DNA, 20 bp, synthetic construct
  misc_feature 1..20: note = Description of Artificial Sequence: Synthetic oligonucleotide
  misc_feature 1..20: note = Target: FXN; (-) strand; PAM type: YTN; PAM sequence: TTC
  source 1..20: mol_type = other DNA
ctggttcatagatgatgcct

SEQ ID NO: 23757 - DNA, 20 bp, synthetic construct
  misc_feature 1..20: note = Description of Artificial Sequence: Synthetic oligonucleotide
  misc_feature 1..20: note = Target: FXN; (-) strand; PAM type: YTN; PAM sequence: TTT
  source 1..20: mol_type = other DNA
cctggttcatagatgatgcc

SEQ ID NO: 23758 - DNA, 20 bp, synthetic construct
  misc_feature 1..20: note = Description of Artificial Sequence: Synthetic oligonucleotide
  misc_feature 1..20: note = Target: FXN; (-) strand; PAM type: YTN; PAM sequence: CTG
  source 1..20: mol_type = other DNA
gtgagggccagtttcctggt

SEQ ID NO: 23759 - DNA, 20 bp, synthetic construct
  misc_feature 1..20: note = Description of Artificial Sequence: Synthetic oligonucleotide
  misc_feature 1..20: note = Target: FXN; (-) strand; PAM type: YTN; PAM sequence: TTG
  source 1..20: mol_type = other DNA
gtgtctggtgagggccagtt

SEQ ID NO: 23760 - DNA, 20 bp, synthetic construct
  misc_feature 1..20: note = Description of Artificial Sequence: Synthetic oligonucleotide
  misc_feature 1..20: note = Target: FXN; (-) strand; PAM type: YTN; PAM sequence: TTT
  source 1..20: mol_type = other DNA
ggtgtctggtgagggccagt

SEQ ID NO: 23761 - DNA, 20 bp, synthetic construct
  misc_feature 1..20: note = Description of Artificial Sequence: Synthetic oligonucleotide
  misc_feature 1..20: note = Target: FXN; (-) strand; PAM type: YTN; PAM sequence: CTT
  source 1..20: mol_type = other DNA
tggtgtctggtgagggccag

SEQ ID NO: 23762 - DNA, 20 bp, synthetic construct
  misc_feature 1..20: note = Description of Artificial Sequence: Synthetic oligonucleotide
  misc_feature 1..20: note = Target: FXN; (-) strand; PAM type: YTN; PAM sequence: CTG
  source 1..20: mol_type = other DNA
gagggtgggaaatccaagat

SEQ ID NO: 23763 - DNA, 20 bp, synthetic construct
  misc_feature 1..20: note = Description of Artificial Sequence: Synthetic oligonucleotide
  misc_feature 1..20: note = Target: FXN; (-) strand; PAM type: YTN; PAM sequence: TTA
  source 1..20: mol_type = other DNA
gagtcctggagggtgggaaa

SEQ ID NO: 23764 - DNA, 20 bp, synthetic construct
  misc_feature 1..20: note = Description of Artificial Sequence: Synthetic oligonucleotide
  misc_feature 1..20: note = Target: FXN; (-) strand; PAM type: YTN; PAM sequence: CTT
  source 1..20: mol_type = other DNA
agagtcctggagggtgggaa

SEQ ID NO: 23765 - DNA, 20 bp, synthetic construct
  misc_feature 1..20: note = Description of Artificial Sequence: Synthetic oligonucleotide
  misc_feature 1..20: note = Target: FXN; (-) strand; PAM type: YTN; PAM sequence: TTC
  source 1..20: mol_type = other DNA
ttagagtcctggagggtggg

SEQ ID NO: 23766 - DNA, 20 bp, synthetic construct
  misc_feature 1..20: note = Description of Artificial Sequence: Synthetic oligonucleotide
  misc_feature 1..20: note = Target: FXN; (-) strand; PAM type: YTN; PAM sequence: TTT
  source 1..20: mol_type = other DNA
cttagagtcctggagggtgg

SEQ ID NO: 23767 - DNA, 20 bp, synthetic construct
  misc_feature 1..20: note = Description of Artificial Sequence: Synthetic oligonucleotide
  misc_feature 1..20: note = Target: FXN; (-) strand; PAM type: YTN; PAM sequence: TTA
  source 1..20: mol_type = other DNA
taaacaatagaaatgtgttt

SEQ ID NO: 23768 - DNA, 20 bp, synthetic construct
  misc_feature 1..20: note = Description of Artificial Sequence: Synthetic oligonucleotide
  misc_feature 1..20: note = Target: FXN; (-) strand; PAM type: YTN; PAM sequence: CTT
  source 1..20: mol_type = other DNA
ataaacaatagaaatgtgtt

SEQ ID NO: 23769 - DNA, 20 bp, synthetic construct
  misc_feature 1..20: note = Description of Artificial Sequence: Synthetic oligonucleotide
  misc_feature 1..20: note = Target: FXN; (-) strand; PAM type: YTN; PAM sequence: CTG
  source 1..20: mol_type = other DNA
ggtggcttataaacaataga

SEQ ID NO: 23770 - DNA, 20 bp, synthetic construct
  misc_feature 1..20: note = Description of Artificial Sequence: Synthetic oligonucleotide
  misc_feature 1..20: note = Target: FXN; (-) strand; PAM type: YTN; PAM sequence: TTA
  source 1..20: mol_type = other DNA
taacaaaataccagccactg

SEQ ID NO: 23771 - DNA, 20 bp, synthetic construct
  misc_feature 1..20: note = Description of Artificial Sequence: Synthetic oligonucleotide
  misc_feature 1..20: note = Target: FXN; (-) strand; PAM type: YTN; PAM sequence: CTG
  source 1..20: mol_type = other DNA
ggatgttataacaaaatacc

SEQ ID NO: 23772 - DNA, 20 bp, synthetic construct
  misc_feature 1..20: note = Description of Artificial Sequence: Synthetic oligonucleotide
  misc_feature 1..20: note = Target: FXN; (-) strand; PAM type: YTN; PAM sequence: TTA
  source 1..20: mol_type = other DNA
gtctgggatgttataacaaa

SEQ ID NO: 23773 - DNA, 20 bp, synthetic construct
  misc_feature 1..20: note = Description of Artificial Sequence: Synthetic oligonucleotide
  misc_feature 1..20: note = Target: FXN; (-) strand; PAM type: YTN; PAM sequence: CTT
  source 1..20: mol_type = other DNA
agtctgggatgttataacaa

SEQ ID NO: 23774 - DNA, 20 bp, synthetic construct
  misc_feature 1..20: note = Description of Artificial Sequence: Synthetic oligonucleotide
  misc_feature 1..20: note = Target: FXN; (-) strand; PAM type: YTN; PAM sequence: TTG
  source 1..20: mol_type = other DNA
tcttagtctgggatgttata

SEQ ID NO: 23775 - DNA, 20 bp, synthetic construct
  misc_feature 1..20: note = Description of Artificial Sequence: Synthetic oligonucleotide
  misc_feature 1..20: note = Target: FXN; (-) strand; PAM type: YTN; PAM sequence: TTT
  source 1..20: mol_type = other DNA
gtcttagtctgggatgttat

SEQ ID NO: 23776 - DNA, 20 bp, synthetic construct
  misc_feature 1..20: note = Description of Artificial Sequence: Synthetic oligonucleotide
  misc_feature 1..20: note = Target: FXN; (-) strand; PAM type: YTN; PAM sequence: TTA
  source 1..20: mol_type = other DNA
tttgtcttagtctgggatgt

SEQ ID NO: 23777 - DNA, 20 bp, synthetic construct
  misc_feature 1..20: note = Description of Artificial Sequence: Synthetic oligonucleotide
  misc_feature 1..20: note = Target: FXN; (-) strand; PAM type: YTN; PAM sequence: TTG
  source 1..20: mol_type = other DNA
ttatttgtcttagtctggga

SEQ ID NO: 23778 - DNA, 20 bp, synthetic construct
  misc_feature 1..20: note = Description of Artificial Sequence: Synthetic oligonucleotide
  misc_feature 1..20: note = Target: FXN; (-) strand; PAM type: YTN; PAM sequence: TTT
  source 1..20: mol_type = other DNA
gttatttgtcttagtctggg

SEQ ID NO: 23779 - DNA, 20 bp, synthetic construct
  misc_feature 1..20: note = Description of Artificial Sequence: Synthetic oligonucleotide
  misc_feature 1..20: note = Target: FXN; (-) strand; PAM type: YTN; PAM sequence: CTG
  source 1..20: mol_type = other DNA
gtgtcagggatacaagtatt

SEQ ID NO: 23780 - DNA, 20 bp, synthetic construct
  misc_feature 1..20: note = Description of Artificial Sequence: Synthetic oligonucleotide
  misc_feature 1..20: note = Target: FXN; (-) strand; PAM type: YTN; PAM sequence: TTA
  source 1..20: mol_type = other DNA
acctggtgtcagggatacaa

SEQ ID NO: 23781 - DNA, 20 bp, synthetic construct
  misc_feature 1..20: note = Description of Artificial Sequence: Synthetic oligonucleotide
  misc_feature 1..20: note = Target: FXN; (-) strand; PAM type: YTN; PAM sequence: CTT
  source 1..20: mol_type = other DNA
aacctggtgtcagggataca

SEQ ID NO: 23782 - DNA, 20 bp, synthetic construct
  misc_feature 1..20: note = Description of Artificial Sequence: Synthetic oligonucleotide
  misc_feature 1..20: note = Target: FXN; (-) strand; PAM type: YTN; PAM sequence: CTC
  source 1..20: mol_type = other DNA
ttaacctggtgtcagggata

SEQ ID NO: 23783 - DNA, 20 bp, synthetic construct
  misc_feature 1..20: note = Description of Artificial Sequence: Synthetic oligonucleotide
  misc_feature 1..20: note = Target: FXN; (-) strand; PAM type: YTN; PAM sequence: CTA
  source 1..20: mol_type = other DNA
tctcttaacctggtgtcagg

SEQ ID NO: 23784 - DNA, 20 bp, synthetic construct
  misc_feature 1..20: note = Description of Artificial Sequence: Synthetic oligonucleotide
  misc_feature 1..20: note = Target: FXN; (-) strand; PAM type: YTN; PAM sequence: TTC
  source 1..20: mol_type = other DNA
tatctcttaacctggtgtca

SEQ ID NO: 23785 - DNA, 20 bp, synthetic construct
  misc_feature 1..20: note = Description of Artificial Sequence: Synthetic oligonucleotide
  misc_feature 1..20: note = Target: FXN; (-) strand; PAM type: YTN; PAM sequence: CTC
  source 1..20: mol_type = other DNA
cagaggaacaaacaaattct

SEQ ID NO: 23786 - DNA, 20 bp, synthetic construct
  misc_feature 1..20: note = Description of Artificial Sequence: Synthetic oligonucleotide
  misc_feature 1..20: note = Target: FXN; (-) strand; PAM type: YTN; PAM sequence: CTC
  source 1..20: mol_type = other DNA
cagggaggacagggcagtga

SEQ ID NO: 23787 - DNA, 20 bp, synthetic construct
  misc_feature 1..20: note = Description of Artificial Sequence: Synthetic oligonucleotide
  misc_feature 1..20: note = Target: FXN; (-) strand; PAM type: YTN; PAM sequence: TTC
  source 1..20: mol_type = other DNA
ctccagggaggacagggcag

SEQ ID NO: 23788 - DNA, 20 bp, synthetic construct
  misc_feature 1..20: note = Description of Artificial Sequence: Synthetic oligonucleotide
  misc_feature 1..20: note = Target: FXN; (-) strand; PAM type: YTN; PAM sequence: CTG
  source 1..20: mol_type = other DNA
gcagattcctccagggagga

SEQ ID NO: 23789 - DNA, 20 bp, synthetic construct
  misc_feature 1..20: note = Description of Artificial Sequence: Synthetic oligonucleotide
  misc_feature 1..20: note = Target: FXN; (-) strand; PAM type: YTN; PAM sequence: TTC
  source 1..20: mol_type = other DNA
gggctggcagattcctccag

SEQ ID NO: 23790 - DNA, 20 bp, synthetic construct
  misc_feature 1..20: note = Description of Artificial Sequence: Synthetic oligonucleotide
  misc_feature 1..20: note = Target: FXN; (-) strand; PAM type: YTN; PAM sequence: CTA
  source 1..20: mol_type = other DNA
agaaaaggagggtacgatga

SEQ ID NO: 23791 - DNA, 20 bp, synthetic construct
  misc_feature 1..20: note = Description of Artificial Sequence: Synthetic oligonucleotide
  misc_feature 1..20: note = Target: FXN; (-) strand; PAM type: YTN; PAM sequence: CTC
  source 1..20: mol_type = other DNA
taagaaaaggagggtacgat

SEQ ID NO: 23792 - DNA, 20 bp, synthetic construct
  misc_feature 1..20: note = Description of Artificial Sequence: Synthetic oligonucleotide
  misc_feature 1..20: note = Target: FXN; (-) strand; PAM type: YTN; PAM sequence: TTG
  source 1..20: mol_type = other DNA
ggggagatacagaggaggtc

SEQ ID NO: 23793 - DNA, 20 bp, synthetic construct
  misc_feature 1..20: note = Description of Artificial Sequence: Synthetic oligonucleotide
  misc_feature 1..20: note = Target: FXN; (-) strand; PAM type: YTN; PAM sequence: TTG
  source 1..20: mol_type = other DNA
tatataagcaatacatggat

SEQ ID NO: 23794 - DNA, 20 bp, synthetic construct
  misc_feature 1..20: note = Description of Artificial Sequence: Synthetic oligonucleotide
  misc_feature 1..20: note = Target: FXN; (-) strand; PAM type: YTN; PAM sequence: CTT
  source 1..20: mol_type = other DNA
gtatataagcaatacatgga

SEQ ID NO: 23795 - DNA, 20 bp, synthetic construct
  misc_feature 1..20: note = Description of Artificial Sequence: Synthetic oligonucleotide
  misc_feature 1..20: note = Target: FXN; (-) strand; PAM type: YTN; PAM sequence: TTG
  source 1..20: mol_type = other DNA
aacaaaaggggcaagccata

SEQ ID NO: 23796 - DNA, 20 bp, synthetic construct
  misc_feature 1..20: note = Description of Artificial Sequence: Synthetic oligonucleotide
  misc_feature 1..20: note = Target: FXN; (-) strand; PAM type: YTN; PAM sequence: CTG
  source 1..20: mol_type = other DNA
catgcatcaatgcagatgac

SEQ ID NO: 23797 - DNA, 20 bp, synthetic construct
  misc_feature 1..20: note = Description of Artificial Sequence: Synthetic oligonucleotide
  misc_feature 1..20: note = Target: FXN; (-) strand; PAM type: YTN; PAM sequence: CTA
  source 1..20: mol_type = other DNA
tccagcagtgagaacaaata

SEQ ID NO: 23798 - DNA, 20 bp, synthetic construct
  misc_feature 1..20: note = Description of Artificial Sequence: Synthetic oligonucleotide
  misc_feature 1..20: note = Target: FXN; (-) strand; PAM type: YTN; PAM sequence: TTA
  source 1..20: mol_type = other DNA
cccaaccagatactatccag

SEQ ID NO: 23799 - DNA, 20 bp, synthetic construct
  misc_feature 1..20: note = Description of Artificial Sequence: Synthetic oligonucleotide
  misc_feature 1..20: note = Target: FXN; (-) strand; PAM type: YTN; PAM sequence: TTT
  source 1..20: mol_type = other DNA
acccaaccagatactatcca

SEQ ID NO: 23800 - DNA, 20 bp, synthetic construct
  misc_feature 1..20: note = Description of Artificial Sequence: Synthetic oligonucleotide
  misc_feature 1..20: note = Target: FXN; (-) strand; PAM type: YTN; PAM sequence: TTA
  source 1..20: mol_type = other DNA
cagtgtgatatatttaccca

SEQ ID NO: 23801 - DNA, 20 bp, synthetic construct
  misc_feature 1..20: note = Description of Artificial Sequence: Synthetic oligonucleotide
  misc_feature 1..20: note = Target: FXN; (-) strand; PAM type: YTN; PAM sequence: TTT
  source 1..20: mol_type = other DNA
acagtgtgatatatttaccc

SEQ ID NO: 23802 - DNA, 20 bp, synthetic construct
  misc_feature 1..20: note = Description of Artificial Sequence: Synthetic oligonucleotide
  misc_feature 1..20: note = Target: FXN; (-) strand; PAM type: YTN; PAM sequence: CTG
  source 1..20: mol_type = other DNA
gatagtgtgatttacagtgt

SEQ ID NO: 23803 - DNA, 20 bp, synthetic construct
  misc_feature 1..20: note = Description of Artificial Sequence: Synthetic oligonucleotide
  misc_feature 1..20: note = Target: FXN; (-) strand; PAM type: YTN; PAM sequence: CTA
  source 1..20: mol_type = other DNA
aaggaacctggatagtgtga

SEQ ID NO: 23804 - DNA, 20 bp, synthetic construct
  misc_feature 1..20: note = Description of Artificial Sequence: Synthetic oligonucleotide
  misc_feature 1..20: note = Target: FXN; (-) strand; PAM type: YTN; PAM sequence: CTG
  source 1..20: mol_type = other DNA
caatcaaccaaatgtcacct

SEQ ID NO: 23805 - DNA, 20 bp, synthetic construct
  misc_feature 1..20: note = Description of Artificial Sequence: Synthetic oligonucleotide
  misc_feature 1..20: note = Target: FXN; (-) strand; PAM type: YTN; PAM sequence: CTG
  source 1..20: mol_type = other DNA
tccatgcacaagaacagtca

SEQ ID NO: 23806 - DNA, 20 bp, synthetic construct
  misc_feature 1..20: note = Description of Artificial Sequence: Synthetic oligonucleotide
  misc_feature 1..20: note = Target: FXN; (-) strand; PAM type: YTN; PAM sequence: TTC
  source 1..20: mol_type = other DNA
tgtccatgcacaagaacagt

SEQ ID NO: 23807 - DNA, 20 bp, synthetic construct
  misc_feature 1..20: note = Description of Artificial Sequence: Synthetic oligonucleotide
  misc_feature 1..20: note = Target: FXN; (-) strand; PAM type: YTN; PAM sequence: CTT
  source 1..20: mol_type = other DNA
ctgtccatgcacaagaacag

SEQ ID NO: 23808 - DNA, 20 bp, synthetic construct
  misc_feature 1..20: note = Description of Artificial Sequence: Synthetic oligonucleotide
  misc_feature 1..20: note = Target: FXN; (-) strand; PAM type: YTN; PAM sequence: CTG
  source 1..20: mol_type = other DNA
aaaggaacttctgtccatgc

SEQ ID NO: 23809 - DNA, 20 bp, synthetic construct
  misc_feature 1..20: note = Description of Artificial Sequence: Synthetic oligonucleotide
  misc_feature 1..20: note = Target: FXN; (-) strand; PAM type: YTN; PAM sequence: TTC
  source 1..20: mol_type = other DNA
acctgaaaggaacttctgtc

SEQ ID NO: 23810 - DNA, 20 bp, synthetic construct
  misc_feature 1..20: note = Description of Artificial Sequence: Synthetic oligonucleotide
  misc_feature 1..20: note = Target: FXN; (-) strand; PAM type: YTN; PAM sequence: CTG
  source 1..20: mol_type = other DNA
agaaattcacctgaaaggaa

SEQ ID NO: 23811 - DNA, 20 bp, synthetic construct
  misc_feature 1..20: note = Description of Artificial Sequence: Synthetic oligonucleotide
  misc_feature 1..20: note = Target: FXN; (-) strand; PAM type: YTN; PAM sequence: TTC
  source 1..20: mol_type = other DNA
tgagaaattcacctgaaagg

SEQ ID NO: 23812 - DNA, 20 bp, synthetic construct
  misc_feature 1..20: note = Description of Artificial Sequence: Synthetic oligonucleotide
  misc_feature 1..20: note = Target: FXN; (-) strand; PAM type: YTN; PAM sequence: TTC
  source 1..20: mol_type = other DNA
cattctgagaaattcacctg

SEQ ID NO: 23813 - DNA, 20 bp, synthetic construct
  misc_feature 1..20: note = Description of Artificial Sequence: Synthetic oligonucleotide
  misc_feature 1..20: note = Target: FXN; (-) strand; PAM type: YTN; PAM sequence: TTG
  source 1..20: mol_type = other DNA
cccagcaattccattctgag

SEQ ID NO: 23814 - DNA, 20 bp, synthetic construct
  misc_feature 1..20: note = Description of Artificial Sequence: Synthetic oligonucleotide
  misc_feature 1..20: note = Target: FXN; (-) strand; PAM type: YTN; PAM sequence: TTT
  source 1..20: mol_type = other DNA
gcccagcaattccattctga

SEQ ID NO: 23815 - DNA, 20 bp, synthetic construct
  misc_feature 1..20: note = Description of Artificial Sequence: Synthetic oligonucleotide
  misc_feature 1..20: note = Target: FXN; (-) strand; PAM type: YTN; PAM sequence: CTT
  source 1..20: mol_type = other DNA
tgcccagcaattccattctg

SEQ ID NO: 23816 - DNA, 20 bp, synthetic construct
  misc_feature 1..20: note = Description of Artificial Sequence: Synthetic oligonucleotide
  misc_feature 1..20: note = Target: FXN; (-) strand; PAM type: YTN; PAM sequence: CTG
  source 1..20: mol_type = other DNA
cccctttgcccagcaattcc

SEQ ID NO: 23817 - DNA, 20 bp, synthetic construct
  misc_feature 1..20: note = Description of Artificial Sequence: Synthetic oligonucleotide
  misc_feature 1..20: note = Target: FXN; (-) strand; PAM type: YTN; PAM sequence: TTG
  source 1..20: mol_type = other DNA
gctgcccctttgcccagcaa

SEQ ID NO: 23818 - DNA, 20 bp, synthetic construct
  misc_feature 1..20: note = Description of Artificial Sequence: Synthetic oligonucleotide
  misc_feature 1..20: note = Target: FXN; (-) strand; PAM type: YTN; PAM sequence: TTA
  source 1..20: mol_type = other DNA
ttggctgcccctttgcccag

SEQ ID NO: 23819 - DNA, 20 bp, synthetic construct
  misc_feature 1..20: note = Description of Artificial Sequence: Synthetic oligonucleotide
  misc_feature 1..20: note = Target: FXN; (-) strand; PAM type: YTN; PAM sequence: TTG
  source 1..20: mol_type = other DNA
attattggctgcccctttgc

SEQ ID NO: 23820 - DNA, 20 bp, synthetic construct
  misc_feature 1..20: note = Description of Artificial Sequence: Synthetic oligonucleotide
  misc_feature 1..20: note = Target: FXN; (-) strand; PAM type: YTN; PAM sequence: TTG
  source 1..20: mol_type = other DNA
gcatcaaatgagttgattat

SEQ ID NO: 23821 - DNA, 20 bp, synthetic construct
  misc_feature 1..20: note = Description of Artificial Sequence: Synthetic oligonucleotide
  misc_feature 1..20: note = Target: FXN; (-) strand; PAM type: YTN; PAM sequence: TTT
  source 1..20: mol_type = other DNA
ggcatcaaatgagttgatta

SEQ ID NO: 23822 - DNA, 20 bp, synthetic construct
  misc_feature 1..20: note = Description of Artificial Sequence: Synthetic oligonucleotide
  misc_feature 1..20: note = Target: FXN; (-) strand; PAM type: YTN; PAM sequence: TTT
  source 1..20: mol_type = other DNA
tggcatcaaatgagttgatt

SEQ ID NO: 23823 - DNA, 20 bp, synthetic construct
  misc_feature 1..20: note = Description of Artificial Sequence: Synthetic oligonucleotide
  misc_feature 1..20: note = Target: FXN; (-) strand; PAM type: YTN; PAM sequence: CTT
  source 1..20: mol_type = other DNA
ttggcatcaaatgagttgat

SEQ ID NO: 23824 - DNA, 20 bp, synthetic construct
  misc_feature 1..20: note = Description of Artificial Sequence: Synthetic oligonucleotide
  misc_feature 1..20: note = Target: FXN; (-) strand; PAM type: YTN; PAM sequence: CTG
  source 1..20: mol_type = other DNA
gcaccaccacttttggcatc

SEQ ID NO: 23825 - DNA, 20 bp, synthetic construct
  misc_feature 1..20: note = Description of Artificial Sequence: Synthetic oligonucleotide
  misc_feature 1..20: note = Target: FXN; (-) strand; PAM type: YTN; PAM sequence: CTC
  source 1..20: mol_type = other DNA
gcaggggaggatgaactggc

SEQ ID NO: 23826 - DNA, 20 bp, synthetic construct
  misc_feature 1..20: note = Description of Artificial Sequence: Synthetic oligonucleotide
  misc_feature 1..20: note = Target: FXN; (-) strand; PAM type: YTN; PAM sequence: TTG
  source 1..20: mol_type = other DNA
aagagtgaatcaggacccat

SEQ ID NO: 23827 - DNA, 20 bp, synthetic construct
  misc_feature 1..20: note = Description of Artificial Sequence: Synthetic oligonucleotide
  misc_feature 1..20: note = Target: FXN; (-) strand; PAM type: YTN; PAM sequence: CTT
  source 1..20: mol_type = other DNA
gaagagtgaatcaggaccca

SEQ ID NO: 23828 - DNA, 20 bp, synthetic construct
  misc_feature 1..20: note = Description of Artificial Sequence: Synthetic oligonucleotide
  misc_feature 1..20: note = Target: FXN; (-) strand; PAM type: YTN; PAM sequence: CTG
  source 1..20: mol_type = other DNA
tcaaaccacagcacttgaag

SEQ ID NO: 23829 - DNA, 20 bp, synthetic construct
  misc_feature 1..20: note = Description of Artificial Sequence: Synthetic oligonucleotide
  misc_feature 1..20: note = Target: FXN; (-) strand; PAM type: YTN; PAM sequence: TTG
  source 1..20: mol_type = other DNA
tcacccccggccctgtcaaa

SEQ ID NO: 23830 - DNA, 20 bp, synthetic construct
  misc_feature 1..20: note = Description of Artificial Sequence: Synthetic oligonucleotide
  misc_feature 1..20: note = Target: FXN; (-) strand; PAM type: YTN; PAM sequence: CTT
  source 1..20: mol_type = other DNA
gtcacccccggccctgtcaa

SEQ ID NO: 23831 - DNA, 20 bp, synthetic construct
  misc_feature 1..20: note = Description of Artificial Sequence: Synthetic oligonucleotide
  misc_feature 1..20: note = Target: FXN; (-) strand; PAM type: YTN; PAM sequence: TTC
  source 1..20: mol_type = other DNA
ccaggtgtccccttgtcacc

SEQ ID NO: 23832 - DNA, 20 bp, synthetic construct
  misc_feature 1..20: note = Description of Artificial Sequence: Synthetic oligonucleotide
  misc_feature 1..20: note = Target: FXN; (-) strand; PAM type: YTN; PAM sequence: CTT
  source 1..20: mol_type = other DNA
cccaggtgtccccttgtcac

SEQ ID NO: 23833 - DNA, 20 bp, synthetic construct
  misc_feature 1..20: note = Description of Artificial Sequence: Synthetic oligonucleotide
  misc_feature 1..20: note = Target: FXN; (-) strand; PAM type: YTN; PAM sequence: TTC
  source 1..20: mol_type = other DNA
cttcccaggtgtccccttgt

SEQ ID NO: 23834 - DNA, 20 bp, synthetic construct
  misc_feature 1..20: note = Description of Artificial Sequence: Synthetic oligonucleotide
  misc_feature 1..20: note = Target: FXN; (-) strand; PAM type: YTN; PAM sequence: TTT
  source 1..20: mol_type = other DNA
ccttcccaggtgtccccttg

SEQ ID NO: 23835 - DNA, 20 bp, synthetic construct
  misc_feature 1..20: note = Description of Artificial Sequence: Synthetic oligonucleotide
  misc_feature 1..20: note = Target: FXN; (-) strand; PAM type: YTN; PAM sequence: CTT
  source 1..20: mol_type = other DNA
tccttcccaggtgtcccctt

SEQ ID NO: 23836 - DNA, 20 bp, synthetic construct
  misc_feature 1..20: note = Description of Artificial Sequence: Synthetic oligonucleotide
  misc_feature 1..20: note = Target: FXN; (-) strand; PAM type: YTN; PAM sequence: CTG
  source 1..20: mol_type = other DNA
gatggccagcagggagccca

SEQ ID NO: 23837 - DNA, 20 bp, synthetic construct
  misc_feature 1..20: note = Description of Artificial Sequence: Synthetic oligonucleotide
  misc_feature 1..20: note = Target: FXN; (-) strand; PAM type: YTN; PAM sequence: CTG
  source 1..20: mol_type = other DNA
gcctggatggccagcaggga

SEQ ID NO: 23838 - DNA, 20 bp, synthetic construct
  misc_feature 1..20: note = Description of Artificial Sequence: Synthetic oligonucleotide
  misc_feature 1..20: note = Target: FXN; (-) strand; PAM type: YTN; PAM sequence: CTG
  source 1..20: mol_type = other DNA
gtaaggactggcctggatgg

SEQ ID NO: 23839 - DNA, 20 bp, synthetic construct
  misc_feature 1..20: note = Description of Artificial Sequence: Synthetic oligonucleotide
  misc_feature 1..20: note = Target: FXN; (-) strand; PAM type: YTN; PAM sequence: CTA
  source 1..20: mol_type = other DNA
ccccctggtaaggactggcc

SEQ ID NO: 23840 - DNA, 20 bp, synthetic construct
  misc_feature 1..20: note = Description of Artificial Sequence: Synthetic oligonucleotide
  misc_feature 1..20: note = Target: FXN; (-) strand; PAM type: YTN; PAM sequence: TTG
  source 1..20: mol_type = other DNA
cctaccccctggtaaggact

SEQ ID NO: 23841 - DNA, 20 bp, synthetic construct
  misc_feature 1..20: note = Description of Artificial Sequence: Synthetic oligonucleotide
  misc_feature 1..20: note = Target: FXN; (-) strand; PAM type: YTN; PAM sequence: TTG
  source 1..20: mol_type = other DNA
acccaatcattgcctacccc

SEQ ID NO: 23842 - DNA, 20 bp, synthetic construct
  misc_feature 1..20: note = Description of Artificial Sequence: Synthetic oligonucleotide
  misc_feature 1..20: note = Target: FXN; (-) strand; PAM type: YTN; PAM sequence: CTT
  source 1..20: mol_type = other DNA
gacccaatcattgcctaccc

SEQ ID NO: 23843 - DNA, 20 bp, synthetic construct
  misc_feature 1..20: note = Description of Artificial Sequence: Synthetic oligonucleotide
  misc_feature 1..20: note = Target: FXN; (-) strand; PAM type: YTN; PAM sequence: CTC
  source 1..20: mol_type = other DNA
aggcccagtggtcaggaacc

SEQ ID NO: 23844 - DNA, 20 bp, synthetic construct
  misc_feature 1..20: note = Description of Artificial Sequence: Synthetic oligonucleotide
  misc_feature 1..20: note = Target: FXN; (-) strand; PAM type: YTN; PAM sequence: CTG
  source 1..20: mol_type = other DNA
aagtctcaggcccagtggtc

SEQ ID NO: 23845 - DNA, 20 bp, synthetic construct
  misc_feature 1..20: note = Description of Artificial Sequence: Synthetic oligonucleotide
  misc_feature 1..20: note = Target: FXN; (-) strand; PAM type: YTN; PAM sequence: CTG
  source 1..20: mol_type = other DNA
ggcctgaagtctcaggccca

SEQ ID NO: 23846 - DNA, 20 bp, synthetic construct
  misc_feature 1..20: note = Description of Artificial Sequence: Synthetic oligonucleotide
  misc_feature 1..20: note = Target: FXN; (-) strand; PAM type: YTN; PAM sequence: TTC
  source 1..20: mol_type = other DNA
tgggcctgaagtctcaggcc

SEQ ID NO: 23847 - DNA, 20 bp, synthetic construct
  misc_feature 1..20: note = Description of Artificial Sequence: Synthetic oligonucleotide
  misc_feature 1..20: note = Target: FXN; (-) strand; PAM type: YTN; PAM sequence: TTT
  source 1..20: mol_type = other DNA
ctgggcctgaagtctcaggc

SEQ ID NO: 23848 - DNA, 20 bp, synthetic construct
  misc_feature 1..20: note = Description of Artificial Sequence: Synthetic oligonucleotide
  misc_feature 1..20: note = Target: FXN; (-) strand; PAM type: YTN; PAM sequence: TTA
  source 1..20: mol_type = other DNA
gatagtttctgggcctgaag

SEQ ID NO: 23849 - DNA, 20 bp, synthetic construct
  misc_feature 1..20: note = Description of Artificial Sequence: Synthetic oligonucleotide
  misc_feature 1..20: note = Target: FXN; (-) strand; PAM type: YTN; PAM sequence: TTG
  source 1..20: mol_type = other DNA
aggaaatattagatagtttc

SEQ ID NO: 23850 - DNA, 20 bp, synthetic construct
  misc_feature 1..20: note = Description of Artificial Sequence: Synthetic oligonucleotide
  misc_feature 1..20: note = Target: FXN; (-) strand; PAM type: YTN; PAM sequence: TTT
  source 1..20: mol_type = other DNA
gaggaaatattagatagttt

SEQ ID NO: 23851 - DNA, 20 bp, synthetic construct
  misc_feature 1..20: note = Description of Artificial Sequence: Synthetic oligonucleotide
  misc_feature 1..20: note = Target: FXN; (-) strand; PAM type: YTN; PAM sequence: CTC
  source 1..20: mol_type = other DNA
atgggatgcatttgaggaaa

SEQ ID NO: 23852 - DNA, 20 bp, synthetic construct
  misc_feature 1..20: note = Description of Artificial Sequence: Synthetic oligonucleotide
  misc_feature 1..20: note = Target: FXN; (-) strand; PAM type: YTN; PAM sequence: CTG
  source 1..20: mol_type = other DNA
ctcatgggatgcatttgagg

SEQ ID NO: 23853 - DNA, 20 bp, synthetic construct
  misc_feature 1..20: note = Description of Artificial Sequence: Synthetic oligonucleotide
  misc_feature 1..20: note = Target: FXN; (-) strand; PAM type: YTN; PAM sequence: CTC
  source 1..20: mol_type = other DNA
acacagtgcctgctcatggg

SEQ ID NO: 23854 - DNA, 20 bp, synthetic construct
  misc_feature 1..20: note = Description of Artificial Sequence: Synthetic oligonucleotide
  misc_feature 1..20: note = Target: FXN; (-) strand; PAM type: YTN; PAM sequence: CTC
  source 1..20: mol_type = other DNA
actcacacagtgcctgctca

SEQ ID NO: 23855 - DNA, 20 bp, synthetic construct
  misc_feature 1..20: note = Description of Artificial Sequence: Synthetic oligonucleotide
  misc_feature 1..20: note = Target: FXN; (-) strand; PAM type: YTN; PAM sequence: TTC
  source 1..20: mol_type = other DNA
agatgtgtgtgctcactcac

SEQ ID NO: 23856 - DNA, 20 bp, synthetic construct
  misc_feature 1..20: note = Description of Artificial Sequence: Synthetic oligonucleotide
  misc_feature 1..20: note = Target: FXN; (-) strand; PAM type: YTN; PAM sequence: CTT
  source 1..20: mol_type = other DNA
cagatgtgtgtgctcactca

SEQ ID NO: 23857 - DNA, 20 bp, synthetic construct
  misc_feature 1..20: note = Description of Artificial Sequence: Synthetic oligonucleotide
  misc_feature 1..20: note = Target: FXN; (-) strand; PAM type: YTN; PAM sequence: TTG
  source 1..20: mol_type = other DNA
aggcttcagatgtgtgtgct

SEQ ID NO: 23858 - DNA, 20 bp, synthetic construct
  misc_feature 1..20: note = Description of Artificial Sequence: Synthetic oligonucleotide
  misc_feature 1..20: note = Target: FXN; (-) strand; PAM type: YTN; PAM sequence: CTT
  source 1..20: mol_type = other DNA
gaggcttcagatgtgtgtgc

SEQ ID NO: 23859 - DNA, 20 bp, synthetic construct
  misc_feature 1..20: note = Description of Artificial Sequence: Synthetic oligonucleotide
  misc_feature 1..20: note = Target: FXN; (-) strand; PAM type: YTN; PAM sequence: CTA
  source 1..20: mol_type = other DNA
gcttgaggcttcagatgtgt

SEQ ID NO: 23860 - DNA, 20 bp, synthetic construct
  misc_feature 1..20: note = Description of Artificial Sequence: Synthetic oligonucleotide
  misc_feature 1..20: note = Target: FXN; (-) strand; PAM type: YTN; PAM sequence: TTG
  source 1..20: mol_type = other DNA
cctagcttgaggcttcagat

SEQ ID NO: 23861 - DNA, 20 bp, synthetic construct
  misc_feature 1..20: note = Description of Artificial Sequence: Synthetic oligonucleotide
  misc_feature 1..20: note = Target: FXN; (-) strand; PAM type: YTN; PAM sequence: CTT
  source 1..20: mol_type = other DNA
gcctagcttgaggcttcaga

SEQ ID NO: 23862 - DNA, 20 bp, synthetic construct
  misc_feature 1..20: note = Description of Artificial Sequence: Synthetic oligonucleotide
  misc_feature 1..20: note = Target: FXN; (-) strand; PAM type: YTN; PAM sequence: TTG
  source 1..20: mol_type = other DNA
gaccacaagtcatggtaggc

SEQ ID NO: 23863 - DNA, 20 bp, synthetic construct
  misc_feature 1..20: note = Description of Artificial Sequence: Synthetic oligonucleotide
  misc_feature 1..20: note = Target: FXN; (-) strand; PAM type: YTN; PAM sequence: CTT
  source 1..20: mol_type = other DNA
ggaccacaagtcatggtagg

SEQ ID NO: 23864 - DNA, 20 bp, synthetic construct
  misc_feature 1..20: note = Description of Artificial Sequence: Synthetic oligonucleotide
  misc_feature 1..20: note = Target: FXN; (-) strand; PAM type: YTN; PAM sequence: CTC
  source 1..20: mol_type = other DNA
caggtcacccgtgagccctt

SEQ ID NO: 23865 - DNA, 20 bp, synthetic construct
  misc_feature 1..20: note = Description of Artificial Sequence: Synthetic oligonucleotide
  misc_feature 1..20: note = Target: FXN; (-) strand; PAM type: YTN; PAM sequence: CTA
  source 1..20: mol_type = other DNA
actccaggtcacccgtgagc

SEQ ID NO: 23866 - DNA, 20 bp, synthetic construct
  misc_feature 1..20: note = Description of Artificial Sequence: Synthetic oligonucleotide
  misc_feature 1..20: note = Target: FXN; (-) strand; PAM type: YTN; PAM sequence: CTC
  source 1..20: mol_type = other DNA
taactccaggtcacccgtga

SEQ ID NO: 23867 - DNA, 20 bp, synthetic construct
  misc_feature 1..20: note = Description of Artificial Sequence: Synthetic oligonucleotide
  misc_feature 1..20: note = Target: FXN; (-) strand; PAM type: YTN; PAM sequence: CTC
  source 1..20: mol_type = other DNA
cctctaactccaggtcaccc

SEQ ID NO: 23868 - DNA, 20 bp, synthetic construct
  misc_feature 1..20: note = Description of Artificial Sequence: Synthetic oligonucleotide
  misc_feature 1..20: note = Target: FXN; (-) strand; PAM type: YTN; PAM sequence: CTG
  source 1..20: mol_type = other DNA
gcagccatgtctccctctaa

SEQ ID NO: 23869 - DNA, 20 bp, synthetic construct
  misc_feature 1..20: note = Description of Artificial Sequence: Synthetic oligonucleotide
  misc_feature 1..20: note = Target: FXN; (-) strand; PAM type: YTN; PAM sequence: CTA
  source 1..20: mol_type = other DNA
aagccacctggcagccatgt

SEQ ID NO: 23870 - DNA, 20 bp, synthetic construct
  misc_feature 1..20: note = Description of Artificial Sequence: Synthetic oligonucleotide
  misc_feature 1..20: note = Target: FXN; (-) strand; PAM type: YTN; PAM sequence: TTC
  source 1..20: mol_type = other DNA
taaagccacctggcagccat

SEQ ID NO: 23871 - DNA, 20 bp, synthetic construct
  misc_feature 1..20: note = Description of Artificial Sequence: Synthetic oligonucleotide
  misc_feature 1..20: note = Target: FXN; (-) strand; PAM type: YTN; PAM sequence: TTT
  source 1..20: mol_type = other DNA
ctaaagccacctggcagcca

SEQ ID NO: 23872 - DNA, 20 bp, synthetic construct
  misc_feature 1..20: note = Description of Artificial Sequence: Synthetic oligonucleotide
  misc_feature 1..20: note = Target: FXN; (-) strand; PAM type: YTN; PAM sequence: CTT
  source 1..20: mol_type = other DNA
tctaaagccacctggcagcc

SEQ ID NO: 23873 - DNA, 20 bp, synthetic construct
  misc_feature 1..20: note = Description of Artificial Sequence: Synthetic oligonucleotide
  misc_feature 1..20: note = Target: FXN; (-) strand; PAM type: YTN; PAM sequence: TTC
  source 1..20: mol_type = other DNA
tttctaaagccacctggcag

SEQ ID NO: 23874 - DNA, 20 bp, synthetic construct
  misc_feature 1..20: note = Description of Artificial Sequence: Synthetic oligonucleotide
  misc_feature 1..20: note = Target: FXN; (-) strand; PAM type: YTN; PAM sequence: CTG
  source 1..20: mol_type = other DNA
gccatgatgagtgttctttc

SEQ ID NO: 23875 - DNA, 20 bp, synthetic construct
  misc_feature 1..20: note = Description of Artificial Sequence: Synthetic oligonucleotide
  misc_feature 1..20: note = Target: FXN; (-) strand; PAM type: YTN; PAM sequence: TTA
  source 1..20: mol_type = other DNA
caggcgtaagccaccgcacc

SEQ ID NO: 23876 - DNA, 20 bp, synthetic construct
  misc_feature 1..20: note = Description of Artificial Sequence: Synthetic oligonucleotide
  misc_feature 1..20: note = Target: FXN; (-) strand; PAM type: YTN; PAM sequence: CTG
  source 1..20: mol_type = other DNA
ggattacaggcgtaagccac

SEQ ID NO: 23877 - DNA, 20 bp, synthetic construct
  misc_feature 1..20: note = Description of Artificial Sequence: Synthetic oligonucleotide
  misc_feature 1..20: note = Target: FXN; (-) strand; PAM type: YTN; PAM sequence: CTC
  source 1..20: mol_type = other DNA
ccaaagtgctgggattacag

SEQ ID NO: 23878 - DNA, 20 bp, synthetic construct
  misc_feature 1..20: note = Description of Artificial Sequence: Synthetic oligonucleotide
  misc_feature 1..20: note = Target: FXN; (-) strand; PAM type: YTN; PAM sequence: TTG
  source 1..20: mol_type = other DNA
gcctcccaaagtgctgggat

SEQ ID NO: 23879 - DNA, 20 bp, synthetic construct
  misc_feature 1..20: note = Description of Artificial Sequence: Synthetic oligonucleotide
  misc_feature 1..20: note = Target: FXN; (-) strand; PAM type: YTN; PAM sequence: CTT
  source 1..20: mol_type = other DNA
ggcctcccaaagtgctggga

SEQ ID NO: 23880 - DNA, 20 bp, synthetic construct
  misc_feature 1..20: note = Description of Artificial Sequence: Synthetic oligonucleotide
  misc_feature 1..20: note = Target: FXN; (-) strand; PAM type: YTN; PAM sequence: CTC
  source 1..20: mol_type = other DNA
atgatccacccaccttggcc

SEQ ID NO: 23881 - DNA, 20 bp, synthetic construct
  misc_feature 1..20: note = Description of Artificial Sequence: Synthetic oligonucleotide
  misc_feature 1..20: note = Target: FXN; (-) strand; PAM type: YTN; PAM sequence: CTG
  source 1..20: mol_type = other DNA
acctcatgatccacccacct

SEQ ID NO: 23882 - DNA, 20 bp, synthetic construct
  misc_feature 1..20: note = Description of Artificial Sequence: Synthetic oligonucleotide
  misc_feature 1..20: note = Target: FXN; (-) strand; PAM type: YTN; PAM sequence: CTC
  source 1..20: mol_type = other DNA
ctgacctcatgatccaccca

SEQ ID NO: 23883 - DNA, 20 bp, synthetic construct
  misc_feature 1..20: note = Description of Artificial Sequence: Synthetic oligonucleotide
  misc_feature 1..20: note = Target: FXN; (-) strand; PAM type: YTN; PAM sequence: CTC
  source 1..20: mol_type = other DNA
actcctgacctcatgatcca

SEQ ID NO: 23884 - DNA, 20 bp, synthetic construct
  misc_feature 1..20: note = Description of Artificial Sequence: Synthetic oligonucleotide
  misc_feature 1..20: note = Target: FXN; (-) strand; PAM type: YTN; PAM sequence: CTG
  source 1..20: mol_type = other DNA
gtctcactcctgacctcatg

SEQ ID NO: 23885 - DNA, 20 bp, synthetic construct
  misc_feature 1..20: note = Description of Artificial Sequence: Synthetic oligonucleotide
  misc_feature 1..20: note = Target: FXN; (-) strand; PAM type: YTN; PAM sequence: TTG
  source 1..20: mol_type = other DNA
gtcaggctggtctcactcct

SEQ ID NO: 23886 - DNA, 20 bp, synthetic construct
  misc_feature 1..20: note = Description of Artificial Sequence: Synthetic oligonucleotide
  misc_feature 1..20: note = Target: FXN; (-) strand; PAM type: YTN; PAM sequence: TTC
  source 1..20: mol_type = other DNA
agcatgttggtcaggctggt

SEQ ID NO: 23887 - DNA, 20 bp, synthetic construct
  misc_feature 1..20: note = Description of Artificial Sequence: Synthetic oligonucleotide
  misc_feature 1..20: note = Target: FXN; (-) strand; PAM type: YTN; PAM sequence: TTT
  source 1..20: mol_type = other DNA
cagcatgttggtcaggctgg

SEQ ID NO: 23888 - DNA, 20 bp, synthetic construct
  misc_feature 1..20: note = Description of Artificial Sequence: Synthetic oligonucleotide
  misc_feature 1..20: note = Target: FXN; (-) strand; PAM type: YTN; PAM sequence: TTA
  source 1..20: mol_type = other DNA
ggagagacaggtttcagcat

SEQ ID NO: 23889 - DNA, 20 bp, synthetic construct
  misc_feature 1..20: note = Description of Artificial Sequence: Synthetic oligonucleotide
  misc_feature 1..20: note = Target: FXN; (-) strand; PAM type: YTN; PAM sequence: TTT
  source 1..20: mol_type = other DNA
aggagagacaggtttcagca

SEQ ID NO: 23890 - DNA, 20 bp, synthetic construct
  misc_feature 1..20: note = Description of Artificial Sequence: Synthetic oligonucleotide
  misc_feature 1..20: note = Target: FXN; (-) strand; PAM type: YTN; PAM sequence: TTT
  source 1..20: mol_type = other DNA
taggagagacaggtttcagc

SEQ ID NO: 23891 - DNA, 20 bp, synthetic construct
  misc_feature 1..20: note = Description of Artificial Sequence: Synthetic oligonucleotide
  misc_feature 1..20: note = Target: FXN; (-) strand; PAM type: YTN; PAM sequence: TTT
  source 1..20: mol_type = other DNA
ttaggagagacaggtttcag

SEQ ID NO: 23892 - DNA, 20 bp, synthetic construct
  misc_feature 1..20: note = Description of Artificial Sequence: Synthetic oligonucleotide
  misc_feature 1..20: note = Target: FXN; (-) strand; PAM type: YTN; PAM sequence: TTG
  source 1..20: mol_type = other DNA
tgtttttaggagagacaggt

SEQ ID NO: 23893 - DNA, 20 bp, synthetic construct
  misc_feature 1..20: note = Description of Artificial Sequence: Synthetic oligonucleotide
  misc_feature 1..20: note = Target: FXN; (-) strand; PAM type: YTN; PAM sequence: TTT
  source 1..20: mol_type = other DNA
gtgtttttaggagagacagg

SEQ ID NO: 23894 - DNA, 20 bp, synthetic construct
  misc_feature 1..20: note = Description of Artificial Sequence: Synthetic oligonucleotide
  misc_feature 1..20: note = Target: FXN; (-) strand; PAM type: YTN; PAM sequence: TTT
  source 1..20: mol_type = other DNA
tgtgtttttaggagagacag

SEQ ID NO: 23895 - DNA, 20 bp, synthetic construct
  misc_feature 1..20: note = Description of Artificial Sequence: Synthetic oligonucleotide
  misc_feature 1..20: note = Target: FXN; (-) strand; PAM type: YTN; PAM sequence: TTT
  source 1..20: mol_type = other DNA
ttgtgtttttaggagagaca

SEQ ID NO: 23896 - DNA, 20 bp, synthetic construct
  misc_feature 1..20: note = Description of Artificial Sequence: Synthetic oligonucleotide
  misc_feature 1..20: note = Target: FXN; (-) strand; PAM type: YTN; PAM sequence: CTA
  source 1..20: mol_type = other DNA
atttttgtgtttttaggaga

SEQ ID NO: 23897 - DNA, 20 bp, synthetic construct
  misc_feature 1..20: note = Description of Artificial Sequence: Synthetic oligonucleotide
  misc_feature 1..20: note = Target: FXN; (-) strand; PAM type: YTN; PAM sequence: CTC
  source 1..20: mol_type = other DNA
catgcccagctaatttttgt

SEQ ID NO: 23898 - DNA, 20 bp, synthetic construct
  misc_feature 1..20: note = Description of Artificial Sequence: Synthetic oligonucleotide
  misc_feature 1..20: note = Target: FXN; (-) strand; PAM type: YTN; PAM sequence: TTA
  source 1..20: mol_type = other DNA
caggcgtgcacctccatgcc

SEQ ID NO: 23899 - DNA, 20 bp, synthetic construct
  misc_feature 1..20: note = Description of Artificial Sequence: Synthetic oligonucleotide
  misc_feature 1..20: note = Target: FXN; (-) strand; PAM type: YTN; PAM sequence: CTG
  source 1..20: mol_type = other DNA
ggattacaggcgtgcacctc

SEQ ID NO: 23900 - DNA, 20 bp, synthetic construct
  misc_feature 1..20: note = Description of Artificial Sequence: Synthetic oligonucleotide
  misc_feature 1..20: note = Target: FXN; (-) strand; PAM type: YTN; PAM sequence: CTG
  source 1..20: mol_type = other DNA
agtagctgggattacaggcg

SEQ ID NO: 23901 - DNA, 20 bp, synthetic construct
  misc_feature 1..20: note = Description of Artificial Sequence: Synthetic oligonucleotide
  misc_feature 1..20: note = Target: FXN; (-) strand; PAM type: YTN; PAM sequence: CTC
  source 1..20: mol_type = other DNA
ctgagtagctgggattacag

SEQ ID NO: 23902 - DNA, 20 bp, synthetic construct
  misc_feature 1..20: note = Description of Artificial Sequence: Synthetic oligonucleotide
  misc_feature 1..20: note = Target: FXN; (-) strand; PAM type: YTN; PAM sequence: CTC
  source 1..20: mol_type = other DNA
agcctcctgagtagctggga

SEQ ID NO: 23903 - DNA, 20 bp, synthetic construct
  misc_feature 1..20: note = Description of Artificial Sequence: Synthetic oligonucleotide
  misc_feature 1..20: note = Target: FXN; (-) strand; PAM type: YTN; PAM sequence: CTG
  source 1..20: mol_type = other DNA
cctcagcctcctgagtagct

SEQ ID NO: 23904 - DNA, 20 bp, synthetic construct
  misc_feature 1..20: note = Description of Artificial Sequence: Synthetic oligonucleotide
  misc_feature 1..20: note = Target: FXN; (-) strand; PAM type: YTN; PAM sequence: CTC
  source 1..20: mol_type = other DNA
ctgcctcagcctcctgagta

SEQ ID NO: 23905 - DNA, 20 bp, synthetic construct
  misc_feature 1..20: note = Description of Artificial Sequence: Synthetic oligonucleotide
  misc_feature 1..20: note = Target: FXN; (-) strand; PAM type: YTN; PAM sequence: TTC
  source 1..20: mol_type = other DNA
tcctgcctcagcctcctgag

SEQ ID NO: 23906 - DNA, 20 bp, synthetic construct
  misc_feature 1..20: note = Description of Artificial Sequence: Synthetic oligonucleotide
  misc_feature 1..20: note = Target: FXN; (-) strand; PAM type: YTN; PAM sequence: TTC
  source 1..20: mol_type = other DNA
aagtgattctcctgcctcag

SEQ ID NO: 23907 - DNA, 20 bp, synthetic construct
  misc_feature 1..20: note = Description of Artificial Sequence: Synthetic oligonucleotide
  misc_feature 1..20: note = Target: FXN; (-) strand; PAM type: YTN; PAM sequence: CTC
  source 1..20: mol_type = other DNA
ccgggttcaagtgattctcc

SEQ ID NO: 23908 - DNA, 20 bp, synthetic construct
  misc_feature 1..20: note = Description of Artificial Sequence: Synthetic oligonucleotide
  misc_feature 1..20: note = Target: FXN; (-) strand; PAM type: YTN; PAM sequence: CTC
  source 1..20: mol_type = other DNA
cgcctcccgggttcaagtga

SEQ ID NO: 23909 - DNA, 20 bp, synthetic construct
  misc_feature 1..20: note = Description of Artificial Sequence: Synthetic oligonucleotide
  misc_feature 1..20: note = Target: FXN; (-) strand; PAM type: YTN; PAM sequence: TTG
  source 1..20: mol_type = other DNA
caacctccgcctcccgggtt

SEQ ID NO: 23910 - DNA, 20 bp, synthetic construct
  misc_feature 1..20: note = Description of Artificial Sequence: Synthetic oligonucleotide
  misc_feature 1..20: note = Target: FXN; (-) strand; PAM type: YTN; PAM sequence: TTA
  source 1..20: mol_type = other DNA
ttgcaacctccgcctcccgg

SEQ ID NO: 23911 - DNA, 20 bp, synthetic construct
  misc_feature 1..20: note = Description of Artificial Sequence: Synthetic oligonucleotide
  misc_feature 1..20: note = Target: FXN; (-) strand; PAM type: YTN; PAM sequence: CTT
  source 1..20: mol_type = other DNA
attgcaacctccgcctcccg

SEQ ID NO: 23912 - DNA, 20 bp, synthetic construct
  misc_feature 1..20: note = Description of Artificial Sequence: Synthetic oligonucleotide
  misc_feature 1..20: note = Target: FXN; (-) strand; PAM type: YTN; PAM sequence: CTA
  source 1..20: mol_type = other DNA
ggcttattgcaacctccgcc

SEQ ID NO: 23913 - DNA, 20 bp, synthetic construct
  misc_feature 1..20: note = Description of Artificial Sequence: Synthetic oligonucleotide
  misc_feature 1..20: note = Target: FXN; (-) strand; PAM type: YTN; PAM sequence: CTG
  source 1..20: mol_type = other DNA
gaatgcagtggcacaatcta

SEQ ID NO: 23914 - DNA, 20 bp, synthetic construct
  misc_feature 1..20: note = Description of Artificial Sequence: Synthetic oligonucleotide
  misc_feature 1..20: note = Target: FXN; (-) strand; PAM type: YTN; PAM sequence: TTG
  source 1..20: mol_type = other DNA
cccaggctggaatgcagtgg

SEQ ID NO: 23915 - DNA, 20 bp, synthetic construct
  misc_feature 1..20: note = Description of Artificial Sequence: Synthetic oligonucleotide
  misc_feature 1..20: note = Target: FXN; (-) strand; PAM type: YTN; PAM sequence: CTG
  source 1..20: mol_type = other DNA
ttgcccaggctggaatgcag

SEQ ID NO: 23916 - DNA, 20 bp, synthetic construct
  misc_feature 1..20: note = Description of Artificial Sequence: Synthetic oligonucleotide
  misc_feature 1..20: note = Target: FXN; (-) strand; PAM type: YTN; PAM sequence: CTC
  source 1..20: mol_type = other DNA
tgttgcccaggctggaatgc

SEQ ID NO: 23917 - DNA, 20 bp, synthetic construct
  misc_feature 1..20: note = Description of Artificial Sequence: Synthetic oligonucleotide
  misc_feature 1..20: note = Target: FXN; (-) strand; PAM type: YTN; PAM sequence: TTG
  source 1..20: mol_type = other DNA
ctctgttgcccaggctggaa

SEQ ID NO: 23918 - DNA, 20 bp, synthetic construct
  misc_feature 1..20: note = Description of Artificial Sequence: Synthetic oligonucleotide
  misc_feature 1..20: note = Target: FXN; (-) strand; PAM type: YTN; PAM sequence: CTT
  source 1..20: mol_type = other DNA
gctctgttgcccaggctgga

SEQ ID NO: 23919 - DNA, 20 bp, synthetic construct
  misc_feature 1..20: note = Description of Artificial Sequence: Synthetic oligonucleotide
  misc_feature 1..20: note = Target: FXN; (-) strand; PAM type: YTN; PAM sequence: CTG
  source 1..20: mol_type = other DNA
agacggagtcttgctctgtt

SEQ ID NO: 23920 - DNA, 20 bp, synthetic construct
  misc_feature 1..20: note = Description of Artificial Sequence: Synthetic oligonucleotide
  misc_feature 1..20: note = Target: FXN; (-) strand; PAM type: YTN; PAM sequence: TTC
  source 1..20: mol_type = other DNA
tgagacggagtcttgctctg

SEQ ID NO: 23921 - DNA, 20 bp, synthetic construct
  misc_feature 1..20: note = Description of Artificial Sequence: Synthetic oligonucleotide
  misc_feature 1..20: note = Target: FXN; (-) strand; PAM type: YTN; PAM sequence: TTT
  source 1..20: mol_type = other DNA
ctgagacggagtcttgctct

SEQ ID NO: 23922 - DNA, 20 bp, synthetic construct
  misc_feature 1..20: note = Description of Artificial Sequence: Synthetic oligonucleotide
  misc_feature 1..20: note = Target: FXN; (-) strand; PAM type: YTN; PAM sequence: TTT
  source 1..20: mol_type = other DNA
tctgagacggagtcttgctc

SEQ ID NO: 23923 - DNA, 20 bp, synthetic construct
  misc_feature 1..20: note = Description of Artificial Sequence: Synthetic oligonucleotide
  misc_feature 1..20: note = Target: FXN; (-) strand; PAM type: YTN; PAM sequence: TTT
  source 1..20: mol_type = other DNA
ttctgagacggagtcttgct

SEQ ID NO: 23924 - DNA, 20 bp, synthetic construct
  misc_feature 1..20: note = Description of Artificial Sequence: Synthetic oligonucleotide
  misc_feature 1..20: note = Target: FXN; (-) strand; PAM type: YTN; PAM sequence: TTT
  source 1..20: mol_type = other DNA
tttctgagacggagtcttgc

SEQ ID NO: 23925 - DNA, 20 bp, synthetic construct
  misc_feature 1..20: note = Description of Artificial Sequence: Synthetic oligonucleotide
  misc_feature 1..20: note = Target: FXN; (-) strand; PAM type: YTN; PAM sequence: TTT
  source 1..20: mol_type = other DNA
ttttctgagacggagtcttg

SEQ ID NO: 23926 - DNA, 20 bp, synthetic construct
  misc_feature 1..20: note = Description of Artificial Sequence: Synthetic oligonucleotide
  misc_feature 1..20: note = Target: FXN; (-) strand; PAM type: YTN; PAM sequence: TTT
  source 1..20: mol_type = other DNA
tttttctgagacggagtctt

SEQ ID NO: 23927 - DNA, 20 bp, synthetic construct
  misc_feature 1..20: note = Description of Artificial Sequence: Synthetic oligonucleotide
  misc_feature 1..20: note = Target: FXN; (-) strand; PAM type: YTN; PAM sequence: TTT
  source 1..20: mol_type = other DNA
ttttttctgagacggagtct

SEQ ID NO: 23928 - DNA, 20 bp, synthetic construct
  misc_feature 1..20: note = Description of Artificial Sequence: Synthetic oligonucleotide
  misc_feature 1..20: note = Target: FXN; (-) strand; PAM type: YTN; PAM sequence: TTT
  source 1..20: mol_type = other DNA
tttttttctgagacggagtc

SEQ ID NO: 23929 - DNA, 20 bp, synthetic construct
  misc_feature 1..20: note = Description of Artificial Sequence: Synthetic oligonucleotide
  misc_feature 1..20: note = Target: FXN; (-) strand; PAM type: YTN; PAM sequence: TTT
  source 1..20: mol_type = other DNA
ttttttttctgagacggagt

SEQ ID NO: 23930 - DNA, 20 bp, synthetic construct
  misc_feature 1..20: note = Description of Artificial Sequence: Synthetic oligonucleotide
  misc_feature 1..20: note = Target: FXN; (-) strand; PAM type: YTN; PAM sequence: TTT
  source 1..20: mol_type = other DNA
tttttttttctgagacggag

SEQ ID NO: 23931 - DNA, 20 bp, synthetic construct
  misc_feature 1..20: note = Description of Artificial Sequence: Synthetic oligonucleotide
  misc_feature 1..20: note = Target: FXN; (-) strand; PAM type: YTN; PAM sequence: TTT
  source 1..20: mol_type = other DNA
ttttttttttctgagacgga

SEQ ID NO: 23932 - DNA, 20 bp, synthetic construct
  misc_feature 1..20: note = Description of Artificial Sequence: Synthetic oligonucleotide
  misc_feature 1..20: note = Target: FXN; (-) strand; PAM type: YTN; PAM sequence: TTT
  source 1..20: mol_type = other DNA
tttttttttttctgagacgg

SEQ ID NO: 23933 - DNA, 20 bp, synthetic construct
  misc_feature 1..20: note = Description of Artificial Sequence: Synthetic oligonucleotide
  misc_feature 1..20: note = Target: FXN; (-) strand; PAM type: YTN; PAM sequence: TTT
  source 1..20: mol_type = other DNA
ttttttttttttctgagacg

SEQ ID NO: 23934 - DNA, 20 bp, synthetic construct
  misc_feature 1..20: note = Description of Artificial Sequence: Synthetic oligonucleotide
  misc_feature 1..20: note = Target: FXN; (-) strand; PAM type: YTN; PAM sequence: CTT
  source 1..20: mol_type = other DNA
tttttttttttttctgagac

SEQ ID NO: 23935 - DNA, 20 bp, synthetic construct
  misc_feature 1..20: note = Description of Artificial Sequence: Synthetic oligonucleotide
  misc_feature 1..20: note = Target: FXN; (-) strand; PAM type: YTN; PAM sequence: TTC
  source 1..20: mol_type = other DNA
ctttttttttttttttctga

SEQ ID NO: 23936 - DNA, 20 bp, synthetic construct
  misc_feature 1..20: note = Description of Artificial Sequence: Synthetic oligonucleotide
  misc_feature 1..20: note = Target: FXN; (-) strand; PAM type: YTN; PAM sequence: CTT
  source 1..20: mol_type = other DNA
cctttttttttttttttctg

SEQ ID NO: 23937 - DNA, 20 bp, synthetic construct
  misc_feature 1..20: note = Description of Artificial Sequence: Synthetic oligonucleotide
  misc_feature 1..20: note = Target: FXN; (-) strand; PAM type: YTN; PAM sequence: TTC
  source 1..20: mol_type = other DNA
ttcctttttttttttttttc

SEQ ID NO: 23938 - DNA, 20 bp, synthetic construct
  misc_feature 1..20: note = Description of Artificial Sequence: Synthetic oligonucleotide
  misc_feature 1..20: note = Target: FXN; (-) strand; PAM type: YTN; PAM sequence: TTG
  source 1..20: mol_type = other DNA
gaggtcaaggtcataggatg

SEQ ID NO: 23939 - DNA, 20 bp, synthetic construct
  misc_feature 1..20: note = Description of Artificial Sequence: Synthetic oligonucleotide
  misc_feature 1..20: note = Target: FXN; (-) strand; PAM type: YTN; PAM sequence: CTT
  source 1..20: mol_type = other DNA
ggaggtcaaggtcataggat

SEQ ID NO: 23940 - DNA, 20 bp, synthetic construct
  misc_feature 1..20: note = Description of Artificial Sequence: Synthetic oligonucleotide
  misc_feature 1..20: note = Target: FXN; (-) strand; PAM type: YTN; PAM sequence: TTG
  source 1..20: mol_type = other DNA
agggaggcaaagcttggagg

SEQ ID NO: 23941 - DNA, 20 bp, synthetic construct
  misc_feature 1..20: note = Description of Artificial Sequence: Synthetic oligonucleotide
  misc_feature 1..20: note = Target: FXN; (-) strand; PAM type: YTN; PAM sequence: CTT
  source 1..20: mol_type = other DNA
gagggaggcaaagcttggag

SEQ ID NO: 23942 - DNA, 20 bp, synthetic construct
  misc_feature 1..20: note = Description of Artificial Sequence: Synthetic oligonucleotide
  misc_feature 1..20: note = Target: FXN; (-) strand; PAM type: YTN; PAM sequence: CTG
  source 1..20: mol_type = other DNA
cttgagggaggcaaagcttg

SEQ ID NO: 23943 - DNA, 20 bp, synthetic construct
  misc_feature 1..20: note = Description of Artificial Sequence: Synthetic oligonucleotide
  misc_feature 1..20: note = Target: FXN; (-) strand; PAM type: YTN; PAM sequence: TTC
  source 1..20: mol_type = other DNA
tgcttgagggaggcaaagct

SEQ ID NO: 23944 - DNA, 20 bp, synthetic construct
  misc_feature 1..20: note = Description of Artificial Sequence: Synthetic oligonucleotide
  misc_feature 1..20: note = Target: FXN; (-) strand; PAM type: YTN; PAM sequence: CTG
  source 1..20: mol_type = other DNA
ttctgcttgagggaggcaaa

SEQ ID NO: 23945 - DNA, 20 bp, synthetic construct
  misc_feature 1..20: note = Description of Artificial Sequence: Synthetic oligonucleotide
  misc_feature 1..20: note = Target: FXN; (-) strand; PAM type: YTN; PAM sequence: TTC
  source 1..20: mol_type = other DNA
tgttctgcttgagggaggca

SEQ ID NO: 23946 - DNA, 20 bp, synthetic construct
  misc_feature 1..20: note = Description of Artificial Sequence: Synthetic oligonucleotide
  misc_feature 1..20: note = Target: FXN; (-) strand; PAM type: YTN; PAM sequence: CTC
  source 1..20: mol_type = other DNA
cattctgttctgcttgaggg

SEQ ID NO: 23947 - DNA, 20 bp, synthetic construct
  misc_feature 1..20: note = Description of Artificial Sequence: Synthetic oligonucleotide
  misc_feature 1..20: note = Target: FXN; (-) strand; PAM type: YTN; PAM sequence: CTA
  source 1..20: mol_type = other DNA
agggaggctccattctgttc

SEQ ID NO: 23948 - DNA, 20 bp, synthetic construct
  misc_feature 1..20: note = Description of Artificial Sequence: Synthetic oligonucleotide
  misc_feature 1..20: note = Target: FXN; (-) strand; PAM type: YTN; PAM sequence: CTG
  source 1..20: mol_type = other DNA
cctaagggaggctccattct

SEQ ID NO: 23949 - DNA, 20 bp, synthetic construct
  misc_feature 1..20: note = Description of Artificial Sequence: Synthetic oligonucleotide
  misc_feature 1..20: note = Target: FXN; (-) strand; PAM type: YTN; PAM sequence: CTC
  source 1..20: mol_type = other DNA
tgcctaagggaggctccatt

SEQ ID NO: 23950 - DNA, 20 bp, synthetic construct
  misc_feature 1..20: note = Description of Artificial Sequence: Synthetic oligonucleotide
  misc_feature 1..20: note = Target: FXN; (-) strand; PAM type: YTN; PAM sequence: TTC
  source 1..20: mol_type = other DNA
cgcctctgcctaagggaggc

SEQ ID NO: 23951 - DNA, 20 bp, synthetic construct
  misc_feature 1..20: note = Description of Artificial Sequence: Synthetic oligonucleotide
  misc_feature 1..20: note = Target: FXN; (-) strand; PAM type: YTN; PAM sequence: CTT
  source 1..20: mol_type = other DNA
ccgcctctgcctaagggagg

SEQ ID NO: 23952 - DNA, 20 bp, synthetic construct
  misc_feature 1..20: note = Description of Artificial Sequence: Synthetic oligonucleotide
  misc_feature 1..20: note = Target: FXN; (-) strand; PAM type: YTN; PAM sequence: CTA
  source 1..20: mol_type = other DNA
ggtgagaggcaaacttccgc

SEQ ID NO: 23953 - DNA, 20 bp, synthetic construct
  misc_feature 1..20: note = Description of Artificial Sequence: Synthetic oligonucleotide
  misc_feature 1..20: note = Target: FXN; (-) strand; PAM type: YTN; PAM sequence: CTG
  source 1..20: mol_type = other DNA
aacaaaagaatggagaacta

SEQ ID NO: 23954 - DNA, 20 bp, synthetic construct
  misc_feature 1..20: note = Description of Artificial Sequence: Synthetic oligonucleotide
  misc_feature 1..20: note = Target: FXN; (-) strand; PAM type: YTN; PAM sequence: CTC
  source 1..20: mol_type = other DNA
tgaacaaaagaatggagaac

SEQ ID NO: 23955 - DNA, 20 bp, synthetic construct
  misc_feature 1..20: note = Description of Artificial Sequence: Synthetic oligonucleotide
  misc_feature 1..20: note = Target: FXN; (-) strand; PAM type: YTN; PAM sequence: TTC
  source 1..20: mol_type = other DNA
aggctctgaacaaaagaatg

SEQ ID NO: 23956 - DNA, 20 bp, synthetic construct
  misc_feature 1..20: note = Description of Artificial Sequence: Synthetic oligonucleotide
  misc_feature 1..20: note = Target: FXN; (-) strand; PAM type: YTN; PAM sequence: CTG
  source 1..20: mol_type = other DNA
agggtattcaggctctgaac

SEQ ID NO: 23957 - DNA, 20 bp, synthetic construct
  misc_feature 1..20: note = Description of Artificial Sequence: Synthetic oligonucleotide
  misc_feature 1..20: note = Target: FXN; (-) strand; PAM type: YTN; PAM sequence: CTC
  source 1..20: mol_type = other DNA
acaaccgtgagcataaaaca

SEQ ID NO: 23958 - DNA, 20 bp, synthetic construct
  misc_feature 1..20: note = Description of Artificial Sequence: Synthetic oligonucleotide
  misc_feature 1..20: note = Target: FXN; (-) strand; PAM type: YTN; PAM sequence: CTC
  source 1..20: mol_type = other DNA
acaacaaacctcacaaccgt

SEQ ID NO: 23959 - DNA, 20 bp, synthetic construct
  misc_feature 1..20: note = Description of Artificial Sequence: Synthetic oligonucleotide
  misc_feature 1..20: note = Target: FXN; (-) strand; PAM type: YTN; PAM sequence: CTG
  source 1..20: mol_type = other DNA
aaggaagggatcgtggtact

SEQ ID NO: 23960 - DNA, 20 bp, synthetic construct
  misc_feature 1..20: note = Description of Artificial Sequence: Synthetic oligonucleotide
  misc_feature 1..20: note = Target: FXN; (-) strand; PAM type: YTN; PAM sequence: CTC
  source 1..20: mol_type = other DNA
tgaaggaagggatcgtggta

SEQ ID NO: 23961 - DNA, 20 bp, synthetic construct
  misc_feature 1..20: note = Description of Artificial Sequence: Synthetic oligonucleotide
  misc_feature 1..20: note = Target: FXN; (-) strand; PAM type: YTN; PAM sequence: CTC
  source 1..20: mol_type = other DNA
ctctgaaggaagggatcgtg

SEQ ID NO: 23962 - DNA, 20 bp, synthetic construct
  misc_feature 1..20: note = Description of Artificial Sequence: Synthetic oligonucleotide
  misc_feature 1..20: note = Target: FXN; (-) strand; PAM type: YTN; PAM sequence: TTA
  source 1..20: mol_type = other DNA
ctcctctgaaggaagggatc

SEQ ID NO: 23963 - DNA, 20 bp, synthetic construct
  misc_feature 1..20: note = Description of Artificial Sequence: Synthetic oligonucleotide
  misc_feature 1..20: note = Target: FXN; (-) strand; PAM type: YTN; PAM sequence: TTT
  source 1..20: mol_type = other DNA
actcctctgaaggaagggat

SEQ ID NO: 23964 - DNA, 20 bp, synthetic construct
  misc_feature 1..20: note = Description of Artificial Sequence: Synthetic oligonucleotide
  misc_feature 1..20: note = Target: FXN; (-) strand; PAM type: YTN; PAM sequence: CTC
  source 1..20: mol_type = other DNA
agtttactcctctgaaggaa

SEQ ID NO: 23965 - DNA, 20 bp, synthetic construct
  misc_feature 1..20: note = Description of Artificial Sequence: Synthetic oligonucleotide
  misc_feature 1..20: note = Target: FXN; (-) strand; PAM type: YTN; PAM sequence: TTG
  source 1..20: mol_type = other DNA
gaacctcagtttactcctct

SEQ ID NO: 23966 - DNA, 20 bp, synthetic construct
  misc_feature 1..20: note = Description of Artificial Sequence: Synthetic oligonucleotide
  misc_feature 1..20: note = Target: FXN; (-) strand; PAM type: YTN; PAM sequence: TTT
  source 1..20: mol_type = other DNA
ggaacctcagtttactcctc

SEQ ID NO: 23967 - DNA, 20 bp, synthetic construct
  misc_feature 1..20: note = Description of Artificial Sequence: Synthetic oligonucleotide
  misc_feature 1..20: note = Target: FXN; (-) strand; PAM type: YTN; PAM sequence: TTT
  source 1..20: mol_type = other DNA
tggaacctcagtttactcct

SEQ ID NO: 23968 - DNA, 20 bp, synthetic construct
  misc_feature 1..20: note = Description of Artificial Sequence: Synthetic oligonucleotide
  misc_feature 1..20: note = Target: FXN; (-) strand; PAM type: YTN; PAM sequence: CTT
  source 1..20: mol_type = other DNA
ttggaacctcagtttactcc

SEQ ID NO: 23969 - DNA, 20 bp, synthetic construct
  misc_feature 1..20: note = Description of Artificial Sequence: Synthetic oligonucleotide
  misc_feature 1..20: note = Target: FXN; (-) strand; PAM type: YTN; PAM sequence: CTA
  source 1..20: mol_type = other DNA
aaccttttggaacctcagtt

SEQ ID NO: 23970 - DNA, 20 bp, synthetic construct
  misc_feature 1..20: note = Description of Artificial Sequence: Synthetic oligonucleotide
  misc_feature 1..20: note = Target: FXN; (-) strand; PAM type: YTN; PAM sequence: CTG
  source 1..20: mol_type = other DNA
ctaaaccttttggaacctca

SEQ ID NO: 23971 - DNA, 20 bp, synthetic construct
  misc_feature 1..20: note = Description of Artificial Sequence: Synthetic oligonucleotide
  misc_feature 1..20: note = Target: FXN; (-) strand; PAM type: YTN; PAM sequence: CTC
  source 1..20: mol_type = other DNA
gggcaactgctaaacctttt

SEQ ID NO: 23972 - DNA, 20 bp, synthetic construct
  misc_feature 1..20: note = Description of Artificial Sequence: Synthetic oligonucleotide
  misc_feature 1..20: note = Target: FXN; (-) strand; PAM type: YTN; PAM sequence: TTC
  source 1..20: mol_type = other DNA
ctcgggcaactgctaaacct

SEQ ID NO: 23973 - DNA, 20 bp, synthetic construct
  misc_feature 1..20: note = Description of Artificial Sequence: Synthetic oligonucleotide
  misc_feature 1..20: note = Target: FXN; (-) strand; PAM type: YTN; PAM sequence: TTA
  source 1..20: mol_type = other DNA
atattcctcgggcaactgct

SEQ ID NO: 23974 - DNA, 20 bp, synthetic construct
  misc_feature 1..20: note = Description of Artificial Sequence: Synthetic oligonucleotide
  misc_feature 1..20: note = Target: FXN; (-) strand; PAM type: YTN; PAM sequence: TTT
  source 1..20: mol_type = other DNA
aatattcctcgggcaactgc

SEQ ID NO: 23975 - DNA, 20 bp, synthetic construct
  misc_feature 1..20: note = Description of Artificial Sequence: Synthetic oligonucleotide
  misc_feature 1..20: note = Target: FXN; (-) strand; PAM type: YTN; PAM sequence: TTG
  source 1..20: mol_type = other DNA
ccaatttaatattcctcggg

SEQ ID NO: 23976 - DNA, 20 bp, synthetic construct
  misc_feature 1..20: note = Description of Artificial Sequence: Synthetic oligonucleotide
  misc_feature 1..20: note = Target: FXN; (-) strand; PAM type: YTN; PAM sequence: TTT
  source 1..20: mol_type = other DNA
gccaatttaatattcctcgg

SEQ ID NO: 23977 - DNA, 20 bp, synthetic construct
  misc_feature 1..20: note = Description of Artificial Sequence: Synthetic oligonucleotide
  misc_feature 1..20: note = Target: FXN; (-) strand; PAM type: YTN; PAM sequence: TTT
  source 1..20: mol_type = other DNA
tgccaatttaatattcctcg

SEQ ID NO: 23978 - DNA, 20 bp, synthetic construct
  misc_feature 1..20: note = Description of Artificial Sequence: Synthetic oligonucleotide
  misc_feature 1..20: note = Target: FXN; (-) strand; PAM type: YTN; PAM sequence: CTT
  source 1..20: mol_type = other DNA
ttgccaatttaatattcctc

SEQ ID NO: 23979 - DNA, 20 bp, synthetic construct
  misc_feature 1..20: note = Description of Artificial Sequence: Synthetic oligonucleotide
  misc_feature 1..20: note = Target: FXN; (-) strand; PAM type: YTN; PAM sequence: CTG
  source 1..20: mol_type = other DNA
cttttgccaatttaatattc

SEQ ID NO: 23980 - DNA, 20 bp, synthetic construct
  misc_feature 1..20: note = Description of Artificial Sequence: Synthetic oligonucleotide
  misc_feature 1..20: note = Target: FXN; (-) strand; PAM type: YTN; PAM sequence: CTA
  source 1..20: mol_type = other DNA
cctgcttttgccaatttaat

SEQ ID NO: 23981 - DNA, 20 bp, synthetic construct
  misc_feature 1..20: note = Description of Artificial Sequence: Synthetic oligonucleotide
  misc_feature 1..20: note = Target: FXN; (-) strand; PAM type: YTN; PAM sequence: TTC
  source 1..20: mol_type = other DNA
tacctgcttttgccaattta

SEQ ID NO: 23982 - DNA, 20 bp, synthetic construct
  misc_feature 1..20: note = Description of Artificial Sequence: Synthetic oligonucleotide
  misc_feature 1..20: note = Target: FXN; (-) strand; PAM type: YTN; PAM sequence: TTA
  source 1..20: mol_type = other DNA
tattctacctgcttttgcca

SEQ ID NO: 23983 - DNA, 20 bp, synthetic construct
  misc_feature 1..20: note = Description of Artificial Sequence: Synthetic oligonucleotide
  misc_feature 1..20: note = Target: FXN; (-) strand; PAM type: YTN; PAM sequence: TTT
  source 1..20: mol_type = other DNA
atattctacctgcttttgcc

SEQ ID NO: 23984 - DNA, 20 bp, synthetic construct
  misc_feature 1..20: note = Description of Artificial Sequence: Synthetic oligonucleotide
  misc_feature 1..20: note = Target: FXN; (-) strand; PAM type: YTN; PAM sequence: CTT
  source 1..20: mol_type = other DNA
tatattctacctgcttttgc

SEQ ID NO: 23985 - DNA, 20 bp, synthetic construct
  misc_feature 1..20: note = Description of Artificial Sequence: Synthetic oligonucleotide
  misc_feature 1..20: note = Target: FXN; (-) strand; PAM type: YTN; PAM sequence: TTG
  source 1..20: mol_type = other DNA
ctttatattctacctgcttt

SEQ ID NO: 23986 - DNA, 20 bp, synthetic construct
  misc_feature 1..20: note = Description of Artificial Sequence: Synthetic oligonucleotide
  misc_feature 1..20: note = Target: FXN; (-) strand; PAM type: YTN; PAM sequence: CTT
  source 1..20: mol_type = other DNA
gctttatattctacctgctt

SEQ ID NO: 23987 - DNA, 20 bp, synthetic construct
  misc_feature 1..20: note = Description of Artificial Sequence: Synthetic oligonucleotide
  misc_feature 1..20: note = Target: FXN; (-) strand; PAM type: YTN; PAM sequence: CTC
  source 1..20: mol_type = other DNA
cttgctttatattctacctg

SEQ ID NO: 23988 - DNA, 20 bp, synthetic construct
  misc_feature 1..20: note = Description of Artificial Sequence: Synthetic oligonucleotide
  misc_feature 1..20: note = Target: FXN; (-) strand; PAM type: YTN; PAM sequence: TTG
  source 1..20: mol_type = other DNA
ccaaatactccttgctttat

SEQ ID NO: 23989 - DNA, 20 bp, synthetic construct
  misc_feature 1..20: note = Description of Artificial Sequence: Synthetic oligonucleotide
  misc_feature 1..20: note = Target: FXN; (-) strand; PAM type: YTN; PAM sequence: TTA
  source 1..20: mol_type = other DNA
atcataaaaaagaaccgttg

SEQ ID NO: 23990 - DNA, 20 bp, synthetic construct
  misc_feature 1..20: note = Description of Artificial Sequence: Synthetic oligonucleotide
  misc_feature 1..20: note = Target: FXN; (-) strand; PAM type: YTN; PAM sequence: TTT
  source 1..20: mol_type = other DNA
aatcataaaaaagaaccgtt

SEQ ID NO: 23991 - DNA, 20 bp, synthetic construct
  misc_feature 1..20: note = Description of Artificial Sequence: Synthetic oligonucleotide
  misc_feature 1..20: note = Target: FXN; (-) strand; PAM type: YTN; PAM sequence: TTT
  source 1..20: mol_type = other DNA
taatcataaaaaagaaccgt

SEQ ID NO: 23992 - DNA, 20 bp, synthetic construct
  misc_feature 1..20: note = Description of Artificial Sequence: Synthetic oligonucleotide
  misc_feature 1..20: note = Target: FXN; (-) strand; PAM type: YTN; PAM sequence: TTT
  source 1..20: mol_type = other DNA
ttaatcataaaaaagaaccg

SEQ ID NO: 23993 - DNA, 20 bp, synthetic construct
  misc_feature 1..20: note = Description of Artificial Sequence: Synthetic oligonucleotide
  misc_feature 1..20: note = Target: FXN; (-) strand; PAM type: YTN; PAM sequence: CTG
  source 1..20: mol_type = other DNA
tttttaatcataaaaaagaa

SEQ ID NO: 23994 - DNA, 20 bp, synthetic construct
  misc_feature 1..20: note = Description of Artificial Sequence: Synthetic oligonucleotide
  misc_feature 1..20: note = Target: FXN; (-) strand; PAM type: YTN; PAM sequence: TTC
  source 1..20: mol_type = other DNA
ggctgtttttaatcataaaa

SEQ ID NO: 23995 - DNA, 20 bp, synthetic construct
  misc_feature 1..20: note = Description of Artificial Sequence: Synthetic oligonucleotide
  misc_feature 1..20: note = Target: FXN; (-) strand; PAM type: YTN; PAM sequence: CTT
  source 1..20: mol_type = other DNA
cggctgtttttaatcataaa

SEQ ID NO: 23996 - DNA, 20 bp, synthetic construct
  misc_feature 1..20: note = Description of Artificial Sequence: Synthetic oligonucleotide
  misc_feature 1..20: note = Target: FXN; (-) strand; PAM type: YTN; PAM sequence: TTC
  source 1..20: mol_type = other DNA
ttcggctgtttttaatcata

SEQ ID NO: 23997 - DNA, 20 bp, synthetic construct
  misc_feature 1..20: note = Description of Artificial Sequence: Synthetic oligonucleotide
  misc_feature 1..20: note = Target: FXN; (-) strand; PAM type: YTN; PAM sequence: TTT
  source 1..20: mol_type = other DNA
cttcggctgtttttaatcat

SEQ ID NO: 23998 - DNA, 20 bp, synthetic construct
  misc_feature 1..20: note = Description of Artificial Sequence: Synthetic oligonucleotide
  misc_feature 1..20: note = Target: FXN; (-) strand; PAM type: YTN; PAM sequence: CTT
  source 1..20: mol_type = other DNA
tcttcggctgtttttaatca

SEQ ID NO: 23999 - DNA, 20 bp, synthetic construct
  misc_feature 1..20: note = Description of Artificial Sequence: Synthetic oligonucleotide
  misc_feature 1..20: note = Target: FXN; (-) strand; PAM type: YTN; PAM sequence: TTC
  source 1..20: mol_type = other DNA
aaaggcacaagtagaagtct

SEQ ID NO: 24000 - DNA, 20 bp, synthetic construct
  misc_feature 1..20: note = Description of Artificial Sequence: Synthetic oligonucleotide
  misc_feature 1..20: note = Target: FXN; (-) strand; PAM type: YTN; PAM sequence: CTT
  source 1..20: mol_type = other DNA
caaaggcacaagtagaagtc

SEQ ID NO: 24001 - DNA, 20 bp, synthetic construct
  misc_feature 1..20: note = Description of Artificial Sequence: Synthetic oligonucleotide
  misc_feature 1..20: note = Target: FXN; (-) strand; PAM type: YTN; PAM sequence: CTC
  source 1..20: mol_type = other DNA
cttcaaaggcacaagtagaa

SEQ ID NO: 24002 - DNA, 20 bp, synthetic construct
  misc_feature 1..20: note = Description of Artificial Sequence: Synthetic oligonucleotide
  misc_feature 1..20: note = Target: FXN; (-) strand; PAM type: YTN; PAM sequence: TTA
  source 1..20: mol_type = other DNA
ctccttcaaaggcacaagta

SEQ ID NO: 24003 - DNA, 20 bp, synthetic construct
  misc_feature 1..20: note = Description of Artificial Sequence: Synthetic oligonucleotide
  misc_feature 1..20: note = Target: FXN; (-) strand; PAM type: YTN; PAM sequence: CTG
  source 1..20: mol_type = other DNA
gtgggaaggtcaaatgcagt

SEQ ID NO: 24004 - DNA, 20 bp, synthetic construct
  misc_feature 1..20: note = Description of Artificial Sequence: Synthetic oligonucleotide
  misc_feature 1..20: note = Target: FXN; (-) strand; PAM type: YTN; PAM sequence: TTA
  source 1..20: mol_type = other DNA
ctggtgggaaggtcaaatgc

SEQ ID NO: 24005 - DNA, 20 bp, synthetic construct
  misc_feature 1..20: note = Description of Artificial Sequence: Synthetic oligonucleotide
  misc_feature 1..20: note = Target: FXN; (-) strand; PAM type: YTN; PAM sequence: TTG
  source 1..20: mol_type = other DNA
ttactggtgggaaggtcaaa

SEQ ID NO: 24006 - DNA, 20 bp, synthetic construct
  misc_feature 1..20: note = Description of Artificial Sequence: Synthetic oligonucleotide
  misc_feature 1..20: note = Target: FXN; (-) strand; PAM type: YTN; PAM sequence: TTG
  source 1..20: mol_type = other DNA
atggttgttactggtgggaa

SEQ ID NO: 24007 - DNA, 20 bp, synthetic construct
  misc_feature 1..20: note = Description of Artificial Sequence: Synthetic oligonucleotide
  misc_feature 1..20: note = Target: FXN; (-) strand; PAM type: YTN; PAM sequence: TTT
  source 1..20: mol_type = other DNA
gatggttgttactggtggga

SEQ ID NO: 24008 - DNA, 20 bp, synthetic construct
  misc_feature 1..20: note = Description of Artificial Sequence: Synthetic oligonucleotide
  misc_feature 1..20: note = Target: FXN; (-) strand; PAM type: YTN; PAM sequence: TTA
  source 1..20: mol_type = other DNA
atagagatttgatggttgtt

SEQ ID NO: 24009 - DNA, 20 bp, synthetic construct
  misc_feature 1..20: note = Description of Artificial Sequence: Synthetic oligonucleotide
  misc_feature 1..20: note = Target: FXN; (-) strand; PAM type: YTN; PAM sequence: TTT
  source 1..20: mol_type = other DNA
aatagagatttgatggttgt

SEQ ID NO: 24010 - DNA, 20 bp, synthetic construct
  misc_feature 1..20: note = Description of Artificial Sequence: Synthetic oligonucleotide
  misc_feature 1..20: note = Target: FXN; (-) strand; PAM type: YTN; PAM sequence: TTA
  source 1..20: mol_type = other DNA
atttaatagagatttgatgg

SEQ ID NO: 24011 - DNA, 20 bp, synthetic construct
  misc_feature 1..20: note = Description of Artificial Sequence: Synthetic oligonucleotide
  misc_feature 1..20: note = Target: FXN; (-) strand; PAM type: YTN; PAM sequence: TTT
  source 1..20: mol_type = other DNA
aatttaatagagatttgatg

SEQ ID NO: 24012 - DNA, 20 bp, synthetic construct
  misc_feature 1..20: note = Description of Artificial Sequence: Synthetic oligonucleotide
  misc_feature 1..20: note = Target: FXN; (-) strand; PAM type: YTN; PAM sequence: TTG
  source 1..20: mol_type = other DNA
tgtgtgtgtgtgtttaattt

SEQ ID NO: 24013 - DNA, 20 bp, synthetic construct
  misc_feature 1..20: note = Description of Artificial Sequence: Synthetic oligonucleotide
  misc_feature 1..20: note = Target: FXN; (-) strand; PAM type: YTN; PAM sequence: TTT
  source 1..20: mol_type = other DNA
gtgtgtgtgtgtgtttaatt

SEQ ID NO: 24014 - DNA, 20 bp, synthetic construct
  misc_feature 1..20: note = Description of Artificial Sequence: Synthetic oligonucleotide
  misc_feature 1..20: note = Target: FXN; (-) strand; PAM type: YTN; PAM sequence: TTG
  source 1..20: mol_type = other DNA
tttgtgtgtgtgtgtgttta

SEQ ID NO: 24015 - DNA, 20 bp, synthetic construct
  misc_feature 1..20: note = Description of Artificial Sequence: Synthetic oligonucleotide
  misc_feature 1..20: note = Target: FXN; (-) strand; PAM type: YTN; PAM sequence: TTT
  source 1..20: mol_type = other DNA
gtttgtgtgtgtgtgtgttt

SEQ ID NO: 24016 - DNA, 20 bp, synthetic construct
  misc_feature 1..20: note = Description of Artificial Sequence: Synthetic oligonucleotide
  misc_feature 1..20: note = Target: FXN; (-) strand; PAM type: YTN; PAM sequence: TTT
  source 1..20: mol_type = other DNA
tgtttgtgtgtgtgtgtgtt

SEQ ID NO: 24017 - DNA, 20 bp, synthetic construct
  misc_feature 1..20: note = Description of Artificial Sequence: Synthetic oligonucleotide
  misc_feature 1..20: note = Target: FXN; (-) strand; PAM type: YTN; PAM sequence: TTT
  source 1..20: mol_type = other DNA
ttgtttgtgtgtgtgtgtgt

SEQ ID NO: 24018 - DNA, 20 bp, synthetic construct
  misc_feature 1..20: note = Description of Artificial Sequence: Synthetic oligonucleotide
  misc_feature 1..20: note = Target: FXN; (-) strand; PAM type: YTN; PAM sequence: CTG
  source 1..20: mol_type = other DNA
tttttgtttgtgtgtgtgtg

SEQ ID NO: 24019 - DNA, 20 bp, synthetic construct
  misc_feature 1..20: note = Description of Artificial Sequence: Synthetic oligonucleotide
  misc_feature 1..20: note = Target: FXN; (-) strand; PAM type: YTN; PAM sequence: TTC
  source 1..20: mol_type = other DNA
acaatagctgtttttgtttg

SEQ ID NO: 24020 - DNA, 20 bp, synthetic construct
  misc_feature 1..20: note = Description of Artificial Sequence: Synthetic oligonucleotide
  misc_feature 1..20: note = Target: FXN; (-) strand; PAM type: YTN; PAM sequence: CTT
  source 1..20: mol_type = other DNA
cacaatagctgtttttgttt

SEQ ID NO: 24021 - DNA, 20 bp, synthetic construct
  misc_feature 1..20: note = Description of Artificial Sequence: Synthetic oligonucleotide
  misc_feature 1..20: note = Target: FXN; (-) strand; PAM type: YTN; PAM sequence: CTG
  source 1..20: mol_type = other DNA
ataccttcacaatagctgtt

SEQ ID NO: 24022 - DNA, 20 bp, synthetic construct
  misc_feature 1..20: note = Description of Artificial Sequence: Synthetic oligonucleotide
  misc_feature 1..20: note = Target: FXN; (-) strand; PAM type: YTN; PAM sequence: TTA
  source 1..20: mol_type = other DNA
gtcgctgataccttcacaat

SEQ ID NO: 24023 - DNA, 20 bp, synthetic construct
  misc_feature 1..20: note = Description of Artificial Sequence: Synthetic oligonucleotide
  misc_feature 1..20: note = Target: FXN; (-) strand; PAM type: YTN; PAM sequence: CTT
  source 1..20: mol_type = other DNA
agtcgctgataccttcacaa

SEQ ID NO: 24024 - DNA, 20 bp, synthetic construct
  misc_feature 1..20: note = Description of Artificial Sequence: Synthetic oligonucleotide
  misc_feature 1..20: note = Target: FXN; (-) strand; PAM type: YTN; PAM sequence: TTG
  source 1..20: mol_type = other DNA
tcttagtcgctgataccttc

SEQ ID NO: 24025 - DNA, 20 bp, synthetic construct
  misc_feature 1..20: note = Description of Artificial Sequence: Synthetic oligonucleotide
  misc_feature 1..20: note = Target: FXN; (-) strand; PAM type: YTN; PAM sequence: TTA
  source 1..20: mol_type = other DNA
gttgtcttagtcgctgatac

SEQ ID NO: 24026 - DNA, 20 bp, synthetic construct
  misc_feature 1..20: note = Description of Artificial Sequence: Synthetic oligonucleotide
  misc_feature 1..20: note = Target: FXN; (-) strand; PAM type: YTN; PAM sequence: CTT
  source 1..20: mol_type = other DNA
agttgtcttagtcgctgata

SEQ ID NO: 24027 - DNA, 20 bp, synthetic construct
  misc_feature 1..20: note = Description of Artificial Sequence: Synthetic oligonucleotide
  misc_feature 1..20: note = Target: FXN; (-) strand; PAM type: YTN; PAM sequence: CTC
  source 1..20: mol_type = other DNA
aaaccttagttgtcttagtc

SEQ ID NO: 24028 - DNA, 20 bp, synthetic construct
  misc_feature 1..20: note = Description of Artificial Sequence: Synthetic oligonucleotide
  misc_feature 1..20: note = Target: FXN; (-) strand; PAM type: YTN; PAM sequence: CTG
  source 1..20: mol_type = other DNA
gcccctcaaaccttagttgt

SEQ ID NO: 24029 - DNA, 20 bp, synthetic construct
  misc_feature 1..20: note = Description of Artificial Sequence: Synthetic oligonucleotide
  misc_feature 1..20: note = Target: FXN; (-) strand; PAM type: YTN; PAM sequence: CTC
  source 1..20: mol_type = other DNA
caggatcctggcccctcaaa

SEQ ID NO: 24030 - DNA, 20 bp, synthetic construct
  misc_feature 1..20: note = Description of Artificial Sequence: Synthetic oligonucleotide
  misc_feature 1..20: note = Target: FXN; (-) strand; PAM type: YTN; PAM sequence: CTC
  source 1..20: mol_type = other DNA
tccaggatcctggcccctca

SEQ ID NO: 24031 - DNA, 20 bp, synthetic construct
  misc_feature 1..20: note = Description of Artificial Sequence: Synthetic oligonucleotide
  misc_feature 1..20: note = Target: FXN; (-) strand; PAM type: YTN; PAM sequence: TTC
  source 1..20: mol_type = other DNA
catctctccaggatcctggc

SEQ ID NO: 24032 - DNA, 20 bp, synthetic construct
  misc_feature 1..20: note = Description of Artificial Sequence: Synthetic oligonucleotide
  misc_feature 1..20: note = Target: FXN; (-) strand; PAM type: YTN; PAM sequence: TTT
  source 1..20: mol_type = other DNA
ccatctctccaggatcctgg

SEQ ID NO: 24033 - DNA, 20 bp, synthetic construct
  misc_feature 1..20: note = Description of Artificial Sequence: Synthetic oligonucleotide
  misc_feature 1..20: note = Target: FXN; (-) strand; PAM type: YTN; PAM sequence: CTC
  source 1..20: mol_type = other DNA
agggaagtttccatctctcc

SEQ ID NO: 24034 - DNA, 20 bp, synthetic construct
  misc_feature 1..20: note = Description of Artificial Sequence: Synthetic oligonucleotide
  misc_feature 1..20: note = Target: FXN; (-) strand; PAM type: YTN; PAM sequence: CTC
  source 1..20: mol_type = other DNA
acctcagggaagtttccatc

SEQ ID NO: 24035 - DNA, 20 bp, synthetic construct
  misc_feature 1..20: note = Description of Artificial Sequence: Synthetic oligonucleotide
  misc_feature 1..20: note = Target: FXN; (-) strand; PAM type: YTN; PAM sequence: CTG
  source 1..20: mol_type = other DNA
agaatgtggggctcacctca

SEQ ID NO: 24036 - DNA, 20 bp, synthetic construct
  misc_feature 1..20: note = Description of Artificial Sequence: Synthetic oligonucleotide
  misc_feature 1..20: note = Target: FXN; (-) strand; PAM type: YTN; PAM sequence: CTC
  source 1..20: mol_type = other DNA
aaaacatccaaggaaaagtg

SEQ ID NO: 24037 - DNA, 20 bp, synthetic construct
  misc_feature 1..20: note = Description of Artificial Sequence: Synthetic oligonucleotide
  misc_feature 1..20: note = Target: FXN; (-) strand; PAM type: YTN; PAM sequence: TTA
  source 1..20: mol_type = other DNA
aagcagtgctcaaaacatcc

SEQ ID NO: 24038 - DNA, 20 bp, synthetic construct
  misc_feature 1..20: note = Description of Artificial Sequence: Synthetic oligonucleotide
  misc_feature 1..20: note = Target: FXN; (-) strand; PAM type: YTN; PAM sequence: TTC
  source 1..20: mol_type = other DNA
ccaggaattaaagcagtgct

SEQ ID NO: 24039 - DNA, 20 bp, synthetic construct
  misc_feature 1..20: note = Description of Artificial Sequence: Synthetic oligonucleotide
  misc_feature 1..20: note = Target: FXN; (-) strand; PAM type: YTN; PAM sequence: TTT
  source 1..20: mol_type = other DNA
cccaggaattaaagcagtgc

SEQ ID NO: 24040 - DNA, 20 bp, synthetic construct
  misc_feature 1..20: note = Description of Artificial Sequence: Synthetic oligonucleotide
  misc_feature 1..20: note = Target: FXN; (-) strand; PAM type: YTN; PAM sequence: TTT
  source 1..20: mol_type = other DNA
tcccaggaattaaagcagtg

SEQ ID NO: 24041 - DNA, 20 bp, synthetic construct
  misc_feature 1..20: note = Description of Artificial Sequence: Synthetic oligonucleotide
  misc_feature 1..20: note = Target: FXN; (-) strand; PAM type: YTN; PAM sequence: TTG
  source 1..20: mol_type = other DNA
ttttcccaggaattaaagca

SEQ ID NO: 24042 - DNA, 20 bp, synthetic construct
  misc_feature 1..20: note = Description of Artificial Sequence: Synthetic oligonucleotide
  misc_feature 1..20: note = Target: FXN; (-) strand; PAM type: YTN; PAM sequence: CTG
  source 1..20: mol_type = other DNA
tgcacagtggaaggaattgt

SEQ ID NO: 24043 - DNA, 20 bp, synthetic construct
  misc_feature 1..20: note = Description of Artificial Sequence: Synthetic oligonucleotide
  misc_feature 1..20: note = Target: FXN; (-) strand; PAM type: YTN; PAM sequence: CTG
  source 1..20: mol_type = other DNA
gccccagagtctgtgcacag

SEQ ID NO: 24044 - DNA, 20 bp, synthetic construct
  misc_feature 1..20: note = Description of Artificial Sequence: Synthetic oligonucleotide
  misc_feature 1..20: note = Target: FXN; (-) strand; PAM type: YTN; PAM sequence: CTG
  source 1..20: mol_type = other DNA
tctggccccagagtctgtgc

SEQ ID NO: 24045 - DNA, 20 bp, synthetic construct
  misc_feature 1..20: note = Description of Artificial Sequence: Synthetic oligonucleotide
  misc_feature 1..20: note = Target: FXN; (-) strand; PAM type: YTN; PAM sequence: TTG
  source 1..20: mol_type = other DNA
aacccaagctgtctggcccc

SEQ ID NO: 24046 - DNA, 20 bp, synthetic construct
  misc_feature 1..20: note = Description of Artificial Sequence: Synthetic oligonucleotide
  misc_feature 1..20: note = Target: FXN; (-) strand; PAM type: YTN; PAM sequence: CTG
  source 1..20: mol_type = other DNA
ggattgaacccaagctgtct

SEQ ID NO: 24047 - DNA, 20 bp, synthetic construct
  misc_feature 1..20: note = Description of Artificial Sequence: Synthetic oligonucleotide
  misc_feature 1..20: note = Target: FXN; (-) strand; PAM type: YTN; PAM sequence: TTA
  source 1..20: mol_type = other DNA
agtggcagagctgggattga

SEQ ID NO: 24048 - DNA, 20 bp, synthetic construct
  misc_feature 1..20: note = Description of Artificial Sequence: Synthetic oligonucleotide
  misc_feature 1..20: note = Target: FXN; (-) strand; PAM type: YTN; PAM sequence: CTA
  source 1..20: mol_type = other DNA
cacagatacacagacattaa

SEQ ID NO: 24049 - DNA, 20 bp, synthetic construct
  misc_feature 1..20: note = Description of Artificial Sequence: Synthetic oligonucleotide
  misc_feature 1..20: note = Target: FXN; (-) strand; PAM type: YTN; PAM sequence: TTG
  source 1..20: mol_type = other DNA
cctacacagatacacagaca

SEQ ID NO: 24050 - DNA, 20 bp, synthetic construct
  misc_feature 1..20: note = Description of Artificial Sequence: Synthetic oligonucleotide
  misc_feature 1..20: note = Target: FXN; (-) strand; PAM type: YTN; PAM sequence: CTT
  source 1..20: mol_type = other DNA
gcctacacagatacacagac

SEQ ID NO: 24051 - DNA, 20 bp, synthetic construct
  misc_feature 1..20: note = Description of Artificial Sequence: Synthetic oligonucleotide
  misc_feature 1..20: note = Target: FXN; (-) strand; PAM type: YTN; PAM sequence: CTG
  source 1..20: mol_type = other DNA
acgcaccaaagggtaacttg

SEQ ID NO: 24052 - DNA, 20 bp, synthetic construct
  misc_feature 1..20: note = Description of Artificial Sequence: Synthetic oligonucleotide
  misc_feature 1..20: note = Target: FXN; (-) strand; PAM type: YTN; PAM sequence: TTA
  source 1..20: mol_type = other DNA
cagatgaggaaactgacgca

SEQ ID NO: 24053 - DNA, 20 bp, synthetic construct
  misc_feature 1..20: note = Description of Artificial Sequence: Synthetic oligonucleotide
  misc_feature 1..20: note = Target: FXN; (-) strand; PAM type: YTN; PAM sequence: TTT
  source 1..20: mol_type = other DNA
acagatgaggaaactgacgc

SEQ ID NO: 24054 - DNA, 20 bp, synthetic construct
  misc_feature 1..20: note = Description of Artificial Sequence: Synthetic oligonucleotide
  misc_feature 1..20: note = Target: FXN; (-) strand; PAM type: YTN; PAM sequence: TTT
  source 1..20: mol_type = other DNA
tacagatgaggaaactgacg

SEQ ID NO: 24055 - DNA, 20 bp, synthetic construct
  misc_feature 1..20: note = Description of Artificial Sequence: Synthetic oligonucleotide
  misc_feature 1..20: note = Target: FXN; (-) strand; PAM type: YTN; PAM sequence: TTG
  source 1..20: mol_type = other DNA
tgttttacagatgaggaaac

SEQ ID NO: 24056 - DNA, 20 bp, synthetic construct
  misc_feature 1..20: note = Description of Artificial Sequence: Synthetic oligonucleotide
  misc_feature 1..20: note = Target: FXN; (-) strand; PAM type: YTN; PAM sequence: CTA
  source 1..20: mol_type = other DNA
tagttgtgttttacagatga

SEQ ID NO: 24057 - DNA, 20 bp, synthetic construct
  misc_feature 1..20: note = Description of Artificial Sequence: Synthetic oligonucleotide
  misc_feature 1..20: note = Target: FXN; (-) strand; PAM type: YTN; PAM sequence: TTA
  source 1..20: mol_type = other DNA
acgaatgaggatcaactata

SEQ ID NO: 24058 - DNA, 20 bp, synthetic construct
  misc_feature 1..20: note = Description of Artificial Sequence: Synthetic oligonucleotide
  misc_feature 1..20: note = Target: FXN; (-) strand; PAM type: YTN; PAM sequence: CTT
  source 1..20: mol_type = other DNA
aacgaatgaggatcaactat

SEQ ID NO: 24059 - DNA, 20 bp, synthetic construct
  misc_feature 1..20: note = Description of Artificial Sequence: Synthetic oligonucleotide
  misc_feature 1..20: note = Target: FXN; (-) strand; PAM type: YTN; PAM sequence: CTC
  source 1..20: mol_type = other DNA
ttaacgaatgaggatcaact

SEQ ID NO: 24060 - DNA, 20 bp, synthetic construct
  misc_feature 1..20: note = Description of Artificial Sequence: Synthetic oligonucleotide
  misc_feature 1..20: note = Target: FXN; (-) strand; PAM type: YTN; PAM sequence: TTA
  source 1..20: mol_type = other DNA
acaagtacagactcttaacg

SEQ ID NO: 24061 - DNA, 20 bp, synthetic construct
  misc_feature 1..20: note = Description of Artificial Sequence: Synthetic oligonucleotide
  misc_feature 1..20: note = Target: FXN; (-) strand; PAM type: YTN; PAM sequence: TTA
  source 1..20: mol_type = other DNA
gcaagtgagcaaattaacaa

SEQ ID NO: 24062 - DNA, 20 bp, synthetic construct
  misc_feature 1..20: note = Description of Artificial Sequence: Synthetic oligonucleotide
  misc_feature 1..20: note = Target: FXN; (-) strand; PAM type: YTN; PAM sequence: TTT
  source 1..20: mol_type = other DNA
agcaagtgagcaaattaaca

SEQ ID NO: 24063 - DNA, 20 bp, synthetic construct
  misc_feature 1..20: note = Description of Artificial Sequence: Synthetic oligonucleotide
  misc_feature 1..20: note = Target: FXN; (-) strand; PAM type: YTN; PAM sequence: TTT
  source 1..20: mol_type = other DNA
tagcaagtgagcaaattaac

SEQ ID NO: 24064 - DNA, 20 bp, synthetic construct
  misc_feature 1..20: note = Description of Artificial Sequence: Synthetic oligonucleotide
  misc_feature 1..20: note = Target: FXN; (-) strand; PAM type: YTN; PAM sequence: TTG
  source 1..20: mol_type = other DNA
gggtaacaaattttagcaag

SEQ ID NO: 24065 - DNA, 20 bp, synthetic construct
  misc_feature 1..20: note = Description of Artificial Sequence: Synthetic oligonucleotide
  misc_feature 1..20: note = Target: FXN; (-) strand; PAM type: YTN; PAM sequence: TTT
  source 1..20: mol_type = other DNA
ggggtaacaaattttagcaa

SEQ ID NO: 24066 - DNA, 20 bp, synthetic construct
  misc_feature 1..20: note = Description of Artificial Sequence: Synthetic oligonucleotide
  misc_feature 1..20: note = Target: FXN; (-) strand; PAM type: YTN; PAM sequence: TTT
  source 1..20: mol_type = other DNA
tggggtaacaaattttagca

SEQ ID NO: 24067 - DNA, 20 bp, synthetic construct
  misc_feature 1..20: note = Description of Artificial Sequence: Synthetic oligonucleotide
  misc_feature 1..20: note = Target: FXN; (-) strand; PAM type: YTN; PAM sequence: CTG
  source 1..20: mol_type = other DNA
attttggggtaacaaatttt

SEQ ID NO: 24068 - DNA, 20 bp, synthetic construct
  misc_feature 1..20: note = Description of Artificial Sequence: Synthetic oligonucleotide
  misc_feature 1..20: note = Target: FXN; (-) strand; PAM type: YTN; PAM sequence: CTA
  source 1..20: mol_type = other DNA
ggggtactgattttggggta

SEQ ID NO: 24069 - DNA, 20 bp, synthetic construct
  misc_feature 1..20: note = Description of Artificial Sequence: Synthetic oligonucleotide
  misc_feature 1..20: note = Target: FXN; (-) strand; PAM type: YTN; PAM sequence: TTG
  source 1..20: mol_type = other DNA
aaacgaccccaaaaggctag

SEQ ID NO: 24070 - DNA, 20 bp, synthetic construct
  misc_feature 1..20: note = Description of Artificial Sequence: Synthetic oligonucleotide
  misc_feature 1..20: note = Target: FXN; (-) strand; PAM type: YTN; PAM sequence: TTT
  source 1..20: mol_type = other DNA
gaaacgaccccaaaaggcta

SEQ ID NO: 24071 - DNA, 20 bp, synthetic construct
  misc_feature 1..20: note = Description of Artificial Sequence: Synthetic oligonucleotide
  misc_feature 1..20: note = Target: FXN; (-) strand; PAM type: YTN; PAM sequence: CTT
  source 1..20: mol_type = other DNA
tgaaacgaccccaaaaggct

SEQ ID NO: 24072 - DNA, 20 bp, synthetic construct
  misc_feature 1..20: note = Description of Artificial Sequence: Synthetic oligonucleotide
  misc_feature 1..20: note = Target: FXN; (-) strand; PAM type: YTN; PAM sequence: CTG
  source 1..20: mol_type = other DNA
cacacatctttgaaacgacc

SEQ ID NO: 24073 - DNA, 20 bp, synthetic construct
  misc_feature 1..20: note = Description of Artificial Sequence: Synthetic oligonucleotide
  misc_feature 1..20: note = Target: FXN; (-) strand; PAM type: YTN; PAM sequence: CTC
  source 1..20: mol_type = other DNA
tgcacacatctttgaaacga

SEQ ID NO: 24074 - DNA, 20 bp, synthetic construct
  misc_feature 1..20: note = Description of Artificial Sequence: Synthetic oligonucleotide
  misc_feature 1..20: note = Target: FXN; (-) strand; PAM type: YTN; PAM sequence: TTG
  source 1..20: mol_type = other DNA
ccgctctgcacacatctttg

SEQ ID NO: 24075 - DNA, 20 bp, synthetic construct
  misc_feature 1..20: note = Description of Artificial Sequence: Synthetic oligonucleotide
  misc_feature 1..20: note = Target: FXN; (-) strand; PAM type: YTN; PAM sequence: TTT
  source 1..20: mol_type = other DNA
gccgctctgcacacatcttt

SEQ ID NO: 24076 - DNA, 20 bp, synthetic construct
  misc_feature 1..20: note = Description of Artificial Sequence: Synthetic oligonucleotide
  misc_feature 1..20: note = Target: FXN; (-) strand; PAM type: YTN; PAM sequence: TTT
  source 1..20: mol_type = other DNA
tgccgctctgcacacatctt

SEQ ID NO: 24077 - DNA, 20 bp, synthetic construct
  misc_feature 1..20: note = Description of Artificial Sequence: Synthetic oligonucleotide
  misc_feature 1..20: note = Target: FXN; (-) strand; PAM type: YTN; PAM sequence: TTT
  source 1..20: mol_type = other DNA
ttgccgctctgcacacatct

SEQ ID NO: 24078 - DNA, 20 bp, synthetic construct
  misc_feature 1..20: note = Description of Artificial Sequence: Synthetic oligonucleotide
  misc_feature 1..20: note = Target: FXN; (-) strand; PAM type: YTN; PAM sequence: TTT
  source 1..20: mol_type = other DNA
tttgccgctctgcacacatc

SEQ ID NO: 24079 - DNA, 20 bp, synthetic construct
  misc_feature 1..20: note = Description of Artificial Sequence: Synthetic oligonucleotide
  misc_feature 1..20: note = Target: FXN; (-) strand; PAM type: YTN; PAM sequence: TTT
  source 1..20: mol_type = other DNA
ttttgccgctctgcacacat

SEQ ID NO: 24080 - DNA, 20 bp, synthetic construct
  misc_feature 1..20: note = Description of Artificial Sequence: Synthetic oligonucleotide
  misc_feature 1..20: note = Target: FXN; (-) strand; PAM type: YTN; PAM sequence: CTC
  source 1..20: mol_type = other DNA
acatttttttgccgctctgc

SEQ ID NO: 24081 - DNA, 20 bp, synthetic construct
  misc_feature 1..20: note = Description of Artificial Sequence: Synthetic oligonucleotide
  misc_feature 1..20: note = Target: FXN; (-) strand; PAM type: YTN; PAM sequence: CTG
  source 1..20: mol_type = other DNA
gaggagctcacatttttttg

SEQ ID NO: 24082 - DNA, 20 bp, synthetic construct
  misc_feature 1..20: note = Description of Artificial Sequence: Synthetic oligonucleotide
  misc_feature 1..20: note = Target: FXN; (-) strand; PAM type: YTN; PAM sequence: CTG
  source 1..20: mol_type = other DNA
ggaacatgagcctggaggag

SEQ ID NO: 24083 - DNA, 20 bp, synthetic construct
  misc_feature 1..20: note = Description of Artificial Sequence: Synthetic oligonucleotide
  misc_feature 1..20: note = Target: FXN; (-) strand; PAM type: YTN; PAM sequence: TTG
  source 1..20: mol_type = other DNA
gctgggaacatgagcctgga

SEQ ID NO: 24084 - DNA, 20 bp, synthetic construct
  misc_feature 1..20: note = Description of Artificial Sequence: Synthetic oligonucleotide
  misc_feature 1..20: note = Target: FXN; (-) strand; PAM type: YTN; PAM sequence: CTT
  source 1..20: mol_type = other DNA
ggctgggaacatgagcctgg

SEQ ID NO: 24085 - DNA, 20 bp, synthetic construct
  misc_feature 1..20: note = Description of Artificial Sequence: Synthetic oligonucleotide
  misc_feature 1..20: note = Target: FXN; (-) strand; PAM type: YTN; PAM sequence: TTG
  source 1..20: mol_type = other DNA
gaccttggctgggaacatga

SEQ ID NO: 24086 - DNA, 20 bp, synthetic construct
  misc_feature 1..20: note = Description of Artificial Sequence: Synthetic oligonucleotide
  misc_feature 1..20: note = Target: FXN; (-) strand; PAM type: YTN; PAM sequence: TTG
  source 1..20: mol_type = other DNA
ttggaccttggctgggaaca

SEQ ID NO: 24087 - DNA, 20 bp, synthetic construct
  misc_feature 1..20: note = Description of Artificial Sequence: Synthetic oligonucleotide
  misc_feature 1..20: note = Target: FXN; (-) strand; PAM type: YTN; PAM sequence: TTT
  source 1..20: mol_type = other DNA
gttggaccttggctgggaac

SEQ ID NO: 24088 - DNA, 20 bp, synthetic construct
  misc_feature 1..20: note = Description of Artificial Sequence: Synthetic oligonucleotide
  misc_feature 1..20: note = Target: FXN; (-) strand; PAM type: YTN; PAM sequence: CTT
  source 1..20: mol_type = other DNA
tgttggaccttggctgggaa

SEQ ID NO: 24089 - DNA, 20 bp, synthetic construct
  misc_feature 1..20: note = Description of Artificial Sequence: Synthetic oligonucleotide
  misc_feature 1..20: note = Target: FXN; (-) strand; PAM type: YTN; PAM sequence: CTG
  source 1..20: mol_type = other DNA
aaataagaaggcagggcagc

SEQ ID NO: 24090 - DNA, 20 bp, synthetic construct
  misc_feature 1..20: note = Description of Artificial Sequence: Synthetic oligonucleotide
  misc_feature 1..20: note = Target: FXN; (-) strand; PAM type: YTN; PAM sequence: CTA
  source 1..20: mol_type = other DNA
tgacagctgaaataagaagg

SEQ ID NO: 24091 - DNA, 20 bp, synthetic construct
  misc_feature 1..20: note = Description of Artificial Sequence: Synthetic oligonucleotide
  misc_feature 1..20: note = Target: FXN; (-) strand; PAM type: YTN; PAM sequence: TTA
  source 1..20: mol_type = other DNA
cactatgacagctgaaataa

SEQ ID NO: 24092 - DNA, 20 bp, synthetic construct
  misc_feature 1..20: note = Description of Artificial Sequence: Synthetic oligonucleotide
  misc_feature 1..20: note = Target: FXN; (-) strand; PAM type: YTN; PAM sequence: TTT
  source 1..20: mol_type = other DNA
acactatgacagctgaaata

SEQ ID NO: 24093 - DNA, 20 bp, synthetic construct
  misc_feature 1..20: note = Description of Artificial Sequence: Synthetic oligonucleotide
  misc_feature 1..20: note = Target: FXN; (-) strand; PAM type: YTN; PAM sequence: CTG
  source 1..20: mol_type = other DNA
tgaaaaggacacagtttaca

SEQ ID NO: 24094 - DNA, 20 bp, synthetic construct
  misc_feature 1..20: note = Description of Artificial Sequence: Synthetic oligonucleotide
  misc_feature 1..20: note = Target: FXN; (-) strand; PAM type: YTN; PAM sequence: CTA
  source 1..20: mol_type = other DNA
atcagactgtgaaaaggaca

SEQ ID NO: 24095 - DNA, 20 bp, synthetic construct
  misc_feature 1..20: note = Description of Artificial Sequence: Synthetic oligonucleotide
  misc_feature 1..20: note = Target: FXN; (-) strand; PAM type: YTN; PAM sequence: CTG
  source 1..20: mol_type = other DNA
aaaaacatggcactaatcag

SEQ ID NO: 24096 - DNA, 20 bp, synthetic construct
  misc_feature 1..20: note = Description of Artificial Sequence: Synthetic oligonucleotide
  misc_feature 1..20: note = Target: FXN; (-) strand; PAM type: YTN; PAM sequence: TTA
  source 1..20: mol_type = other DNA
acagagaaataaccaagaaa

SEQ ID NO: 24097 - DNA, 20 bp, synthetic construct
  misc_feature 1..20: note = Description of Artificial Sequence: Synthetic oligonucleotide
  misc_feature 1..20: note = Target: FXN; (-) strand; PAM type: YTN; PAM sequence: TTT
  source 1..20: mol_type = other DNA
aacagagaaataaccaagaa

SEQ ID NO: 24098 - DNA, 20 bp, synthetic construct
  misc_feature 1..20: note = Description of Artificial Sequence: Synthetic oligonucleotide
  misc_feature 1..20: note = Target: FXN; (-) strand; PAM type: YTN; PAM sequence: TTT
  source 1..20: mol_type = other DNA
taacagagaaataaccaaga

SEQ ID NO: 24099 - DNA, 20 bp, synthetic construct
  misc_feature 1..20: note = Description of Artificial Sequence: Synthetic oligonucleotide
  misc_feature 1..20: note = Target: FXN; (-) strand; PAM type: YTN; PAM sequence: TTG
  source 1..20: mol_type = other DNA
gagacaattttaacagagaa

SEQ ID NO: 24100 - DNA, 20 bp, synthetic construct
  misc_feature 1..20: note = Description of Artificial Sequence: Synthetic oligonucleotide
  misc_feature 1..20: note = Target: FXN; (-) strand; PAM type: YTN; PAM sequence: CTT
  source 1..20: mol_type = other DNA
ggagacaattttaacagaga

SEQ ID NO: 24101 - DNA, 20 bp, synthetic construct
  misc_feature 1..20: note = Description of Artificial Sequence: Synthetic oligonucleotide
  misc_feature 1..20: note = Target: FXN; (-) strand; PAM type: YTN; PAM sequence: CTA
  source 1..20: mol_type = other DNA
cacttggagacaattttaac

SEQ ID NO: 24102 - DNA, 20 bp, synthetic construct
  misc_feature 1..20: note = Description of Artificial Sequence: Synthetic oligonucleotide
  misc_feature 1..20: note = Target: FXN; (-) strand; PAM type: YTN; PAM sequence: TTG
  source 1..20: mol_type = other DNA
cactacacttggagacaatt

SEQ ID NO: 24103 - DNA, 20 bp, synthetic construct
  misc_feature 1..20: note = Description of Artificial Sequence: Synthetic oligonucleotide
  misc_feature 1..20: note = Target: FXN; (-) strand; PAM type: YTN; PAM sequence: TTT
  source 1..20: mol_type = other DNA
gcactacacttggagacaat

SEQ ID NO: 24104 - DNA, 20 bp, synthetic construct
  misc_feature 1..20: note = Description of Artificial Sequence: Synthetic oligonucleotide
  misc_feature 1..20: note = Target: FXN; (-) strand; PAM type: YTN; PAM sequence: CTT
  source 1..20: mol_type = other DNA
tgcactacacttggagacaa

SEQ ID NO: 24105 - DNA, 20 bp, synthetic construct
  misc_feature 1..20: note = Description of Artificial Sequence: Synthetic oligonucleotide
  misc_feature 1..20: note = Target: FXN; (-) strand; PAM type: YTN; PAM sequence: CTA
  source 1..20: mol_type = other DNA
aactttgcactacacttgga

SEQ ID NO: 24106 - DNA, 20 bp, synthetic construct
  misc_feature 1..20: note = Description of Artificial Sequence: Synthetic oligonucleotide
  misc_feature 1..20: note = Target: FXN; (-) strand; PAM type: YTN; PAM sequence: CTC
  source 1..20: mol_type = other DNA
gtgctaaactttgcactaca

SEQ ID NO: 24107 - DNA, 20 bp, synthetic construct
  misc_feature 1..20: note = Description of Artificial Sequence: Synthetic oligonucleotide
  misc_feature 1..20: note = Target: FXN; (-) strand; PAM type: YTN; PAM sequence: CTC
  source 1..20: mol_type = other DNA
ctcgtgctaaactttgcact

SEQ ID NO: 24108 - DNA, 20 bp, synthetic construct
  misc_feature 1..20: note = Description of Artificial Sequence: Synthetic oligonucleotide
  misc_feature 1..20: note = Target: FXN; (-) strand; PAM type: YTN; PAM sequence: CTG
  source 1..20: mol_type = other DNA
taaggaacatcacagcctcc

SEQ ID NO: 24109 - DNA, 20 bp, synthetic construct
  misc_feature 1..20: note = Description of Artificial Sequence: Synthetic oligonucleotide
  misc_feature 1..20: note = Target: FXN; (-) strand; PAM type: YTN; PAM sequence: CTC
  source 1..20: mol_type = other DNA
tgtaaggaacatcacagcct

SEQ ID NO: 24110 - DNA, 20 bp, synthetic construct
  misc_feature 1..20: note = Description of Artificial Sequence: Synthetic oligonucleotide
  misc_feature 1..20: note = Target: FXN; (-) strand; PAM type: YTN; PAM sequence: TTC
  source 1..20: mol_type = other DNA
tctgtaaggaacatcacagc

SEQ ID NO: 24111 - DNA, 20 bp, synthetic construct
  misc_feature 1..20: note = Description of Artificial Sequence: Synthetic oligonucleotide
  misc_feature 1..20: note = Target: FXN; (-) strand; PAM type: YTN; PAM sequence: TTT
  source 1..20: mol_type = other DNA
ctctgtaaggaacatcacag

SEQ ID NO: 24112 - DNA, 20 bp, synthetic construct
  misc_feature 1..20: note = Description of Artificial Sequence: Synthetic oligonucleotide
  misc_feature 1..20: note = Target: FXN; (-) strand; PAM type: YTN; PAM sequence: TTT
  source 1..20: mol_type = other DNA
tctctgtaaggaacatcaca

SEQ ID NO: 24113 - DNA, 20 bp, synthetic construct
  misc_feature 1..20: note = Description of Artificial Sequence: Synthetic oligonucleotide
  misc_feature 1..20: note = Target: FXN; (-) strand; PAM type: YTN; PAM sequence: CTA
  source 1..20: mol_type = other DNA
acacatgcattttctctgta

SEQ ID NO: 24114 - DNA, 20 bp, synthetic construct
  misc_feature 1..20: note = Description of Artificial Sequence: Synthetic oligonucleotide
  misc_feature 1..20: note = Target: FXN; (-) strand; PAM type: YTN; PAM sequence: CTC
  source 1..20: mol_type = other DNA
taacacatgcattttctctg

SEQ ID NO: 24115 - DNA, 20 bp, synthetic construct
  misc_feature 1..20: note = Description of Artificial Sequence: Synthetic oligonucleotide
  misc_feature 1..20: note = Target: FXN; (-) strand; PAM type: YTN; PAM sequence: TTC
  source 1..20: mol_type = other DNA
tctaacacatgcattttctc

SEQ ID NO: 24116 - DNA, 20 bp, synthetic construct
  misc_feature 1..20: note = Description of Artificial Sequence: Synthetic oligonucleotide
  misc_feature 1..20: note = Target: FXN; (-) strand; PAM type: YTN; PAM sequence: CTT
  source 1..20: mol_type = other DNA
ctctaacacatgcattttct

SEQ ID NO: 24117 - DNA, 20 bp, synthetic construct
  misc_feature 1..20: note = Description of Artificial Sequence: Synthetic oligonucleotide
  misc_feature 1..20: note = Target: FXN; (-) strand; PAM type: YTN; PAM sequence: CTG
  source 1..20: mol_type = other DNA
acaaagcttctctaacacat

SEQ ID NO: 24118 - DNA, 20 bp, synthetic construct
  misc_feature 1..20: note = Description of Artificial Sequence: Synthetic oligonucleotide
  misc_feature 1..20: note = Target: FXN; (-) strand; PAM type: YTN; PAM sequence: CTC
  source 1..20: mol_type = other DNA
atgcctgacaaagcttctct

SEQ ID NO: 24119 - DNA, 20 bp, synthetic construct
  misc_feature 1..20: note = Description of Artificial Sequence: Synthetic oligonucleotide
  misc_feature 1..20: note = Target: FXN; (-) strand; PAM type: YTN; PAM sequence: TTA
  source 1..20: mol_type = other DNA
actcatgcctgacaaagctt

SEQ ID NO: 24120 - DNA, 20 bp, synthetic construct
  misc_feature 1..20: note = Description of Artificial Sequence: Synthetic oligonucleotide
  misc_feature 1..20: note = Target: FXN; (-) strand; PAM type: YTN; PAM sequence: CTT
  source 1..20: mol_type = other DNA
aactcatgcctgacaaagct

SEQ ID NO: 24121 - DNA, 20 bp, synthetic construct
  misc_feature 1..20: note = Description of Artificial Sequence: Synthetic oligonucleotide
  misc_feature 1..20: note = Target: FXN; (-) strand; PAM type: YTN; PAM sequence: CTC
  source 1..20: mol_type = other DNA
aggacaacagcaccttaact

SEQ ID NO: 24122 - DNA, 20 bp, synthetic construct
  misc_feature 1..20: note = Description of Artificial Sequence: Synthetic oligonucleotide
  misc_feature 1..20: note = Target: FXN; (-) strand; PAM type: YTN; PAM sequence: TTG
  source 1..20: mol_type = other DNA
atctcaggacaacagcacct

SEQ ID NO: 24123 - DNA, 20 bp, synthetic construct
  misc_feature 1..20: note = Description of Artificial Sequence: Synthetic oligonucleotide
  misc_feature 1..20: note = Target: FXN; (-) strand; PAM type: YTN; PAM sequence: TTA
  source 1..20: mol_type = other DNA
attgatctcaggacaacagc

SEQ ID NO: 24124 - DNA, 20 bp, synthetic construct
  misc_feature 1..20: note = Description of Artificial Sequence: Synthetic oligonucleotide
  misc_feature 1..20: note = Target: FXN; (-) strand; PAM type: YTN; PAM sequence: CTC
  source 1..20: mol_type = other DNA
aaacaacaacaacaacaaat

SEQ ID NO: 24125 - DNA, 20 bp, synthetic construct
  misc_feature 1..20: note = Description of Artificial Sequence: Synthetic oligonucleotide
  misc_feature 1..20: note = Target: FXN; (-) strand; PAM type: YTN; PAM sequence: CTG
  source 1..20: mol_type = other DNA
tctcaaacaacaacaacaac

SEQ ID NO: 24126 - DNA, 20 bp, synthetic construct
  misc_feature 1..20: note = Description of Artificial Sequence: Synthetic oligonucleotide
  misc_feature 1..20: note = Target: FXN; (-) strand; PAM type: YTN; PAM sequence: CTG
  source 1..20: mol_type = other DNA
ggcaacagagggagaccctg

SEQ ID NO: 24127 - DNA, 20 bp, synthetic construct
  misc_feature 1..20: note = Description of Artificial Sequence: Synthetic oligonucleotide
  misc_feature 1..20: note = Target: FXN; (-) strand; PAM type: YTN; PAM sequence: CTC
  source 1..20: mol_type = other DNA
cagcagcctgggcaacagag

SEQ ID NO: 24128 - DNA, 20 bp, synthetic construct
  misc_feature 1..20: note = Description of Artificial Sequence: Synthetic oligonucleotide
  misc_feature 1..20: note = Target: FXN; (-) strand; PAM type: YTN; PAM sequence: TTG
  source 1..20: mol_type = other DNA
cactccagcagcctgggcaa

SEQ ID NO: 24129 - DNA, 20 bp, synthetic construct
  misc_feature 1..20: note = Description of Artificial Sequence: Synthetic oligonucleotide
  misc_feature 1..20: note = Target: FXN; (-) strand; PAM type: YTN; PAM sequence: TTA
  source 1..20: mol_type = other DNA
caccattgcactccagcagc

SEQ ID NO: 24130 - DNA, 20 bp, synthetic construct
  misc_feature 1..20: note = Description of Artificial Sequence: Synthetic oligonucleotide
  misc_feature 1..20: note = Target: FXN; (-) strand; PAM type: YTN; PAM sequence: CTA
  source 1..20: mol_type = other DNA
tgattacaccattgcactcc

SEQ ID NO: 24131 - DNA, 20 bp, synthetic construct
  misc_feature 1..20: note = Description of Artificial Sequence: Synthetic oligonucleotide
  misc_feature 1..20: note = Target: FXN; (-) strand; PAM type: YTN; PAM sequence: CTG
  source 1..20: mol_type = other DNA
cagtgagctatgattacacc

SEQ ID NO: 24132 - DNA, 20 bp, synthetic construct
  misc_feature 1..20: note = Description of Artificial Sequence: Synthetic oligonucleotide
  misc_feature 1..20: note = Target: FXN; (-) strand; PAM type: YTN; PAM sequence: TTG
  source 1..20: mol_type = other DNA
agccagagaggtagaggctg

SEQ ID NO: 24133 - DNA, 20 bp, synthetic construct
  misc_feature 1..20: note = Description of Artificial Sequence: Synthetic oligonucleotide
  misc_feature 1..20: note = Target: FXN; (-) strand; PAM type: YTN; PAM sequence: CTT
  source 1..20: mol_type = other DNA
gagccagagaggtagaggct

SEQ ID NO: 24134 - DNA, 20 bp, synthetic construct
  misc_feature 1..20: note = Description of Artificial Sequence: Synthetic oligonucleotide
  misc_feature 1..20: note = Target: FXN; (-) strand; PAM type: YTN; PAM sequence: TTG
  source 1..20: mol_type = other DNA
cttgagccagagaggtagag

SEQ ID NO: 24135 - DNA, 20 bp, synthetic construct
  misc_feature 1..20: note = Description of Artificial Sequence: Synthetic oligonucleotide
  misc_feature 1..20: note = Target: FXN; (-) strand; PAM type: YTN; PAM sequence: CTC
  source 1..20: mol_type = other DNA
aggaggccgaggtgggagga

SEQ ID NO: 24136 - DNA, 20 bp, synthetic construct
  misc_feature 1..20: note = Description of Artificial Sequence: Synthetic oligonucleotide
  misc_feature 1..20: note = Target: FXN; (-) strand; PAM type: YTN; PAM sequence: CTA
  source 1..20: mol_type = other DNA
ctcaggaggccgaggtggga

SEQ ID NO: 24137 - DNA, 20 bp, synthetic construct
  misc_feature 1..20: note = Description of Artificial Sequence: Synthetic oligonucleotide
  misc_feature 1..20: note = Target: FXN; (-) strand; PAM type: YTN; PAM sequence: CTG
  source 1..20: mol_type = other DNA
tagtcccagctactcaggag

SEQ ID NO: 24138 - DNA, 20 bp, synthetic construct
  misc_feature 1..20: note = Description of Artificial Sequence: Synthetic oligonucleotide
  misc_feature 1..20: note = Target: FXN; (-) strand; PAM type: YTN; PAM sequence: CTG
  source 1..20: mol_type = other DNA
ggtgtggtggggtgtacctg

SEQ ID NO: 24139 - DNA, 20 bp, synthetic construct
  misc_feature 1..20: note = Description of Artificial Sequence: Synthetic oligonucleotide
  misc_feature 1..20: note = Target: FXN; (-) strand; PAM type: YTN; PAM sequence: TTA
  source 1..20: mol_type = other DNA
tctgggtgtggtggggtgta

SEQ ID NO: 24140 - DNA, 20 bp, synthetic construct
  misc_feature 1..20: note = Description of Artificial Sequence: Synthetic oligonucleotide
  misc_feature 1..20: note = Target: FXN; (-) strand; PAM type: YTN; PAM sequence: CTA
  source 1..20: mol_type = other DNA
aaaaaatatcaaaaacatta

SEQ ID NO: 24141 - DNA, 20 bp, synthetic construct
  misc_feature 1..20: note = Description of Artificial Sequence: Synthetic oligonucleotide
  misc_feature 1..20: note = Target: FXN; (-) strand; PAM type: YTN; PAM sequence: TTC
  source 1..20: mol_type = other DNA
cacctaaaaaaatatcaaaa

SEQ ID NO: 24142 - DNA, 20 bp, synthetic construct
  misc_feature 1..20: note = Description of Artificial Sequence: Synthetic oligonucleotide
  misc_feature 1..20: note = Target: FXN; (-) strand; PAM type: YTN; PAM sequence: CTG
  source 1..20: mol_type = other DNA
ggtgatgagcaaaattccac

SEQ ID NO: 24143 - DNA, 20 bp, synthetic construct
  misc_feature 1..20: note = Description of Artificial Sequence: Synthetic oligonucleotide
  misc_feature 1..20: note = Target: FXN; (-) strand; PAM type: YTN; PAM sequence: CTC
  source 1..20: mol_type = other DNA
cagcctgggtgatgagcaaa

SEQ ID NO: 24144 - DNA, 20 bp, synthetic construct
  misc_feature 1..20: note = Description of Artificial Sequence: Synthetic oligonucleotide
  misc_feature 1..20: note = Target: FXN; (-) strand; PAM type: YTN; PAM sequence: TTG
  source 1..20: mol_type = other DNA
cactccagcctgggtgatga

SEQ ID NO: 24145 - DNA, 20 bp, synthetic construct
  misc_feature 1..20: note = Description of Artificial Sequence: Synthetic oligonucleotide
  misc_feature 1..20: note = Target: FXN; (-) strand; PAM type: YTN; PAM sequence: TTG
  source 1..20: mol_type = other DNA
cagtgagccaggatcgcacc

SEQ ID NO: 24146 - DNA, 20 bp, synthetic construct
  misc_feature 1..20: note = Description of Artificial Sequence: Synthetic oligonucleotide
  misc_feature 1..20: note = Target: FXN; (-) strand; PAM type: YTN; PAM sequence: TTG
  source 1..20: mol_type = other DNA
aatccgggaggtggaggttg

SEQ ID NO: 24147 - DNA, 20 bp, synthetic construct
  misc_feature 1..20: note = Description of Artificial Sequence: Synthetic oligonucleotide
  misc_feature 1..20: note = Target: FXN; (-) strand; PAM type: YTN; PAM sequence: CTT
  source 1..20: mol_type = other DNA
gaatccgggaggtggaggtt

SEQ ID NO: 24148 - DNA, 20 bp, synthetic construct
  misc_feature 1..20: note = Description of Artificial Sequence: Synthetic oligonucleotide
  misc_feature 1..20: note = Target: FXN; (-) strand; PAM type: YTN; PAM sequence: TTG
  source 1..20: mol_type = other DNA
cttgaatccgggaggtggag

SEQ ID NO: 24149 - DNA, 20 bp, synthetic construct
  misc_feature 1..20: note = Description of Artificial Sequence: Synthetic oligonucleotide
  misc_feature 1..20: note = Target: FXN; (-) strand; PAM type: YTN; PAM sequence: CTG
  source 1..20: mol_type = other DNA
aggcagaagaattgcttgaa

SEQ ID NO: 24150 - DNA, 20 bp, synthetic construct
  misc_feature 1..20: note = Description of Artificial Sequence: Synthetic oligonucleotide
  misc_feature 1..20: note = Target: FXN; (-) strand; PAM type: YTN; PAM sequence: CTC
  source 1..20: mol_type = other DNA
aggaggctgaggcagaagaa

SEQ ID NO: 24151 - DNA, 20 bp, synthetic construct
  misc_feature 1..20: note = Description of Artificial Sequence: Synthetic oligonucleotide
  misc_feature 1..20: note = Target: FXN; (-) strand; PAM type: YTN; PAM sequence: CTA
  source 1..20: mol_type = other DNA
ctcaggaggctgaggcagaa

SEQ ID NO: 24152 - DNA, 20 bp, synthetic construct
  misc_feature 1..20: note = Description of Artificial Sequence: Synthetic oligonucleotide
  misc_feature 1..20: note = Target: FXN; (-) strand; PAM type: YTN; PAM sequence: CTG
  source 1..20: mol_type = other DNA
tgctactcaggaggctgagg

SEQ ID NO: 24153 - DNA, 20 bp, synthetic construct
  misc_feature 1..20: note = Description of Artificial Sequence: Synthetic oligonucleotide
  misc_feature 1..20: note = Target: FXN; (-) strand; PAM type: YTN; PAM sequence: CTG
  source 1..20: mol_type = other DNA
taatctgtgctactcaggag

SEQ ID NO: 24154 - DNA, 20 bp, synthetic construct
  misc_feature 1..20: note = Description of Artificial Sequence: Synthetic oligonucleotide
  misc_feature 1..20: note = Target: FXN; (-) strand; PAM type: YTN; PAM sequence: TTA
  source 1..20: mol_type = other DNA
gcaaggcgtgatgacatgtg

SEQ ID NO: 24155 - DNA, 20 bp, synthetic construct
  misc_feature 1..20: note = Description of Artificial Sequence: Synthetic oligonucleotide
  misc_feature 1..20: note = Target: FXN; (-) strand; PAM type: YTN; PAM sequence: CTA
  source 1..20: mol_type = other DNA
aaaacacaaaaattagcaag

SEQ ID NO: 24156 - DNA, 20 bp, synthetic construct
  misc_feature 1..20: note = Description of Artificial Sequence: Synthetic oligonucleotide
  misc_feature 1..20: note = Target: FXN; (-) strand; PAM type: YTN; PAM sequence: CTA
  source 1..20: mol_type = other DNA
ctaaaaacacaaaaattagc

SEQ ID NO: 24157 - DNA, 20 bp, synthetic construct
  misc_feature 1..20: note = Description of Artificial Sequence: Synthetic oligonucleotide
  misc_feature 1..20: note = Target: FXN; (-) strand; PAM type: YTN; PAM sequence: CTC
  source 1..20: mol_type = other DNA
tactaaaaacacaaaaatta

SEQ ID NO: 24158 - DNA, 20 bp, synthetic construct
  misc_feature 1..20: note = Description of Artificial Sequence: Synthetic oligonucleotide
  misc_feature 1..20: note = Target: FXN; (-) strand; PAM type: YTN; PAM sequence: CTG
  source 1..20: mol_type = other DNA
gccaacatggtgaaaccccg

SEQ ID NO: 24159 - DNA, 20 bp, synthetic construct
  misc_feature 1..20: note = Description of Artificial Sequence: Synthetic oligonucleotide
  misc_feature 1..20: note = Target: FXN; (-) strand; PAM type: YTN; PAM sequence: CTA
  source 1..20: mol_type = other DNA
gcctggccaacatggtgaaa

SEQ ID NO: 24160 - DNA, 20 bp, synthetic construct
  misc_feature 1..20: note = Description of Artificial Sequence: Synthetic oligonucleotide
  misc_feature 1..20: note = Target: FXN; (-) strand; PAM type: YTN; PAM sequence: TTC
  source 1..20: mol_type = other DNA
aagactagcctggccaacat

SEQ ID NO: 24161 - DNA, 20 bp, synthetic construct
  misc_feature 1..20: note = Description of Artificial Sequence: Synthetic oligonucleotide
  misc_feature 1..20: note = Target: FXN; (-) strand; PAM type: YTN; PAM sequence: CTG
  source 1..20: mol_type = other DNA
aggtcaggagttcaagacta

SEQ ID NO: 24162 - DNA, 20 bp, synthetic construct
  misc_feature 1..20: note = Description of Artificial Sequence: Synthetic oligonucleotide
  misc_feature 1..20: note = Target: FXN; (-) strand; PAM type: YTN; PAM sequence: TTG
  source 1..20: mol_type = other DNA
ggaggcggaggcgggtggat

SEQ ID NO: 24163 - DNA, 20 bp, synthetic construct
  misc_feature 1..20: note = Description of Artificial Sequence: Synthetic oligonucleotide
  misc_feature 1..20: note = Target: FXN; (-) strand; PAM type: YTN; PAM sequence: TTT
  source 1..20: mol_type = other DNA
gggaggcggaggcgggtgga

SEQ ID NO: 24164 - DNA, 20 bp, synthetic construct
  misc_feature 1..20: note = Description of Artificial Sequence: Synthetic oligonucleotide
  misc_feature 1..20: note = Target: FXN; (-) strand; PAM type: YTN; PAM sequence: CTG
  source 1..20: mol_type = other DNA
cagtttgggaggcggaggcg

SEQ ID NO: 24165 - DNA, 20 bp, synthetic construct
  misc_feature 1..20: note = Description of Artificial Sequence: Synthetic oligonucleotide
  misc_feature 1..20: note = Target: FXN; (-) strand; PAM type: YTN; PAM sequence: CTC
  source 1..20: mol_type = other DNA
tgcagtttgggaggcggagg

SEQ ID NO: 24166 - DNA, 20 bp, synthetic construct
  misc_feature 1..20: note = Description of Artificial Sequence: Synthetic oligonucleotide
  misc_feature 1..20: note = Target: FXN; (-) strand; PAM type: YTN; PAM sequence: CTA
  source 1..20: mol_type = other DNA
taatctctgcagtttgggag

SEQ ID NO: 24167 - DNA, 20 bp, synthetic construct
  misc_feature 1..20: note = Description of Artificial Sequence: Synthetic oligonucleotide
  misc_feature 1..20: note = Target: FXN; (-) strand; PAM type: YTN; PAM sequence: TTC
  source 1..20: mol_type = other DNA
gtgcctataatctctgcagt

SEQ ID NO: 24168 - DNA, 20 bp, synthetic construct
  misc_feature 1..20: note = Description of Artificial Sequence: Synthetic oligonucleotide
  misc_feature 1..20: note = Target: FXN; (-) strand; PAM type: YTN; PAM sequence: TTG
  source 1..20: mol_type = other DNA
tggttcgtgcctataatctc

SEQ ID NO: 24169 - DNA, 20 bp, synthetic construct
  misc_feature 1..20: note = Description of Artificial Sequence: Synthetic oligonucleotide
  misc_feature 1..20: note = Target: FXN; (-) strand; PAM type: YTN; PAM sequence: TTG
  source 1..20: mol_type = other DNA
aaaaataaaaaacatgaggc

SEQ ID NO: 24170 - DNA, 20 bp, synthetic construct
  misc_feature 1..20: note = Description of Artificial Sequence: Synthetic oligonucleotide
  misc_feature 1..20: note = Target: FXN; (-) strand; PAM type: YTN; PAM sequence: CTT
  source 1..20: mol_type = other DNA
gaaaaataaaaaacatgagg

SEQ ID NO: 24171 - DNA, 20 bp, synthetic construct
  misc_feature 1..20: note = Description of Artificial Sequence: Synthetic oligonucleotide
  misc_feature 1..20: note = Target: FXN; (-) strand; PAM type: YTN; PAM sequence: TTC
  source 1..20: mol_type = other DNA
aacttgaaaaataaaaaaca

SEQ ID NO: 24172 - DNA, 20 bp, synthetic construct
  misc_feature 1..20: note = Description of Artificial Sequence: Synthetic oligonucleotide
  misc_feature 1..20: note = Target: FXN; (-) strand; PAM type: YTN; PAM sequence: TTT
  source 1..20: mol_type = other DNA
caacttgaaaaataaaaaac

SEQ ID NO: 24173 - DNA, 20 bp, synthetic construct
  misc_feature 1..20: note = Description of Artificial Sequence: Synthetic oligonucleotide
  misc_feature 1..20: note = Target: FXN; (-) strand; PAM type: YTN; PAM sequence: CTC
  source 1..20: mol_type = other DNA
atttcaacttgaaaaataaa

SEQ ID NO: 24174 - DNA, 20 bp, synthetic construct
  misc_feature 1..20: note = Description of Artificial Sequence: Synthetic oligonucleotide
  misc_feature 1..20: note = Target: FXN; (-) strand; PAM type: YTN; PAM sequence: CTG
  source 1..20: mol_type = other DNA
ggcaacatagagagacctca

SEQ ID NO: 24175 - DNA, 20 bp, synthetic construct
  misc_feature 1..20: note = Description of Artificial Sequence: Synthetic oligonucleotide
  misc_feature 1..20: note = Target: FXN; (-) strand; PAM type: YTN; PAM sequence: TTG
  source 1..20: mol_type = other DNA
agaccaacctgggcaacata

SEQ ID NO: 24176 - DNA, 20 bp, synthetic construct
  misc_feature 1..20: note = Description of Artificial Sequence: Synthetic oligonucleotide
  misc_feature 1..20: note = Target: FXN; (-) strand; PAM type: YTN; PAM sequence: TTT
  source 1..20: mol_type = other DNA
gagaccaacctgggcaacat

SEQ ID NO: 24177 - DNA, 20 bp, synthetic construct
  misc_feature 1..20: note = Description of Artificial Sequence: Synthetic oligonucleotide
  misc_feature 1..20: note = Target: FXN; (-) strand; PAM type: YTN; PAM sequence: CTC
  source 1..20: mol_type = other DNA
aagagtttgagaccaacctg

SEQ ID NO: 24178 - DNA, 20 bp, synthetic construct
  misc_feature 1..20: note = Description of Artificial Sequence: Synthetic oligonucleotide
  misc_feature 1..20: note = Target: FXN; (-) strand; PAM type: YTN; PAM sequence: TTG
  source 1..20: mol_type = other DNA
agctcaagagtttgagacca

SEQ ID NO: 24179 - DNA, 20 bp, synthetic construct
  misc_feature 1..20: note = Description of Artificial Sequence: Synthetic oligonucleotide
  misc_feature 1..20: note = Target: FXN; (-) strand; PAM type: YTN; PAM sequence: CTT
  source 1..20: mol_type = other DNA
gagctcaagagtttgagacc

SEQ ID NO: 24180 - DNA, 20 bp, synthetic construct
  misc_feature 1..20: note = Description of Artificial Sequence: Synthetic oligonucleotide
  misc_feature 1..20: note = Target: FXN; (-) strand; PAM type: YTN; PAM sequence: TTA
  source 1..20: mol_type = other DNA
cttgagctcaagagtttgag

SEQ ID NO: 24181 - DNA, 20 bp, synthetic construct
  misc_feature 1..20: note = Description of Artificial Sequence: Synthetic oligonucleotide
  misc_feature 1..20: note = Target: FXN; (-) strand; PAM type: YTN; PAM sequence: TTG
  source 1..20: mol_type = other DNA
ggaggccaaggtgggaggat

SEQ ID NO: 24182 - DNA, 20 bp, synthetic construct
  misc_feature 1..20: note = Description of Artificial Sequence: Synthetic oligonucleotide
  misc_feature 1..20: note = Target: FXN; (-) strand; PAM type: YTN; PAM sequence: TTT
  source 1..20: mol_type = other DNA
gggaggccaaggtgggagga

SEQ ID NO: 24183 - DNA, 20 bp, synthetic construct
  misc_feature 1..20: note = Description of Artificial Sequence: Synthetic oligonucleotide
  misc_feature 1..20: note = Target: FXN; (-) strand; PAM type: YTN; PAM sequence: CTT
  source 1..20: mol_type = other DNA
tgggaggccaaggtgggagg

SEQ ID NO: 24184 - DNA, 20 bp, synthetic construct
  misc_feature 1..20: note = Description of Artificial Sequence: Synthetic oligonucleotide
  misc_feature 1..20: note = Target: FXN; (-) strand; PAM type: YTN; PAM sequence: CTG
  source 1..20: mol_type = other DNA
taatccccgcactttgggag

SEQ ID NO: 24185 - DNA, 20 bp, synthetic construct
  misc_feature 1..20: note = Description of Artificial Sequence: Synthetic oligonucleotide
  misc_feature 1..20: note = Target: FXN; (-) strand; PAM type: YTN; PAM sequence: CTC
  source 1..20: mol_type = other DNA
acacctgtaatccccgcact

SEQ ID NO: 24186 - DNA, 20 bp, synthetic construct
  misc_feature 1..20: note = Description of Artificial Sequence: Synthetic oligonucleotide
  misc_feature 1..20: note = Target: FXN; (-) strand; PAM type: YTN; PAM sequence: CTG
  source 1..20: mol_type = other DNA
ggcatggtagctcacacctg

SEQ ID NO: 24187 - DNA, 20 bp, synthetic construct
  misc_feature 1..20: note = Description of Artificial Sequence: Synthetic oligonucleotide
  misc_feature 1..20: note = Target: FXN; (-) strand; PAM type: YTN; PAM sequence: TTG
  source 1..20: mol_type = other DNA
gctgggcatggtagctcaca

SEQ ID NO: 24188 - DNA, 20 bp, synthetic construct
  misc_feature 1..20: note = Description of Artificial Sequence: Synthetic oligonucleotide
  misc_feature 1..20: note = Target: FXN; (-) strand; PAM type: YTN; PAM sequence: CTT
  source 1..20: mol_type = other DNA
ggctgggcatggtagctcac

SEQ ID NO: 24189 - DNA, 20 bp, synthetic construct
  misc_feature 1..20: note = Description of Artificial Sequence: Synthetic oligonucleotide
  misc_feature 1..20: note = Target: FXN; (-) strand; PAM type: YTN; PAM sequence: CTG
  source 1..20: mol_type = other DNA
atcttggctgggcatggtag

SEQ ID NO: 24190 - DNA, 20 bp, synthetic construct
  misc_feature 1..20: note = Description of Artificial Sequence: Synthetic oligonucleotide
  misc_feature 1..20: note = Target: FXN; (-) strand; PAM type: YTN; PAM sequence: TTA
  source 1..20: mol_type = other DNA
acactgatcttggctgggca

SEQ ID NO: 24191 - DNA, 20 bp, synthetic construct
  misc_feature 1..20: note = Description of Artificial Sequence: Synthetic oligonucleotide
  misc_feature 1..20: note = Target: FXN; (-) strand; PAM type: YTN; PAM sequence: TTC
  source 1..20: mol_type = other DNA
attaacactgatcttggctg

SEQ ID NO: 24192 - DNA, 20 bp, synthetic construct
  misc_feature 1..20: note = Description of Artificial Sequence: Synthetic oligonucleotide
  misc_feature 1..20: note = Target: FXN; (-) strand; PAM type: YTN; PAM sequence: TTG
  source 1..20: mol_type = other DNA
attcattaacactgatcttg

SEQ ID NO: 24193 - DNA, 20 bp, synthetic construct
  misc_feature 1..20: note = Description of Artificial Sequence: Synthetic oligonucleotide
  misc_feature 1..20: note = Target: FXN; (-) strand; PAM type: YTN; PAM sequence: TTA
  source 1..20: mol_type = other DNA
tgtaatatatatagttgatt

SEQ ID NO: 24194 - DNA, 20 bp, synthetic construct
  misc_feature 1..20: note = Description of Artificial Sequence: Synthetic oligonucleotide
  misc_feature 1..20: note = Target: FXN; (-) strand; PAM type: YTN; PAM sequence: CTT
  source 1..20: mol_type = other DNA
atgtaatatatatagttgat

SEQ ID NO: 24195 - DNA, 20 bp, synthetic construct
  misc_feature 1..20: note = Description of Artificial Sequence: Synthetic oligonucleotide
  misc_feature 1..20: note = Target: FXN; (-) strand; PAM type: YTN; PAM sequence: TTA
  source 1..20: mol_type = other DNA
aagacaccttatgtaatata

SEQ ID NO: 24196 - DNA, 20 bp, synthetic construct
  misc_feature 1..20: note = Description of Artificial Sequence: Synthetic oligonucleotide
  misc_feature 1..20: note = Target: FXN; (-) strand; PAM type: YTN; PAM sequence: TTT
  source 1..20: mol_type = other DNA
aaagacaccttatgtaatat

SEQ ID NO: 24197 - DNA, 20 bp, synthetic construct
  misc_feature 1..20: note = Description of Artificial Sequence: Synthetic oligonucleotide
  misc_feature 1..20: note = Target: FXN; (-) strand; PAM type: YTN; PAM sequence: CTG
  source 1..20: mol_type = other DNA
tttaaagacaccttatgtaa

SEQ ID NO: 24198 - DNA, 20 bp, synthetic construct
  misc_feature 1..20: note = Description of Artificial Sequence: Synthetic oligonucleotide
  misc_feature 1..20: note = Target: FXN; (-) strand; PAM type: YTN; PAM sequence: TTC
  source 1..20: mol_type = other DNA
tgtttaaagacaccttatgt

SEQ ID NO: 24199 - DNA, 20 bp, synthetic construct
  misc_feature 1..20: note = Description of Artificial Sequence: Synthetic oligonucleotide
  misc_feature 1..20: note = Target: FXN; (-) strand; PAM type: YTN; PAM sequence: TTT
  source 1..20: mol_type = other DNA
ctgtttaaagacaccttatg

SEQ ID NO: 24200 - DNA, 20 bp, synthetic construct
  misc_feature 1..20: note = Description of Artificial Sequence: Synthetic oligonucleotide
  misc_feature 1..20: note = Target: FXN; (-) strand; PAM type: YTN; PAM sequence: TTA
  source 1..20: mol_type = other DNA
tttctgtttaaagacacctt

SEQ ID NO: 24201 - DNA, 20 bp, synthetic construct
  misc_feature 1..20: note = Description of Artificial Sequence: Synthetic oligonucleotide
  misc_feature 1..20: note = Target: FXN; (-) strand; PAM type: YTN; PAM sequence: CTT
  source 1..20: mol_type = other DNA
atttctgtttaaagacacct

SEQ ID NO: 24202 - DNA, 20 bp, synthetic construct
  misc_feature 1..20: note = Description of Artificial Sequence: Synthetic oligonucleotide
  misc_feature 1..20: note = Target: FXN; (-) strand; PAM type: YTN; PAM sequence: TTA
  source 1..20: mol_type = other DNA
ccaatcgatcaatatataac

SEQ ID NO: 24203 - DNA, 20 bp, synthetic construct
  misc_feature 1..20: note = Description of Artificial Sequence: Synthetic oligonucleotide
  misc_feature 1..20: note = Target: FXN; (-) strand; PAM type: YTN; PAM sequence: TTG
  source 1..20: mol_type = other DNA
ttaccaatcgatcaatatat

SEQ ID NO: 24204 - DNA, 20 bp, synthetic construct
  misc_feature 1..20: note = Description of Artificial Sequence: Synthetic oligonucleotide
  misc_feature 1..20: note = Target: FXN; (-) strand; PAM type: YTN; PAM sequence: CTG
  source 1..20: mol_type = other DNA
gtcacaacattgttaccaat

SEQ ID NO: 24205 - DNA, 20 bp, synthetic construct
  misc_feature 1..20: note = Description of Artificial Sequence: Synthetic oligonucleotide
  misc_feature 1..20: note = Target: FXN; (-) strand; PAM type: YTN; PAM sequence: CTG
  source 1..20: mol_type = other DNA
ctggtcacaacattgttacc

SEQ ID NO: 24206 - DNA, 20 bp, synthetic construct
  misc_feature 1..20: note = Description of Artificial Sequence: Synthetic oligonucleotide
  misc_feature 1..20: note = Target: FXN; (-) strand; PAM type: YTN; PAM sequence: CTG
  source 1..20: mol_type = other DNA
taagctgctggtcacaacat

SEQ ID NO: 24207 - DNA, 20 bp, synthetic construct
  misc_feature 1..20: note = Description of Artificial Sequence: Synthetic oligonucleotide
  misc_feature 1..20: note = Target: FXN; (-) strand; PAM type: YTN; PAM sequence: CTA
  source 1..20: mol_type = other DNA
ggtaccctgtaagctgctgg

SEQ ID NO: 24208 - DNA, 20 bp, synthetic construct
  misc_feature 1..20: note = Description of Artificial Sequence: Synthetic oligonucleotide
  misc_feature 1..20: note = Target: FXN; (-) strand; PAM type: YTN; PAM sequence: TTA
  source 1..20: mol_type = other DNA
taggagaaatacaaggctag

SEQ ID NO: 24209 - DNA, 20 bp, synthetic construct
  misc_feature 1..20: note = Description of Artificial Sequence: Synthetic oligonucleotide
  misc_feature 1..20: note = Target: FXN; (-) strand; PAM type: YTN; PAM sequence: TTT
  source 1..20: mol_type = other DNA
ataggagaaatacaaggcta

SEQ ID NO: 24210 - DNA, 20 bp, synthetic construct
  misc_feature 1..20: note = Description of Artificial Sequence: Synthetic oligonucleotide
  misc_feature 1..20: note = Target: FXN; (-) strand; PAM type: YTN; PAM sequence: TTA
  source 1..20: mol_type = other DNA
tttataggagaaatacaagg

SEQ ID NO: 24211 - DNA, 20 bp, synthetic construct
  misc_feature 1..20: note = Description of Artificial Sequence: Synthetic oligonucleotide
  misc_feature 1..20: note = Target: FXN; (-) strand; PAM type: YTN; PAM sequence: CTC
  source 1..20: mol_type = other DNA
aacgagcaaattatttatag

SEQ ID NO: 24212 - DNA, 20 bp, synthetic construct
  misc_feature 1..20: note = Description of Artificial Sequence: Synthetic oligonucleotide
  misc_feature 1..20: note = Target: FXN; (-) strand; PAM type: YTN; PAM sequence: TTG
  source 1..20: mol_type = other DNA
ccacaaacactcaacgagca

SEQ ID NO: 24213 - DNA, 20 bp, synthetic construct
  misc_feature 1..20: note = Description of Artificial Sequence: Synthetic oligonucleotide
  misc_feature 1..20: note = Target: FXN; (-) strand; PAM type: YTN; PAM sequence: CTA
  source 1..20: mol_type = other DNA
caaagttgccacaaacactc

SEQ ID NO: 24214 - DNA, 20 bp, synthetic construct
  misc_feature 1..20: note = Description of Artificial Sequence: Synthetic oligonucleotide
  misc_feature 1..20: note = Target: FXN; (-) strand; PAM type: YTN; PAM sequence: TTA
  source 1..20: mol_type = other DNA
tgtgctacaaagttgccaca

SEQ ID NO: 24215 - DNA, 20 bp, synthetic construct
  misc_feature 1..20: note = Description of Artificial Sequence: Synthetic oligonucleotide
  misc_feature 1..20: note = Target: FXN; (-) strand; PAM type: YTN; PAM sequence: TTG
  source 1..20: mol_type = other DNA
gtagttatgtgctacaaagt

SEQ ID NO: 24216 - DNA, 20 bp, synthetic construct
  misc_feature 1..20: note = Description of Artificial Sequence: Synthetic oligonucleotide
  misc_feature 1..20: note = Target: FXN; (-) strand; PAM type: YTN; PAM sequence: CTT
  source 1..20: mol_type = other DNA
ggtagttatgtgctacaaag

SEQ ID NO: 24217 - DNA, 20 bp, synthetic construct
  misc_feature 1..20: note = Description of Artificial Sequence: Synthetic oligonucleotide
  misc_feature 1..20: note = Target: FXN; (-) strand; PAM type: YTN; PAM sequence: TTC
  source 1..20: mol_type = other DNA
ttggtagttatgtgctacaa

SEQ ID NO: 24218 - DNA, 20 bp, synthetic construct
  misc_feature 1..20: note = Description of Artificial Sequence: Synthetic oligonucleotide
  misc_feature 1..20: note = Target: FXN; (-) strand; PAM type: YTN; PAM sequence: TTA
  source 1..20: mol_type = other DNA
ttcttggtagttatgtgcta

SEQ ID NO: 24219 - DNA, 20 bp, synthetic construct
  misc_feature 1..20: note = Description of Artificial Sequence: Synthetic oligonucleotide
  misc_feature 1..20: note = Target: FXN; (-) strand; PAM type: YTN; PAM sequence: CTT
  source 1..20: mol_type = other DNA
attcttggtagttatgtgct

SEQ ID NO: 24220 - DNA, 20 bp, synthetic construct
  misc_feature 1..20: note = Description of Artificial Sequence: Synthetic oligonucleotide
  misc_feature 1..20: note = Target: FXN; (-) strand; PAM type: YTN; PAM sequence: TTA
  source 1..20: mol_type = other DNA
cagtccttattcttggtagt

SEQ ID NO: 24221 - DNA, 20 bp, synthetic construct
  misc_feature 1..20: note = Description of Artificial Sequence: Synthetic oligonucleotide
  misc_feature 1..20: note = Target: FXN; (-) strand; PAM type: YTN; PAM sequence: TTA
  source 1..20: mol_type = other DNA
ttacagtccttattcttggt

SEQ ID NO: 24222 - DNA, 20 bp, synthetic construct
  misc_feature 1..20: note = Description of Artificial Sequence: Synthetic oligonucleotide
  misc_feature 1..20: note = Target: FXN; (-) strand; PAM type: YTN; PAM sequence: CTT
  source 1..20: mol_type = other DNA
attacagtccttattcttgg

SEQ ID NO: 24223 - DNA, 20 bp, synthetic construct
  misc_feature 1..20: note = Description of Artificial Sequence: Synthetic oligonucleotide
  misc_feature 1..20: note = Target: FXN; (-) strand; PAM type: YTN; PAM sequence: CTC
  source 1..20: mol_type = other DNA
ttattacagtccttattctt

SEQ ID NO: 24224 - DNA, 20 bp, synthetic construct
  misc_feature 1..20: note = Description of Artificial Sequence: Synthetic oligonucleotide
  misc_feature 1..20: note = Target: FXN; (-) strand; PAM type: YTN; PAM sequence: CTG
  source 1..20: mol_type = other DNA
tgagggacgtactcttatta

SEQ ID NO: 24225 - DNA, 20 bp, synthetic construct
  misc_feature 1..20: note = Description of Artificial Sequence: Synthetic oligonucleotide
  misc_feature 1..20: note = Target: FXN; (-) strand; PAM type: YTN; PAM sequence: TTA
  source 1..20: mol_type = other DNA
caatcctgtgagggacgtac

SEQ ID NO: 24226 - DNA, 20 bp, synthetic construct
  misc_feature 1..20: note = Description of Artificial Sequence: Synthetic oligonucleotide
  misc_feature 1..20: note = Target: FXN; (-) strand; PAM type: YTN; PAM sequence: TTC
  source 1..20: mol_type = other DNA
attacaatcctgtgagggac

SEQ ID NO: 24227 - DNA, 20 bp, synthetic construct
  misc_feature 1..20: note = Description of Artificial Sequence: Synthetic oligonucleotide
  misc_feature 1..20: note = Target: FXN; (-) strand; PAM type: YTN; PAM sequence: CTT
  source 1..20: mol_type = other DNA
cattacaatcctgtgaggga

SEQ ID NO: 24228 - DNA, 20 bp, synthetic construct
  misc_feature 1..20: note = Description of Artificial Sequence: Synthetic oligonucleotide
  misc_feature 1..20: note = Target: FXN; (-) strand; PAM type: YTN; PAM sequence: CTC
  source 1..20: mol_type = other DNA
agtcttcattacaatcctgt

SEQ ID NO: 24229 - DNA, 20 bp, synthetic construct
  misc_feature 1..20: note = Description of Artificial Sequence: Synthetic oligonucleotide
  misc_feature 1..20: note = Target: FXN; (-) strand; PAM type: YTN; PAM sequence: TTA
  source 1..20: mol_type = other DNA
tgtaaatggactcagtcttc

SEQ ID NO: 24230 - DNA, 20 bp, synthetic construct
  misc_feature 1..20: note = Description of Artificial Sequence: Synthetic oligonucleotide
  misc_feature 1..20: note = Target: FXN; (-) strand; PAM type: YTN; PAM sequence: TTT
  source 1..20: mol_type = other DNA
atgtaaatggactcagtctt

SEQ ID NO: 24231 - DNA, 20 bp, synthetic construct
  misc_feature 1..20: note = Description of Artificial Sequence: Synthetic oligonucleotide
  misc_feature 1..20: note = Target: FXN; (-) strand; PAM type: YTN; PAM sequence: CTT
  source 1..20: mol_type = other DNA
tatgtaaatggactcagtct

SEQ ID NO: 24232 - DNA, 20 bp, synthetic construct
  misc_feature 1..20: note = Description of Artificial Sequence: Synthetic oligonucleotide
  misc_feature 1..20: note = Target: FXN; (-) strand; PAM type: YTN; PAM sequence: CTC
  source 1..20: mol_type = other DNA
agcctttatgtaaatggact

SEQ ID NO: 24233 - DNA, 20 bp, synthetic construct
  misc_feature 1..20: note = Description of Artificial Sequence: Synthetic oligonucleotide
  misc_feature 1..20: note = Target: FXN; (-) strand; PAM type: YTN; PAM sequence: CTC
  source 1..20: mol_type = other DNA
tcagcctttatgtaaatgga

SEQ ID NO: 24234 - DNA, 20 bp, synthetic construct
  misc_feature 1..20: note = Description of Artificial Sequence: Synthetic oligonucleotide
  misc_feature 1..20: note = Target: FXN; (-) strand; PAM type: YTN; PAM sequence: CTG
  source 1..20: mol_type = other DNA
ctctcagcctttatgtaaat

SEQ ID NO: 24235 - DNA, 20 bp, synthetic construct
  misc_feature 1..20: note = Description of Artificial Sequence: Synthetic oligonucleotide
  misc_feature 1..20: note = Target: FXN; (-) strand; PAM type: YTN; PAM sequence: TTG
  source 1..20: mol_type = other DNA
acactgctctcagcctttat

SEQ ID NO: 24236 - DNA, 20 bp, synthetic construct
  misc_feature 1..20: note = Description of Artificial Sequence: Synthetic oligonucleotide
  misc_feature 1..20: note = Target: FXN; (-) strand; PAM type: YTN; PAM sequence: CTT
  source 1..20: mol_type = other DNA
gacactgctctcagccttta

SEQ ID NO: 24237 - DNA, 20 bp, synthetic construct
  misc_feature 1..20: note = Description of Artificial Sequence: Synthetic oligonucleotide
  misc_feature 1..20: note = Target: FXN; (-) strand; PAM type: YTN; PAM sequence: CTG
  source 1..20: mol_type = other DNA
cttgacactgctctcagcct

SEQ ID NO: 24238 - DNA, 20 bp, synthetic construct
  misc_feature 1..20: note = Description of Artificial Sequence: Synthetic oligonucleotide
  misc_feature 1..20: note = Target: FXN; (-) strand; PAM type: YTN; PAM sequence: CTC
  source 1..20: mol_type = other DNA
catctgcttgacactgctct

SEQ ID NO: 24239 - DNA, 20 bp, synthetic construct
  misc_feature 1..20: note = Description of Artificial Sequence: Synthetic oligonucleotide
  misc_feature 1..20: note = Target: FXN; (-) strand; PAM type: YTN; PAM sequence: TTC
  source 1..20: mol_type = other DNA
tccatctgcttgacactgct

SEQ ID NO: 24240 - DNA, 20 bp, synthetic construct
  misc_feature 1..20: note = Description of Artificial Sequence: Synthetic oligonucleotide
  misc_feature 1..20: note = Target: FXN; (-) strand; PAM type: YTN; PAM sequence: CTA
  source 1..20: mol_type = other DNA
cagtgttctccatctgcttg

SEQ ID NO: 24241 - DNA, 20 bp, synthetic construct
  misc_feature 1..20: note = Description of Artificial Sequence: Synthetic oligonucleotide
  misc_feature 1..20: note = Target: FXN; (-) strand; PAM type: YTN; PAM sequence: TTC
  source 1..20: mol_type = other DNA
tacagtgttctccatctgct

SEQ ID NO: 24242 - DNA, 20 bp, synthetic construct
  misc_feature 1..20: note = Description of Artificial Sequence: Synthetic oligonucleotide
  misc_feature 1..20: note = Target: FXN; (-) strand; PAM type: YTN; PAM sequence: CTA
  source 1..20: mol_type = other DNA
tcgcacattctacagtgttc

SEQ ID NO: 24243 - DNA, 20 bp, synthetic construct
  misc_feature 1..20: note = Description of Artificial Sequence: Synthetic oligonucleotide
  misc_feature 1..20: note = Target: FXN; (-) strand; PAM type: YTN; PAM sequence: TTA
  source 1..20: mol_type = other DNA
gagctatcgcacattctaca

SEQ ID NO: 24244 - DNA, 20 bp, synthetic construct
  misc_feature 1..20: note = Description of Artificial Sequence: Synthetic oligonucleotide
  misc_feature 1..20: note = Target: FXN; (-) strand; PAM type: YTN; PAM sequence: CTG
  source 1..20: mol_type = other DNA
ttagagctatcgcacattct

SEQ ID NO: 24245 - DNA, 20 bp, synthetic construct
  misc_feature 1..20: note = Description of Artificial Sequence: Synthetic oligonucleotide
  misc_feature 1..20: note = Target: FXN; (-) strand; PAM type: YTN; PAM sequence: CTG
  source 1..20: mol_type = other DNA
aagaagtgagagggcagcca

SEQ ID NO: 24246 - DNA, 20 bp, synthetic construct
  misc_feature 1..20: note = Description of Artificial Sequence: Synthetic oligonucleotide
  misc_feature 1..20: note = Target: FXN; (-) strand; PAM type: YTN; PAM sequence: CTC
  source 1..20: mol_type = other DNA
tgaagaagtgagagggcagc

SEQ ID NO: 24247 - DNA, 20 bp, synthetic construct
  misc_feature 1..20: note = Description of Artificial Sequence: Synthetic oligonucleotide
  misc_feature 1..20: note = Target: FXN; (-) strand; PAM type: YTN; PAM sequence: TTA
  source 1..20: mol_type = other DNA
gaaacacatgtctctgaaga

SEQ ID NO: 24248 - DNA, 20 bp, synthetic construct
  misc_feature 1..20: note = Description of Artificial Sequence: Synthetic oligonucleotide
  misc_feature 1..20: note = Target: FXN; (-) strand; PAM type: YTN; PAM sequence: CTT
  source 1..20: mol_type = other DNA
agaaacacatgtctctgaag

SEQ ID NO: 24249 - DNA, 20 bp, synthetic construct
  misc_feature 1..20: note = Description of Artificial Sequence: Synthetic oligonucleotide
  misc_feature 1..20: note = Target: FXN; (-) strand; PAM type: YTN; PAM sequence: CTG
  source 1..20: mol_type = other DNA
ggggacagtggatggggagg

SEQ ID NO: 24250 - DNA, 20 bp, synthetic construct
  misc_feature 1..20: note = Description of Artificial Sequence: Synthetic oligonucleotide
  misc_feature 1..20: note = Target: FXN; (-) strand; PAM type: YTN; PAM sequence: CTG
  source 1..20: mol_type = other DNA
ggaagtaagtggaggaggaa

SEQ ID NO: 24251 - DNA, 20 bp, synthetic construct
  misc_feature 1..20: note = Description of Artificial Sequence: Synthetic oligonucleotide
  misc_feature 1..20: note = Target: FXN; (-) strand; PAM type: YTN; PAM sequence: CTC
  source 1..20: mol_type = other DNA
agaaaagagaaggcagaagg

SEQ ID NO: 24252 - DNA, 20 bp, synthetic construct
  misc_feature 1..20: note = Description of Artificial Sequence: Synthetic oligonucleotide
  misc_feature 1..20: note = Target: FXN; (-) strand; PAM type: YTN; PAM sequence: TTA
  source 1..20: mol_type = other DNA
gcaaactcagaaaagagaag

SEQ ID NO: 24253 - DNA, 20 bp, synthetic construct
  misc_feature 1..20: note = Description of Artificial Sequence: Synthetic oligonucleotide
  misc_feature 1..20: note = Target: FXN; (-) strand; PAM type: YTN; PAM sequence: CTT
  source 1..20: mol_type = other DNA
agcaaactcagaaaagagaa

SEQ ID NO: 24254 - DNA, 20 bp, synthetic construct
  misc_feature 1..20: note = Description of Artificial Sequence: Synthetic oligonucleotide
  misc_feature 1..20: note = Target: FXN; (-) strand; PAM type: YTN; PAM sequence: TTG
  source 1..20: mol_type = other DNA
agccagcagtgcccttagca

SEQ ID NO: 24255 - DNA, 20 bp, synthetic construct
  misc_feature 1..20: note = Description of Artificial Sequence: Synthetic oligonucleotide
  misc_feature 1..20: note = Target: FXN; (-) strand; PAM type: YTN; PAM sequence: CTT
  source 1..20: mol_type = other DNA
gagccagcagtgcccttagc

SEQ ID NO: 24256 - DNA, 20 bp, synthetic construct
  misc_feature 1..20: note = Description of Artificial Sequence: Synthetic oligonucleotide
  misc_feature 1..20: note = Target: FXN; (-) strand; PAM type: YTN; PAM sequence: CTC
  source 1..20: mol_type = other DNA
ttgagccagcagtgccctta

SEQ ID NO: 24257 - DNA, 20 bp, synthetic construct
  misc_feature 1..20: note = Description of Artificial Sequence: Synthetic oligonucleotide
  misc_feature 1..20: note = Target: FXN; (-) strand; PAM type: YTN; PAM sequence: CTG
  source 1..20: mol_type = other DNA
ctcttgagccagcagtgccc

SEQ ID NO: 24258 - DNA, 20 bp, synthetic construct
  misc_feature 1..20: note = Description of Artificial Sequence: Synthetic oligonucleotide
  misc_feature 1..20: note = Target: FXN; (-) strand; PAM type: YTN; PAM sequence: TTA
  source 1..20: mol_type = other DNA
ctgctcttgagccagcagtg

SEQ ID NO: 24259 - DNA, 20 bp, synthetic construct
  misc_feature 1..20: note = Description of Artificial Sequence: Synthetic oligonucleotide
  misc_feature 1..20: note = Target: FXN; (-) strand; PAM type: YTN; PAM sequence: TTA
  source 1..20: mol_type = other DNA
gttactgctcttgagccagc

SEQ ID NO: 24260 - DNA, 20 bp, synthetic construct
  misc_feature 1..20: note = Description of Artificial Sequence: Synthetic oligonucleotide
  misc_feature 1..20: note = Target: FXN; (-) strand; PAM type: YTN; PAM sequence: CTG
  source 1..20: mol_type = other DNA
ttagttactgctcttgagcc

SEQ ID NO: 24261 - DNA, 20 bp, synthetic construct
  misc_feature 1..20: note = Description of Artificial Sequence: Synthetic oligonucleotide
  misc_feature 1..20: note = Target: FXN; (-) strand; PAM type: YTN; PAM sequence: TTG
  source 1..20: mol_type = other DNA
ccatggagagaagaggcgag

SEQ ID NO: 24262 - DNA, 20 bp, synthetic construct
  misc_feature 1..20: note = Description of Artificial Sequence: Synthetic oligonucleotide
  misc_feature 1..20: note = Target: FXN; (-) strand; PAM type: YTN; PAM sequence: CTG
  source 1..20: mol_type = other DNA
gttgccatggagagaagagg

SEQ ID NO: 24263 - DNA, 20 bp, synthetic construct
  misc_feature 1..20: note = Description of Artificial Sequence: Synthetic oligonucleotide
  misc_feature 1..20: note = Target: FXN; (-) strand; PAM type: YTN; PAM sequence: CTC
  source 1..20: mol_type = other DNA
caaaggtcactggttgccat

SEQ ID NO: 24264 - DNA, 20 bp, synthetic construct
  misc_feature 1..20: note = Description of Artificial Sequence: Synthetic oligonucleotide
  misc_feature 1..20: note = Target: FXN; (-) strand; PAM type: YTN; PAM sequence: TTC
  source 1..20: mol_type = other DNA
tccaaaggtcactggttgcc

SEQ ID NO: 24265 - DNA, 20 bp, synthetic construct
  misc_feature 1..20: note = Description of Artificial Sequence: Synthetic oligonucleotide
  misc_feature 1..20: note = Target: FXN; (-) strand; PAM type: YTN; PAM sequence: TTA
  source 1..20: mol_type = other DNA
cattctccaaaggtcactgg

SEQ ID NO: 24266 - DNA, 20 bp, synthetic construct
  misc_feature 1..20: note = Description of Artificial Sequence: Synthetic oligonucleotide
  misc_feature 1..20: note = Target: FXN; (-) strand; PAM type: YTN; PAM sequence: TTT
  source 1..20: mol_type = other DNA
acattctccaaaggtcactg

SEQ ID NO: 24267 - DNA, 20 bp, synthetic construct
  misc_feature 1..20: note = Description of Artificial Sequence: Synthetic oligonucleotide
  misc_feature 1..20: note = Target: FXN; (-) strand; PAM type: YTN; PAM sequence: TTG
  source 1..20: mol_type = other DNA
gtgataaggtttacattctc

SEQ ID NO: 24268 - DNA, 20 bp, synthetic construct
  misc_feature 1..20: note = Description of Artificial Sequence: Synthetic oligonucleotide
  misc_feature 1..20: note = Target: FXN; (-) strand; PAM type: YTN; PAM sequence: TTA
  source 1..20: mol_type = other DNA
agagattggtgataaggttt

SEQ ID NO: 24269 - DNA, 20 bp, synthetic construct
  misc_feature 1..20: note = Description of Artificial Sequence: Synthetic oligonucleotide
  misc_feature 1..20: note = Target: FXN; (-) strand; PAM type: YTN; PAM sequence: TTT
  source 1..20: mol_type = other DNA
aagagattggtgataaggtt

SEQ ID NO: 24270 - DNA, 20 bp, synthetic construct
  misc_feature 1..20: note = Description of Artificial Sequence: Synthetic oligonucleotide
  misc_feature 1..20: note = Target: FXN; (-) strand; PAM type: YTN; PAM sequence: CTT
  source 1..20: mol_type = other DNA
taagagattggtgataaggt

SEQ ID NO: 24271 - DNA, 20 bp, synthetic construct
  misc_feature 1..20: note = Description of Artificial Sequence: Synthetic oligonucleotide
  misc_feature 1..20: note = Target: FXN; (-) strand; PAM type: YTN; PAM sequence: CTG
  source 1..20: mol_type = other DNA
ggaaggcaccgaagggcttt

SEQ ID NO: 24272 - DNA, 20 bp, synthetic construct
  misc_feature 1..20: note = Description of Artificial Sequence: Synthetic oligonucleotide
  misc_feature 1..20: note = Target: FXN; (-) strand; PAM type: YTN; PAM sequence: CTG
  source 1..20: mol_type = other DNA
gacgtcatcctgggaaggca

SEQ ID NO: 24273 - DNA, 20 bp, synthetic construct
  misc_feature 1..20: note = Description of Artificial Sequence: Synthetic oligonucleotide
  misc_feature 1..20: note = Target: FXN; (-) strand; PAM type: YTN; PAM sequence: CTC
  source 1..20: mol_type = other DNA
agctggacgtcatcctggga

SEQ ID NO: 24274 - DNA, 20 bp, synthetic construct
  misc_feature 1..20: note = Description of Artificial Sequence: Synthetic oligonucleotide
  misc_feature 1..20: note = Target: FXN; (-) strand; PAM type: YTN; PAM sequence: TTG
  source 1..20: mol_type = other DNA
ccaaggacctcagctggacg

SEQ ID NO: 24275 - DNA, 20 bp, synthetic construct
  misc_feature 1..20: note = Description of Artificial Sequence: Synthetic oligonucleotide
  misc_feature 1..20: note = Target: FXN; (-) strand; PAM type: YTN; PAM sequence: CTT
  source 1..20: mol_type = other DNA
gccaaggacctcagctggac

SEQ ID NO: 24276 - DNA, 20 bp, synthetic construct
  misc_feature 1..20: note = Description of Artificial Sequence: Synthetic oligonucleotide
  misc_feature 1..20: note = Target: FXN; (-) strand; PAM type: YTN; PAM sequence: CTG
  source 1..20: mol_type = other DNA
ggtcttgccaaggacctcag

SEQ ID NO: 24277 - DNA, 20 bp, synthetic construct
  misc_feature 1..20: note = Description of Artificial Sequence: Synthetic oligonucleotide
  misc_feature 1..20: note = Target: FXN; (-) strand; PAM type: YTN; PAM sequence: CTG
  source 1..20: mol_type = other DNA
gagtagggagatgcagggga

SEQ ID NO: 24278 - DNA, 20 bp, synthetic construct
  misc_feature 1..20: note = Description of Artificial Sequence: Synthetic oligonucleotide
  misc_feature 1..20: note = Target: FXN; (-) strand; PAM type: YTN; PAM sequence: CTG
  source 1..20: mol_type = other DNA
gggcacaagagtggtgcagc

SEQ ID NO: 24279 - DNA, 20 bp, synthetic construct
  misc_feature 1..20: note = Description of Artificial Sequence: Synthetic oligonucleotide
  misc_feature 1..20: note = Target: FXN; (-) strand; PAM type: YTN; PAM sequence: CTG
  source 1..20: mol_type = other DNA
gggagatgaaggaaataatc

SEQ ID NO: 24280 - DNA, 20 bp, synthetic construct
  misc_feature 1..20: note = Description of Artificial Sequence: Synthetic oligonucleotide
  misc_feature 1..20: note = Target: FXN; (-) strand; PAM type: YTN; PAM sequence: CTG
  source 1..20: mol_type = other DNA
accagctggggagatgaagg

SEQ ID NO: 24281 - DNA, 20 bp, synthetic construct
  misc_feature 1..20: note = Description of Artificial Sequence: Synthetic oligonucleotide
  misc_feature 1..20: note = Target: FXN; (-) strand; PAM type: YTN; PAM sequence: CTG
  source 1..20: mol_type = other DNA
ctgaccagctggggagatga

SEQ ID NO: 24282 - DNA, 20 bp, synthetic construct
  misc_feature 1..20: note = Description of Artificial Sequence: Synthetic oligonucleotide
  misc_feature 1..20: note = Target: FXN; (-) strand; PAM type: YTN; PAM sequence: CTC
  source 1..20: mol_type = other DNA
tgctgaccagctggggagat

SEQ ID NO: 24283 - DNA, 20 bp, synthetic construct
  misc_feature 1..20: note = Description of Artificial Sequence: Synthetic oligonucleotide
  misc_feature 1..20: note = Target: FXN; (-) strand; PAM type: YTN; PAM sequence: TTA
  source 1..20: mol_type = other DNA
ccaccagctctgctgaccag

SEQ ID NO: 24284 - DNA, 20 bp, synthetic construct
  misc_feature 1..20: note = Description of Artificial Sequence: Synthetic oligonucleotide
  misc_feature 1..20: note = Target: FXN; (-) strand; PAM type: YTN; PAM sequence: TTG
  source 1..20: mol_type = other DNA
attaccaccagctctgctga

SEQ ID NO: 24285 - DNA, 20 bp, synthetic construct
  misc_feature 1..20: note = Description of Artificial Sequence: Synthetic oligonucleotide
  misc_feature 1..20: note = Target: FXN; (-) strand; PAM type: YTN; PAM sequence: CTG
  source 1..20: mol_type = other DNA
agttgattaccaccagctct

SEQ ID NO: 24286 - DNA, 20 bp, synthetic construct
  misc_feature 1..20: note = Description of Artificial Sequence: Synthetic oligonucleotide
  misc_feature 1..20: note = Target: FXN; (-) strand; PAM type: YTN; PAM sequence: CTG
  source 1..20: mol_type = other DNA
gacatccaggtgacagggtc

SEQ ID NO: 24287 - DNA, 20 bp, synthetic construct
  misc_feature 1..20: note = Description of Artificial Sequence: Synthetic oligonucleotide
  misc_feature 1..20: note = Target: FXN; (-) strand; PAM type: YTN; PAM sequence: CTG
  source 1..20: mol_type = other DNA
ctggacatccaggtgacagg

SEQ ID NO: 24288 - DNA, 20 bp, synthetic construct
  misc_feature 1..20: note = Description of Artificial Sequence: Synthetic oligonucleotide
  misc_feature 1..20: note = Target: FXN; (-) strand; PAM type: YTN; PAM sequence: CTA
  source 1..20: mol_type = other DNA
actgctggacatccaggtga

SEQ ID NO: 24289 - DNA, 20 bp, synthetic construct
  misc_feature 1..20: note = Description of Artificial Sequence: Synthetic oligonucleotide
  misc_feature 1..20: note = Target: FXN; (-) strand; PAM type: YTN; PAM sequence: TTA
  source 1..20: mol_type = other DNA
gtccctaactgctggacatc

SEQ ID NO: 24290 - DNA, 20 bp, synthetic construct
  misc_feature 1..20: note = Description of Artificial Sequence: Synthetic oligonucleotide
  misc_feature 1..20: note = Target: FXN; (-) strand; PAM type: YTN; PAM sequence: TTT
  source 1..20: mol_type = other DNA
agtccctaactgctggacat

SEQ ID NO: 24291 - DNA, 20 bp, synthetic construct
  misc_feature 1..20: note = Description of Artificial Sequence: Synthetic oligonucleotide
  misc_feature 1..20: note = Target: FXN; (-) strand; PAM type: YTN; PAM sequence: TTT
  source 1..20: mol_type = other DNA
tagtccctaactgctggaca

SEQ ID NO: 24292 - DNA, 20 bp, synthetic construct
  misc_feature 1..20: note = Description of Artificial Sequence: Synthetic oligonucleotide
  misc_feature 1..20: note = Target: FXN; (-) strand; PAM type: YTN; PAM sequence: TTT
  source 1..20: mol_type = other DNA
ttagtccctaactgctggac

SEQ ID NO: 24293 - DNA, 20 bp, synthetic construct
  misc_feature 1..20: note = Description of Artificial Sequence: Synthetic oligonucleotide
  misc_feature 1..20: note = Target: FXN; (-) strand; PAM type: YTN; PAM sequence: TTT
  source 1..20: mol_type = other DNA
tttagtccctaactgctgga

SEQ ID NO: 24294 - DNA, 20 bp, synthetic construct
  misc_feature 1..20: note = Description of Artificial Sequence: Synthetic oligonucleotide
  misc_feature 1..20: note = Target: FXN; (-) strand; PAM type: YTN; PAM sequence: TTT
  source 1..20: mol_type = other DNA
ttttagtccctaactgctgg

SEQ ID NO: 24295 - DNA, 20 bp, synthetic construct
  misc_feature 1..20: note = Description of Artificial Sequence: Synthetic oligonucleotide
  misc_feature 1..20: note = Target: FXN; (-) strand; PAM type: YTN; PAM sequence: TTT
  source 1..20: mol_type = other DNA
tttttagtccctaactgctg

SEQ ID NO: 24296 - DNA, 20 bp, synthetic construct
  misc_feature 1..20: note = Description of Artificial Sequence: Synthetic oligonucleotide
  misc_feature 1..20: note = Target: FXN; (-) strand; PAM type: YTN; PAM sequence: TTG
  source 1..20: mol_type = other DNA
attttttttagtccctaact

SEQ ID NO: 24297 - DNA, 20 bp, synthetic construct
  misc_feature 1..20: note = Description of Artificial Sequence: Synthetic oligonucleotide
  misc_feature 1..20: note = Target: FXN; (-) strand; PAM type: YTN; PAM sequence: CTG
  source 1..20: mol_type = other DNA
ttgattttttttagtcccta

SEQ ID NO: 24298 - DNA, 20 bp, synthetic construct
  misc_feature 1..20: note = Description of Artificial Sequence: Synthetic oligonucleotide
  misc_feature 1..20: note = Target: FXN; (-) strand; PAM type: YTN; PAM sequence: CTG
  source 1..20: mol_type = other DNA
caggacagaatgtgacctgt

SEQ ID NO: 24299 - DNA, 20 bp, synthetic construct
  misc_feature 1..20: note = Description of Artificial Sequence: Synthetic oligonucleotide
  misc_feature 1..20: note = Target: FXN; (-) strand; PAM type: YTN; PAM sequence: TTA
  source 1..20: mol_type = other DNA
tcatgatctgcaggacagaa

SEQ ID NO: 24300 - DNA, 20 bp, synthetic construct
  misc_feature 1..20: note = Description of Artificial Sequence: Synthetic oligonucleotide
  misc_feature 1..20: note = Target: FXN; (-) strand; PAM type: YTN; PAM sequence: TTA
  source 1..20: mol_type = other DNA
ttatcatgatctgcaggaca

SEQ ID NO: 24301 - DNA, 20 bp, synthetic construct
  misc_feature 1..20: note = Description of Artificial Sequence: Synthetic oligonucleotide
  misc_feature 1..20: note = Target: FXN; (-) strand; PAM type: YTN; PAM sequence: CTT
  source 1..20: mol_type = other DNA
attatcatgatctgcaggac

SEQ ID NO: 24302 - DNA, 20 bp, synthetic construct
  misc_feature 1..20: note = Description of Artificial Sequence: Synthetic oligonucleotide
  misc_feature 1..20: note = Target: FXN; (-) strand; PAM type: YTN; PAM sequence: CTG
  source 1..20: mol_type = other DNA
acagatcttattatcatgat

SEQ ID NO: 24303 - DNA, 20 bp, synthetic construct
  misc_feature 1..20: note = Description of Artificial Sequence: Synthetic oligonucleotide
  misc_feature 1..20: note = Target: FXN; (-) strand; PAM type: YTN; PAM sequence: CTG
  source 1..20: mol_type = other DNA
tctgacagatcttattatca

SEQ ID NO: 24304 - DNA, 20 bp, synthetic construct
  misc_feature 1..20: note = Description of Artificial Sequence: Synthetic oligonucleotide
  misc_feature 1..20: note = Target: FXN; (-) strand; PAM type: YTN; PAM sequence: CTG
  source 1..20: mol_type = other DNA
ctgtctgacagatcttatta

SEQ ID NO: 24305 - DNA, 20 bp, synthetic construct
  misc_feature 1..20: note = Description of Artificial Sequence: Synthetic oligonucleotide
  misc_feature 1..20: note = Target: FXN; (-) strand; PAM type: YTN; PAM sequence: CTG
  source 1..20: mol_type = other DNA
actgctgtctgacagatctt

SEQ ID NO: 24306 - DNA, 20 bp, synthetic construct
  misc_feature 1..20: note = Description of Artificial Sequence: Synthetic oligonucleotide
  misc_feature 1..20: note = Target: FXN; (-) strand; PAM type: YTN; PAM sequence: CTG
  source 1..20: mol_type = other DNA
ctgactgctgtctgacagat

SEQ ID NO: 24307 - DNA, 20 bp, synthetic construct
  misc_feature 1..20: note = Description of Artificial Sequence: Synthetic oligonucleotide
  misc_feature 1..20: note = Target: FXN; (-) strand; PAM type: YTN; PAM sequence: CTG
  source 1..20: mol_type = other DNA
actgctgactgctgtctgac

SEQ ID NO: 24308 - DNA, 20 bp, synthetic construct
  misc_feature 1..20: note = Description of Artificial Sequence: Synthetic oligonucleotide
  misc_feature 1..20: note = Target: FXN; (-) strand; PAM type: YTN; PAM sequence: CTC
  source 1..20: mol_type = other DNA
tgactgctgactgctgtctg

SEQ ID NO: 24309 - DNA, 20 bp, synthetic construct
  misc_feature 1..20: note = Description of Artificial Sequence: Synthetic oligonucleotide
  misc_feature 1..20: note = Target: FXN; (-) strand; PAM type: YTN; PAM sequence: TTG
  source 1..20: mol_type = other DNA
gctctgactgctgactgctg

SEQ ID NO: 24310 - DNA, 20 bp, synthetic construct
  misc_feature 1..20: note = Description of Artificial Sequence: Synthetic oligonucleotide
  misc_feature 1..20: note = Target: FXN; (-) strand; PAM type: YTN; PAM sequence: TTT
  source 1..20: mol_type = other DNA
ggctctgactgctgactgct

SEQ ID NO: 24311 - DNA, 20 bp, synthetic construct
  misc_feature 1..20: note = Description of Artificial Sequence: Synthetic oligonucleotide
  misc_feature 1..20: note = Target: FXN; (-) strand; PAM type: YTN; PAM sequence: CTG
  source 1..20: mol_type = other DNA
aagtccagaagatttggctc

SEQ ID NO: 24312 - DNA, 20 bp, synthetic construct
  misc_feature 1..20: note = Description of Artificial Sequence: Synthetic oligonucleotide
  misc_feature 1..20: note = Target: FXN; (-) strand; PAM type: YTN; PAM sequence: CTG
  source 1..20: mol_type = other DNA
ctgaagtccagaagatttgg

SEQ ID NO: 24313 - DNA, 20 bp, synthetic construct
  misc_feature 1..20: note = Description of Artificial Sequence: Synthetic oligonucleotide
  misc_feature 1..20: note = Target: FXN; (-) strand; PAM type: YTN; PAM sequence: CTA
  source 1..20: mol_type = other DNA
agagaggcaacaggaaatag

SEQ ID NO: 24314 - DNA, 20 bp, synthetic construct
  misc_feature 1..20: note = Description of Artificial Sequence: Synthetic oligonucleotide
  misc_feature 1..20: note = Target: FXN; (-) strand; PAM type: YTN; PAM sequence: TTA
  source 1..20: mol_type = other DNA
aaaggtcactaagagaggca

SEQ ID NO: 24315 - DNA, 20 bp, synthetic construct
  misc_feature 1..20: note = Description of Artificial Sequence: Synthetic oligonucleotide
  misc_feature 1..20: note = Target: FXN; (-) strand; PAM type: YTN; PAM sequence: CTT
  source 1..20: mol_type = other DNA
aaaaggtcactaagagaggc

SEQ ID NO: 24316 - DNA, 20 bp, synthetic construct
  misc_feature 1..20: note = Description of Artificial Sequence: Synthetic oligonucleotide
  misc_feature 1..20: note = Target: FXN; (-) strand; PAM type: YTN; PAM sequence: CTC
  source 1..20: mol_type = other DNA
ttaaaaggtcactaagagag

SEQ ID NO: 24317 - DNA, 20 bp, synthetic construct
  misc_feature 1..20: note = Description of Artificial Sequence: Synthetic oligonucleotide
  misc_feature 1..20: note = Target: FXN; (-) strand; PAM type: YTN; PAM sequence: CTG
  source 1..20: mol_type = other DNA
ggaggcatccacaatgctct

SEQ ID NO: 24318 - DNA, 20 bp, synthetic construct
  misc_feature 1..20: note = Description of Artificial Sequence: Synthetic oligonucleotide
  misc_feature 1..20: note = Target: FXN; (-) strand; PAM type: YTN; PAM sequence: TTA
  source 1..20: mol_type = other DNA
gcaggaggctgggaggcatc

SEQ ID NO: 24319 - DNA, 20 bp, synthetic construct
  misc_feature 1..20: note = Description of Artificial Sequence: Synthetic oligonucleotide
  misc_feature 1..20: note = Target: FXN; (-) strand; PAM type: YTN; PAM sequence: TTA
  source 1..20: mol_type = other DNA
cagggtggttagcaggaggc

SEQ ID NO: 24320 - DNA, 20 bp, synthetic construct
  misc_feature 1..20: note = Description of Artificial Sequence: Synthetic oligonucleotide
  misc_feature 1..20: note = Target: FXN; (-) strand; PAM type: YTN; PAM sequence: TTC
  source 1..20: mol_type = other DNA
aggttacagggtggttagca

SEQ ID NO: 24321 - DNA, 20 bp, synthetic construct
  misc_feature 1..20: note = Description of Artificial Sequence: Synthetic oligonucleotide
  misc_feature 1..20: note = Target: FXN; (-) strand; PAM type: YTN; PAM sequence: CTG
  source 1..20: mol_type = other DNA
ttcaggttacagggtggtta

SEQ ID NO: 24322 - DNA, 20 bp, synthetic construct
  misc_feature 1..20: note = Description of Artificial Sequence: Synthetic oligonucleotide
  misc_feature 1..20: note = Target: FXN; (-) strand; PAM type: YTN; PAM sequence: CTG
  source 1..20: mol_type = other DNA
caggctgttcaggttacagg

SEQ ID NO: 24323 - DNA, 20 bp, synthetic construct
  misc_feature 1..20: note = Description of Artificial Sequence: Synthetic oligonucleotide
  misc_feature 1..20: note = Target: FXN; (-) strand; PAM type: YTN; PAM sequence: CTG
  source 1..20: mol_type = other DNA
ctgcaggctgttcaggttac

SEQ ID NO: 24324 - DNA, 20 bp, synthetic construct
  misc_feature 1..20: note = Description of Artificial Sequence: Synthetic oligonucleotide
  misc_feature 1..20: note = Target: FXN; (-) strand; PAM type: YTN; PAM sequence: CTG
  source 1..20: mol_type = other DNA
ggcagggctgctgcaggctg

SEQ ID NO: 24325 - DNA, 20 bp, synthetic construct
  misc_feature 1..20: note = Description of Artificial Sequence: Synthetic oligonucleotide
  misc_feature 1..20: note = Target: FXN; (-) strand; PAM type: YTN; PAM sequence: CTA
  source 1..20: mol_type = other DNA
ctgggcagggctgctgcagg

SEQ ID NO: 24326 - DNA, 20 bp, synthetic construct
  misc_feature 1..20: note = Description of Artificial Sequence: Synthetic oligonucleotide
  misc_feature 1..20: note = Target: FXN; (-) strand; PAM type: YTN; PAM sequence: TTC
  source 1..20: mol_type = other DNA
tactgggcagggctgctgca

SEQ ID NO: 24327 - DNA, 20 bp, synthetic construct
  misc_feature 1..20: note = Description of Artificial Sequence: Synthetic oligonucleotide
  misc_feature 1..20: note = Target: FXN; (-) strand; PAM type: YTN; PAM sequence: TTC
  source 1..20: mol_type = other DNA
catcacatcaggaagttcta

SEQ ID NO: 24328 - DNA, 20 bp, synthetic construct
  misc_feature 1..20: note = Description of Artificial Sequence: Synthetic oligonucleotide
  misc_feature 1..20: note = Target: FXN; (-) strand; PAM type: YTN; PAM sequence: TTT
  source 1..20: mol_type = other DNA
ccatcacatcaggaagttct

SEQ ID NO: 24329 - DNA, 20 bp, synthetic construct
  misc_feature 1..20: note = Description of Artificial Sequence: Synthetic oligonucleotide
  misc_feature 1..20: note = Target: FXN; (-) strand; PAM type: YTN; PAM sequence: CTA
  source 1..20: mol_type = other DNA
gtggtgcagacacagcattt

SEQ ID NO: 24330 - DNA, 20 bp, synthetic construct
  misc_feature 1..20: note = Description of Artificial Sequence: Synthetic oligonucleotide
  misc_feature 1..20: note = Target: FXN; (-) strand; PAM type: YTN; PAM sequence: CTG
  source 1..20: mol_type = other DNA
tggccacatgtggctagtgg

SEQ ID NO: 24331 - DNA, 20 bp, synthetic construct
  misc_feature 1..20: note = Description of Artificial Sequence: Synthetic oligonucleotide
  misc_feature 1..20: note = Target: FXN; (-) strand; PAM type: YTN; PAM sequence: TTC
  source 1..20: mol_type = other DNA
gagaatcctgtggccacatg

SEQ ID NO: 24332 - DNA, 20 bp, synthetic construct
  misc_feature 1..20: note = Description of Artificial Sequence: Synthetic oligonucleotide
  misc_feature 1..20: note = Target: FXN; (-) strand; PAM type: YTN; PAM sequence: TTT
  source 1..20: mol_type = other DNA
cgagaatcctgtggccacat

SEQ ID NO: 24333 - DNA, 20 bp, synthetic construct
  misc_feature 1..20: note = Description of Artificial Sequence: Synthetic oligonucleotide
  misc_feature 1..20: note = Target: FXN; (-) strand; PAM type: YTN; PAM sequence: CTG
  source 1..20: mol_type = other DNA
caccaccagtttcgagaatc

SEQ ID NO: 24334 - DNA, 20 bp, synthetic construct
  misc_feature 1..20: note = Description of Artificial Sequence: Synthetic oligonucleotide
  misc_feature 1..20: note = Target: FXN; (-) strand; PAM type: YTN; PAM sequence: CTC
  source 1..20: mol_type = other DNA
aactgcaccaccagtttcga

SEQ ID NO: 24335 - DNA, 20 bp, synthetic construct
  misc_feature 1..20: note = Description of Artificial Sequence: Synthetic oligonucleotide
  misc_feature 1..20: note = Target: FXN; (-) strand; PAM type: YTN; PAM sequence: CTC
  source 1..20: mol_type = other DNA
ctcaactgcaccaccagttt

SEQ ID NO: 24336 - DNA, 20 bp, synthetic construct
  misc_feature 1..20: note = Description of Artificial Sequence: Synthetic oligonucleotide
  misc_feature 1..20: note = Target: FXN; (-) strand; PAM type: YTN; PAM sequence: TTA
  source 1..20: mol_type = other DNA
atgagataaaatataaagtc

SEQ ID NO: 24337 - DNA, 20 bp, synthetic construct
  misc_feature 1..20: note = Description of Artificial Sequence: Synthetic oligonucleotide
  misc_feature 1..20: note = Target: FXN; (-) strand; PAM type: YTN; PAM sequence: TTT
  source 1..20: mol_type = other DNA
aatgagataaaatataaagt

SEQ ID NO: 24338 - DNA, 20 bp, synthetic construct
  misc_feature 1..20: note = Description of Artificial Sequence: Synthetic oligonucleotide
  misc_feature 1..20: note = Target: FXN; (-) strand; PAM type: YTN; PAM sequence: TTA
  source 1..20: mol_type = other DNA
aatttaatgagataaaatat

SEQ ID NO: 24339 - DNA, 20 bp, synthetic construct
  misc_feature 1..20: note = Description of Artificial Sequence: Synthetic oligonucleotide
  misc_feature 1..20: note = Target: FXN; (-) strand; PAM type: YTN; PAM sequence: TTT
  source 1..20: mol_type = other DNA
aaatttaatgagataaaata

SEQ ID NO: 24340 - DNA, 20 bp, synthetic construct
  misc_feature 1..20: note = Description of Artificial Sequence: Synthetic oligonucleotide
  misc_feature 1..20: note = Target: FXN; (-) strand; PAM type: YTN; PAM sequence: TTA
  source 1..20: mol_type = other DNA
catttaaatttaatgagata

SEQ ID NO: 24341 - DNA, 20 bp, synthetic construct
  misc_feature 1..20: note = Description of Artificial Sequence: Synthetic oligonucleotide
  misc_feature 1..20: note = Target: FXN; (-) strand; PAM type: YTN; PAM sequence: TTT
  source 1..20: mol_type = other DNA
acatttaaatttaatgagat

SEQ ID NO: 24342 - DNA, 20 bp, synthetic construct
  misc_feature 1..20: note = Description of Artificial Sequence: Synthetic oligonucleotide
  misc_feature 1..20: note = Target: FXN; (-) strand; PAM type: YTN; PAM sequence: CTA
  source 1..20: mol_type = other DNA
tttacatttaaatttaatga

SEQ ID NO: 24343 - DNA, 20 bp, synthetic construct
  misc_feature 1..20: note = Description of Artificial Sequence: Synthetic oligonucleotide
  misc_feature 1..20: note = Target: FXN; (-) strand; PAM type: YTN; PAM sequence: CTA
  source 1..20: mol_type = other DNA
gccaacaagccacacgtagc

SEQ ID NO: 24344 - DNA, 20 bp, synthetic construct
  misc_feature 1..20: note = Description of Artificial Sequence: Synthetic oligonucleotide
  misc_feature 1..20: note = Target: FXN; (-) strand; PAM type: YTN; PAM sequence: TTC
  source 1..20: mol_type = other DNA
caataggctagccaacaagc

SEQ ID NO: 24345 - DNA, 20 bp, synthetic construct
  misc_feature 1..20: note = Description of Artificial Sequence: Synthetic oligonucleotide
  misc_feature 1..20: note = Target: FXN; (-) strand; PAM type: YTN; PAM sequence: TTT
  source 1..20: mol_type = other DNA
ccaataggctagccaacaag

SEQ ID NO: 24346 - DNA, 20 bp, synthetic construct
  misc_feature 1..20: note = Description of Artificial Sequence: Synthetic oligonucleotide
  misc_feature 1..20: note = Target: FXN; (-) strand; PAM type: YTN; PAM sequence: TTT
  source 1..20: mol_type = other DNA
tccaataggctagccaacaa

SEQ ID NO: 24347 - DNA, 20 bp, synthetic construct
  misc_feature 1..20: note = Description of Artificial Sequence: Synthetic oligonucleotide
  misc_feature 1..20: note = Target: FXN; (-) strand; PAM type: YTN; PAM sequence: CTA
  source 1..20: mol_type = other DNA
agcccgtgttttccaatagg

SEQ ID NO: 24348 - DNA, 20 bp, synthetic construct
  misc_feature 1..20: note = Description of Artificial Sequence: Synthetic oligonucleotide
  misc_feature 1..20: note = Target: FXN; (-) strand; PAM type: YTN; PAM sequence: CTC
  source 1..20: mol_type = other DNA
taagcccgtgttttccaata

SEQ ID NO: 24349 - DNA, 20 bp, synthetic construct
  misc_feature 1..20: note = Description of Artificial Sequence: Synthetic oligonucleotide
  misc_feature 1..20: note = Target: FXN; (-) strand; PAM type: YTN; PAM sequence: CTC
  source 1..20: mol_type = other DNA
tctaagcccgtgttttccaa

SEQ ID NO: 24350 - DNA, 20 bp, synthetic construct
  misc_feature 1..20: note = Description of Artificial Sequence: Synthetic oligonucleotide
  misc_feature 1..20: note = Target: FXN; (-) strand; PAM type: YTN; PAM sequence: CTG
  source 1..20: mol_type = other DNA
tgtctctctaagcccgtgtt

SEQ ID NO: 24351 - DNA, 20 bp, synthetic construct
  misc_feature 1..20: note = Description of Artificial Sequence: Synthetic oligonucleotide
  misc_feature 1..20: note = Target: FXN; (-) strand; PAM type: YTN; PAM sequence: CTC
  source 1..20: mol_type = other DNA
cctgtgtctctctaagcccg

SEQ ID NO: 24352 - DNA, 20 bp, synthetic construct
  misc_feature 1..20: note = Description of Artificial Sequence: Synthetic oligonucleotide
  misc_feature 1..20: note = Target: FXN; (-) strand; PAM type: YTN; PAM sequence: TTC
  source 1..20: mol_type = other DNA
tccctgtgtctctctaagcc

SEQ ID NO: 24353 - DNA, 20 bp, synthetic construct
  misc_feature 1..20: note = Description of Artificial Sequence: Synthetic oligonucleotide
  misc_feature 1..20: note = Target: FXN; (-) strand; PAM type: YTN; PAM sequence: TTA
  source 1..20: mol_type = other DNA
cagtgattctccctgtgtct

SEQ ID NO: 24354 - DNA, 20 bp, synthetic construct
  misc_feature 1..20: note = Description of Artificial Sequence: Synthetic oligonucleotide
  misc_feature 1..20: note = Target: FXN; (-) strand; PAM type: YTN; PAM sequence: TTA
  source 1..20: mol_type = other DNA
gtgcattacagtgattctcc

SEQ ID NO: 24355 - DNA, 20 bp, synthetic construct
  misc_feature 1..20: note = Description of Artificial Sequence: Synthetic oligonucleotide
  misc_feature 1..20: note = Target: FXN; (-) strand; PAM type: YTN; PAM sequence: TTT
  source 1..20: mol_type = other DNA
agtgcattacagtgattctc

SEQ ID NO: 24356 - DNA, 20 bp, synthetic construct
  misc_feature 1..20: note = Description of Artificial Sequence: Synthetic oligonucleotide
  misc_feature 1..20: note = Target: FXN; (-) strand; PAM type: YTN; PAM sequence: TTT
  source 1..20: mol_type = other DNA
tagtgcattacagtgattct

SEQ ID NO: 24357 - DNA, 20 bp, synthetic construct
  misc_feature 1..20: note = Description of Artificial Sequence: Synthetic oligonucleotide
  misc_feature 1..20: note = Target: FXN; (-) strand; PAM type: YTN; PAM sequence: CTT
  source 1..20: mol_type = other DNA
ttagtgcattacagtgattc

SEQ ID NO: 24358 - DNA, 20 bp, synthetic construct
  misc_feature 1..20: note = Description of Artificial Sequence: Synthetic oligonucleotide
  misc_feature 1..20: note = Target: FXN; (-) strand; PAM type: YTN; PAM sequence: TTC
  source 1..20: mol_type = other DNA
ttttagtgcattacagtgat

SEQ ID NO: 24359 - DNA, 20 bp, synthetic construct
  misc_feature 1..20: note = Description of Artificial Sequence: Synthetic oligonucleotide
  misc_feature 1..20: note = Target: FXN; (-) strand; PAM type: YTN; PAM sequence: CTT
  source 1..20: mol_type = other DNA
cttttagtgcattacagtga

SEQ ID NO: 24360 - DNA, 20 bp, synthetic construct
  misc_feature 1..20: note = Description of Artificial Sequence: Synthetic oligonucleotide
  misc_feature 1..20: note = Target: FXN; (-) strand; PAM type: YTN; PAM sequence: TTA
  source 1..20: mol_type = other DNA
ccttcttttagtgcattaca

SEQ ID NO: 24361 - DNA, 20 bp, synthetic construct
  misc_feature 1..20: note = Description of Artificial Sequence: Synthetic oligonucleotide
  misc_feature 1..20: note = Target: FXN; (-) strand; PAM type: YTN; PAM sequence: TTT
  source 1..20: mol_type = other DNA
accttcttttagtgcattac

SEQ ID NO: 24362 - DNA, 20 bp, synthetic construct
  misc_feature 1..20: note = Description of Artificial Sequence: Synthetic oligonucleotide
  misc_feature 1..20: note = Target: FXN; (-) strand; PAM type: YTN; PAM sequence: TTT
  source 1..20: mol_type = other DNA
taccttcttttagtgcatta

SEQ ID NO: 24363 - DNA, 20 bp, synthetic construct
  misc_feature 1..20: note = Description of Artificial Sequence: Synthetic oligonucleotide
  misc_feature 1..20: note = Target: FXN; (-) strand; PAM type: YTN; PAM sequence: TTT
  source 1..20: mol_type = other DNA
ttaccttcttttagtgcatt

SEQ ID NO: 24364 - DNA, 20 bp, synthetic construct
  misc_feature 1..20: note = Description of Artificial Sequence: Synthetic oligonucleotide
  misc_feature 1..20: note = Target: FXN; (-) strand; PAM type: YTN; PAM sequence: TTT
  source 1..20: mol_type = other DNA
tttaccttcttttagtgcat

SEQ ID NO: 24365 - DNA, 20 bp, synthetic construct
  misc_feature 1..20: note = Description of Artificial Sequence: Synthetic oligonucleotide
  misc_feature 1..20: note = Target: FXN; (-) strand; PAM type: YTN; PAM sequence: TTT
  source 1..20: mol_type = other DNA
ttttaccttcttttagtgca

SEQ ID NO: 24366 - DNA, 20 bp, synthetic construct
  misc_feature 1..20: note = Description of Artificial Sequence: Synthetic oligonucleotide
  misc_feature 1..20: note = Target: FXN; (-) strand; PAM type: YTN; PAM sequence: TTT
  source 1..20: mol_type = other DNA
tttttaccttcttttagtgc

SEQ ID NO: 24367 - DNA, 20 bp, synthetic construct
  misc_feature 1..20: note = Description of Artificial Sequence: Synthetic oligonucleotide
  misc_feature 1..20: note = Target: FXN; (-) strand; PAM type: YTN; PAM sequence: TTT
  source 1..20: mol_type = other DNA
ttttttaccttcttttagtg

SEQ ID NO: 24368 - DNA, 20 bp, synthetic construct
  misc_feature 1..20: note = Description of Artificial Sequence: Synthetic oligonucleotide
  misc_feature 1..20: note = Target: FXN; (-) strand; PAM type: YTN; PAM sequence: TTT
  source 1..20: mol_type = other DNA
tttttttaccttcttttagt

SEQ ID NO: 24369 - DNA, 20 bp, synthetic construct
  misc_feature 1..20: note = Description of Artificial Sequence: Synthetic oligonucleotide
  misc_feature 1..20: note = Target: FXN; (-) strand; PAM type: YTN; PAM sequence: TTT
  source 1..20: mol_type = other DNA
ttttttttaccttcttttag

SEQ ID NO: 24370 - DNA, 20 bp, synthetic construct
  misc_feature 1..20: note = Description of Artificial Sequence: Synthetic oligonucleotide
  misc_feature 1..20: note = Target: FXN; (-) strand; PAM type: YTN; PAM sequence: TTT
  source 1..20: mol_type = other DNA
tttttttttaccttctttta

SEQ ID NO: 24371 - DNA, 20 bp, synthetic construct
  misc_feature 1..20: note = Description of Artificial Sequence: Synthetic oligonucleotide
  misc_feature 1..20: note = Target: FXN; (-) strand; PAM type: YTN; PAM sequence: TTT
  source 1..20: mol_type = other DNA
ttttttttttaccttctttt

SEQ ID NO: 24372 - DNA, 20 bp, synthetic construct
  misc_feature 1..20: note = Description of Artificial Sequence: Synthetic oligonucleotide
  misc_feature 1..20: note = Target: FXN; (-) strand; PAM type: YTN; PAM sequence: TTA
  source 1..20: mol_type = other DNA
ggatttttttttttttacct

SEQ ID NO: 24373 - DNA, 20 bp, synthetic construct
  misc_feature 1..20: note = Description of Artificial Sequence: Synthetic oligonucleotide
  misc_feature 1..20: note = Target: FXN; (-) strand; PAM type: YTN; PAM sequence: CTT
  source 1..20: mol_type = other DNA
aggatttttttttttttacc

SEQ ID NO: 24374 - DNA, 20 bp, synthetic construct
  misc_feature 1..20: note = Description of Artificial Sequence: Synthetic oligonucleotide
  misc_feature 1..20: note = Target: FXN; (-) strand; PAM type: YTN; PAM sequence: TTC
  source 1..20: mol_type = other DNA
ttaggattttttttttttta

SEQ ID NO: 24375 - DNA, 20 bp, synthetic construct
  misc_feature 1..20: note = Description of Artificial Sequence: Synthetic oligonucleotide
  misc_feature 1..20: note = Target: FXN; (-) strand; PAM type: YTN; PAM sequence: TTT
  source 1..20: mol_type = other DNA
cttaggattttttttttttt

SEQ ID NO: 24376 - DNA, 20 bp, synthetic construct
  misc_feature 1..20: note = Description of Artificial Sequence: Synthetic oligonucleotide
  misc_feature 1..20: note = Target: FXN; (-) strand; PAM type: YTN; PAM sequence: TTA
  source 1..20: mol_type = other DNA
ggaatatttcttaggatttt

SEQ ID NO: 24377 - DNA, 20 bp, synthetic construct
  misc_feature 1..20: note = Description of Artificial Sequence: Synthetic oligonucleotide
  misc_feature 1..20: note = Target: FXN; (-) strand; PAM type: YTN; PAM sequence: TTT
  source 1..20: mol_type = other DNA
aggaatatttcttaggattt

SEQ ID NO: 24378 - DNA, 20 bp, synthetic construct
  misc_feature 1..20: note = Description of Artificial Sequence: Synthetic oligonucleotide
  misc_feature 1..20: note = Target: FXN; (-) strand; PAM type: YTN; PAM sequence: TTT
  source 1..20: mol_type = other DNA
taggaatatttcttaggatt

SEQ ID NO: 24379 - DNA, 20 bp, synthetic construct
  misc_feature 1..20: note = Description of Artificial Sequence: Synthetic oligonucleotide
  misc_feature 1..20: note = Target: FXN; (-) strand; PAM type: YTN; PAM sequence: TTA
  source 1..20: mol_type = other DNA
aagtattttaggaatatttc

SEQ ID NO: 24380 - DNA, 20 bp, synthetic construct
  misc_feature 1..20: note = Description of Artificial Sequence: Synthetic oligonucleotide
  misc_feature 1..20: note = Target: FXN; (-) strand; PAM type: YTN; PAM sequence: CTA
  source 1..20: mol_type = other DNA
tattaaagtattttaggaat

SEQ ID NO: 24381 - DNA, 20 bp, synthetic construct
  misc_feature 1..20: note = Description of Artificial Sequence: Synthetic oligonucleotide
  misc_feature 1..20: note = Target: FXN; (-) strand; PAM type: YTN; PAM sequence: CTG
  source 1..20: mol_type = other DNA
gatgtgagccaccgcaccca

SEQ ID NO: 24382 - DNA, 20 bp, synthetic construct
  misc_feature 1..20: note = Description of Artificial Sequence: Synthetic oligonucleotide
  misc_feature 1..20: note = Target: FXN; (-) strand; PAM type: YTN; PAM sequence: TTC
  source 1..20: mol_type = other DNA
ccaaaatgctggatgtgagc

SEQ ID NO: 24383 - DNA, 20 bp, synthetic construct
  misc_feature 1..20: note = Description of Artificial Sequence: Synthetic oligonucleotide
  misc_feature 1..20: note = Target: FXN; (-) strand; PAM type: YTN; PAM sequence: CTT
  source 1..20: mol_type = other DNA
cccaaaatgctggatgtgag

SEQ ID NO: 24384 - DNA, 20 bp, synthetic construct
  misc_feature 1..20: note = Description of Artificial Sequence: Synthetic oligonucleotide
  misc_feature 1..20: note = Target: FXN; (-) strand; PAM type: YTN; PAM sequence: CTC
  source 1..20: mol_type = other DNA
agcttcccaaaatgctggat

SEQ ID NO: 24385 - DNA, 20 bp, synthetic construct
  misc_feature 1..20: note = Description of Artificial Sequence: Synthetic oligonucleotide
  misc_feature 1..20: note = Target: FXN; (-) strand; PAM type: YTN; PAM sequence: CTC
  source 1..20: mol_type = other DNA
ctcagcttcccaaaatgctg

SEQ ID NO: 24386 - DNA, 20 bp, synthetic construct
  misc_feature 1..20: note = Description of Artificial Sequence: Synthetic oligonucleotide
  misc_feature 1..20: note = Target: FXN; (-) strand; PAM type: YTN; PAM sequence: CTG
  source 1..20: mol_type = other DNA
ccctcctcagcttcccaaaa

SEQ ID NO: 24387 - DNA, 20 bp, synthetic construct
  misc_feature 1..20: note = Description of Artificial Sequence: Synthetic oligonucleotide
  misc_feature 1..20: note = Target: FXN; (-) strand; PAM type: YTN; PAM sequence: CTC
  source 1..20: mol_type = other DNA
aagtgatctgccctcctcag

SEQ ID NO: 24388 - DNA, 20 bp, synthetic construct
  misc_feature 1..20: note = Description of Artificial Sequence: Synthetic oligonucleotide
  misc_feature 1..20: note = Target: FXN; (-) strand; PAM type: YTN; PAM sequence: CTG
  source 1..20: mol_type = other DNA
gcctcaagtgatctgccctc

SEQ ID NO: 24389 - DNA, 20 bp, synthetic construct
  misc_feature 1..20: note = Description of Artificial Sequence: Synthetic oligonucleotide
  misc_feature 1..20: note = Target: FXN; (-) strand; PAM type: YTN; PAM sequence: CTC
  source 1..20: mol_type = other DNA
ctggcctcaagtgatctgcc

SEQ ID NO: 24390 - DNA, 20 bp, synthetic construct
  misc_feature 1..20: note = Description of Artificial Sequence: Synthetic oligonucleotide
  misc_feature 1..20: note = Target: FXN; (-) strand; PAM type: YTN; PAM sequence: TTG
  source 1..20: mol_type = other DNA
aactcctggcctcaagtgat

SEQ ID NO: 24391 - DNA, 20 bp, synthetic construct
  misc_feature 1..20: note = Description of Artificial Sequence: Synthetic oligonucleotide
  misc_feature 1..20: note = Target: FXN; (-) strand; PAM type: YTN; PAM sequence: CTT
  source 1..20: mol_type = other DNA
gaactcctggcctcaagtga

SEQ ID NO: 24392 - DNA, 20 bp, synthetic construct
  misc_feature 1..20: note = Description of Artificial Sequence: Synthetic oligonucleotide
  misc_feature 1..20: note = Target: FXN; (-) strand; PAM type: YTN; PAM sequence: CTG
  source 1..20: mol_type = other DNA
gtcttgaactcctggcctca

SEQ ID NO: 24393 - DNA, 20 bp, synthetic construct
  misc_feature 1..20: note = Description of Artificial Sequence: Synthetic oligonucleotide
  misc_feature 1..20: note = Target: FXN; (-) strand; PAM type: YTN; PAM sequence: TTG
  source 1..20: mol_type = other DNA
gccaggctggtcttgaactc

SEQ ID NO: 24394 - DNA, 20 bp, synthetic construct
  misc_feature 1..20: note = Description of Artificial Sequence: Synthetic oligonucleotide
  misc_feature 1..20: note = Target: FXN; (-) strand; PAM type: YTN; PAM sequence: TTC
  source 1..20: mol_type = other DNA
accatgttggccaggctggt

SEQ ID NO: 24395 - DNA, 20 bp, synthetic construct
  misc_feature 1..20: note = Description of Artificial Sequence: Synthetic oligonucleotide
  misc_feature 1..20: note = Target: FXN; (-) strand; PAM type: YTN; PAM sequence: TTT
  source 1..20: mol_type = other DNA
caccatgttggccaggctgg

SEQ ID NO: 24396 - DNA, 20 bp, synthetic construct
  misc_feature 1..20: note = Description of Artificial Sequence: Synthetic oligonucleotide
  misc_feature 1..20: note = Target: FXN; (-) strand; PAM type: YTN; PAM sequence: TTA
  source 1..20: mol_type = other DNA
gtagagacggggtttcacca

SEQ ID NO: 24397 - DNA, 20 bp, synthetic construct
  misc_feature 1..20: note = Description of Artificial Sequence: Synthetic oligonucleotide
  misc_feature 1..20: note = Target: FXN; (-) strand; PAM type: YTN; PAM sequence: TTT
  source 1..20: mol_type = other DNA
agtagagacggggtttcacc

SEQ ID NO: 24398 - DNA, 20 bp, synthetic construct
  misc_feature 1..20: note = Description of Artificial Sequence: Synthetic oligonucleotide
  misc_feature 1..20: note = Target: FXN; (-) strand; PAM type: YTN; PAM sequence: TTT
  source 1..20: mol_type = other DNA
tagtagagacggggtttcac

SEQ ID NO: 24399 - DNA, 20 bp, synthetic construct
  misc_feature 1..20: note = Description of Artificial Sequence: Synthetic oligonucleotide
  misc_feature 1..20: note = Target: FXN; (-) strand; PAM type: YTN; PAM sequence: TTT
  source 1..20: mol_type = other DNA
ttagtagagacggggtttca

SEQ ID NO: 24400 - DNA, 20 bp, synthetic construct
  misc_feature 1..20: note = Description of Artificial Sequence: Synthetic oligonucleotide
  misc_feature 1..20: note = Target: FXN; (-) strand; PAM type: YTN; PAM sequence: TTG
  source 1..20: mol_type = other DNA
tatttttagtagagacgggg

SEQ ID NO: 24401 - DNA, 20 bp, synthetic construct
  misc_feature 1..20: note = Description of Artificial Sequence: Synthetic oligonucleotide
  misc_feature 1..20: note = Target: FXN; (-) strand; PAM type: YTN; PAM sequence: TTT
  source 1..20: mol_type = other DNA
gtatttttagtagagacggg

SEQ ID NO: 24402 - DNA, 20 bp, synthetic construct
  misc_feature 1..20: note = Description of Artificial Sequence: Synthetic oligonucleotide
  misc_feature 1..20: note = Target: FXN; (-) strand; PAM type: YTN; PAM sequence: TTT
  source 1..20: mol_type = other DNA
tgtatttttagtagagacgg

SEQ ID NO: 24403 - DNA, 20 bp, synthetic construct
  misc_feature 1..20: note = Description of Artificial Sequence: Synthetic oligonucleotide
  misc_feature 1..20: note = Target: FXN; (-) strand; PAM type: YTN; PAM sequence: TTT
  source 1..20: mol_type = other DNA
ttgtatttttagtagagacg

SEQ ID NO: 24404 - DNA, 20 bp, synthetic construct
  misc_feature 1..20: note = Description of Artificial Sequence: Synthetic oligonucleotide
  misc_feature 1..20: note = Target: FXN; (-) strand; PAM type: YTN; PAM sequence: TTT
  source 1..20: mol_type = other DNA
tttgtatttttagtagagac

SEQ ID NO: 24405 - DNA, 20 bp, synthetic construct
  misc_feature 1..20: note = Description of Artificial Sequence: Synthetic oligonucleotide
  misc_feature 1..20: note = Target: FXN; (-) strand; PAM type: YTN; PAM sequence: TTA
  source 1..20: mol_type = other DNA
caggcacccgccaccgcacc

SEQ ID NO: 24406 - DNA, 20 bp, synthetic construct
  misc_feature 1..20: note = Description of Artificial Sequence: Synthetic oligonucleotide
  misc_feature 1..20: note = Target: FXN; (-) strand; PAM type: YTN; PAM sequence: CTG
  source 1..20: mol_type = other DNA
ggattacaggcacccgccac

SEQ ID NO: 24407 - DNA, 20 bp, synthetic construct
  misc_feature 1..20: note = Description of Artificial Sequence: Synthetic oligonucleotide
  misc_feature 1..20: note = Target: FXN; (-) strand; PAM type: YTN; PAM sequence: CTC
  source 1..20: mol_type = other DNA
ccgcgtagctgggattacag

SEQ ID NO: 24408 - DNA, 20 bp, synthetic construct
  misc_feature 1..20: note = Description of Artificial Sequence: Synthetic oligonucleotide
  misc_feature 1..20: note = Target: FXN; (-) strand; PAM type: YTN; PAM sequence: CTC
  source 1..20: mol_type = other DNA
agcctcccgcgtagctggga

SEQ ID NO: 24409 - DNA, 20 bp, synthetic construct
  misc_feature 1..20: note = Description of Artificial Sequence: Synthetic oligonucleotide
  misc_feature 1..20: note = Target: FXN; (-) strand; PAM type: YTN; PAM sequence: CTC
  source 1..20: mol_type = other DNA
gtgcctcagcctcccgcgta

SEQ ID NO: 24410 - DNA, 20 bp, synthetic construct
  misc_feature 1..20: note = Description of Artificial Sequence: Synthetic oligonucleotide
  misc_feature 1..20: note = Target: FXN; (-) strand; PAM type: YTN; PAM sequence: TTC
  source 1..20: mol_type = other DNA
tcgtgcctcagcctcccgcg

SEQ ID NO: 24411 - DNA, 20 bp, synthetic construct
  misc_feature 1..20: note = Description of Artificial Sequence: Synthetic oligonucleotide
  misc_feature 1..20: note = Target: FXN; (-) strand; PAM type: YTN; PAM sequence: TTC
  source 1..20: mol_type = other DNA
gagtgattctcgtgcctcag

SEQ ID NO: 24412 - DNA, 20 bp, synthetic construct
  misc_feature 1..20: note = Description of Artificial Sequence: Synthetic oligonucleotide
  misc_feature 1..20: note = Target: FXN; (-) strand; PAM type: YTN; PAM sequence: CTC
  source 1..20: mol_type = other DNA
ccgggttcgagtgattctcg

SEQ ID NO: 24413 - DNA, 20 bp, synthetic construct
  misc_feature 1..20: note = Description of Artificial Sequence: Synthetic oligonucleotide
  misc_feature 1..20: note = Target: FXN; (-) strand; PAM type: YTN; PAM sequence: CTG
  source 1..20: mol_type = other DNA
caacccccgcctcccgggtt

SEQ ID NO: 24414 - DNA, 20 bp, synthetic construct
  misc_feature 1..20: note = Description of Artificial Sequence: Synthetic oligonucleotide
  misc_feature 1..20: note = Target: FXN; (-) strand; PAM type: YTN; PAM sequence: CTC
  source 1..20: mol_type = other DNA
actgcaacccccgcctcccg

SEQ ID NO: 24415 - DNA, 20 bp, synthetic construct
  misc_feature 1..20: note = Description of Artificial Sequence: Synthetic oligonucleotide
  misc_feature 1..20: note = Target: FXN; (-) strand; PAM type: YTN; PAM sequence: CTC
  source 1..20: mol_type = other DNA
ggctcactgcaacccccgcc

SEQ ID NO: 24416 - DNA, 20 bp, synthetic construct
  misc_feature 1..20: note = Description of Artificial Sequence: Synthetic oligonucleotide
  misc_feature 1..20: note = Target: FXN; (-) strand; PAM type: YTN; PAM sequence: CTG
  source 1..20: mol_type = other DNA
gagtgcagtggcacgatctc

SEQ ID NO: 24417 - DNA, 20 bp, synthetic construct
  misc_feature 1..20: note = Description of Artificial Sequence: Synthetic oligonucleotide
  misc_feature 1..20: note = Target: FXN; (-) strand; PAM type: YTN; PAM sequence: CTG
  source 1..20: mol_type = other DNA
tcgcccaggctggagtgcag

SEQ ID NO: 24418 - DNA, 20 bp, synthetic construct
  misc_feature 1..20: note = Description of Artificial Sequence: Synthetic oligonucleotide
  misc_feature 1..20: note = Target: FXN; (-) strand; PAM type: YTN; PAM sequence: CTC
  source 1..20: mol_type = other DNA
tgtcgcccaggctggagtgc

SEQ ID NO: 24419 - DNA, 20 bp, synthetic construct
  misc_feature 1..20: note = Description of Artificial Sequence: Synthetic oligonucleotide
  misc_feature 1..20: note = Target: FXN; (-) strand; PAM type: YTN; PAM sequence: CTC
  source 1..20: mol_type = other DNA
gctctgtcgcccaggctgga

SEQ ID NO: 24420 - DNA, 20 bp, synthetic construct
  misc_feature 1..20: note = Description of Artificial Sequence: Synthetic oligonucleotide
  misc_feature 1..20: note = Target: FXN; (-) strand; PAM type: YTN; PAM sequence: TTG
  source 1..20: mol_type = other DNA
agatgaagtctcgctctgtc

SEQ ID NO: 24421 - DNA, 20 bp, synthetic construct
  misc_feature 1..20: note = Description of Artificial Sequence: Synthetic oligonucleotide
  misc_feature 1..20: note = Target: FXN; (-) strand; PAM type: YTN; PAM sequence: TTT
  source 1..20: mol_type = other DNA
gagatgaagtctcgctctgt

SEQ ID NO: 24422 - DNA, 20 bp, synthetic construct
  misc_feature 1..20: note = Description of Artificial Sequence: Synthetic oligonucleotide
  misc_feature 1..20: note = Target: FXN; (-) strand; PAM type: YTN; PAM sequence: TTT
  source 1..20: mol_type = other DNA
tgagatgaagtctcgctctg

SEQ ID NO: 24423 - DNA, 20 bp, synthetic construct
  misc_feature 1..20: note = Description of Artificial Sequence: Synthetic oligonucleotide
  misc_feature 1..20: note = Target: FXN; (-) strand; PAM type: YTN; PAM sequence: TTT
  source 1..20: mol_type = other DNA
ttgagatgaagtctcgctct

SEQ ID NO: 24424 - DNA, 20 bp, synthetic construct
  misc_feature 1..20: note = Description of Artificial Sequence: Synthetic oligonucleotide
  misc_feature 1..20: note = Target: FXN; (-) strand; PAM type: YTN; PAM sequence: TTG
  source 1..20: mol_type = other DNA
tttttgagatgaagtctcgc

SEQ ID NO: 24425 - DNA, 20 bp, synthetic construct
  misc_feature 1..20: note = Description of Artificial Sequence: Synthetic oligonucleotide
  misc_feature 1..20: note = Target: FXN; (-) strand; PAM type: YTN; PAM sequence: TTT
  source 1..20: mol_type = other DNA
gtttttgagatgaagtctcg

SEQ ID NO: 24426 - DNA, 20 bp, synthetic construct
  misc_feature 1..20: note = Description of Artificial Sequence: Synthetic oligonucleotide
  misc_feature 1..20: note = Target: FXN; (-) strand; PAM type: YTN; PAM sequence: TTT
  source 1..20: mol_type = other DNA
tgtttttgagatgaagtctc

SEQ ID NO: 24427 - DNA, 20 bp, synthetic construct
  misc_feature 1..20: note = Description of Artificial Sequence: Synthetic oligonucleotide
  misc_feature 1..20: note = Target: FXN; (-) strand; PAM type: YTN; PAM sequence: TTT
  source 1..20: mol_type = other DNA
ttgtttttgagatgaagtct

SEQ ID NO: 24428 - DNA, 20 bp, synthetic construct
  misc_feature 1..20: note = Description of Artificial Sequence: Synthetic oligonucleotide
  misc_feature 1..20: note = Target: FXN; (-) strand; PAM type: YTN; PAM sequence: TTT
  source 1..20: mol_type = other DNA
tttgtttttgagatgaagtc

SEQ ID NO: 24429 - DNA, 20 bp, synthetic construct
  misc_feature 1..20: note = Description of Artificial Sequence: Synthetic oligonucleotide
  misc_feature 1..20: note = Target: FXN; (-) strand; PAM type: YTN; PAM sequence: TTG
  source 1..20: mol_type = other DNA
ttttttgtttttgagatgaa

SEQ ID NO: 24430 - DNA, 20 bp, synthetic construct
  misc_feature 1..20: note = Description of Artificial Sequence: Synthetic oligonucleotide
  misc_feature 1..20: note = Target: FXN; (-) strand; PAM type: YTN; PAM sequence: TTT
  source 1..20: mol_type = other DNA
gttttttgtttttgagatga

SEQ ID NO: 24431 - DNA, 20 bp, synthetic construct
  misc_feature 1..20: note = Description of Artificial Sequence: Synthetic oligonucleotide
  misc_feature 1..20: note = Target: FXN; (-) strand; PAM type: YTN; PAM sequence: TTT
  source 1..20: mol_type = other DNA
tgttttttgtttttgagatg

SEQ ID NO: 24432 - DNA, 20 bp, synthetic construct
  misc_feature 1..20: note = Description of Artificial Sequence: Synthetic oligonucleotide
  misc_feature 1..20: note = Target: FXN; (-) strand; PAM type: YTN; PAM sequence: TTT
  source 1..20: mol_type = other DNA
ttgttttttgtttttgagat

SEQ ID NO: 24433 - DNA, 20 bp, synthetic construct
  misc_feature 1..20: note = Description of Artificial Sequence: Synthetic oligonucleotide
  misc_feature 1..20: note = Target: FXN; (-) strand; PAM type: YTN; PAM sequence: TTG
  source 1..20: mol_type = other DNA
gtttttgttttttgtttttg

SEQ ID NO: 24434 - DNA, 20 bp, synthetic construct
  misc_feature 1..20: note = Description of Artificial Sequence: Synthetic oligonucleotide
  misc_feature 1..20: note = Target: FXN; (-) strand; PAM type: YTN; PAM sequence: TTT
  source 1..20: mol_type = other DNA
ggtttttgttttttgttttt

SEQ ID NO: 24435 - DNA, 20 bp, synthetic construct
  misc_feature 1..20: note = Description of Artificial Sequence: Synthetic oligonucleotide
  misc_feature 1..20: note = Target: FXN; (-) strand; PAM type: YTN; PAM sequence: TTT
  source 1..20: mol_type = other DNA
tggtttttgttttttgtttt

SEQ ID NO: 24436 - DNA, 20 bp, synthetic construct
  misc_feature 1..20: note = Description of Artificial Sequence: Synthetic oligonucleotide
  misc_feature 1..20: note = Target: FXN; (-) strand; PAM type: YTN; PAM sequence: TTT
  source 1..20: mol_type = other DNA
ttggtttttgttttttgttt

SEQ ID NO: 24437 - DNA, 20 bp, synthetic construct
  misc_feature 1..20: note = Description of Artificial Sequence: Synthetic oligonucleotide
  misc_feature 1..20: note = Target: FXN; (-) strand; PAM type: YTN; PAM sequence: TTT
  source 1..20: mol_type = other DNA
tttggtttttgttttttgtt

SEQ ID NO: 24438 - DNA, 20 bp, synthetic construct
  misc_feature 1..20: note = Description of Artificial Sequence: Synthetic oligonucleotide
  misc_feature 1..20: note = Target: FXN; (-) strand; PAM type: YTN; PAM sequence: TTT
  source 1..20: mol_type = other DNA
ttttggtttttgttttttgt

SEQ ID NO: 24439 - DNA, 20 bp, synthetic construct
  misc_feature 1..20: note = Description of Artificial Sequence: Synthetic oligonucleotide
  misc_feature 1..20: note = Target: FXN; (-) strand; PAM type: YTN; PAM sequence: TTT
  source 1..20: mol_type = other DNA
tttttggtttttgttttttg

SEQ ID NO: 24440 - DNA, 20 bp, synthetic construct
  misc_feature 1..20: note = Description of Artificial Sequence: Synthetic oligonucleotide
  misc_feature 1..20: note = Target: FXN; (-) strand; PAM type: YTN; PAM sequence: TTT
  source 1..20: mol_type = other DNA
ttttttggtttttgtttttt

SEQ ID NO: 24441 - DNA, 20 bp, synthetic construct
  misc_feature 1..20: note = Description of Artificial Sequence: Synthetic oligonucleotide
  misc_feature 1..20: note = Target: FXN; (-) strand; PAM type: YTN; PAM sequence: TTT
  source 1..20: mol_type = other DNA
tttttttggtttttgttttt

SEQ ID NO: 24442 - DNA, 20 bp, synthetic construct
  misc_feature 1..20: note = Description of Artificial Sequence: Synthetic oligonucleotide
  misc_feature 1..20: note = Target: FXN; (-) strand; PAM type: YTN; PAM sequence: TTT
  source 1..20: mol_type = other DNA
ttttttttggtttttgtttt

SEQ ID NO: 24443 - DNA, 20 bp, synthetic construct
  misc_feature 1..20: note = Description of Artificial Sequence: Synthetic oligonucleotide
  misc_feature 1..20: note = Target: FXN; (-) strand; PAM type: YTN; PAM sequence: CTG
  source 1..20: mol_type = other DNA
aagtttttttttttggtttt

SEQ ID NO: 24444 - DNA, 20 bp, synthetic construct
  misc_feature 1..20: note = Description of Artificial Sequence: Synthetic oligonucleotide
  misc_feature 1..20: note = Target: FXN; (-) strand; PAM type: YTN; PAM sequence: TTA
  source 1..20: mol_type = other DNA
aataatcatgctgaagtttt

SEQ ID NO: 24445 - DNA, 20 bp, synthetic construct
  misc_feature 1..20: note = Description of Artificial Sequence: Synthetic oligonucleotide
  misc_feature 1..20: note = Target: FXN; (-) strand; PAM type: YTN; PAM sequence: TTG
  source 1..20: mol_type = other DNA
gttaaataatcatgctgaag

SEQ ID NO: 24446 - DNA, 20 bp, synthetic construct
  misc_feature 1..20: note = Description of Artificial Sequence: Synthetic oligonucleotide
  misc_feature 1..20: note = Target: FXN; (-) strand; PAM type: YTN; PAM sequence: TTT
  source 1..20: mol_type = other DNA
ggttaaataatcatgctgaa

SEQ ID NO: 24447 - DNA, 20 bp, synthetic construct
  misc_feature 1..20: note = Description of Artificial Sequence: Synthetic oligonucleotide
  misc_feature 1..20: note = Target: FXN; (-) strand; PAM type: YTN; PAM sequence: TTT
  source 1..20: mol_type = other DNA
tggttaaataatcatgctga

SEQ ID NO: 24448 - DNA, 20 bp, synthetic construct
  misc_feature 1..20: note = Description of Artificial Sequence: Synthetic oligonucleotide
  misc_feature 1..20: note = Target: FXN; (-) strand; PAM type: YTN; PAM sequence: CTG
  source 1..20: mol_type = other DNA
cattttggttaaataatcat

SEQ ID NO: 24449 - DNA, 20 bp, synthetic construct
  misc_feature 1..20: note = Description of Artificial Sequence: Synthetic oligonucleotide
  misc_feature 1..20: note = Target: FXN; (-) strand; PAM type: YTN; PAM sequence: CTA
  source 1..20: mol_type = other DNA
acctgcattttggttaaata

SEQ ID NO: 24450 - DNA, 20 bp, synthetic construct
  misc_feature 1..20: note = Description of Artificial Sequence: Synthetic oligonucleotide
  misc_feature 1..20: note = Target: FXN; (-) strand; PAM type: YTN; PAM sequence: CTG
  source 1..20: mol_type = other DNA
catccggtgaacaactaacc

SEQ ID NO: 24451 - DNA, 20 bp, synthetic construct
  misc_feature 1..20: note = Description of Artificial Sequence: Synthetic oligonucleotide
  misc_feature 1..20: note = Target: FXN; (-) strand; PAM type: YTN; PAM sequence: CTC
  source 1..20: mol_type = other DNA
tgcatccggtgaacaactaa

SEQ ID NO: 24452 - DNA, 20 bp, synthetic construct
  misc_feature 1..20: note = Description of Artificial Sequence: Synthetic oligonucleotide
  misc_feature 1..20: note = Target: FXN; (-) strand; PAM type: YTN; PAM sequence: TTG
  source 1..20: mol_type = other DNA
gactctgcatccggtgaaca

SEQ ID NO: 24453 - DNA, 20 bp, synthetic construct
  misc_feature 1..20: note = Description of Artificial Sequence: Synthetic oligonucleotide
  misc_feature 1..20: note = Target: FXN; (-) strand; PAM type: YTN; PAM sequence: TTA
  source 1..20: mol_type = other DNA
attggactctgcatccggtg

SEQ ID NO: 24454 - DNA, 20 bp, synthetic construct
  misc_feature 1..20: note = Description of Artificial Sequence: Synthetic oligonucleotide
  misc_feature 1..20: note = Target: FXN; (-) strand; PAM type: YTN; PAM sequence: TTG
  source 1..20: mol_type = other DNA
ttaattggactctgcatccg

SEQ ID NO: 24455 - DNA, 20 bp, synthetic construct
  misc_feature 1..20: note = Description of Artificial Sequence: Synthetic oligonucleotide
  misc_feature 1..20: note = Target: FXN; (-) strand; PAM type: YTN; PAM sequence: CTT
  source 1..20: mol_type = other DNA
gttaattggactctgcatcc

SEQ ID NO: 24456 - DNA, 20 bp, synthetic construct
  misc_feature 1..20: note = Description of Artificial Sequence: Synthetic oligonucleotide
  misc_feature 1..20: note = Target: FXN; (-) strand; PAM type: YTN; PAM sequence: CTC
  source 1..20: mol_type = other DNA
ttgttaattggactctgcat

SEQ ID NO: 24457 - DNA, 20 bp, synthetic construct
  misc_feature 1..20: note = Description of Artificial Sequence: Synthetic oligonucleotide
  misc_feature 1..20: note = Target: FXN; (-) strand; PAM type: YTN; PAM sequence: TTG
  source 1..20: mol_type = other DNA
ctcttgttaattggactctg

SEQ ID NO: 24458 - DNA, 20 bp, synthetic construct
  misc_feature 1..20: note = Description of Artificial Sequence: Synthetic oligonucleotide
  misc_feature 1..20: note = Target: FXN; (-) strand; PAM type: YTN; PAM sequence: CTT
  source 1..20: mol_type = other DNA
gctcttgttaattggactct

SEQ ID NO: 24459 - DNA, 20 bp, synthetic construct
  misc_feature 1..20: note = Description of Artificial Sequence: Synthetic oligonucleotide
  misc_feature 1..20: note = Target: FXN; (-) strand; PAM type: YTN; PAM sequence: TTG
  source 1..20: mol_type = other DNA
gtaccaggccttgctcttgt

SEQ ID NO: 24460 - DNA, 20 bp, synthetic construct
  misc_feature 1..20: note = Description of Artificial Sequence: Synthetic oligonucleotide
  misc_feature 1..20: note = Target: FXN; (-) strand; PAM type: YTN; PAM sequence: TTT
  source 1..20: mol_type = other DNA
ggtaccaggccttgctcttg

SEQ ID NO: 24461 - DNA, 20 bp, synthetic construct
  misc_feature 1..20: note = Description of Artificial Sequence: Synthetic oligonucleotide
  misc_feature 1..20: note = Target: FXN; (-) strand; PAM type: YTN; PAM sequence: TTT
  source 1..20: mol_type = other DNA
tggtaccaggccttgctctt

SEQ ID NO: 24462 - DNA, 20 bp, synthetic construct
  misc_feature 1..20: note = Description of Artificial Sequence: Synthetic oligonucleotide
  misc_feature 1..20: note = Target: FXN; (-) strand; PAM type: YTN; PAM sequence: TTT
  source 1..20: mol_type = other DNA
ttggtaccaggccttgctct

SEQ ID NO: 24463 - DNA, 20 bp, synthetic construct
  misc_feature 1..20: note = Description of Artificial Sequence: Synthetic oligonucleotide
  misc_feature 1..20: note = Target: FXN; (-) strand; PAM type: YTN; PAM sequence: TTT
  source 1..20: mol_type = other DNA
tttggtaccaggccttgctc

SEQ ID NO: 24464 - DNA, 20 bp, synthetic construct
  misc_feature 1..20: note = Description of Artificial Sequence: Synthetic oligonucleotide
  misc_feature 1..20: note = Target: FXN; (-) strand; PAM type: YTN; PAM sequence: TTT
  source 1..20: mol_type = other DNA
ttttggtaccaggccttgct

SEQ ID NO: 24465 - DNA, 20 bp, synthetic construct
  misc_feature 1..20: note = Description of Artificial Sequence: Synthetic oligonucleotide
  misc_feature 1..20: note = Target: FXN; (-) strand; PAM type: YTN; PAM sequence: CTT
  source 1..20: mol_type = other DNA
tttttggtaccaggccttgc

SEQ ID NO: 24466 - DNA, 20 bp, synthetic construct
  misc_feature 1..20: note = Description of Artificial Sequence: Synthetic oligonucleotide
  misc_feature 1..20: note = Target: FXN; (-) strand; PAM type: YTN; PAM sequence: TTC
  source 1..20: mol_type = other DNA
actttttttggtaccaggcc

SEQ ID NO: 24467 - DNA, 20 bp, synthetic construct
  misc_feature 1..20: note = Description of Artificial Sequence: Synthetic oligonucleotide
  misc_feature 1..20: note = Target: FXN; (-) strand; PAM type: YTN; PAM sequence: TTC
  source 1..20: mol_type = other DNA
ggagtaaattcacttttttt

SEQ ID NO: 24468 - DNA, 20 bp, synthetic construct
  misc_feature 1..20: note = Description of Artificial Sequence: Synthetic oligonucleotide
  misc_feature 1..20: note = Target: FXN; (-) strand; PAM type: YTN; PAM sequence: TTT
  source 1..20: mol_type = other DNA
cggagtaaattcactttttt

SEQ ID NO: 24469 - DNA, 20 bp, synthetic construct
  misc_feature 1..20: note = Description of Artificial Sequence: Synthetic oligonucleotide
  misc_feature 1..20: note = Target: FXN; (-) strand; PAM type: YTN; PAM sequence: CTA
  source 1..20: mol_type = other DNA
gtttcggagtaaattcactt

SEQ ID NO: 24470 - DNA, 20 bp, synthetic construct
  misc_feature 1..20: note = Description of Artificial Sequence: Synthetic oligonucleotide
  misc_feature 1..20: note = Target: FXN; (-) strand; PAM type: YTN; PAM sequence: CTC
  source 1..20: mol_type = other DNA
acccaagctagtttcggagt

SEQ ID NO: 24471 - DNA, 20 bp, synthetic construct
  misc_feature 1..20: note = Description of Artificial Sequence: Synthetic oligonucleotide
  misc_feature 1..20: note = Target: FXN; (-) strand; PAM type: YTN; PAM sequence: TTG
  source 1..20: mol_type = other DNA
tacccctcacccaagctagt

SEQ ID NO: 24472 - DNA, 20 bp, synthetic construct
  misc_feature 1..20: note = Description of Artificial Sequence: Synthetic oligonucleotide
  misc_feature 1..20: note = Target: FXN; (-) strand; PAM type: YTN; PAM sequence: TTT
  source 1..20: mol_type = other DNA
gtacccctcacccaagctag

SEQ ID NO: 24473 - DNA, 20 bp, synthetic construct
  misc_feature 1..20: note = Description of Artificial Sequence: Synthetic oligonucleotide
  misc_feature 1..20: note = Target: FXN; (-) strand; PAM type: YTN; PAM sequence: CTT
  source 1..20: mol_type = other DNA
tgtacccctcacccaagcta

SEQ ID NO: 24474 - DNA, 20 bp, synthetic construct
  misc_feature 1..20: note = Description of Artificial Sequence: Synthetic oligonucleotide
  misc_feature 1..20: note = Target: FXN; (-) strand; PAM type: YTN; PAM sequence: TTA
  source 1..20: mol_type = other DNA
aagaaaggcaggatgctttg

SEQ ID NO: 24475 - DNA, 20 bp, synthetic construct
  misc_feature 1..20: note = Description of Artificial Sequence: Synthetic oligonucleotide
  misc_feature 1..20: note = Target: FXN; (-) strand; PAM type: YTN; PAM sequence: TTT
  source 1..20: mol_type = other DNA
aaagaaaggcaggatgcttt

SEQ ID NO: 24476 - DNA, 20 bp, synthetic construct
  misc_feature 1..20: note = Description of Artificial Sequence: Synthetic oligonucleotide
  misc_feature 1..20: note = Target: FXN; (-) strand; PAM type: YTN; PAM sequence: TTT
  source 1..20: mol_type = other DNA
taaagaaaggcaggatgctt

SEQ ID NO: 24477 - DNA, 20 bp, synthetic construct
  misc_feature 1..20: note = Description of Artificial Sequence: Synthetic oligonucleotide
  misc_feature 1..20: note = Target: FXN; (-) strand; PAM type: YTN; PAM sequence: CTT
  source 1..20: mol_type = other DNA
ttaaagaaaggcaggatgct

SEQ ID NO: 24478 - DNA, 20 bp, synthetic construct
  misc_feature 1..20: note = Description of Artificial Sequence: Synthetic oligonucleotide
  misc_feature 1..20: note = Target: FXN; (-) strand; PAM type: YTN; PAM sequence: TTC
  source 1..20: mol_type = other DNA
caaggggaagcagcactttt

SEQ ID NO: 24479 - DNA, 20 bp, synthetic construct
  misc_feature 1..20: note = Description of Artificial Sequence: Synthetic oligonucleotide
  misc_feature 1..20: note = Target: FXN; (-) strand; PAM type: YTN; PAM sequence: CTT
  source 1..20: mol_type = other DNA
ccaaggggaagcagcacttt

SEQ ID NO: 24480 - DNA, 20 bp, synthetic construct
  misc_feature 1..20: note = Description of Artificial Sequence: Synthetic oligonucleotide
  misc_feature 1..20: note = Target: FXN; (-) strand; PAM type: YTN; PAM sequence: CTA
  source 1..20: mol_type = other DNA
cttccaaggggaagcagcac

SEQ ID NO: 24481 - DNA, 20 bp, synthetic construct
  misc_feature 1..20: note = Description of Artificial Sequence: Synthetic oligonucleotide
  misc_feature 1..20: note = Target: FXN; (-) strand; PAM type: YTN; PAM sequence: TTC
  source 1..20: mol_type = other DNA
tacttccaaggggaagcagc

SEQ ID NO: 24482 - DNA, 20 bp, synthetic construct
  misc_feature 1..20: note = Description of Artificial Sequence: Synthetic oligonucleotide
  misc_feature 1..20: note = Target: FXN; (-) strand; PAM type: YTN; PAM sequence: TTT
  source 1..20: mol_type = other DNA
ctacttccaaggggaagcag

SEQ ID NO: 24483 - DNA, 20 bp, synthetic construct
  misc_feature 1..20: note = Description of Artificial Sequence: Synthetic oligonucleotide
  misc_feature 1..20: note = Target: FXN; (-) strand; PAM type: YTN; PAM sequence: CTT
  source 1..20: mol_type = other DNA
tctacttccaaggggaagca

SEQ ID NO: 24484 - DNA, 20 bp, synthetic construct
  misc_feature 1..20: note = Description of Artificial Sequence: Synthetic oligonucleotide
  misc_feature 1..20: note = Target: FXN; (-) strand; PAM type: YTN; PAM sequence: TTA
  source 1..20: mol_type = other DNA
taaaagtgtccactttctac

SEQ ID NO: 24485 - DNA, 20 bp, synthetic construct
  misc_feature 1..20: note = Description of Artificial Sequence: Synthetic oligonucleotide
  misc_feature 1..20: note = Target: FXN; (-) strand; PAM type: YTN; PAM sequence: CTT
  source 1..20: mol_type = other DNA
ataaaagtgtccactttcta

SEQ ID NO: 24486 - DNA, 20 bp, synthetic construct
  misc_feature 1..20: note = Description of Artificial Sequence: Synthetic oligonucleotide
  misc_feature 1..20: note = Target: FXN; (-) strand; PAM type: YTN; PAM sequence: TTA
  source 1..20: mol_type = other DNA
ccttataaaagtgtccactt

SEQ ID NO: 24487 - DNA, 20 bp, synthetic construct
  misc_feature 1..20: note = Description of Artificial Sequence: Synthetic oligonucleotide
  misc_feature 1..20: note = Target: FXN; (-) strand; PAM type: YTN; PAM sequence: CTT
  source 1..20: mol_type = other DNA
accttataaaagtgtccact

SEQ ID NO: 24488 - DNA, 20 bp, synthetic construct
  misc_feature 1..20: note = Description of Artificial Sequence: Synthetic oligonucleotide
  misc_feature 1..20: note = Target: FXN; (-) strand; PAM type: YTN; PAM sequence: TTC
  source 1..20: mol_type = other DNA
cccccttaccttataaaagt

SEQ ID NO: 24489 - DNA, 20 bp, synthetic construct
  misc_feature 1..20: note = Description of Artificial Sequence: Synthetic oligonucleotide
  misc_feature 1..20: note = Target: FXN; (-) strand; PAM type: YTN; PAM sequence: CTT
  source 1..20: mol_type = other DNA
ccccccttaccttataaaag

SEQ ID NO: 24490 - DNA, 20 bp, synthetic construct
  misc_feature 1..20: note = Description of Artificial Sequence: Synthetic oligonucleotide
  misc_feature 1..20: note = Target: FXN; (-) strand; PAM type: YTN; PAM sequence: TTG
  source 1..20: mol_type = other DNA
cacacttccccccttacctt

SEQ ID NO: 24491 - DNA, 20 bp, synthetic construct
  misc_feature 1..20: note = Description of Artificial Sequence: Synthetic oligonucleotide
  misc_feature 1..20: note = Target: FXN; (-) strand; PAM type: YTN; PAM sequence: CTT
  source 1..20: mol_type = other DNA
gcacacttccccccttacct

SEQ ID NO: 24492 - DNA, 20 bp, synthetic construct
  misc_feature 1..20: note = Description of Artificial Sequence: Synthetic oligonucleotide
  misc_feature 1..20: note = Target: FXN; (-) strand; PAM type: YTN; PAM sequence: TTG
  source 1..20: mol_type = other DNA
cccttgcacacttcccccct

SEQ ID NO: 24493 - DNA, 20 bp, synthetic construct
  misc_feature 1..20: note = Description of Artificial Sequence: Synthetic oligonucleotide
  misc_feature 1..20: note = Target: FXN; (-) strand; PAM type: YTN; PAM sequence: CTT
  source 1..20: mol_type = other DNA
gcccttgcacacttcccccc

SEQ ID NO: 24494 - DNA, 20 bp, synthetic construct
  misc_feature 1..20: note = Description of Artificial Sequence: Synthetic oligonucleotide
  misc_feature 1..20: note = Target: FXN; (-) strand; PAM type: YTN; PAM sequence: CTA
  source 1..20: mol_type = other DNA
gcagagggacccccccactt

SEQ ID NO: 24495 - DNA, 20 bp, synthetic construct
  misc_feature 1..20: note = Description of Artificial Sequence: Synthetic oligonucleotide
  misc_feature 1..20: note = Target: FXN; (-) strand; PAM type: YTN; PAM sequence: CTG
  source 1..20: mol_type = other DNA
tagagtatgcacggaactag

SEQ ID NO: 24496 - DNA, 20 bp, synthetic construct
  misc_feature 1..20: note = Description of Artificial Sequence: Synthetic oligonucleotide
  misc_feature 1..20: note = Target: FXN; (-) strand; PAM type: YTN; PAM sequence: CTG
  source 1..20: mol_type = other DNA
tcctgtagagtatgcacgga

SEQ ID NO: 24497 - DNA, 20 bp, synthetic construct
  misc_feature 1..20: note = Description of Artificial Sequence: Synthetic oligonucleotide
  misc_feature 1..20: note = Target: FXN; (-) strand; PAM type: YTN; PAM sequence: CTA
  source 1..20: mol_type = other DNA
accaggaaggtgccaagtca

SEQ ID NO: 24498 - DNA, 20 bp, synthetic construct
  misc_feature 1..20: note = Description of Artificial Sequence: Synthetic oligonucleotide
  misc_feature 1..20: note = Target: FXN; (-) strand; PAM type: YTN; PAM sequence: TTA
  source 1..20: mol_type = other DNA
ctaaccaggaaggtgccaag

SEQ ID NO: 24499 - DNA, 20 bp, synthetic construct
  misc_feature 1..20: note = Description of Artificial Sequence: Synthetic oligonucleotide
  misc_feature 1..20: note = Target: FXN; (-) strand; PAM type: YTN; PAM sequence: TTA
  source 1..20: mol_type = other DNA
ttactaaccaggaaggtgcc

SEQ ID NO: 24500 - DNA, 20 bp, synthetic construct
  misc_feature 1..20: note = Description of Artificial Sequence: Synthetic oligonucleotide
  misc_feature 1..20: note = Target: FXN; (-) strand; PAM type: YTN; PAM sequence: CTT
  source 1..20: mol_type = other DNA
attactaaccaggaaggtgc

SEQ ID NO: 24501 - DNA, 20 bp, synthetic construct
  misc_feature 1..20: note = Description of Artificial Sequence: Synthetic oligonucleotide
  misc_feature 1..20: note = Target: FXN; (-) strand; PAM type: YTN; PAM sequence: CTA
  source 1..20: mol_type = other DNA
cagcttattactaaccagga

SEQ ID NO: 24502 - DNA, 20 bp, synthetic construct
  misc_feature 1..20: note = Description of Artificial Sequence: Synthetic oligonucleotide
  misc_feature 1..20: note = Target: FXN; (-) strand; PAM type: YTN; PAM sequence: CTG
  source 1..20: mol_type = other DNA
ctacagcttattactaacca

SEQ ID NO: 24503 - DNA, 20 bp, synthetic construct
  misc_feature 1..20: note = Description of Artificial Sequence: Synthetic oligonucleotide
  misc_feature 1..20: note = Target: FXN; (-) strand; PAM type: YTN; PAM sequence: TTG
  source 1..20: mol_type = other DNA
gccactgctacagcttatta

SEQ ID NO: 24504 - DNA, 20 bp, synthetic construct
  misc_feature 1..20: note = Description of Artificial Sequence: Synthetic oligonucleotide
  misc_feature 1..20: note = Target: FXN; (-) strand; PAM type: YTN; PAM sequence: CTT
  source 1..20: mol_type = other DNA
ggccactgctacagcttatt

SEQ ID NO: 24505 - DNA, 20 bp, synthetic construct
  misc_feature 1..20: note = Description of Artificial Sequence: Synthetic oligonucleotide
  misc_feature 1..20: note = Target: FXN; (-) strand; PAM type: YTN; PAM sequence: CTG
  source 1..20: mol_type = other DNA
aaagcatgcccacttggcca

SEQ ID NO: 24506 - DNA, 20 bp, synthetic construct
  misc_feature 1..20: note = Description of Artificial Sequence: Synthetic oligonucleotide
  misc_feature 1..20: note = Target: FXN; (-) strand; PAM type: YTN; PAM sequence: CTG
  source 1..20: mol_type = other DNA
ggagggcatactgaaagcat

SEQ ID NO: 24507 - DNA, 20 bp, synthetic construct
  misc_feature 1..20: note = Description of Artificial Sequence: Synthetic oligonucleotide
  misc_feature 1..20: note = Target: FXN; (-) strand; PAM type: YTN; PAM sequence: TTC
  source 1..20: mol_type = other DNA
actgggagggcatactgaaa

SEQ ID NO: 24508 - DNA, 20 bp, synthetic construct
  misc_feature 1..20: note = Description of Artificial Sequence: Synthetic oligonucleotide
  misc_feature 1..20: note = Target: FXN; (-) strand; PAM type: YTN; PAM sequence: TTC
  source 1..20: mol_type = other DNA
attcactgggagggcatact

SEQ ID NO: 24509 - DNA, 20 bp, synthetic construct
  misc_feature 1..20: note = Description of Artificial Sequence: Synthetic oligonucleotide
  misc_feature 1..20: note = Target: FXN; (-) strand; PAM type: YTN; PAM sequence: TTT
  source 1..20: mol_type = other DNA
cattcactgggagggcatac

SEQ ID NO: 24510 - DNA, 20 bp, synthetic construct
  misc_feature 1..20: note = Description of Artificial Sequence: Synthetic oligonucleotide
  misc_feature 1..20: note = Target: FXN; (-) strand; PAM type: YTN; PAM sequence: CTT
  source 1..20: mol_type = other DNA
tcattcactgggagggcata

SEQ ID NO: 24511 - DNA, 20 bp, synthetic construct
  misc_feature 1..20: note = Description of Artificial Sequence: Synthetic oligonucleotide
  misc_feature 1..20: note = Target: FXN; (-) strand; PAM type: YTN; PAM sequence: CTC
  source 1..20: mol_type = other DNA
aggactttcattcactggga

SEQ ID NO: 24512 - DNA, 20 bp, synthetic construct
  misc_feature 1..20: note = Description of Artificial Sequence: Synthetic oligonucleotide
  misc_feature 1..20: note = Target: FXN; (-) strand; PAM type: YTN; PAM sequence: TTG
  source 1..20: mol_type = other DNA
cctcaggactttcattcact

SEQ ID NO: 24513 - DNA, 20 bp, synthetic construct
  misc_feature 1..20: note = Description of Artificial Sequence: Synthetic oligonucleotide
  misc_feature 1..20: note = Target: FXN; (-) strand; PAM type: YTN; PAM sequence: TTG
  source 1..20: mol_type = other DNA
ggggttgcctcaggactttc

SEQ ID NO: 24514 - DNA, 20 bp, synthetic construct
  misc_feature 1..20: note = Description of Artificial Sequence: Synthetic oligonucleotide
  misc_feature 1..20: note = Target: FXN; (-) strand; PAM type: YTN; PAM sequence: CTT
  source 1..20: mol_type = other DNA
gggggttgcctcaggacttt

SEQ ID NO: 24515 - DNA, 20 bp, synthetic construct
  misc_feature 1..20: note = Description of Artificial Sequence: Synthetic oligonucleotide
  misc_feature 1..20: note = Target: FXN; (-) strand; PAM type: YTN; PAM sequence: TTC
  source 1..20: mol_type = other DNA
cacccttgggggttgcctca

SEQ ID NO: 24516 - DNA, 20 bp, synthetic construct
  misc_feature 1..20: note = Description of Artificial Sequence: Synthetic oligonucleotide
  misc_feature 1..20: note = Target: FXN; (-) strand; PAM type: YTN; PAM sequence: CTT
  source 1..20: mol_type = other DNA
ccacccttgggggttgcctc

SEQ ID NO: 24517 - DNA, 20 bp, synthetic construct
  misc_feature 1..20: note = Description of Artificial Sequence: Synthetic oligonucleotide
  misc_feature 1..20: note = Target: FXN; (-) strand; PAM type: YTN; PAM sequence: CTG
  source 1..20: mol_type = other DNA
gcacttccacccttgggggt

SEQ ID NO: 24518 - DNA, 20 bp, synthetic construct
  misc_feature 1..20: note = Description of Artificial Sequence: Synthetic oligonucleotide
  misc_feature 1..20: note = Target: FXN; (-) strand; PAM type: YTN; PAM sequence: CTC
  source 1..20: mol_type = other DNA
cagtgggtggtggcctggca

SEQ ID NO: 24519 - DNA, 20 bp, synthetic construct
  misc_feature 1..20: note = Description of Artificial Sequence: Synthetic oligonucleotide
  misc_feature 1..20: note = Target: FXN; (-) strand; PAM type: YTN; PAM sequence: TTC
  source 1..20: mol_type = other DNA
acctccagtgggtggtggcc

SEQ ID NO: 24520 - DNA, 20 bp, synthetic construct
  misc_feature 1..20: note = Description of Artificial Sequence: Synthetic oligonucleotide
  misc_feature 1..20: note = Target: FXN; (-) strand; PAM type: YTN; PAM sequence: TTT
  source 1..20: mol_type = other DNA
cacctccagtgggtggtggc

SEQ ID NO: 24521 - DNA, 20 bp, synthetic construct
  misc_feature 1..20: note = Description of Artificial Sequence: Synthetic oligonucleotide
  misc_feature 1..20: note = Target: FXN; (-) strand; PAM type: YTN; PAM sequence: CTT
  source 1..20: mol_type = other DNA
tcacctccagtgggtggtgg

SEQ ID NO: 24522 - DNA, 20 bp, synthetic construct
  misc_feature 1..20: note = Description of Artificial Sequence: Synthetic oligonucleotide
  misc_feature 1..20: note = Target: FXN; (-) strand; PAM type: YTN; PAM sequence: TTC
  source 1..20: mol_type = other DNA
gcagaccaaagcaaacccat

SEQ ID NO: 24523 - DNA, 20 bp, synthetic construct
  misc_feature 1..20: note = Description of Artificial Sequence: Synthetic oligonucleotide
  misc_feature 1..20: note = Target: FXN; (-) strand; PAM type: YTN; PAM sequence: CTC
  source 1..20: mol_type = other DNA
cacatgacagtagattcgca

SEQ ID NO: 24524 - DNA, 20 bp, synthetic construct
  misc_feature 1..20: note = Description of Artificial Sequence: Synthetic oligonucleotide
  misc_feature 1..20: note = Target: FXN; (-) strand; PAM type: YTN; PAM sequence: CTC
  source 1..20: mol_type = other DNA
tccacatgacagtagattcg

SEQ ID NO: 24525 - DNA, 20 bp, synthetic construct
  misc_feature 1..20: note = Description of Artificial Sequence: Synthetic oligonucleotide
  misc_feature 1..20: note = Target: FXN; (-) strand; PAM type: YTN; PAM sequence: TTC
  source 1..20: mol_type = other DNA
cagagcacagatctctccac

SEQ ID NO: 24526 - DNA, 20 bp, synthetic construct
  misc_feature 1..20: note = Description of Artificial Sequence: Synthetic oligonucleotide
  misc_feature 1..20: note = Target: FXN; (-) strand; PAM type: YTN; PAM sequence: CTT
  source 1..20: mol_type = other DNA
ccagagcacagatctctcca

SEQ ID NO: 24527 - DNA, 20 bp, synthetic construct
  misc_feature 1..20: note = Description of Artificial Sequence: Synthetic oligonucleotide
  misc_feature 1..20: note = Target: FXN; (-) strand; PAM type: YTN; PAM sequence: CTC
  source 1..20: mol_type = other DNA
ttccagagcacagatctctc

SEQ ID NO: 24528 - DNA, 20 bp, synthetic construct
  misc_feature 1..20: note = Description of Artificial Sequence: Synthetic oligonucleotide
  misc_feature 1..20: note = Target: FXN; (-) strand; PAM type: YTN; PAM sequence: CTG
  source 1..20: mol_type = other DNA
tatgctcttccagagcacag

SEQ ID NO: 24529 - DNA, 20 bp, synthetic construct
  misc_feature 1..20: note = Description of Artificial Sequence: Synthetic oligonucleotide
  misc_feature 1..20: note = Target: FXN; (-) strand; PAM type: YTN; PAM sequence: CTA
  source 1..20: mol_type = other DNA
actgtatgctcttccagagc

SEQ ID NO: 24530 - DNA, 20 bp, synthetic construct
  misc_feature 1..20: note = Description of Artificial Sequence: Synthetic oligonucleotide
  misc_feature 1..20: note = Target: FXN; (-) strand; PAM type: YTN; PAM sequence: TTC
  source 1..20: mol_type = other DNA
taactgtatgctcttccaga

SEQ ID NO: 24531 - DNA, 20 bp, synthetic construct
  misc_feature 1..20: note = Description of Artificial Sequence: Synthetic oligonucleotide
  misc_feature 1..20: note = Target: FXN; (-) strand; PAM type: YTN; PAM sequence: TTT
  source 1..20: mol_type = other DNA
ctaactgtatgctcttccag

SEQ ID NO: 24532 - DNA, 20 bp, synthetic construct
  misc_feature 1..20: note = Description of Artificial Sequence: Synthetic oligonucleotide
  misc_feature 1..20: note = Target: FXN; (-) strand; PAM type: YTN; PAM sequence: TTT
  source 1..20: mol_type = other DNA
tctaactgtatgctcttcca

SEQ ID NO: 24533 - DNA, 20 bp, synthetic construct
  misc_feature 1..20: note = Description of Artificial Sequence: Synthetic oligonucleotide
  misc_feature 1..20: note = Target: FXN; (-) strand; PAM type: YTN; PAM sequence: CTT
  source 1..20: mol_type = other DNA
ttctaactgtatgctcttcc

SEQ ID NO: 24534 - DNA, 20 bp, synthetic construct
  misc_feature 1..20: note = Description of Artificial Sequence: Synthetic oligonucleotide
  misc_feature 1..20: note = Target: FXN; (-) strand; PAM type: YTN; PAM sequence: TTC
  source 1..20: mol_type = other DNA
agggcaagcttttctaactg

SEQ ID NO: 24535 - DNA, 20 bp, synthetic construct
  misc_feature 1..20: note = Description of Artificial Sequence: Synthetic oligonucleotide
  misc_feature 1..20: note = Target: FXN; (-) strand; PAM type: YTN; PAM sequence: CTT
  source 1..20: mol_type = other DNA
cagggcaagcttttctaact

SEQ ID NO: 24536 - DNA, 20 bp, synthetic construct
  misc_feature 1..20: note = Description of Artificial Sequence: Synthetic oligonucleotide
  misc_feature 1..20: note = Target: FXN; (-) strand; PAM type: YTN; PAM sequence: TTC
  source 1..20: mol_type = other DNA
ccttcagggcaagcttttct

SEQ ID NO: 24537 - DNA, 20 bp, synthetic construct
  misc_feature 1..20: note = Description of Artificial Sequence: Synthetic oligonucleotide
  misc_feature 1..20: note = Target: FXN; (-) strand; PAM type: YTN; PAM sequence: TTC
  source 1..20: mol_type = other DNA
accatacattcccttcaggg

SEQ ID NO: 24538 - DNA, 20 bp, synthetic construct
  misc_feature 1..20: note = Description of Artificial Sequence: Synthetic oligonucleotide
  misc_feature 1..20: note = Target: FXN; (-) strand; PAM type: YTN; PAM sequence: CTT
  source 1..20: mol_type = other DNA
caccatacattcccttcagg

SEQ ID NO: 24539 - DNA, 20 bp, synthetic construct
  misc_feature 1..20: note = Description of Artificial Sequence: Synthetic oligonucleotide
  misc_feature 1..20: note = Target: FXN; (-) strand; PAM type: YTN; PAM sequence: CTC
  source 1..20: mol_type = other DNA
cccttcaccatacattccct

SEQ ID NO: 24540 - DNA, 20 bp, synthetic construct
  misc_feature 1..20: note = Description of Artificial Sequence: Synthetic oligonucleotide
  misc_feature 1..20: note = Target: FXN; (-) strand; PAM type: YTN; PAM sequence: TTC
  source 1..20: mol_type = other DNA
acctccccttcaccatacat

SEQ ID NO: 24541 - DNA, 20 bp, synthetic construct
  misc_feature 1..20: note = Description of Artificial Sequence: Synthetic oligonucleotide
  misc_feature 1..20: note = Target: FXN; (-) strand; PAM type: YTN; PAM sequence: TTT
  source 1..20: mol_type = other DNA
cacctccccttcaccataca

SEQ ID NO: 24542 - DNA, 20 bp, synthetic construct
  misc_feature 1..20: note = Description of Artificial Sequence: Synthetic oligonucleotide
  misc_feature 1..20: note = Target: FXN; (-) strand; PAM type: YTN; PAM sequence: CTT
  source 1..20: mol_type = other DNA
tcacctccccttcaccatac

SEQ ID NO: 24543 - DNA, 20 bp, synthetic construct
  misc_feature 1..20: note = Description of Artificial Sequence: Synthetic oligonucleotide
  misc_feature 1..20: note = Target: FXN; (-) strand; PAM type: YTN; PAM sequence: TTC
  source 1..20: mol_type = other DNA
agaaatgcaaatataacctt

SEQ ID NO: 24544 - DNA, 20 bp, synthetic construct
  misc_feature 1..20: note = Description of Artificial Sequence: Synthetic oligonucleotide
  misc_feature 1..20: note = Target: FXN; (-) strand; PAM type: YTN; PAM sequence: CTT
  source 1..20: mol_type = other DNA
cagaaatgcaaatataacct

SEQ ID NO: 24545 - DNA, 20 bp, synthetic construct
  misc_feature 1..20: note = Description of Artificial Sequence: Synthetic oligonucleotide
  misc_feature 1..20: note = Target: FXN; (-) strand; PAM type: YTN; PAM sequence: TTA
  source 1..20: mol_type = other DNA
gcccttcagaaatgcaaata

SEQ ID NO: 24546 - DNA, 20 bp, synthetic construct
  misc_feature 1..20: note = Description of Artificial Sequence: Synthetic oligonucleotide
  misc_feature 1..20: note = Target: FXN; (-) strand; PAM type: YTN; PAM sequence: CTT
  source 1..20: mol_type = other DNA
agcccttcagaaatgcaaat

SEQ ID NO: 24547 - DNA, 20 bp, synthetic construct
  misc_feature 1..20: note = Description of Artificial Sequence: Synthetic oligonucleotide
  misc_feature 1..20: note = Target: FXN; (-) strand; PAM type: YTN; PAM sequence: CTA
  source 1..20: mol_type = other DNA
cttagcccttcagaaatgca

SEQ ID NO: 24548 - DNA, 20 bp, synthetic construct
  misc_feature 1..20: note = Description of Artificial Sequence: Synthetic oligonucleotide
  misc_feature 1..20: note = Target: FXN; (-) strand; PAM type: YTN; PAM sequence: TTC
  source 1..20: mol_type = other DNA
ctacttagcccttcagaaat

SEQ ID NO: 24549 - DNA, 20 bp, synthetic construct
  misc_feature 1..20: note = Description of Artificial Sequence: Synthetic oligonucleotide
  misc_feature 1..20: note = Target: FXN; (-) strand; PAM type: YTN; PAM sequence: TTT
  source 1..20: mol_type = other DNA
cctacttagcccttcagaaa

SEQ ID NO: 24550 - DNA, 20 bp, synthetic construct
  misc_feature 1..20: note = Description of Artificial Sequence: Synthetic oligonucleotide
  misc_feature 1..20: note = Target: FXN; (-) strand; PAM type: YTN; PAM sequence: TTC
  source 1..20: mol_type = other DNA
ccggtttcctacttagccct

SEQ ID NO: 24551 - DNA, 20 bp, synthetic construct
  misc_feature 1..20: note = Description of Artificial Sequence: Synthetic oligonucleotide
  misc_feature 1..20: note = Target: FXN; (-) strand; PAM type: YTN; PAM sequence: CTG
  source 1..20: mol_type = other DNA
gttcccggtttcctacttag

SEQ ID NO: 24552 - DNA, 20 bp, synthetic construct
  misc_feature 1..20: note = Description of Artificial Sequence: Synthetic oligonucleotide
  misc_feature 1..20: note = Target: FXN; (-) strand; PAM type: YTN; PAM sequence: CTC
  source 1..20: mol_type = other DNA
ccctggttcccggtttccta

SEQ ID NO: 24553 - DNA, 20 bp, synthetic construct
  misc_feature 1..20: note = Description of Artificial Sequence: Synthetic oligonucleotide
  misc_feature 1..20: note = Target: FXN; (-) strand; PAM type: YTN; PAM sequence: CTC
  source 1..20: mol_type = other DNA
tcccctggttcccggtttcc

SEQ ID NO: 24554 - DNA, 20 bp, synthetic construct
  misc_feature 1..20: note = Description of Artificial Sequence: Synthetic oligonucleotide
  misc_feature 1..20: note = Target: FXN; (-) strand; PAM type: YTN; PAM sequence: CTC
  source 1..20: mol_type = other DNA
ctctcccctggttcccggtt

SEQ ID NO: 24555 - DNA, 20 bp, synthetic construct
  misc_feature 1..20: note = Description of Artificial Sequence: Synthetic oligonucleotide
  misc_feature 1..20: note = Target: FXN; (-) strand; PAM type: YTN; PAM sequence: TTC
  source 1..20: mol_type = other DNA
tcctctcccctggttcccgg

SEQ ID NO: 24556 - DNA, 20 bp, synthetic construct
  misc_feature 1..20: note = Description of Artificial Sequence: Synthetic oligonucleotide
  misc_feature 1..20: note = Target: FXN; (-) strand; PAM type: YTN; PAM sequence: CTT
  source 1..20: mol_type = other DNA
ctcctctcccctggttcccg

SEQ ID NO: 24557 - DNA, 20 bp, synthetic construct
  misc_feature 1..20: note = Description of Artificial Sequence: Synthetic oligonucleotide
  misc_feature 1..20: note = Target: FXN; (-) strand; PAM type: YTN; PAM sequence: CTC
  source 1..20: mol_type = other DNA
ttctcctctcccctggttcc

SEQ ID NO: 24558 - DNA, 20 bp, synthetic construct
  misc_feature 1..20: note = Description of Artificial Sequence: Synthetic oligonucleotide
  misc_feature 1..20: note = Target: FXN; (-) strand; PAM type: YTN; PAM sequence: TTC
  source 1..20: mol_type = other DNA
tcttctcctctcccctggtt

SEQ ID NO: 24559 - DNA, 20 bp, synthetic construct
  misc_feature 1..20: note = Description of Artificial Sequence: Synthetic oligonucleotide
  misc_feature 1..20: note = Target: FXN; (-) strand; PAM type: YTN; PAM sequence: CTT
  source 1..20: mol_type = other DNA
ctcttctcctctcccctggt

SEQ ID NO: 24560 - DNA, 20 bp, synthetic construct
  misc_feature 1..20: note = Description of Artificial Sequence: Synthetic oligonucleotide
  misc_feature 1..20: note = Target: FXN; (-) strand; PAM type: YTN; PAM sequence: CTC
  source 1..20: mol_type = other DNA
ttctcttctcctctcccctg

SEQ ID NO: 24561 - DNA, 20 bp, synthetic construct
  misc_feature 1..20: note = Description of Artificial Sequence: Synthetic oligonucleotide
  misc_feature 1..20: note = Target: FXN; (-) strand; PAM type: YTN; PAM sequence: CTC
  source 1..20: mol_type = other DNA
tcttctcttctcctctcccc

SEQ ID NO: 24562 - DNA, 20 bp, synthetic construct
  misc_feature 1..20: note = Description of Artificial Sequence: Synthetic oligonucleotide
  misc_feature 1..20: note = Target: FXN; (-) strand; PAM type: YTN; PAM sequence: TTA
  source 1..20: mol_type = other DNA
tcctctcttctcttctcctc

SEQ ID NO: 24563 - DNA, 20 bp, synthetic construct
  misc_feature 1..20: note = Description of Artificial Sequence: Synthetic oligonucleotide
  misc_feature 1..20: note = Target: FXN; (-) strand; PAM type: YTN; PAM sequence: TTA
  source 1..20: mol_type = other DNA
aaaaaaattatcctctcttc

SEQ ID NO: 24564 - DNA, 20 bp, synthetic construct
  misc_feature 1..20: note = Description of Artificial Sequence: Synthetic oligonucleotide
  misc_feature 1..20: note = Target: FXN; (-) strand; PAM type: YTN; PAM sequence: CTT
  source 1..20: mol_type = other DNA
aaaaaaaattatcctctctt

SEQ ID NO: 24565 - DNA, 20 bp, synthetic construct
  misc_feature 1..20: note = Description of Artificial Sequence: Synthetic oligonucleotide
  misc_feature 1..20: note = Target: FXN; (-) strand; PAM type: YTN; PAM sequence: TTC
  source 1..20: mol_type = other DNA
ttaaaaaaaattatcctctc

SEQ ID NO: 24566 - DNA, 20 bp, synthetic construct
  misc_feature 1..20: note = Description of Artificial Sequence: Synthetic oligonucleotide
  misc_feature 1..20: note = Target: FXN; (-) strand; PAM type: YTN; PAM sequence: TTT
  source 1..20: mol_type = other DNA
cttaaaaaaaattatcctct

SEQ ID NO: 24567 - DNA, 20 bp, synthetic construct
  misc_feature 1..20: note = Description of Artificial Sequence: Synthetic oligonucleotide
  misc_feature 1..20: note = Target: FXN; (-) strand; PAM type: YTN; PAM sequence: TTT
  source 1..20: mol_type = other DNA
tcttaaaaaaaattatcctc

SEQ ID NO: 24568 - DNA, 20 bp, synthetic construct
  misc_feature 1..20: note = Description of Artificial Sequence: Synthetic oligonucleotide
  misc_feature 1..20: note = Target: FXN; (-) strand; PAM type: YTN; PAM sequence: CTT
  source 1..20: mol_type = other DNA
ttcttaaaaaaaattatcct

SEQ ID NO: 24569 - DNA, 20 bp, synthetic construct
  misc_feature 1..20: note = Description of Artificial Sequence: Synthetic oligonucleotide
  misc_feature 1..20: note = Target: FXN; (-) strand; PAM type: YTN; PAM sequence: TTG
  source 1..20: mol_type = other DNA
cttttcttaaaaaaaattat

SEQ ID NO: 24570 - DNA, 20 bp, synthetic construct
  misc_feature 1..20: note = Description of Artificial Sequence: Synthetic oligonucleotide
  misc_feature 1..20: note = Target: FXN; (-) strand; PAM type: YTN; PAM sequence: CTA
  source 1..20: mol_type = other DNA
agaaaaagggaatatgttgc

SEQ ID NO: 24571 - DNA, 20 bp, synthetic construct
  misc_feature 1..20: note = Description of Artificial Sequence: Synthetic oligonucleotide
  misc_feature 1..20: note = Target: FXN; (-) strand; PAM type: YTN; PAM sequence: TTC
  source 1..20: mol_type = other DNA
taagaaaaagggaatatgtt

SEQ ID NO: 24572 - DNA, 20 bp, synthetic construct
  misc_feature 1..20: note = Description of Artificial Sequence: Synthetic oligonucleotide
  misc_feature 1..20: note = Target: FXN; (-) strand; PAM type: YTN; PAM sequence: TTT
  source 1..20: mol_type = other DNA
ctaagaaaaagggaatatgt

SEQ ID NO: 24573 - DNA, 20 bp, synthetic construct
  misc_feature 1..20: note = Description of Artificial Sequence: Synthetic oligonucleotide
  misc_feature 1..20: note = Target: FXN; (-) strand; PAM type: YTN; PAM sequence: TTT
  source 1..20: mol_type = other DNA
tctaagaaaaagggaatatg

SEQ ID NO: 24574 - DNA, 20 bp, synthetic construct
  misc_feature 1..20: note = Description of Artificial Sequence: Synthetic oligonucleotide
  misc_feature 1..20: note = Target: FXN; (-) strand; PAM type: YTN; PAM sequence: TTT
  source 1..20: mol_type = other DNA
ttctaagaaaaagggaatat

SEQ ID NO: 24575 - DNA, 20 bp, synthetic construct
  misc_feature 1..20: note = Description of Artificial Sequence: Synthetic oligonucleotide
  misc_feature 1..20: note = Target: FXN; (-) strand; PAM type: YTN; PAM sequence: TTT
  source 1..20: mol_type = other DNA
tttctaagaaaaagggaata

SEQ ID NO: 24576 - DNA, 20 bp, synthetic construct
  misc_feature 1..20: note = Description of Artificial Sequence: Synthetic oligonucleotide
  misc_feature 1..20: note = Target: FXN; (-) strand; PAM type: YTN; PAM sequence: CTC
  source 1..20: mol_type = other DNA
cattttttctaagaaaaagg

SEQ ID NO: 24577 - DNA, 20 bp, synthetic construct
  misc_feature 1..20: note = Description of Artificial Sequence: Synthetic oligonucleotide
  misc_feature 1..20: note = Target: FXN; (-) strand; PAM type: YTN; PAM sequence: CTG
  source 1..20: mol_type = other DNA
taaccgagtgctccattttt

SEQ ID NO: 24578 - DNA, 20 bp, synthetic construct
  misc_feature 1..20: note = Description of Artificial Sequence: Synthetic oligonucleotide
  misc_feature 1..20: note = Target: FXN; (-) strand; PAM type: YTN; PAM sequence: TTC
  source 1..20: mol_type = other DNA
gagtgcctgtaaccgagtgc

SEQ ID NO: 24579 - DNA, 20 bp, synthetic construct
  misc_feature 1..20: note = Description of Artificial Sequence: Synthetic oligonucleotide
  misc_feature 1..20: note = Target: FXN; (-) strand; PAM type: YTN; PAM sequence: CTA
  source 1..20: mol_type = other DNA
cattcgagtgcctgtaaccg

SEQ ID NO: 24580 - DNA, 20 bp, synthetic construct
  misc_feature 1..20: note = Description of Artificial Sequence: Synthetic oligonucleotide
  misc_feature 1..20: note = Target: FXN; (-) strand; PAM type: YTN; PAM sequence: TTC
  source 1..20: mol_type = other DNA
tacattcgagtgcctgtaac

SEQ ID NO: 24581 - DNA, 20 bp, synthetic construct
  misc_feature 1..20: note = Description of Artificial Sequence: Synthetic oligonucleotide
  misc_feature 1..20: note = Target: FXN; (-) strand; PAM type: YTN; PAM sequence: CTT
  source 1..20: mol_type = other DNA
ctacattcgagtgcctgtaa

SEQ ID NO: 24582 - DNA, 20 bp, synthetic construct
  misc_feature 1..20: note = Description of Artificial Sequence: Synthetic oligonucleotide
  misc_feature 1..20: note = Target: FXN; (-) strand; PAM type: YTN; PAM sequence: CTA
  source 1..20: mol_type = other DNA
cttctacattcgagtgcctg

SEQ ID NO: 24583 - DNA, 20 bp, synthetic construct
  misc_feature 1..20: note = Description of Artificial Sequence: Synthetic oligonucleotide
  misc_feature 1..20: note = Target: FXN; (-) strand; PAM type: YTN; PAM sequence: TTG
  source 1..20: mol_type = other DNA
ctacttctacattcgagtgc

SEQ ID NO: 24584 - DNA, 20 bp, synthetic construct
  misc_feature 1..20: note = Description of Artificial Sequence: Synthetic oligonucleotide
  misc_feature 1..20: note = Target: FXN; (-) strand; PAM type: YTN; PAM sequence: TTA
  source 1..20: mol_type = other DNA
tatattgctacttctacatt

SEQ ID NO: 24585 - DNA, 20 bp, synthetic construct
  misc_feature 1..20: note = Description of Artificial Sequence: Synthetic oligonucleotide
  misc_feature 1..20: note = Target: FXN; (-) strand; PAM type: YTN; PAM sequence: TTT
  source 1..20: mol_type = other DNA
atatattgctacttctacat

SEQ ID NO: 24586 - DNA, 20 bp, synthetic construct
  misc_feature 1..20: note = Description of Artificial Sequence: Synthetic oligonucleotide
  misc_feature 1..20: note = Target: FXN; (-) strand; PAM type: YTN; PAM sequence: TTA
  source 1..20: mol_type = other DNA
atgcataatttatatattgc

SEQ ID NO: 24587 - DNA, 20 bp, synthetic construct
  misc_feature 1..20: note = Description of Artificial Sequence: Synthetic oligonucleotide
  misc_feature 1..20: note = Target: FXN; (-) strand; PAM type: YTN; PAM sequence: TTA
  source 1..20: mol_type = other DNA
taacccattaatgcataatt

SEQ ID NO: 24588 - DNA, 20 bp, synthetic construct
  misc_feature 1..20: note = Description of Artificial Sequence: Synthetic oligonucleotide
  misc_feature 1..20: note = Target: FXN; (-) strand; PAM type: YTN; PAM sequence: TTC
  source 1..20: mol_type = other DNA
agtgaattataacccattaa

SEQ ID NO: 24589 - DNA, 20 bp, synthetic construct
  misc_feature 1..20: note = Description of Artificial Sequence: Synthetic oligonucleotide
  misc_feature 1..20: note = Target: FXN; (-) strand; PAM type: YTN; PAM sequence: TTT
  source 1..20: mol_type = other DNA
cagtgaattataacccatta

SEQ ID NO: 24590 - DNA, 20 bp, synthetic construct
  misc_feature 1..20: note = Description of Artificial Sequence: Synthetic oligonucleotide
  misc_feature 1..20: note = Target: FXN; (-) strand; PAM type: YTN; PAM sequence: TTT
  source 1..20: mol_type = other DNA
tcagtgaattataacccatt

SEQ ID NO: 24591 - DNA, 20 bp, synthetic construct
  misc_feature 1..20: note = Description of Artificial Sequence: Synthetic oligonucleotide
  misc_feature 1..20: note = Target: FXN; (-) strand; PAM type: YTN; PAM sequence: TTT
  source 1..20: mol_type = other DNA
ttcagtgaattataacccat

SEQ ID NO: 24592 - DNA, 20 bp, synthetic construct
  misc_feature 1..20: note = Description of Artificial Sequence: Synthetic oligonucleotide
  misc_feature 1..20: note = Target: FXN; (-) strand; PAM type: YTN; PAM sequence: CTA
  source 1..20: mol_type = other DNA
tttttcagtgaattataacc

SEQ ID NO: 24593 - DNA, 20 bp, synthetic construct
  misc_feature 1..20: note = Description of Artificial Sequence: Synthetic oligonucleotide
  misc_feature 1..20: note = Target: FXN; (-) strand; PAM type: YTN; PAM sequence: TTA
  source 1..20: mol_type = other DNA
ctatttttcagtgaattata

SEQ ID NO: 24594 - DNA, 20 bp, synthetic construct
  misc_feature 1..20: note = Description of Artificial Sequence: Synthetic oligonucleotide
  misc_feature 1..20: note = Target: FXN; (-) strand; PAM type: YTN; PAM sequence: TTA
  source 1..20: mol_type = other DNA
agaagtacgttactattttt

SEQ ID NO: 24595 - DNA, 20 bp, synthetic construct
  misc_feature 1..20: note = Description of Artificial Sequence: Synthetic oligonucleotide
  misc_feature 1..20: note = Target: FXN; (-) strand; PAM type: YTN; PAM sequence: CTG
  source 1..20: mol_type = other DNA
aaagccaaagttaagaagta

SEQ ID NO: 24596 - DNA, 20 bp, synthetic construct
  misc_feature 1..20: note = Description of Artificial Sequence: Synthetic oligonucleotide
  misc_feature 1..20: note = Target: FXN; (-) strand; PAM type: YTN; PAM sequence: CTC
  source 1..20: mol_type = other DNA
tgaaagccaaagttaagaag

SEQ ID NO: 24597 - DNA, 20 bp, synthetic construct
  misc_feature 1..20: note = Description of Artificial Sequence: Synthetic oligonucleotide
  misc_feature 1..20: note = Target: FXN; (-) strand; PAM type: YTN; PAM sequence: TTC
  source 1..20: mol_type = other DNA
gaactctgaaagccaaagtt

SEQ ID NO: 24598 - DNA, 20 bp, synthetic construct
  misc_feature 1..20: note = Description of Artificial Sequence: Synthetic oligonucleotide
  misc_feature 1..20: note = Target: FXN; (-) strand; PAM type: YTN; PAM sequence: TTG
  source 1..20: mol_type = other DNA
gttcgaactctgaaagccaa

SEQ ID NO: 24599 - DNA, 20 bp, synthetic construct
  misc_feature 1..20: note = Description of Artificial Sequence: Synthetic oligonucleotide
  misc_feature 1..20: note = Target: FXN; (-) strand; PAM type: YTN; PAM sequence: TTG
  source 1..20: mol_type = other DNA
aggccacgttggttcgaact

SEQ ID NO: 24600 - DNA, 20 bp, synthetic construct
  misc_feature 1..20: note = Description of Artificial Sequence: Synthetic oligonucleotide
  misc_feature 1..20: note = Target: FXN; (-) strand; PAM type: YTN; PAM sequence: CTG
  source 1..20: mol_type = other DNA
gttgaggccacgttggttcg

SEQ ID NO: 24601 - DNA, 20 bp, synthetic construct
  misc_feature 1..20: note = Description of Artificial Sequence: Synthetic oligonucleotide
  misc_feature 1..20: note = Target: FXN; (-) strand; PAM type: YTN; PAM sequence: TTC
  source 1..20: mol_type = other DNA
caaatctggttgaggccacg

SEQ ID NO: 24602 - DNA, 20 bp, synthetic construct
  misc_feature 1..20: note = Description of Artificial Sequence: Synthetic oligonucleotide
  misc_feature 1..20: note = Target: FXN; (-) strand; PAM type: YTN; PAM sequence: TTG
  source 1..20: mol_type = other DNA
acattccaaatctggttgag

SEQ ID NO: 24603 - DNA, 20 bp, synthetic construct
  misc_feature 1..20: note = Description of Artificial Sequence: Synthetic oligonucleotide
  misc_feature 1..20: note = Target: FXN; (-) strand; PAM type: YTN; PAM sequence: TTT
  source 1..20: mol_type = other DNA
gacattccaaatctggttga

SEQ ID NO: 24604 - DNA, 20 bp, synthetic construct
  misc_feature 1..20: note = Description of Artificial Sequence: Synthetic oligonucleotide
  misc_feature 1..20: note = Target: FXN; (-) strand; PAM type: YTN; PAM sequence: TTT
  source 1..20: mol_type = other DNA
tgacattccaaatctggttg

SEQ ID NO: 24605 - DNA, 20 bp, synthetic construct
  misc_feature 1..20: note = Description of Artificial Sequence: Synthetic oligonucleotide
  misc_feature 1..20: note = Target: FXN; (-) strand; PAM type: YTN; PAM sequence: TTT
  source 1..20: mol_type = other DNA
ttgacattccaaatctggtt

SEQ ID NO: 24606 - DNA, 20 bp, synthetic construct
  misc_feature 1..20: note = Description of Artificial Sequence: Synthetic oligonucleotide
  misc_feature 1..20: note = Target: FXN; (-) strand; PAM type: YTN; PAM sequence: CTT
  source 1..20: mol_type = other DNA
tttgacattccaaatctggt

SEQ ID NO: 24607 - DNA, 20 bp, synthetic construct
  misc_feature 1..20: note = Description of Artificial Sequence: Synthetic oligonucleotide
  misc_feature 1..20: note = Target: FXN; (-) strand; PAM type: YTN; PAM sequence: CTG
  source 1..20: mol_type = other DNA
ctttttgacattccaaatct

SEQ ID NO: 24608 - DNA, 20 bp, synthetic construct
  misc_feature 1..20: note = Description of Artificial Sequence: Synthetic oligonucleotide
  misc_feature 1..20: note = Target: FXN; (-) strand; PAM type: YTN; PAM sequence: CTC
  source 1..20: mol_type = other DNA
tgctttttgacattccaaat

SEQ ID NO: 24609 - DNA, 20 bp, synthetic construct
  misc_feature 1..20: note = Description of Artificial Sequence: Synthetic oligonucleotide
  misc_feature 1..20: note = Target: FXN; (-) strand; PAM type: YTN; PAM sequence: TTC
  source 1..20: mol_type = other DNA
atcaaatagacactctgctt

SEQ ID NO: 24610 - DNA, 20 bp, synthetic construct
  misc_feature 1..20: note = Description of Artificial Sequence: Synthetic oligonucleotide
  misc_feature 1..20: note = Target: FXN; (-) strand; PAM type: YTN; PAM sequence: CTC
  source 1..20: mol_type = other DNA
aaattcatcaaatagacact

SEQ ID NO: 24611 - DNA, 20 bp, synthetic construct
  misc_feature 1..20: note = Description of Artificial Sequence: Synthetic oligonucleotide
  misc_feature 1..20: note = Target: FXN; (-) strand; PAM type: YTN; PAM sequence: TTC
  source 1..20: mol_type = other DNA
ctcaaattcatcaaatagac

SEQ ID NO: 24612 - DNA, 20 bp, synthetic construct
  misc_feature 1..20: note = Description of Artificial Sequence: Synthetic oligonucleotide
  misc_feature 1..20: note = Target: FXN; (-) strand; PAM type: YTN; PAM sequence: TTT
  source 1..20: mol_type = other DNA
cctcaaattcatcaaataga

SEQ ID NO: 24613 - DNA, 20 bp, synthetic construct
  misc_feature 1..20: note = Description of Artificial Sequence: Synthetic oligonucleotide
  misc_feature 1..20: note = Target: FXN; (-) strand; PAM type: YTN; PAM sequence: TTC
  source 1..20: mol_type = other DNA
cagatttcctcaaattcatc

SEQ ID NO: 24614 - DNA, 20 bp, synthetic construct
  misc_feature 1..20: note = Description of Artificial Sequence: Synthetic oligonucleotide
  misc_feature 1..20: note = Target: FXN; (-) strand; PAM type: YTN; PAM sequence: CTG
  source 1..20: mol_type = other DNA
ggtggcccaaagttccagat

SEQ ID NO: 24615 - DNA, 20 bp, synthetic construct
  misc_feature 1..20: note = Description of Artificial Sequence: Synthetic oligonucleotide
  misc_feature 1..20: note = Target: FXN; (-) strand; PAM type: YTN; PAM sequence: TTA
  source 1..20: mol_type = other DNA
ccctgggtggcccaaagttc

SEQ ID NO: 24616 - DNA, 20 bp, synthetic construct
  misc_feature 1..20: note = Description of Artificial Sequence: Synthetic oligonucleotide
  misc_feature 1..20: note = Target: FXN; (-) strand; PAM type: YTN; PAM sequence: CTT
  source 1..20: mol_type = other DNA
accctgggtggcccaaagtt

SEQ ID NO: 24617 - DNA, 20 bp, synthetic construct
  misc_feature 1..20: note = Description of Artificial Sequence: Synthetic oligonucleotide
  misc_feature 1..20: note = Target: FXN; (-) strand; PAM type: YTN; PAM sequence: TTA
  source 1..20: mol_type = other DNA
tcttaccctgggtggcccaa

SEQ ID NO: 24618 - DNA, 20 bp, synthetic construct
  misc_feature 1..20: note = Description of Artificial Sequence: Synthetic oligonucleotide
  misc_feature 1..20: note = Target: FXN; (-) strand; PAM type: YTN; PAM sequence: TTT
  source 1..20: mol_type = other DNA
atcttaccctgggtggccca

SEQ ID NO: 24619 - DNA, 20 bp, synthetic construct
  misc_feature 1..20: note = Description of Artificial Sequence: Synthetic oligonucleotide
  misc_feature 1..20: note = Target: FXN; (-) strand; PAM type: YTN; PAM sequence: TTT
  source 1..20: mol_type = other DNA
tatcttaccctgggtggccc

SEQ ID NO: 24620 - DNA, 20 bp, synthetic construct
  misc_feature 1..20: note = Description of Artificial Sequence: Synthetic oligonucleotide
  misc_feature 1..20: note = Target: FXN; (-) strand; PAM type: YTN; PAM sequence: CTA
  source 1..20: mol_type = other DNA
tgacgtggaaggtgttttat

SEQ ID NO: 24621 - DNA, 20 bp, synthetic construct
  misc_feature 1..20: note = Description of Artificial Sequence: Synthetic oligonucleotide
  misc_feature 1..20: note = Target: FXN; (-) strand; PAM type: YTN; PAM sequence: CTA
  source 1..20: mol_type = other DNA
atgggagaggcagggaagga

SEQ ID NO: 24622 - DNA, 20 bp, synthetic construct
  misc_feature 1..20: note = Description of Artificial Sequence: Synthetic oligonucleotide
  misc_feature 1..20: note = Target: FXN; (-) strand; PAM type: YTN; PAM sequence: TTC
  source 1..20: mol_type = other DNA
taatgggagaggcagggaag

SEQ ID NO: 24623 - DNA, 20 bp, synthetic construct
  misc_feature 1..20: note = Description of Artificial Sequence: Synthetic oligonucleotide
  misc_feature 1..20: note = Target: FXN; (-) strand; PAM type: YTN; PAM sequence: CTC
  source 1..20: mol_type = other DNA
aggaagaaaaccaggttcta

SEQ ID NO: 24624 - DNA, 20 bp, synthetic construct
  misc_feature 1..20: note = Description of Artificial Sequence: Synthetic oligonucleotide
  misc_feature 1..20: note = Target: FXN; (-) strand; PAM type: YTN; PAM sequence: CTG
  source 1..20: mol_type = other DNA
ctcaggaagaaaaccaggtt

SEQ ID NO: 24625 - DNA, 20 bp, synthetic construct
  misc_feature 1..20: note = Description of Artificial Sequence: Synthetic oligonucleotide
  misc_feature 1..20: note = Target: FXN; (-) strand; PAM type: YTN; PAM sequence: TTG
  source 1..20: mol_type = other DNA
ctgctcaggaagaaaaccag

SEQ ID NO: 24626 - DNA, 20 bp, synthetic construct
  misc_feature 1..20: note = Description of Artificial Sequence: Synthetic oligonucleotide
  misc_feature 1..20: note = Target: FXN; (-) strand; PAM type: YTN; PAM sequence: TTG
  source 1..20: mol_type = other DNA
ttgctgctcaggaagaaaac

SEQ ID NO: 24627 - DNA, 20 bp, synthetic construct
  misc_feature 1..20: note = Description of Artificial Sequence: Synthetic oligonucleotide
  misc_feature 1..20: note = Target: FXN; (-) strand; PAM type: YTN; PAM sequence: CTA
  source 1..20: mol_type = other DNA
agattgttgctgctcaggaa

SEQ ID NO: 24628 - DNA, 20 bp, synthetic construct
  misc_feature 1..20: note = Description of Artificial Sequence: Synthetic oligonucleotide
  misc_feature 1..20: note = Target: FXN; (-) strand; PAM type: YTN; PAM sequence: CTC
  source 1..20: mol_type = other DNA
agtcacatggaaagatgcct

SEQ ID NO: 24629 - DNA, 20 bp, synthetic construct
  misc_feature 1..20: note = Description of Artificial Sequence: Synthetic oligonucleotide
  misc_feature 1..20: note = Target: FXN; (-) strand; PAM type: YTN; PAM sequence: TTA
  source 1..20: mol_type = other DNA
aaaataatgtggtggatact

SEQ ID NO: 24630 - DNA, 20 bp, synthetic construct
  misc_feature 1..20: note = Description of Artificial Sequence: Synthetic oligonucleotide
  misc_feature 1..20: note = Target: FXN; (-) strand; PAM type: YTN; PAM sequence: TTC
  source 1..20: mol_type = other DNA
attaaaaataatgtggtgga

SEQ ID NO: 24631 - DNA, 20 bp, synthetic construct
  misc_feature 1..20: note = Description of Artificial Sequence: Synthetic oligonucleotide
  misc_feature 1..20: note = Target: FXN; (-) strand; PAM type: YTN; PAM sequence: TTT
  source 1..20: mol_type = other DNA
cattaaaaataatgtggtgg

SEQ ID NO: 24632 - DNA, 20 bp, synthetic construct
  misc_feature 1..20: note = Description of Artificial Sequence: Synthetic oligonucleotide
  misc_feature 1..20: note = Target: FXN; (-) strand; PAM type: YTN; PAM sequence: CTA
  source 1..20: mol_type = other DNA
tttcattaaaaataatgtgg

SEQ ID NO: 24633 - DNA, 20 bp, synthetic construct
  misc_feature 1..20: note = Description of Artificial Sequence: Synthetic oligonucleotide
  misc_feature 1..20: note = Target: FXN; (-) strand; PAM type: YTN; PAM sequence: CTA
  source 1..20: mol_type = other DNA
atactatttcattaaaaata

SEQ ID NO: 24634 - DNA, 20 bp, synthetic construct
  misc_feature 1..20: note = Description of Artificial Sequence: Synthetic oligonucleotide
  misc_feature 1..20: note = Target: FXN; (-) strand; PAM type: YTN; PAM sequence: TTA
  source 1..20: mol_type = other DNA
tgtcacatccatgcaatcta

SEQ ID NO: 24635 - DNA, 20 bp, synthetic construct
  misc_feature 1..20: note = Description of Artificial Sequence: Synthetic oligonucleotide
  misc_feature 1..20: note = Target: FXN; (-) strand; PAM type: YTN; PAM sequence: TTA
  source 1..20: mol_type = other DNA
aatggattatgtcacatcca

SEQ ID NO: 24636 - DNA, 20 bp, synthetic construct
  misc_feature 1..20: note = Description of Artificial Sequence: Synthetic oligonucleotide
  misc_feature 1..20: note = Target: FXN; (-) strand; PAM type: YTN; PAM sequence: CTG
  source 1..20: mol_type = other DNA
aatgtccaacagtaggggat

SEQ ID NO: 24637 - DNA, 20 bp, synthetic construct
  misc_feature 1..20: note = Description of Artificial Sequence: Synthetic oligonucleotide
  misc_feature 1..20: note = Target: FXN; (-) strand; PAM type: YTN; PAM sequence: CTG
  source 1..20: mol_type = other DNA
gaaacaacctgaatgtccaa

SEQ ID NO: 24638 - DNA, 20 bp, synthetic construct
  misc_feature 1..20: note = Description of Artificial Sequence: Synthetic oligonucleotide
  misc_feature 1..20: note = Target: FXN; (-) strand; PAM type: YTN; PAM sequence: CTC
  source 1..20: mol_type = other DNA
tggaaacaacctgaatgtcc

SEQ ID NO: 24639 - DNA, 20 bp, synthetic construct
  misc_feature 1..20: note = Description of Artificial Sequence: Synthetic oligonucleotide
  misc_feature 1..20: note = Target: FXN; (-) strand; PAM type: YTN; PAM sequence: TTG
  source 1..20: mol_type = other DNA
aaactctggaaacaacctga

SEQ ID NO: 24640 - DNA, 20 bp, synthetic construct
  misc_feature 1..20: note = Description of Artificial Sequence: Synthetic oligonucleotide
  misc_feature 1..20: note = Target: FXN; (-) strand; PAM type: YTN; PAM sequence: TTA
  source 1..20: mol_type = other DNA
aataaaataatattgaaact

SEQ ID NO: 24641 - DNA, 20 bp, synthetic construct
  misc_feature 1..20: note = Description of Artificial Sequence: Synthetic oligonucleotide
  misc_feature 1..20: note = Target: FXN; (-) strand; PAM type: YTN; PAM sequence: TTA
  source 1..20: mol_type = other DNA
gggtattaaataaaataata

SEQ ID NO: 24642 - DNA, 20 bp, synthetic construct
  misc_feature 1..20: note = Description of Artificial Sequence: Synthetic oligonucleotide
  misc_feature 1..20: note = Target: FXN; (-) strand; PAM type: YTN; PAM sequence: CTA
  source 1..20: mol_type = other DNA
ttagggtattaaataaaata

SEQ ID NO: 24643 - DNA, 20 bp, synthetic construct
  misc_feature 1..20: note = Description of Artificial Sequence: Synthetic oligonucleotide
  misc_feature 1..20: note = Target: FXN; (-) strand; PAM type: YTN; PAM sequence: CTA
  source 1..20: mol_type = other DNA
actattagggtattaaataa

SEQ ID NO: 24644 - DNA, 20 bp, synthetic construct
  misc_feature 1..20: note = Description of Artificial Sequence: Synthetic oligonucleotide
  misc_feature 1..20: note = Target: FXN; (-) strand; PAM type: YTN; PAM sequence: CTC
  source 1..20: mol_type = other DNA
taactattagggtattaaat

SEQ ID NO: 24645 - DNA, 20 bp, synthetic construct
  misc_feature 1..20: note = Description of Artificial Sequence: Synthetic oligonucleotide
  misc_feature 1..20: note = Target: FXN; (-) strand; PAM type: YTN; PAM sequence: CTG
  source 1..20: mol_type = other DNA
ctctaactattagggtatta

SEQ ID NO: 24646 - DNA, 20 bp, synthetic construct
  misc_feature 1..20: note = Description of Artificial Sequence: Synthetic oligonucleotide
  misc_feature 1..20: note = Target: FXN; (-) strand; PAM type: YTN; PAM sequence: TTG
  source 1..20: mol_type = other DNA
tgatagcagcatggcctgct

SEQ ID NO: 24647 - DNA, 20 bp, synthetic construct
  misc_feature 1..20: note = Description of Artificial Sequence: Synthetic oligonucleotide
  misc_feature 1..20: note = Target: FXN; (-) strand; PAM type: YTN; PAM sequence: TTT
  source 1..20: mol_type = other DNA
gtgatagcagcatggcctgc

SEQ ID NO: 24648 - DNA, 20 bp, synthetic construct
  misc_feature 1..20: note = Description of Artificial Sequence: Synthetic oligonucleotide
  misc_feature 1..20: note = Target: FXN; (-) strand; PAM type: YTN; PAM sequence: CTA
  source 1..20: mol_type = other DNA
tttgtgatagcagcatggcc

SEQ ID NO: 24649 - DNA, 20 bp, synthetic construct
  misc_feature 1..20: note = Description of Artificial Sequence: Synthetic oligonucleotide
  misc_feature 1..20: note = Target: FXN; (-) strand; PAM type: YTN; PAM sequence: TTG
  source 1..20: mol_type = other DNA
ggtctatttgtgatagcagc

SEQ ID NO: 24650 - DNA, 20 bp, synthetic construct
  misc_feature 1..20: note = Description of Artificial Sequence: Synthetic oligonucleotide
  misc_feature 1..20: note = Target: FXN; (-) strand; PAM type: YTN; PAM sequence: TTT
  source 1..20: mol_type = other DNA
gggtctatttgtgatagcag

SEQ ID NO: 24651 - DNA, 20 bp, synthetic construct
  misc_feature 1..20: note = Description of Artificial Sequence: Synthetic oligonucleotide
  misc_feature 1..20: note = Target: FXN; (-) strand; PAM type: YTN; PAM sequence: TTA
  source 1..20: mol_type = other DNA
aatatttgggtctatttgtg

SEQ ID NO: 24652 - DNA, 20 bp, synthetic construct
  misc_feature 1..20: note = Description of Artificial Sequence: Synthetic oligonucleotide
  misc_feature 1..20: note = Target: FXN; (-) strand; PAM type: YTN; PAM sequence: CTA
  source 1..20: mol_type = other DNA
ttaaatatttgggtctattt

SEQ ID NO: 24653 - DNA, 20 bp, synthetic construct
  misc_feature 1..20: note = Description of Artificial Sequence: Synthetic oligonucleotide
  misc_feature 1..20: note = Target: FXN; (-) strand; PAM type: YTN; PAM sequence: TTG
  source 1..20: mol_type = other DNA
agctattaaatatttgggtc

SEQ ID NO: 24654 - DNA, 20 bp, synthetic construct
  misc_feature 1..20: note = Description of Artificial Sequence: Synthetic oligonucleotide
  misc_feature 1..20: note = Target: FXN; (-) strand; PAM type: YTN; PAM sequence: TTT
  source 1..20: mol_type = other DNA
gagctattaaatatttgggt

SEQ ID NO: 24655 - DNA, 20 bp, synthetic construct
  misc_feature 1..20: note = Description of Artificial Sequence: Synthetic oligonucleotide
  misc_feature 1..20: note = Target: FXN; (-) strand; PAM type: YTN; PAM sequence: TTG
  source 1..20: mol_type = other DNA
gtttgagctattaaatattt

SEQ ID NO: 24656 - DNA, 20 bp, synthetic construct
  misc_feature 1..20: note = Description of Artificial Sequence: Synthetic oligonucleotide
  misc_feature 1..20: note = Target: FXN; (-) strand; PAM type: YTN; PAM sequence: TTA
  source 1..20: mol_type = other DNA
ttggtttgagctattaaata

SEQ ID NO: 24657 - DNA, 20 bp, synthetic construct
  misc_feature 1..20: note = Description of Artificial Sequence: Synthetic oligonucleotide
  misc_feature 1..20: note = Target: FXN; (-) strand; PAM type: YTN; PAM sequence: CTG
  source 1..20: mol_type = other DNA
cccagagaggaggacacaaa

SEQ ID NO: 24658 - DNA, 20 bp, synthetic construct
  misc_feature 1..20: note = Description of Artificial Sequence: Synthetic oligonucleotide
  misc_feature 1..20: note = Target: FXN; (-) strand; PAM type: YTN; PAM sequence: CTG
  source 1..20: mol_type = other DNA
tactgcccagagaggaggac

SEQ ID NO: 24659 - DNA, 20 bp, synthetic construct
  misc_feature 1..20: note = Description of Artificial Sequence: Synthetic oligonucleotide
  misc_feature 1..20: note = Target: FXN; (-) strand; PAM type: YTN; PAM sequence: TTC
  source 1..20: mol_type = other DNA
aggaggtatgccaaccctgt

SEQ ID NO: 24660 - DNA, 20 bp, synthetic construct
  misc_feature 1..20: note = Description of Artificial Sequence: Synthetic oligonucleotide
  misc_feature 1..20: note = Target: FXN; (-) strand; PAM type: YTN; PAM sequence: CTT
  source 1..20: mol_type = other DNA
caggaggtatgccaaccctg

SEQ ID NO: 24661 - DNA, 20 bp, synthetic construct
  misc_feature 1..20: note = Description of Artificial Sequence: Synthetic oligonucleotide
  misc_feature 1..20: note = Target: FXN; (-) strand; PAM type: YTN; PAM sequence: TTC
  source 1..20: mol_type = other DNA
acttcaggaggtatgccaac

SEQ ID NO: 24662 - DNA, 20 bp, synthetic construct
  misc_feature 1..20: note = Description of Artificial Sequence: Synthetic oligonucleotide
  misc_feature 1..20: note = Target: FXN; (-) strand; PAM type: YTN; PAM sequence: CTA
  source 1..20: mol_type = other DNA
attcacttcaggaggtatgc

SEQ ID NO: 24663 - DNA, 20 bp, synthetic construct
  misc_feature 1..20: note = Description of Artificial Sequence: Synthetic oligonucleotide
  misc_feature 1..20: note = Target: FXN; (-) strand; PAM type: YTN; PAM sequence: TTC
  source 1..20: mol_type = other DNA
ctaattcacttcaggaggta

SEQ ID NO: 24664 - DNA, 20 bp, synthetic construct
  misc_feature 1..20: note = Description of Artificial Sequence: Synthetic oligonucleotide
  misc_feature 1..20: note = Target: FXN; (-) strand; PAM type: YTN; PAM sequence: CTG
  source 1..20: mol_type = other DNA
gaatgagtgtagttcctaat

SEQ ID NO: 24665 - DNA, 20 bp, synthetic construct
  misc_feature 1..20: note = Description of Artificial Sequence: Synthetic oligonucleotide
  misc_feature 1..20: note = Target: FXN; (-) strand; PAM type: YTN; PAM sequence: CTG
  source 1..20: mol_type = other DNA
gaagctggaatgagtgtagt

SEQ ID NO: 24666 - DNA, 20 bp, synthetic construct
  misc_feature 1..20: note = Description of Artificial Sequence: Synthetic oligonucleotide
  misc_feature 1..20: note = Target: FXN; (-) strand; PAM type: YTN; PAM sequence: CTG
  source 1..20: mol_type = other DNA
acagataaagaccaaactgg

SEQ ID NO: 24667 - DNA, 20 bp, synthetic construct
  misc_feature 1..20: note = Description of Artificial Sequence: Synthetic oligonucleotide
  misc_feature 1..20: note = Target: FXN; (-) strand; PAM type: YTN; PAM sequence: CTC
  source 1..20: mol_type = other DNA
aacaatgcagaggacagtaa

SEQ ID NO: 24668 - DNA, 20 bp, synthetic construct
  misc_feature 1..20: note = Description of Artificial Sequence: Synthetic oligonucleotide
  misc_feature 1..20: note = Target: FXN; (-) strand; PAM type: YTN; PAM sequence: CTG
  source 1..20: mol_type = other DNA
agactcaacaatgcagagga

SEQ ID NO: 24669 - DNA, 20 bp, synthetic construct
  misc_feature 1..20: note = Description of Artificial Sequence: Synthetic oligonucleotide
  misc_feature 1..20: note = Target: FXN; (-) strand; PAM type: YTN; PAM sequence: TTG
  source 1..20: mol_type = other DNA
gacaaggtgactgagactca

SEQ ID NO: 24670 - DNA, 20 bp, synthetic construct
  misc_feature 1..20: note = Description of Artificial Sequence: Synthetic oligonucleotide
  misc_feature 1..20: note = Target: FXN; (-) strand; PAM type: YTN; PAM sequence: CTT
  source 1..20: mol_type = other DNA
ggacaaggtgactgagactc

SEQ ID NO: 24671 - DNA, 20 bp, synthetic construct
  misc_feature 1..20: note = Description of Artificial Sequence: Synthetic oligonucleotide
  misc_feature 1..20: note = Target: FXN; (-) strand; PAM type: YTN; PAM sequence: CTG
  source 1..20: mol_type = other DNA
gccaatggaacttggacaag

SEQ ID NO: 24672 - DNA, 20 bp, synthetic construct
  misc_feature 1..20: note = Description of Artificial Sequence: Synthetic oligonucleotide
  misc_feature 1..20: note = Target: FXN; (-) strand; PAM type: YTN; PAM sequence: TTC
  source 1..20: mol_type = other DNA
tggccaatggaacttggaca

SEQ ID NO: 24673 - DNA, 20 bp, synthetic construct
  misc_feature 1..20: note = Description of Artificial Sequence: Synthetic oligonucleotide
  misc_feature 1..20: note = Target: FXN; (-) strand; PAM type: YTN; PAM sequence: TTT
  source 1..20: mol_type = other DNA
ctggccaatggaacttggac

SEQ ID NO: 24674 - DNA, 20 bp, synthetic construct
  misc_feature 1..20: note = Description of Artificial Sequence: Synthetic oligonucleotide
  misc_feature 1..20: note = Target: FXN; (-) strand; PAM type: YTN; PAM sequence: CTT
  source 1..20: mol_type = other DNA
tctggccaatggaacttgga

SEQ ID NO: 24675 - DNA, 20 bp, synthetic construct
  misc_feature 1..20: note = Description of Artificial Sequence: Synthetic oligonucleotide
  misc_feature 1..20: note = Target: FXN; (-) strand; PAM type: YTN; PAM sequence: CTA
  source 1..20: mol_type = other DNA
gccctttctggccaatggaa

SEQ ID NO: 24676 - DNA, 20 bp, synthetic construct
  misc_feature 1..20: note = Description of Artificial Sequence: Synthetic oligonucleotide
  misc_feature 1..20: note = Target: FXN; (-) strand; PAM type: YTN; PAM sequence: TTC
  source 1..20: mol_type = other DNA
tagccctttctggccaatgg

SEQ ID NO: 24677 - DNA, 20 bp, synthetic construct
  misc_feature 1..20: note = Description of Artificial Sequence: Synthetic oligonucleotide
  misc_feature 1..20: note = Target: FXN; (-) strand; PAM type: YTN; PAM sequence: CTT
  source 1..20: mol_type = other DNA
ctagccctttctggccaatg

SEQ ID NO: 24678 - DNA, 20 bp, synthetic construct
  misc_feature 1..20: note = Description of Artificial Sequence: Synthetic oligonucleotide
  misc_feature 1..20: note = Target: FXN; (-) strand; PAM type: YTN; PAM sequence: CTG
  source 1..20: mol_type = other DNA
tgcttctagccctttctggc

SEQ ID NO: 24679 - DNA, 20 bp, synthetic construct
  misc_feature 1..20: note = Description of Artificial Sequence: Synthetic oligonucleotide
  misc_feature 1..20: note = Target: FXN; (-) strand; PAM type: YTN; PAM sequence: TTC
  source 1..20: mol_type = other DNA
tgtgcttctagccctttctg

SEQ ID NO: 24680 - DNA, 20 bp, synthetic construct
  misc_feature 1..20: note = Description of Artificial Sequence: Synthetic oligonucleotide
  misc_feature 1..20: note = Target: FXN; (-) strand; PAM type: YTN; PAM sequence: CTT
  source 1..20: mol_type = other DNA
ctgtgcttctagccctttct

SEQ ID NO: 24681 - DNA, 20 bp, synthetic construct
  misc_feature 1..20: note = Description of Artificial Sequence: Synthetic oligonucleotide
  misc_feature 1..20: note = Target: FXN; (-) strand; PAM type: YTN; PAM sequence: TTC
  source 1..20: mol_type = other DNA
cagcccttctgtgcttctag

SEQ ID NO: 24682 - DNA, 20 bp, synthetic construct
  misc_feature 1..20: note = Description of Artificial Sequence: Synthetic oligonucleotide
  misc_feature 1..20: note = Target: FXN; (-) strand; PAM type: YTN; PAM sequence: CTT
  source 1..20: mol_type = other DNA
ccagcccttctgtgcttcta

SEQ ID NO: 24683 - DNA, 20 bp, synthetic construct
  misc_feature 1..20: note = Description of Artificial Sequence: Synthetic oligonucleotide
  misc_feature 1..20: note = Target: FXN; (-) strand; PAM type: YTN; PAM sequence: TTC
  source 1..20: mol_type = other DNA
ccaccagaatgtgagtgagg

SEQ ID NO: 24684 - DNA, 20 bp, synthetic construct
  misc_feature 1..20: note = Description of Artificial Sequence: Synthetic oligonucleotide
  misc_feature 1..20: note = Target: FXN; (-) strand; PAM type: YTN; PAM sequence: CTT
  source 1..20: mol_type = other DNA
cccaccagaatgtgagtgag

SEQ ID NO: 24685 - DNA, 20 bp, synthetic construct
  misc_feature 1..20: note = Description of Artificial Sequence: Synthetic oligonucleotide
  misc_feature 1..20: note = Target: FXN; (-) strand; PAM type: YTN; PAM sequence: TTC
  source 1..20: mol_type = other DNA
ttcccaccagaatgtgagtg

SEQ ID NO: 24686 - DNA, 20 bp, synthetic construct
  misc_feature 1..20: note = Description of Artificial Sequence: Synthetic oligonucleotide
  misc_feature 1..20: note = Target: FXN; (-) strand; PAM type: YTN; PAM sequence: CTA
  source 1..20: mol_type = other DNA
agttcttcccaccagaatgt

SEQ ID NO: 24687 - DNA, 20 bp, synthetic construct
  misc_feature 1..20: note = Description of Artificial Sequence: Synthetic oligonucleotide
  misc_feature 1..20: note = Target: FXN; (-) strand; PAM type: YTN; PAM sequence: CTA
  source 1..20: mol_type = other DNA
aggccacaccactaagttct

SEQ ID NO: 24688 - DNA, 20 bp, synthetic construct
  misc_feature 1..20: note = Description of Artificial Sequence: Synthetic oligonucleotide
  misc_feature 1..20: note = Target: FXN; (-) strand; PAM type: YTN; PAM sequence: TTA
  source 1..20: mol_type = other DNA
cagtcagctaaggccacacc

SEQ ID NO: 24689 - DNA, 20 bp, synthetic construct
  misc_feature 1..20: note = Description of Artificial Sequence: Synthetic oligonucleotide
  misc_feature 1..20: note = Target: FXN; (-) strand; PAM type: YTN; PAM sequence: CTT
  source 1..20: mol_type = other DNA
acagtcagctaaggccacac

SEQ ID NO: 24690 - DNA, 20 bp, synthetic construct
  misc_feature 1..20: note = Description of Artificial Sequence: Synthetic oligonucleotide
  misc_feature 1..20: note = Target: FXN; (-) strand; PAM type: YTN; PAM sequence: CTC
  source 1..20: mol_type = other DNA
ccttacagtcagctaaggcc

SEQ ID NO: 24691 - DNA, 20 bp, synthetic construct
  misc_feature 1..20: note = Description of Artificial Sequence: Synthetic oligonucleotide
  misc_feature 1..20: note = Target: FXN; (-) strand; PAM type: YTN; PAM sequence: TTC
  source 1..20: mol_type = other DNA
ccagcctcccttacagtcag

SEQ ID NO: 24692 - DNA, 20 bp, synthetic construct
  misc_feature 1..20: note = Description of Artificial Sequence: Synthetic oligonucleotide
  misc_feature 1..20: note = Target: FXN; (-) strand; PAM type: YTN; PAM sequence: TTT
  source 1..20: mol_type = other DNA
cccagcctcccttacagtca

SEQ ID NO: 24693 - DNA, 20 bp, synthetic construct
  misc_feature 1..20: note = Description of Artificial Sequence: Synthetic oligonucleotide
  misc_feature 1..20: note = Target: FXN; (-) strand; PAM type: YTN; PAM sequence: CTA
  source 1..20: mol_type = other DNA
tatttcccagcctcccttac

SEQ ID NO: 24694 - DNA, 20 bp, synthetic construct
  misc_feature 1..20: note = Description of Artificial Sequence: Synthetic oligonucleotide
  misc_feature 1..20: note = Target: FXN; (-) strand; PAM type: YTN; PAM sequence: CTA
  source 1..20: mol_type = other DNA
gactatatttcccagcctcc

SEQ ID NO: 24695 - DNA, 20 bp, synthetic construct
  misc_feature 1..20: note = Description of Artificial Sequence: Synthetic oligonucleotide
  misc_feature 1..20: note = Target: FXN; (-) strand; PAM type: YTN; PAM sequence: CTC
  source 1..20: mol_type = other DNA
gctagactatatttcccagc

SEQ ID NO: 24696 - DNA, 20 bp, synthetic construct
  misc_feature 1..20: note = Description of Artificial Sequence: Synthetic oligonucleotide
  misc_feature 1..20: note = Target: FXN; (-) strand; PAM type: YTN; PAM sequence: TTC
  source 1..20: mol_type = other DNA
cagggcactcgctagactat

SEQ ID NO: 24697 - DNA, 20 bp, synthetic construct
  misc_feature 1..20: note = Description of Artificial Sequence: Synthetic oligonucleotide
  misc_feature 1..20: note = Target: FXN; (-) strand; PAM type: YTN; PAM sequence: TTT
  source 1..20: mol_type = other DNA
ccagggcactcgctagacta

SEQ ID NO: 24698 - DNA, 20 bp, synthetic construct
  misc_feature 1..20: note = Description of Artificial Sequence: Synthetic oligonucleotide
  misc_feature 1..20: note = Target: FXN; (-) strand; PAM type: YTN; PAM sequence: TTT
  source 1..20: mol_type = other DNA
tccagggcactcgctagact

SEQ ID NO: 24699 - DNA, 20 bp, synthetic construct
  misc_feature 1..20: note = Description of Artificial Sequence: Synthetic oligonucleotide
  misc_feature 1..20: note = Target: FXN; (-) strand; PAM type: YTN; PAM sequence: TTT
  source 1..20: mol_type = other DNA
ttccagggcactcgctagac

SEQ ID NO: 24700 - DNA, 20 bp, synthetic construct
  misc_feature 1..20: note = Description of Artificial Sequence: Synthetic oligonucleotide
  misc_feature 1..20: note = Target: FXN; (-) strand; PAM type: YTN; PAM sequence: CTT
  source 1..20: mol_type = other DNA
tttccagggcactcgctaga

SEQ ID NO: 24701 - DNA, 20 bp, synthetic construct
  misc_feature 1..20: note = Description of Artificial Sequence: Synthetic oligonucleotide
  misc_feature 1..20: note = Target: FXN; (-) strand; PAM type: YTN; PAM sequence: TTC
  source 1..20: mol_type = other DNA
catggggaatgccgtgccgg

SEQ ID NO: 24702 - DNA, 20 bp, synthetic construct
  misc_feature 1..20: note = Description of Artificial Sequence: Synthetic oligonucleotide
  misc_feature 1..20: note = Target: FXN; (-) strand; PAM type: YTN; PAM sequence: TTT
  source 1..20: mol_type = other DNA
ccatggggaatgccgtgccg

SEQ ID NO: 24703 - DNA, 20 bp, synthetic construct
  misc_feature 1..20: note = Description of Artificial Sequence: Synthetic oligonucleotide
  misc_feature 1..20: note = Target: FXN; (-) strand; PAM type: YTN; PAM sequence: CTT
  source 1..20: mol_type = other DNA
tccatggggaatgccgtgcc

SEQ ID NO: 24704 - DNA, 20 bp, synthetic construct
  misc_feature 1..20: note = Description of Artificial Sequence: Synthetic oligonucleotide
  misc_feature 1..20: note = Target: FXN; (-) strand; PAM type: YTN; PAM sequence: CTG
  source 1..20: mol_type = other DNA
acagctttccatggggaatg

SEQ ID NO: 24705 - DNA, 20 bp, synthetic construct
  misc_feature 1..20: note = Description of Artificial Sequence: Synthetic oligonucleotide
  misc_feature 1..20: note = Target: FXN; (-) strand; PAM type: YTN; PAM sequence: CTG
  source 1..20: mol_type = other DNA
tagccgtgcctgacagcttt

SEQ ID NO: 24706 - DNA, 20 bp, synthetic construct
  misc_feature 1..20: note = Description of Artificial Sequence: Synthetic oligonucleotide
  misc_feature 1..20: note = Target: FXN; (-) strand; PAM type: YTN; PAM sequence: TTG
  source 1..20: mol_type = other DNA
gcagggggtagactgtagcc

SEQ ID NO: 24707 - DNA, 20 bp, synthetic construct
  misc_feature 1..20: note = Description of Artificial Sequence: Synthetic oligonucleotide
  misc_feature 1..20: note = Target: FXN; (-) strand; PAM type: YTN; PAM sequence: CTG
  source 1..20: mol_type = other DNA
gttggcagggggtagactgt

SEQ ID NO: 24708 - DNA, 20 bp, synthetic construct
  misc_feature 1..20: note = Description of Artificial Sequence: Synthetic oligonucleotide
  misc_feature 1..20: note = Target: FXN; (-) strand; PAM type: YTN; PAM sequence: CTG
  source 1..20: mol_type = other DNA
agtgtggaaggagggtccat

SEQ ID NO: 24709 - DNA, 20 bp, synthetic construct
  misc_feature 1..20: note = Description of Artificial Sequence: Synthetic oligonucleotide
  misc_feature 1..20: note = Target: FXN; (-) strand; PAM type: YTN; PAM sequence: CTG
  source 1..20: mol_type = other DNA
ggggtaaatgcatctgagtg

SEQ ID NO: 24710 - DNA, 20 bp, synthetic construct
  misc_feature 1..20: note = Description of Artificial Sequence: Synthetic oligonucleotide
  misc_feature 1..20: note = Target: FXN; (-) strand; PAM type: YTN; PAM sequence: TTG
  source 1..20: mol_type = other DNA
gggctgggggtaaatgcatc

SEQ ID NO: 24711 - DNA, 20 bp, synthetic construct
  misc_feature 1..20: note = Description of Artificial Sequence: Synthetic oligonucleotide
  misc_feature 1..20: note = Target: FXN; (-) strand; PAM type: YTN; PAM sequence: CTT
  source 1..20: mol_type = other DNA
ggggctgggggtaaatgcat

SEQ ID NO: 24712 - DNA, 20 bp, synthetic construct
  misc_feature 1..20: note = Description of Artificial Sequence: Synthetic oligonucleotide
  misc_feature 1..20: note = Target: FXN; (-) strand; PAM type: YTN; PAM sequence: CTC
  source 1..20: mol_type = other DNA
ttggggctgggggtaaatgc

SEQ ID NO: 24713 - DNA, 20 bp, synthetic construct
  misc_feature 1..20: note = Description of Artificial Sequence: Synthetic oligonucleotide
  misc_feature 1..20: note = Target: FXN; (-) strand; PAM type: YTN; PAM sequence: CTC
  source 1..20: mol_type = other DNA
tcttggggctgggggtaaat

SEQ ID NO: 24714 - DNA, 20 bp, synthetic construct
  misc_feature 1..20: note = Description of Artificial Sequence: Synthetic oligonucleotide
  misc_feature 1..20: note = Target: FXN; (-) strand; PAM type: YTN; PAM sequence: TTG
  source 1..20: mol_type = other DNA
gctctcttggggctgggggt

SEQ ID NO: 24715 - DNA, 20 bp, synthetic construct
  misc_feature 1..20: note = Description of Artificial Sequence: Synthetic oligonucleotide
  misc_feature 1..20: note = Target: FXN; (-) strand; PAM type: YTN; PAM sequence: CTG
  source 1..20: mol_type = other DNA
tggtgaccacatgggcatcg

SEQ ID NO: 24716 - DNA, 20 bp, synthetic construct
  misc_feature 1..20: note = Description of Artificial Sequence: Synthetic oligonucleotide
  misc_feature 1..20: note = Target: FXN; (-) strand; PAM type: YTN; PAM sequence: CTC
  source 1..20: mol_type = other DNA
ggaggtggctgtggtgacca

SEQ ID NO: 24717 - DNA, 20 bp, synthetic construct
  misc_feature 1..20: note = Description of Artificial Sequence: Synthetic oligonucleotide
  misc_feature 1..20: note = Target: FXN; (-) strand; PAM type: YTN; PAM sequence: TTG
  source 1..20: mol_type = other DNA
gactcggaggtggctgtggt

SEQ ID NO: 24718 - DNA, 20 bp, synthetic construct
  misc_feature 1..20: note = Description of Artificial Sequence: Synthetic oligonucleotide
  misc_feature 1..20: note = Target: FXN; (-) strand; PAM type: YTN; PAM sequence: CTT
  source 1..20: mol_type = other DNA
ggactcggaggtggctgtgg

SEQ ID NO: 24719 - DNA, 20 bp, synthetic construct
  misc_feature 1..20: note = Description of Artificial Sequence: Synthetic oligonucleotide
  misc_feature 1..20: note = Target: FXN; (-) strand; PAM type: YTN; PAM sequence: CTG
  source 1..20: mol_type = other DNA
gaaatcttggactcggaggt

SEQ ID NO: 24720 - DNA, 20 bp, synthetic construct
  misc_feature 1..20: note = Description of Artificial Sequence: Synthetic oligonucleotide
  misc_feature 1..20: note = Target: FXN; (-) strand; PAM type: YTN; PAM sequence: CTG
  source 1..20: mol_type = other DNA
catgtcacctggaaatcttg

SEQ ID NO: 24721 - DNA, 20 bp, synthetic construct
  misc_feature 1..20: note = Description of Artificial Sequence: Synthetic oligonucleotide
  misc_feature 1..20: note = Target: FXN; (-) strand; PAM type: YTN; PAM sequence: CTG
  source 1..20: mol_type = other DNA
ggagagaggagactgcatgt

SEQ ID NO: 24722 - DNA, 20 bp, synthetic construct
  misc_feature 1..20: note = Description of Artificial Sequence: Synthetic oligonucleotide
  misc_feature 1..20: note = Target: FXN; (-) strand; PAM type: YTN; PAM sequence: CTA
  source 1..20: mol_type = other DNA
aagctgggagagaggagact

SEQ ID NO: 24723 - DNA, 20 bp, synthetic construct
  misc_feature 1..20: note = Description of Artificial Sequence: Synthetic oligonucleotide
  misc_feature 1..20: note = Target: FXN; (-) strand; PAM type: YTN; PAM sequence: TTC
  source 1..20: mol_type = other DNA
ctaaagctgggagagaggag

SEQ ID NO: 24724 - DNA, 20 bp, synthetic construct
  misc_feature 1..20: note = Description of Artificial Sequence: Synthetic oligonucleotide
  misc_feature 1..20: note = Target: FXN; (-) strand; PAM type: YTN; PAM sequence: CTG
  source 1..20: mol_type = other DNA
tgtgtagatcagaagaagcc

SEQ ID NO: 24725 - DNA, 20 bp, synthetic construct
  misc_feature 1..20: note = Description of Artificial Sequence: Synthetic oligonucleotide
  misc_feature 1..20: note = Target: FXN; (-) strand; PAM type: YTN; PAM sequence: CTG
  source 1..20: mol_type = other DNA
tgtctgtgtgtagatcagaa

SEQ ID NO: 24726 - DNA, 20 bp, synthetic construct
  misc_feature 1..20: note = Description of Artificial Sequence: Synthetic oligonucleotide
  misc_feature 1..20: note = Target: FXN; (-) strand; PAM type: YTN; PAM sequence: CTG
  source 1..20: mol_type = other DNA
tgtgtgtgtgtctgtgtctg

SEQ ID NO: 24727 - DNA, 20 bp, synthetic construct
  misc_feature 1..20: note = Description of Artificial Sequence: Synthetic oligonucleotide
  misc_feature 1..20: note = Target: FXN; (-) strand; PAM type: YTN; PAM sequence: CTC
  source 1..20: mol_type = other DNA
catcgtgtgtgtgtgtgtgt

SEQ ID NO: 24728 - DNA, 20 bp, synthetic construct
  misc_feature 1..20: note = Description of Artificial Sequence: Synthetic oligonucleotide
  misc_feature 1..20: note = Target: FXN; (-) strand; PAM type: YTN; PAM sequence: CTC
  source 1..20: mol_type = other DNA
tccatcgtgtgtgtgtgtgt

SEQ ID NO: 24729 - DNA, 20 bp, synthetic construct
  misc_feature 1..20: note = Description of Artificial Sequence: Synthetic oligonucleotide
  misc_feature 1..20: note = Target: FXN; (-) strand; PAM type: YTN; PAM sequence: CTG
  source 1..20: mol_type = other DNA
cccctctccatcgtgtgtgt

SEQ ID NO: 24730 - DNA, 20 bp, synthetic construct
  misc_feature 1..20: note = Description of Artificial Sequence: Synthetic oligonucleotide
  misc_feature 1..20: note = Target: FXN; (-) strand; PAM type: YTN; PAM sequence: TTA
  source 1..20: mol_type = other DNA
tcctgcccctctccatcgtg

SEQ ID NO: 24731 - DNA, 20 bp, synthetic construct
  misc_feature 1..20: note = Description of Artificial Sequence: Synthetic oligonucleotide
  misc_feature 1..20: note = Target: FXN; (-) strand; PAM type: YTN; PAM sequence: TTG
  source 1..20: mol_type = other DNA
cagttatcctgcccctctcc

SEQ ID NO: 24732 - DNA, 20 bp, synthetic construct
  misc_feature 1..20: note = Description of Artificial Sequence: Synthetic oligonucleotide
  misc_feature 1..20: note = Target: FXN; (-) strand; PAM type: YTN; PAM sequence: TTA
  source 1..20: mol_type = other DNA
cagttgcagttatcctgccc

SEQ ID NO: 24733 - DNA, 20 bp, synthetic construct
  misc_feature 1..20: note = Description of Artificial Sequence: Synthetic oligonucleotide
  misc_feature 1..20: note = Target: FXN; (-) strand; PAM type: YTN; PAM sequence: CTG
  source 1..20: mol_type = other DNA
aatggagttacagttgcagt

SEQ ID NO: 24734 - DNA, 20 bp, synthetic construct
  misc_feature 1..20: note = Description of Artificial Sequence: Synthetic oligonucleotide
  misc_feature 1..20: note = Target: FXN; (-) strand; PAM type: YTN; PAM sequence: TTC
  source 1..20: mol_type = other DNA
tgaatggagttacagttgca

SEQ ID NO: 24735 - DNA, 20 bp, synthetic construct
  misc_feature 1..20: note = Description of Artificial Sequence: Synthetic oligonucleotide
  misc_feature 1..20: note = Target: FXN; (-) strand; PAM type: YTN; PAM sequence: TTT
  source 1..20: mol_type = other DNA
ctgaatggagttacagttgc

SEQ ID NO: 24736 - DNA, 20 bp, synthetic construct
  misc_feature 1..20: note = Description of Artificial Sequence: Synthetic oligonucleotide
  misc_feature 1..20: note = Target: FXN; (-) strand; PAM type: YTN; PAM sequence: TTT
  source 1..20: mol_type = other DNA
tctgaatggagttacagttg

SEQ ID NO: 24737 - DNA, 20 bp, synthetic construct
  misc_feature 1..20: note = Description of Artificial Sequence: Synthetic oligonucleotide
  misc_feature 1..20: note = Target: FXN; (-) strand; PAM type: YTN; PAM sequence: CTT
  source 1..20: mol_type = other DNA
ttctgaatggagttacagtt

SEQ ID NO: 24738 - DNA, 20 bp, synthetic construct
  misc_feature 1..20: note = Description of Artificial Sequence: Synthetic oligonucleotide
  misc_feature 1..20: note = Target: FXN; (-) strand; PAM type: YTN; PAM sequence: CTC
  source 1..20: mol_type = other DNA
ttttctgaatggagttacag

SEQ ID NO: 24739 - DNA, 20 bp, synthetic construct
  misc_feature 1..20: note = Description of Artificial Sequence: Synthetic oligonucleotide
  misc_feature 1..20: note = Target: FXN; (-) strand; PAM type: YTN; PAM sequence: CTG
  source 1..20: mol_type = other DNA
tgcctcttttctgaatggag

SEQ ID NO: 24740 - DNA, 20 bp, synthetic construct
  misc_feature 1..20: note = Description of Artificial Sequence: Synthetic oligonucleotide
  misc_feature 1..20: note = Target: FXN; (-) strand; PAM type: YTN; PAM sequence: CTA
  source 1..20: mol_type = other DNA
gtgctgtgcctcttttctga

SEQ ID NO: 24741 - DNA, 20 bp, synthetic construct
  misc_feature 1..20: note = Description of Artificial Sequence: Synthetic oligonucleotide
  misc_feature 1..20: note = Target: FXN; (-) strand; PAM type: YTN; PAM sequence: CTG
  source 1..20: mol_type = other DNA
cgggcagctagtgctgtgcc

SEQ ID NO: 24742 - DNA, 20 bp, synthetic construct
  misc_feature 1..20: note = Description of Artificial Sequence: Synthetic oligonucleotide
  misc_feature 1..20: note = Target: FXN; (-) strand; PAM type: YTN; PAM sequence: CTC
  source 1..20: mol_type = other DNA
cagtgctgcgggcagctagt

SEQ ID NO: 24743 - DNA, 20 bp, synthetic construct
  misc_feature 1..20: note = Description of Artificial Sequence: Synthetic oligonucleotide
  misc_feature 1..20: note = Target: FXN; (-) strand; PAM type: YTN; PAM sequence: CTG
  source 1..20: mol_type = other DNA
cccagcagggctccagtgct

SEQ ID NO: 24744 - DNA, 20 bp, synthetic construct
  misc_feature 1..20: note = Description of Artificial Sequence: Synthetic oligonucleotide
  misc_feature 1..20: note = Target: FXN; (-) strand; PAM type: YTN; PAM sequence: TTG
  source 1..20: mol_type = other DNA
atccagtgctgcccagcagg

SEQ ID NO: 24745 - DNA, 20 bp, synthetic construct
  misc_feature 1..20: note = Description of Artificial Sequence: Synthetic oligonucleotide
  misc_feature 1..20: note = Target: FXN; (-) strand; PAM type: YTN; PAM sequence: CTG
  source 1..20: mol_type = other DNA
ccagggcagaggttgatcca

SEQ ID NO: 24746 - DNA, 20 bp, synthetic construct
  misc_feature 1..20: note = Description of Artificial Sequence: Synthetic oligonucleotide
  misc_feature 1..20: note = Target: FXN; (-) strand; PAM type: YTN; PAM sequence: CTC
  source 1..20: mol_type = other DNA
tgccagggcagaggttgatc

SEQ ID NO: 24747 - DNA, 20 bp, synthetic construct
  misc_feature 1..20: note = Description of Artificial Sequence: Synthetic oligonucleotide
  misc_feature 1..20: note = Target: FXN; (-) strand; PAM type: YTN; PAM sequence: CTC
  source 1..20: mol_type = other DNA
ctctgccagggcagaggttg

SEQ ID NO: 24748 - DNA, 20 bp, synthetic construct
  misc_feature 1..20: note = Description of Artificial Sequence: Synthetic oligonucleotide
  misc_feature 1..20: note = Target: FXN; (-) strand; PAM type: YTN; PAM sequence: TTG
  source 1..20: mol_type = other DNA
tggaggaacatgctcctctg

SEQ ID NO: 24749 - DNA, 20 bp, synthetic construct
  misc_feature 1..20: note = Description of Artificial Sequence: Synthetic oligonucleotide
  misc_feature 1..20: note = Target: FXN; (-) strand; PAM type: YTN; PAM sequence: TTT
  source 1..20: mol_type = other DNA
gtggaggaacatgctcctct

SEQ ID NO: 24750 - DNA, 20 bp, synthetic construct
  misc_feature 1..20: note = Description of Artificial Sequence: Synthetic oligonucleotide
  misc_feature 1..20: note = Target: FXN; (-) strand; PAM type: YTN; PAM sequence: CTG
  source 1..20: mol_type = other DNA
aagcagggatttgtggagga

SEQ ID NO: 24751 - DNA, 20 bp, synthetic construct
  misc_feature 1..20: note = Description of Artificial Sequence: Synthetic oligonucleotide
  misc_feature 1..20: note = Target: FXN; (-) strand; PAM type: YTN; PAM sequence: CTC
  source 1..20: mol_type = other DNA
gagaggctgaagcagggatt

SEQ ID NO: 24752 - DNA, 20 bp, synthetic construct
  misc_feature 1..20: note = Description of Artificial Sequence: Synthetic oligonucleotide
  misc_feature 1..20: note = Target: FXN; (-) strand; PAM type: YTN; PAM sequence: CTC
  source 1..20: mol_type = other DNA
tcgagaggctgaagcaggga

SEQ ID NO: 24753 - DNA, 20 bp, synthetic construct
  misc_feature 1..20: note = Description of Artificial Sequence: Synthetic oligonucleotide
  misc_feature 1..20: note = Target: FXN; (-) strand; PAM type: YTN; PAM sequence: TTG
  source 1..20: mol_type = other DNA
tggccaaggaaaataacaga

SEQ ID NO: 24754 - DNA, 20 bp, synthetic construct
  misc_feature 1..20: note = Description of Artificial Sequence: Synthetic oligonucleotide
  misc_feature 1..20: note = Target: FXN; (-) strand; PAM type: YTN; PAM sequence: CTT
  source 1..20: mol_type = other DNA
gtggccaaggaaaataacag

SEQ ID NO: 24755 - DNA, 20 bp, synthetic construct
  misc_feature 1..20: note = Description of Artificial Sequence: Synthetic oligonucleotide
  misc_feature 1..20: note = Target: FXN; (-) strand; PAM type: YTN; PAM sequence: CTG
  source 1..20: mol_type = other DNA
ccttgtggccaaggaaaata

SEQ ID NO: 24756 - DNA, 20 bp, synthetic construct
  misc_feature 1..20: note = Description of Artificial Sequence: Synthetic oligonucleotide
  misc_feature 1..20: note = Target: FXN; (-) strand; PAM type: YTN; PAM sequence: CTG
  source 1..20: mol_type = other DNA
cctgccttgtggccaaggaa

SEQ ID NO: 24757 - DNA, 20 bp, synthetic construct
  misc_feature 1..20: note = Description of Artificial Sequence: Synthetic oligonucleotide
  misc_feature 1..20: note = Target: FXN; (-) strand; PAM type: YTN; PAM sequence: CTG
  source 1..20: mol_type = other DNA
cctgcctgccttgtggccaa

SEQ ID NO: 24758 - DNA, 20 bp, synthetic construct
  misc_feature 1..20: note = Description of Artificial Sequence: Synthetic oligonucleotide
  misc_feature 1..20: note = Target: FXN; (-) strand; PAM type: YTN; PAM sequence: TTC
  source 1..20: mol_type = other DNA
ccactgcctgcctgccttgt

SEQ ID NO: 24759 - DNA, 20 bp, synthetic construct
  misc_feature 1..20: note = Description of Artificial Sequence: Synthetic oligonucleotide
  misc_feature 1..20: note = Target: FXN; (-) strand; PAM type: YTN; PAM sequence: CTT
  source 1..20: mol_type = other DNA
cccactgcctgcctgccttg

SEQ ID NO: 24760 - DNA, 20 bp, synthetic construct
  misc_feature 1..20: note = Description of Artificial Sequence: Synthetic oligonucleotide
  misc_feature 1..20: note = Target: FXN; (-) strand; PAM type: YTN; PAM sequence: TTG
  source 1..20: mol_type = other DNA
ccccggaggagggcacactt

SEQ ID NO: 24761 - DNA, 20 bp, synthetic construct
  misc_feature 1..20: note = Description of Artificial Sequence: Synthetic oligonucleotide
  misc_feature 1..20: note = Target: FXN; (-) strand; PAM type: YTN; PAM sequence: CTT
  source 1..20: mol_type = other DNA
gccccggaggagggcacact

SEQ ID NO: 24762 - DNA, 20 bp, synthetic construct
  misc_feature 1..20: note = Description of Artificial Sequence: Synthetic oligonucleotide
  misc_feature 1..20: note = Target: FXN; (-) strand; PAM type: YTN; PAM sequence: CTC
  source 1..20: mol_type = other DNA
cttgccccggaggagggcac

SEQ ID NO: 24763 - DNA, 20 bp, synthetic construct
  misc_feature 1..20: note = Description of Artificial Sequence: Synthetic oligonucleotide
  misc_feature 1..20: note = Target: FXN; (-) strand; PAM type: YTN; PAM sequence: CTG
  source 1..20: mol_type = other DNA
tgaaggctccttgccccgga

SEQ ID NO: 24764 - DNA, 20 bp, synthetic construct
  misc_feature 1..20: note = Description of Artificial Sequence: Synthetic oligonucleotide
  misc_feature 1..20: note = Target: FXN; (-) strand; PAM type: YTN; PAM sequence: TTA
  source 1..20: mol_type = other DNA
gcaggaagtgggctgtgaag

SEQ ID NO: 24765 - DNA, 20 bp, synthetic construct
  misc_feature 1..20: note = Description of Artificial Sequence: Synthetic oligonucleotide
  misc_feature 1..20: note = Target: FXN; (-) strand; PAM type: YTN; PAM sequence: TTA
  source 1..20: mol_type = other DNA
ttagcaggaagtgggctgtg

SEQ ID NO: 24766 - DNA, 20 bp, synthetic construct
  misc_feature 1..20: note = Description of Artificial Sequence: Synthetic oligonucleotide
  misc_feature 1..20: note = Target: FXN; (-) strand; PAM type: YTN; PAM sequence: CTG
  source 1..20: mol_type = other DNA
ttattagcaggaagtgggct

SEQ ID NO: 24767 - DNA, 20 bp, synthetic construct
  misc_feature 1..20: note = Description of Artificial Sequence: Synthetic oligonucleotide
  misc_feature 1..20: note = Target: FXN; (-) strand; PAM type: YTN; PAM sequence: CTG
  source 1..20: mol_type = other DNA
tggaaccccaaactgttatt

SEQ ID NO: 24768 - DNA, 20 bp, synthetic construct
  misc_feature 1..20: note = Description of Artificial Sequence: Synthetic oligonucleotide
  misc_feature 1..20: note = Target: FXN; (-) strand; PAM type: YTN; PAM sequence: TTA
  source 1..20: mol_type = other DNA
aaacaccctgtggaacccca

SEQ ID NO: 24769 - DNA, 20 bp, synthetic construct
  misc_feature 1..20: note = Description of Artificial Sequence: Synthetic oligonucleotide
  misc_feature 1..20: note = Target: FXN; (-) strand; PAM type: YTN; PAM sequence: CTT
  source 1..20: mol_type = other DNA
aaaacaccctgtggaacccc

SEQ ID NO: 24770 - DNA, 20 bp, synthetic construct
  misc_feature 1..20: note = Description of Artificial Sequence: Synthetic oligonucleotide
  misc_feature 1..20: note = Target: FXN; (-) strand; PAM type: YTN; PAM sequence: CTG
  source 1..20: mol_type = other DNA
gagtcttaaaacaccctgtg

SEQ ID NO: 24771 - DNA, 20 bp, synthetic construct
  misc_feature 1..20: note = Description of Artificial Sequence: Synthetic oligonucleotide
  misc_feature 1..20: note = Target: FXN; (-) strand; PAM type: YTN; PAM sequence: CTG
  source 1..20: mol_type = other DNA
actggagtcttaaaacaccc

SEQ ID NO: 24772 - DNA, 20 bp, synthetic construct
  misc_feature 1..20: note = Description of Artificial Sequence: Synthetic oligonucleotide
  misc_feature 1..20: note = Target: FXN; (-) strand; PAM type: YTN; PAM sequence: CTA
  source 1..20: mol_type = other DNA
aaatagctgactggagtctt

SEQ ID NO: 24773 - DNA, 20 bp, synthetic construct
  misc_feature 1..20: note = Description of Artificial Sequence: Synthetic oligonucleotide
  misc_feature 1..20: note = Target: FXN; (-) strand; PAM type: YTN; PAM sequence: CTG
  source 1..20: mol_type = other DNA
gcctaaaatagctgactgga

SEQ ID NO: 24774 - DNA, 20 bp, synthetic construct
  misc_feature 1..20: note = Description of Artificial Sequence: Synthetic oligonucleotide
  misc_feature 1..20: note = Target: FXN; (-) strand; PAM type: YTN; PAM sequence: TTC
  source 1..20: mol_type = other DNA
ataaaagaaaaaaaaagaga

SEQ ID NO: 24775 - DNA, 20 bp, synthetic construct
  misc_feature 1..20: note = Description of Artificial Sequence: Synthetic oligonucleotide
  misc_feature 1..20: note = Target: FXN; (-) strand; PAM type: YTN; PAM sequence: TTT
  source 1..20: mol_type = other DNA
cataaaagaaaaaaaaagag

SEQ ID NO: 24776 - DNA, 20 bp, synthetic construct
  misc_feature 1..20: note = Description of Artificial Sequence: Synthetic oligonucleotide
  misc_feature 1..20: note = Target: FXN; (-) strand; PAM type: YTN; PAM sequence: CTC
  source 1..20: mol_type = other DNA
agggtgtgatttcataaaag

SEQ ID NO: 24777 - DNA, 20 bp, synthetic construct
  misc_feature 1..20: note = Description of Artificial Sequence: Synthetic oligonucleotide
  misc_feature 1..20: note = Target: FXN; (-) strand; PAM type: YTN; PAM sequence: CTG
  source 1..20: mol_type = other DNA
ggtctcagggtgtgatttca

SEQ ID NO: 24778 - DNA, 20 bp, synthetic construct
  misc_feature 1..20: note = Description of Artificial Sequence: Synthetic oligonucleotide
  misc_feature 1..20: note = Target: FXN; (-) strand; PAM type: YTN; PAM sequence: CTC
  source 1..20: mol_type = other DNA
cagcctgggtctcagggtgt

SEQ ID NO: 24779 - DNA, 20 bp, synthetic construct
  misc_feature 1..20: note = Description of Artificial Sequence: Synthetic oligonucleotide
  misc_feature 1..20: note = Target: FXN; (-) strand; PAM type: YTN; PAM sequence: CTG
  source 1..20: mol_type = other DNA
cactccagcctgggtctcag

SEQ ID NO: 24780 - DNA, 20 bp, synthetic construct
  misc_feature 1..20: note = Description of Artificial Sequence: Synthetic oligonucleotide
  misc_feature 1..20: note = Target: FXN; (-) strand; PAM type: YTN; PAM sequence: CTG
  source 1..20: mol_type = other DNA
cagtgagccgagatcgcacc

SEQ ID NO: 24781 - DNA, 20 bp, synthetic construct
  misc_feature 1..20: note = Description of Artificial Sequence: Synthetic oligonucleotide
  misc_feature 1..20: note = Target: FXN; (-) strand; PAM type: YTN; PAM sequence: TTG
  source 1..20: mol_type = other DNA
aacccgggaggcggaggctg

SEQ ID NO: 24782 - DNA, 20 bp, synthetic construct
  misc_feature 1..20: note = Description of Artificial Sequence: Synthetic oligonucleotide
  misc_feature 1..20: note = Target: FXN; (-) strand; PAM type: YTN; PAM sequence: CTT
  source 1..20: mol_type = other DNA
gaacccgggaggcggaggct

SEQ ID NO: 24783 - DNA, 20 bp, synthetic construct
  misc_feature 1..20: note = Description of Artificial Sequence: Synthetic oligonucleotide
  misc_feature 1..20: note = Target: FXN; (-) strand; PAM type: YTN; PAM sequence: TTG
  source 1..20: mol_type = other DNA
cttgaacccgggaggcggag

SEQ ID NO: 24784 - DNA, 20 bp, synthetic construct
  misc_feature 1..20: note = Description of Artificial Sequence: Synthetic oligonucleotide
  misc_feature 1..20: note = Target: FXN; (-) strand; PAM type: YTN; PAM sequence: CTG
  source 1..20: mol_type = other DNA
aggcaggaggattgcttgaa

SEQ ID NO: 24785 - DNA, 20 bp, synthetic construct
  misc_feature 1..20: note = Description of Artificial Sequence: Synthetic oligonucleotide
  misc_feature 1..20: note = Target: FXN; (-) strand; PAM type: YTN; PAM sequence: CTC
  source 1..20: mol_type = other DNA
aggaggctgaggcaggagga

SEQ ID NO: 24786 - DNA, 20 bp, synthetic construct
  misc_feature 1..20: note = Description of Artificial Sequence: Synthetic oligonucleotide
  misc_feature 1..20: note = Target: FXN; (-) strand; PAM type: YTN; PAM sequence: CTA
  source 1..20: mol_type = other DNA
ctcaggaggctgaggcagga

SEQ ID NO: 24787 - DNA, 20 bp, synthetic construct
  misc_feature 1..20: note = Description of Artificial Sequence: Synthetic oligonucleotide
  misc_feature 1..20: note = Target: FXN; (-) strand; PAM type: YTN; PAM sequence: CTA
  source 1..20: mol_type = other DNA
tagtcccagctactcaggag

SEQ ID NO: 24788 - DNA, 20 bp, synthetic construct
  misc_feature 1..20: note = Description of Artificial Sequence: Synthetic oligonucleotide
  misc_feature 1..20: note = Target: FXN; (-) strand; PAM type: YTN; PAM sequence: CTG
  source 1..20: mol_type = other DNA
cacgcctatagtcccagcta

SEQ ID NO: 24789 - DNA, 20 bp, synthetic construct
  misc_feature 1..20: note = Description of Artificial Sequence: Synthetic oligonucleotide
  misc_feature 1..20: note = Target: FXN; (-) strand; PAM type: YTN; PAM sequence: CTA
  source 1..20: mol_type = other DNA
ggtgtggcactgcacgccta

SEQ ID NO: 24790 - DNA, 20 bp, synthetic construct
  misc_feature 1..20: note = Description of Artificial Sequence: Synthetic oligonucleotide
  misc_feature 1..20: note = Target: FXN; (-) strand; PAM type: YTN; PAM sequence: TTA
  source 1..20: mol_type = other DNA
gctaggtgtggcactgcacg

SEQ ID NO: 24791 - DNA, 20 bp, synthetic construct
  misc_feature 1..20: note = Description of Artificial Sequence: Synthetic oligonucleotide
  misc_feature 1..20: note = Target: FXN; (-) strand; PAM type: YTN; PAM sequence: CTA
  source 1..20: mol_type = other DNA
aaaatacaaaaattagctag

SEQ ID NO: 24792 - DNA, 20 bp, synthetic construct
  misc_feature 1..20: note = Description of Artificial Sequence: Synthetic oligonucleotide
  misc_feature 1..20: note = Target: FXN; (-) strand; PAM type: YTN; PAM sequence: TTA
  source 1..20: mol_type = other DNA
ctaaaaatacaaaaattagc

SEQ ID NO: 24793 - DNA, 20 bp, synthetic construct
  misc_feature 1..20: note = Description of Artificial Sequence: Synthetic oligonucleotide
  misc_feature 1..20: note = Target: FXN; (-) strand; PAM type: YTN; PAM sequence: TTT
  source 1..20: mol_type = other DNA
actaaaaatacaaaaattag

SEQ ID NO: 24794 - DNA, 20 bp, synthetic construct
  misc_feature 1..20: note = Description of Artificial Sequence: Synthetic oligonucleotide
  misc_feature 1..20: note = Target: FXN; (-) strand; PAM type: YTN; PAM sequence: CTT
  source 1..20: mol_type = other DNA
tactaaaaatacaaaaatta

SEQ ID NO: 24795 - DNA, 20 bp, synthetic construct
  misc_feature 1..20: note = Description of Artificial Sequence: Synthetic oligonucleotide
  misc_feature 1..20: note = Target: FXN; (-) strand; PAM type: YTN; PAM sequence: CTG
  source 1..20: mol_type = other DNA
gccaacatggtgaaaccccg

SEQ ID NO: 24796 - DNA, 20 bp, synthetic construct
  misc_feature 1..20: note = Description of Artificial Sequence: Synthetic oligonucleotide
  misc_feature 1..20: note = Target: FXN; (-) strand; PAM type: YTN; PAM sequence: TTC
  source 1..20: mol_type = other DNA
aagaccagcctggccaacat

SEQ ID NO: 24797 - DNA, 20 bp, synthetic construct
  misc_feature 1..20: note = Description of Artificial Sequence: Synthetic oligonucleotide
  misc_feature 1..20: note = Target: FXN; (-) strand; PAM type: YTN; PAM sequence: CTG
  source 1..20: mol_type = other DNA
aggtcaggagttcaagacca

SEQ ID NO: 24798 - DNA, 20 bp, synthetic construct
  misc_feature 1..20: note = Description of Artificial Sequence: Synthetic oligonucleotide
  misc_feature 1..20: note = Target: FXN; (-) strand; PAM type: YTN; PAM sequence: TTG
  source 1..20: mol_type = other DNA
ggaggccgaggcgggcggat

SEQ ID NO: 24799 - DNA, 20 bp, synthetic construct
  misc_feature 1..20: note = Description of Artificial Sequence: Synthetic oligonucleotide
  misc_feature 1..20: note = Target: FXN; (-) strand; PAM type: YTN; PAM sequence: TTT
  source 1..20: mol_type = other DNA
gggaggccgaggcgggcgga

SEQ ID NO: 24800 - DNA, 20 bp, synthetic construct
  misc_feature 1..20: note = Description of Artificial Sequence: Synthetic oligonucleotide
  misc_feature 1..20: note = Target: FXN; (-) strand; PAM type: YTN; PAM sequence: CTT
  source 1..20: mol_type = other DNA
tgggaggccgaggcgggcgg

SEQ ID NO: 24801 - DNA, 20 bp, synthetic construct
  misc_feature 1..20: note = Description of Artificial Sequence: Synthetic oligonucleotide
  misc_feature 1..20: note = Target: FXN; (-) strand; PAM type: YTN; PAM sequence: CTC
  source 1..20: mol_type = other DNA
atgccagtaatcccagcact

SEQ ID NO: 24802 - DNA, 20 bp, synthetic construct
  misc_feature 1..20: note = Description of Artificial Sequence: Synthetic oligonucleotide
  misc_feature 1..20: note = Target: FXN; (-) strand; PAM type: YTN; PAM sequence: CTG
  source 1..20: mol_type = other DNA
ggcgcagtggctcatgccag

SEQ ID NO: 24803 - DNA, 20 bp, synthetic construct
  misc_feature 1..20: note = Description of Artificial Sequence: Synthetic oligonucleotide
  misc_feature 1..20: note = Target: FXN; (-) strand; PAM type: YTN; PAM sequence: CTG
  source 1..20: mol_type = other DNA
ggctgggcgcagtggctcat

SEQ ID NO: 24804 - DNA, 20 bp, synthetic construct
  misc_feature 1..20: note = Description of Artificial Sequence: Synthetic oligonucleotide
  misc_feature 1..20: note = Target: FXN; (-) strand; PAM type: YTN; PAM sequence: CTC
  source 1..20: mol_type = other DNA
aaagaaaaatgagtctgggc

SEQ ID NO: 24805 - DNA, 20 bp, synthetic construct
  misc_feature 1..20: note = Description of Artificial Sequence: Synthetic oligonucleotide
  misc_feature 1..20: note = Target: FXN; (-) strand; PAM type: YTN; PAM sequence: CTC
  source 1..20: mol_type = other DNA
tcaaagaaaaatgagtctgg

SEQ ID NO: 24806 - DNA, 20 bp, synthetic construct
  misc_feature 1..20: note = Description of Artificial Sequence: Synthetic oligonucleotide
  misc_feature 1..20: note = Target: FXN; (-) strand; PAM type: YTN; PAM sequence: CTA
  source 1..20: mol_type = other DNA
ctctcaaagaaaaatgagtc

SEQ ID NO: 24807 - DNA, 20 bp, synthetic construct
  misc_feature 1..20: note = Description of Artificial Sequence: Synthetic oligonucleotide
  misc_feature 1..20: note = Target: FXN; (-) strand; PAM type: YTN; PAM sequence: TTG
  source 1..20: mol_type = other DNA
ggaaaagcctactctcaaag

SEQ ID NO: 24808 - DNA, 20 bp, synthetic construct
  misc_feature 1..20: note = Description of Artificial Sequence: Synthetic oligonucleotide
  misc_feature 1..20: note = Target: FXN; (-) strand; PAM type: YTN; PAM sequence: TTT
  source 1..20: mol_type = other DNA
gggaaaagcctactctcaaa

SEQ ID NO: 24809 - DNA, 20 bp, synthetic construct
  misc_feature 1..20: note = Description of Artificial Sequence: Synthetic oligonucleotide
  misc_feature 1..20: note = Target: FXN; (-) strand; PAM type: YTN; PAM sequence: TTT
  source 1..20: mol_type = other DNA
tgggaaaagcctactctcaa

SEQ ID NO: 24810 - DNA, 20 bp, synthetic construct
  misc_feature 1..20: note = Description of Artificial Sequence: Synthetic oligonucleotide
  misc_feature 1..20: note = Target: FXN; (-) strand; PAM type: YTN; PAM sequence: CTT
  source 1..20: mol_type = other DNA
ttgggaaaagcctactctca

SEQ ID NO: 24811 - DNA, 20 bp, synthetic construct
  misc_feature 1..20: note = Description of Artificial Sequence: Synthetic oligonucleotide
  misc_feature 1..20: note = Target: FXN; (-) strand; PAM type: YTN; PAM sequence: CTA
  source 1..20: mol_type = other DNA
cttttgggaaaagcctactc

SEQ ID NO: 24812 - DNA, 20 bp, synthetic construct
  misc_feature 1..20: note = Description of Artificial Sequence: Synthetic oligonucleotide
  misc_feature 1..20: note = Target: FXN; (-) strand; PAM type: YTN; PAM sequence: CTC
  source 1..20: mol_type = other DNA
agaagcctacttttgggaaa

SEQ ID NO: 24813 - DNA, 20 bp, synthetic construct
  misc_feature 1..20: note = Description of Artificial Sequence: Synthetic oligonucleotide
  misc_feature 1..20: note = Target: FXN; (-) strand; PAM type: YTN; PAM sequence: CTG
  source 1..20: mol_type = other DNA
aaagtgaatagctcagaagc

SEQ ID NO: 24814 - DNA, 20 bp, synthetic construct
  misc_feature 1..20: note = Description of Artificial Sequence: Synthetic oligonucleotide
  misc_feature 1..20: note = Target: FXN; (-) strand; PAM type: YTN; PAM sequence: CTG
  source 1..20: mol_type = other DNA
cctgaaagtgaatagctcag

SEQ ID NO: 24815 - DNA, 20 bp, synthetic construct
  misc_feature 1..20: note = Description of Artificial Sequence: Synthetic oligonucleotide
  misc_feature 1..20: note = Target: FXN; (-) strand; PAM type: YTN; PAM sequence: CTG
  source 1..20: mol_type = other DNA
gcacatgggactgcctgaaa

SEQ ID NO: 24816 - DNA, 20 bp, synthetic construct
  misc_feature 1..20: note = Description of Artificial Sequence: Synthetic oligonucleotide
  misc_feature 1..20: note = Target: FXN; (-) strand; PAM type: YTN; PAM sequence: TTC
  source 1..20: mol_type = other DNA
ctggcacatgggactgcctg

SEQ ID NO: 24817 - DNA, 20 bp, synthetic construct
  misc_feature 1..20: note = Description of Artificial Sequence: Synthetic oligonucleotide
  misc_feature 1..20: note = Target: FXN; (-) strand; PAM type: YTN; PAM sequence: TTG
  source 1..20: mol_type = other DNA
gatgtggttcctggcacatg

SEQ ID NO: 24818 - DNA, 20 bp, synthetic construct
  misc_feature 1..20: note = Description of Artificial Sequence: Synthetic oligonucleotide
  misc_feature 1..20: note = Target: FXN; (-) strand; PAM type: YTN; PAM sequence: TTT
  source 1..20: mol_type = other DNA
ggatgtggttcctggcacat

SEQ ID NO: 24819 - DNA, 20 bp, synthetic construct
  misc_feature 1..20: note = Description of Artificial Sequence: Synthetic oligonucleotide
  misc_feature 1..20: note = Target: FXN; (-) strand; PAM type: YTN; PAM sequence: CTC
  source 1..20: mol_type = other DNA
ccatccacggaggaaatttg

SEQ ID NO: 24820 - DNA, 20 bp, synthetic construct
  misc_feature 1..20: note = Description of Artificial Sequence: Synthetic oligonucleotide
  misc_feature 1..20: note = Target: FXN; (-) strand; PAM type: YTN; PAM sequence: CTG
  source 1..20: mol_type = other DNA
agactcccatccacggagga

SEQ ID NO: 24821 - DNA, 20 bp, synthetic construct
  misc_feature 1..20: note = Description of Artificial Sequence: Synthetic oligonucleotide
  misc_feature 1..20: note = Target: FXN; (-) strand; PAM type: YTN; PAM sequence: CTG
  source 1..20: mol_type = other DNA
ggcatggggacatgcaagga

SEQ ID NO: 24822 - DNA, 20 bp, synthetic construct
  misc_feature 1..20: note = Description of Artificial Sequence: Synthetic oligonucleotide
  misc_feature 1..20: note = Target: FXN; (-) strand; PAM type: YTN; PAM sequence: CTG
  source 1..20: mol_type = other DNA
agacagctgggcatggggac

SEQ ID NO: 24823 - DNA, 20 bp, synthetic construct
  misc_feature 1..20: note = Description of Artificial Sequence: Synthetic oligonucleotide
  misc_feature 1..20: note = Target: FXN; (-) strand; PAM type: YTN; PAM sequence: TTA
  source 1..20: mol_type = other DNA
ggctgagacagctgggcatg

SEQ ID NO: 24824 - DNA, 20 bp, synthetic construct
  misc_feature 1..20: note = Description of Artificial Sequence: Synthetic oligonucleotide
  misc_feature 1..20: note = Target: FXN; (-) strand; PAM type: YTN; PAM sequence: CTT
  source 1..20: mol_type = other DNA
aggctgagacagctgggcat

SEQ ID NO: 24825 - DNA, 20 bp, synthetic construct
  misc_feature 1..20: note = Description of Artificial Sequence: Synthetic oligonucleotide
  misc_feature 1..20: note = Target: FXN; (-) strand; PAM type: YTN; PAM sequence: CTG
  source 1..20: mol_type = other DNA
cccttaggctgagacagctg

SEQ ID NO: 24826 - DNA, 20 bp, synthetic construct
  misc_feature 1..20: note = Description of Artificial Sequence: Synthetic oligonucleotide
  misc_feature 1..20: note = Target: FXN; (-) strand; PAM type: YTN; PAM sequence: TTC
  source 1..20: mol_type = other DNA
aaggtacctgcccttaggct

SEQ ID NO: 24827 - DNA, 20 bp, synthetic construct
  misc_feature 1..20: note = Description of Artificial Sequence: Synthetic oligonucleotide
  misc_feature 1..20: note = Target: FXN; (-) strand; PAM type: YTN; PAM sequence: CTT
  source 1..20: mol_type = other DNA
caaggtacctgcccttaggc

SEQ ID NO: 24828 - DNA, 20 bp, synthetic construct
  misc_feature 1..20: note = Description of Artificial Sequence: Synthetic oligonucleotide
  misc_feature 1..20: note = Target: FXN; (-) strand; PAM type: YTN; PAM sequence: TTG
  source 1..20: mol_type = other DNA
acttcaaggtacctgccctt

SEQ ID NO: 24829 - DNA, 20 bp, synthetic construct
  misc_feature 1..20: note = Description of Artificial Sequence: Synthetic oligonucleotide
  misc_feature 1..20: note = Target: FXN; (-) strand; PAM type: YTN; PAM sequence: CTT
  source 1..20: mol_type = other DNA
gacttcaaggtacctgccct

SEQ ID NO: 24830 - DNA, 20 bp, synthetic construct
  misc_feature 1..20: note = Description of Artificial Sequence: Synthetic oligonucleotide
  misc_feature 1..20: note = Target: FXN; (-) strand; PAM type: YTN; PAM sequence: TTA
  source 1..20: mol_type = other DNA
acttgacttcaaggtacctg

SEQ ID NO: 24831 - DNA, 20 bp, synthetic construct
  misc_feature 1..20: note = Description of Artificial Sequence: Synthetic oligonucleotide
  misc_feature 1..20: note = Target: FXN; (-) strand; PAM type: YTN; PAM sequence: TTT
  source 1..20: mol_type = other DNA
aacttgacttcaaggtacct

SEQ ID NO: 24832 - DNA, 20 bp, synthetic construct
  misc_feature 1..20: note = Description of Artificial Sequence: Synthetic oligonucleotide
  misc_feature 1..20: note = Target: FXN; (-) strand; PAM type: YTN; PAM sequence: TTG
  source 1..20: mol_type = other DNA
tttaacttgacttcaaggta

SEQ ID NO: 24833 - DNA, 20 bp, synthetic construct
  misc_feature 1..20: note = Description of Artificial Sequence: Synthetic oligonucleotide
  misc_feature 1..20: note = Target: FXN; (-) strand; PAM type: YTN; PAM sequence: TTA
  source 1..20: mol_type = other DNA
ttgtttaacttgacttcaag

SEQ ID NO: 24834 - DNA, 20 bp, synthetic construct
  misc_feature 1..20: note = Description of Artificial Sequence: Synthetic oligonucleotide
  misc_feature 1..20: note = Target: FXN; (-) strand; PAM type: YTN; PAM sequence: CTT
  source 1..20: mol_type = other DNA
attgtttaacttgacttcaa

SEQ ID NO: 24835 - DNA, 20 bp, synthetic construct
  misc_feature 1..20: note = Description of Artificial Sequence: Synthetic oligonucleotide
  misc_feature 1..20: note = Target: FXN; (-) strand; PAM type: YTN; PAM sequence: CTC
  source 1..20: mol_type = other DNA
caatcttattgtttaacttg

SEQ ID NO: 24836 - DNA, 20 bp, synthetic construct
  misc_feature 1..20: note = Description of Artificial Sequence: Synthetic oligonucleotide
  misc_feature 1..20: note = Target: FXN; (-) strand; PAM type: YTN; PAM sequence: CTG
  source 1..20: mol_type = other DNA
gtctccaatcttattgttta

SEQ ID NO: 24837 - DNA, 20 bp, synthetic construct
  misc_feature 1..20: note = Description of Artificial Sequence: Synthetic oligonucleotide
  misc_feature 1..20: note = Target: FXN; (-) strand; PAM type: YTN; PAM sequence: TTG
  source 1..20: mol_type = other DNA
ctggtctccaatcttattgt

SEQ ID NO: 24838 - DNA, 20 bp, synthetic construct
  misc_feature 1..20: note = Description of Artificial Sequence: Synthetic oligonucleotide
  misc_feature 1..20: note = Target: FXN; (-) strand; PAM type: YTN; PAM sequence: CTG
  source 1..20: mol_type = other DNA
agggcattgctggtctccaa

SEQ ID NO: 24839 - DNA, 20 bp, synthetic construct
  misc_feature 1..20: note = Description of Artificial Sequence: Synthetic oligonucleotide
  misc_feature 1..20: note = Target: FXN; (-) strand; PAM type: YTN; PAM sequence: CTG
  source 1..20: mol_type = other DNA
caaaaaccaggctgagggca

SEQ ID NO: 24840 - DNA, 20 bp, synthetic construct
  misc_feature 1..20: note = Description of Artificial Sequence: Synthetic oligonucleotide
  misc_feature 1..20: note = Target: FXN; (-) strand; PAM type: YTN; PAM sequence: CTG
  source 1..20: mol_type = other DNA
ctgcaaaaaccaggctgagg

SEQ ID NO: 24841 - DNA, 20 bp, synthetic construct
  misc_feature 1..20: note = Description of Artificial Sequence: Synthetic oligonucleotide
  misc_feature 1..20: note = Target: FXN; (-) strand; PAM type: YTN; PAM sequence: CTC
  source 1..20: mol_type = other DNA
agtcctgctgcaaaaaccag

SEQ ID NO: 24842 - DNA, 20 bp, synthetic construct
  misc_feature 1..20: note = Description of Artificial Sequence: Synthetic oligonucleotide
  misc_feature 1..20: note = Target: FXN; (-) strand; PAM type: YTN; PAM sequence: TTG
  source 1..20: mol_type = other DNA
agccaaaacaagggactcag

SEQ ID NO: 24843 - DNA, 20 bp, synthetic construct
  misc_feature 1..20: note = Description of Artificial Sequence: Synthetic oligonucleotide
  misc_feature 1..20: note = Target: FXN; (-) strand; PAM type: YTN; PAM sequence: TTC
  source 1..20: mol_type = other DNA
ccattgagccaaaacaaggg

SEQ ID NO: 24844 - DNA, 20 bp, synthetic construct
  misc_feature 1..20: note = Description of Artificial Sequence: Synthetic oligonucleotide
  misc_feature 1..20: note = Target: FXN; (-) strand; PAM type: YTN; PAM sequence: CTT
  source 1..20: mol_type = other DNA
cccattgagccaaaacaagg

SEQ ID NO: 24845 - DNA, 20 bp, synthetic construct
  misc_feature 1..20: note = Description of Artificial Sequence: Synthetic oligonucleotide
  misc_feature 1..20: note = Target: FXN; (-) strand; PAM type: YTN; PAM sequence: TTG
  source 1..20: mol_type = other DNA
aacagcaaagacttcccatt

SEQ ID NO: 24846 - DNA, 20 bp, synthetic construct
  misc_feature 1..20: note = Description of Artificial Sequence: Synthetic oligonucleotide
  misc_feature 1..20: note = Target: FXN; (-) strand; PAM type: YTN; PAM sequence: TTT
  source 1..20: mol_type = other DNA
gaacagcaaagacttcccat

SEQ ID NO: 24847 - DNA, 20 bp, synthetic construct
  misc_feature 1..20: note = Description of Artificial Sequence: Synthetic oligonucleotide
  misc_feature 1..20: note = Target: FXN; (-) strand; PAM type: YTN; PAM sequence: CTT
  source 1..20: mol_type = other DNA
tgaacagcaaagacttccca

SEQ ID NO: 24848 - DNA, 20 bp, synthetic construct
  misc_feature 1..20: note = Description of Artificial Sequence: Synthetic oligonucleotide
  misc_feature 1..20: note = Target: FXN; (-) strand; PAM type: YTN; PAM sequence: CTA
  source 1..20: mol_type = other DNA
aggctttgaacagcaaagac

SEQ ID NO: 24849 - DNA, 20 bp, synthetic construct
  misc_feature 1..20: note = Description of Artificial Sequence: Synthetic oligonucleotide
  misc_feature 1..20: note = Target: FXN; (-) strand; PAM type: YTN; PAM sequence: CTC
  source 1..20: mol_type = other DNA
agccagagaagctaaggctt

SEQ ID NO: 24850 - DNA, 20 bp, synthetic construct
  misc_feature 1..20: note = Description of Artificial Sequence: Synthetic oligonucleotide
  misc_feature 1..20: note = Target: FXN; (-) strand; PAM type: YTN; PAM sequence: CTA
  source 1..20: mol_type = other DNA
ggatgacaggcgtgagccac

SEQ ID NO: 24851 - DNA, 20 bp, synthetic construct
  misc_feature 1..20: note = Description of Artificial Sequence: Synthetic oligonucleotide
  misc_feature 1..20: note = Target: FXN; (-) strand; PAM type: YTN; PAM sequence: CTC
  source 1..20: mol_type = other DNA
ccaaagagctaggatgacag

SEQ ID NO: 24852 - DNA, 20 bp, synthetic construct
  misc_feature 1..20: note = Description of Artificial Sequence: Synthetic oligonucleotide
  misc_feature 1..20: note = Target: FXN; (-) strand; PAM type: YTN; PAM sequence: CTC
  source 1..20: mol_type = other DNA
ggcctcccaaagagctagga

SEQ ID NO: 24853 - DNA, 20 bp, synthetic construct
  misc_feature 1..20: note = Description of Artificial Sequence: Synthetic oligonucleotide
  misc_feature 1..20: note = Target: FXN; (-) strand; PAM type: YTN; PAM sequence: CTC
  source 1..20: mol_type = other DNA
acctcggcctcccaaagagc

SEQ ID NO: 24854 - DNA, 20 bp, synthetic construct
  misc_feature 1..20: note = Description of Artificial Sequence: Synthetic oligonucleotide
  misc_feature 1..20: note = Target: FXN; (-) strand; PAM type: YTN; PAM sequence: CTG
  source 1..20: mol_type = other DNA
ctcacctcggcctcccaaag

SEQ ID NO: 24855 - DNA, 20 bp, synthetic construct
  misc_feature 1..20: note = Description of Artificial Sequence: Synthetic oligonucleotide
  misc_feature 1..20: note = Target: FXN; (-) strand; PAM type: YTN; PAM sequence: CTC
  source 1..20: mol_type = other DNA
agtgatctgctcacctcggc

SEQ ID NO: 24856 - DNA, 20 bp, synthetic construct
  misc_feature 1..20: note = Description of Artificial Sequence: Synthetic oligonucleotide
  misc_feature 1..20: note = Target: FXN; (-) strand; PAM type: YTN; PAM sequence: CTG
  source 1..20: mol_type = other DNA
gcctcagtgatctgctcacc

SEQ ID NO: 24857 - DNA, 20 bp, synthetic construct
  misc_feature 1..20: note = Description of Artificial Sequence: Synthetic oligonucleotide
  misc_feature 1..20: note = Target: FXN; (-) strand; PAM type: YTN; PAM sequence: CTC
  source 1..20: mol_type = other DNA
ctggcctcagtgatctgctc

SEQ ID NO: 24858 - DNA, 20 bp, synthetic construct
  misc_feature 1..20: note = Description of Artificial Sequence: Synthetic oligonucleotide
  misc_feature 1..20: note = Target: FXN; (-) strand; PAM type: YTN; PAM sequence: TTG
  source 1..20: mol_type = other DNA
aactcctggcctcagtgatc

SEQ ID NO: 24859 - DNA, 20 bp, synthetic construct
  misc_feature 1..20: note = Description of Artificial Sequence: Synthetic oligonucleotide
  misc_feature 1..20: note = Target: FXN; (-) strand; PAM type: YTN; PAM sequence: CTT
  source 1..20: mol_type = other DNA
gaactcctggcctcagtgat

SEQ ID NO: 24860 - DNA, 20 bp, synthetic construct
  misc_feature 1..20: note = Description of Artificial Sequence: Synthetic oligonucleotide
  misc_feature 1..20: note = Target: FXN; (-) strand; PAM type: YTN; PAM sequence: CTG
  source 1..20: mol_type = other DNA
gtcttgaactcctggcctca

SEQ ID NO: 24861 - DNA, 20 bp, synthetic construct
  misc_feature 1..20: note = Description of Artificial Sequence: Synthetic oligonucleotide
  misc_feature 1..20: note = Target: FXN; (-) strand; PAM type: YTN; PAM sequence: TTG
  source 1..20: mol_type = other DNA
gccaggctggtcttgaactc

SEQ ID NO: 24862 - DNA, 20 bp, synthetic construct
  misc_feature 1..20: note = Description of Artificial Sequence: Synthetic oligonucleotide
  misc_feature 1..20: note = Target: FXN; (-) strand; PAM type: YTN; PAM sequence: TTC
  source 1..20: mol_type = other DNA
accatgttggccaggctggt

SEQ ID NO: 24863 - DNA, 20 bp, synthetic construct
  misc_feature 1..20: note = Description of Artificial Sequence: Synthetic oligonucleotide
  misc_feature 1..20: note = Target: FXN; (-) strand; PAM type: YTN; PAM sequence: TTT
  source 1..20: mol_type = other DNA
caccatgttggccaggctgg

SEQ ID NO: 24864 - DNA, 20 bp, synthetic construct
  misc_feature 1..20: note = Description of Artificial Sequence: Synthetic oligonucleotide
  misc_feature 1..20: note = Target: FXN; (-) strand; PAM type: YTN; PAM sequence: TTA
  source 1..20: mol_type = other DNA
gtagagacagggtttcacca

SEQ ID NO: 24865 - DNA, 20 bp, synthetic construct
  misc_feature 1..20: note = Description of Artificial Sequence: Synthetic oligonucleotide
  misc_feature 1..20: note = Target: FXN; (-) strand; PAM type: YTN; PAM sequence: TTT
  source 1..20: mol_type = other DNA
agtagagacagggtttcacc

SEQ ID NO: 24866 - DNA, 20 bp, synthetic construct
  misc_feature 1..20: note = Description of Artificial Sequence: Synthetic oligonucleotide
  misc_feature 1..20: note = Target: FXN; (-) strand; PAM type: YTN; PAM sequence: TTT
  source 1..20: mol_type = other DNA
tagtagagacagggtttcac

SEQ ID NO: 24867 - DNA, 20 bp, synthetic construct
  misc_feature 1..20: note = Description of Artificial Sequence: Synthetic oligonucleotide
  misc_feature 1..20: note = Target: FXN; (-) strand; PAM type: YTN; PAM sequence: TTT
  source 1..20: mol_type = other DNA
ttagtagagacagggtttca

SEQ ID NO: 24868 - DNA, 20 bp, synthetic construct
  misc_feature 1..20: note = Description of Artificial Sequence: Synthetic oligonucleotide
  misc_feature 1..20: note = Target: FXN; (-) strand; PAM type: YTN; PAM sequence: TTG
  source 1..20: mol_type = other DNA
tatttttagtagagacaggg

SEQ ID NO: 24869 - DNA, 20 bp, synthetic construct
  misc_feature 1..20: note = Description of Artificial Sequence: Synthetic oligonucleotide
  misc_feature 1..20: note = Target: FXN; (-) strand; PAM type: YTN; PAM sequence: TTT
  source 1..20: mol_type = other DNA
gtatttttagtagagacagg

SEQ ID NO: 24870 - DNA, 20 bp, synthetic construct
  misc_feature 1..20: note = Description of Artificial Sequence: Synthetic oligonucleotide
  misc_feature 1..20: note = Target: FXN; (-) strand; PAM type: YTN; PAM sequence: TTT
  source 1..20: mol_type = other DNA
tgtatttttagtagagacag

SEQ ID NO: 24871 - DNA, 20 bp, synthetic construct
  misc_feature 1..20: note = Description of Artificial Sequence: Synthetic oligonucleotide
  misc_feature 1..20: note = Target: FXN; (-) strand; PAM type: YTN; PAM sequence: TTT
  source 1..20: mol_type = other DNA
ttgtatttttagtagagaca

SEQ ID NO: 24872 - DNA, 20 bp, synthetic construct
  misc_feature 1..20: note = Description of Artificial Sequence: Synthetic oligonucleotide
  misc_feature 1..20: note = Target: FXN; (-) strand; PAM type: YTN; PAM sequence: CTT
  source 1..20: mol_type = other DNA
tttgtatttttagtagagac

SEQ ID NO: 24873 - DNA, 20 bp, synthetic construct
  misc_feature 1..20: note = Description of Artificial Sequence: Synthetic oligonucleotide
  misc_feature 1..20: note = Target: FXN; (-) strand; PAM type: YTN; PAM sequence: CTA
  source 1..20: mol_type = other DNA
actttttgtatttttagtag

SEQ ID NO: 24874 - DNA, 20 bp, synthetic construct
  misc_feature 1..20: note = Description of Artificial Sequence: Synthetic oligonucleotide
  misc_feature 1..20: note = Target: FXN; (-) strand; PAM type: YTN; PAM sequence: CTG
  source 1..20: mol_type = other DNA
gctaactttttgtattttta

SEQ ID NO: 24875 - DNA, 20 bp, synthetic construct
  misc_feature 1..20: note = Description of Artificial Sequence: Synthetic oligonucleotide
  misc_feature 1..20: note = Target: FXN; (-) strand; PAM type: YTN; PAM sequence: CTG
  source 1..20: mol_type = other DNA
ccaccacgcctggctaactt

SEQ ID NO: 24876 - DNA, 20 bp, synthetic construct
  misc_feature 1..20: note = Description of Artificial Sequence: Synthetic oligonucleotide
  misc_feature 1..20: note = Target: FXN; (-) strand; PAM type: YTN; PAM sequence: TTA
  source 1..20: mol_type = other DNA
caggtgcctgccaccacgcc

SEQ ID NO: 24877 - DNA, 20 bp, synthetic construct
  misc_feature 1..20: note = Description of Artificial Sequence: Synthetic oligonucleotide
  misc_feature 1..20: note = Target: FXN; (-) strand; PAM type: YTN; PAM sequence: CTG
  source 1..20: mol_type = other DNA
ggattacaggtgcctgccac

SEQ ID NO: 24878 - DNA, 20 bp, synthetic construct
  misc_feature 1..20: note = Description of Artificial Sequence: Synthetic oligonucleotide
  misc_feature 1..20: note = Target: FXN; (-) strand; PAM type: YTN; PAM sequence: CTC
  source 1..20: mol_type = other DNA
ccgagtagctgggattacag

SEQ ID NO: 24879 - DNA, 20 bp, synthetic construct
  misc_feature 1..20: note = Description of Artificial Sequence: Synthetic oligonucleotide
  misc_feature 1..20: note = Target: FXN; (-) strand; PAM type: YTN; PAM sequence: CTC
  source 1..20: mol_type = other DNA
aggctcccgagtagctggga

SEQ ID NO: 24880 - DNA, 20 bp, synthetic construct
  misc_feature 1..20: note = Description of Artificial Sequence: Synthetic oligonucleotide
  misc_feature 1..20: note = Target: FXN; (-) strand; PAM type: YTN; PAM sequence: CTG
  source 1..20: mol_type = other DNA
cctcaggctcccgagtagct

SEQ ID NO: 24881 - DNA, 20 bp, synthetic construct
  misc_feature 1..20: note = Description of Artificial Sequence: Synthetic oligonucleotide
  misc_feature 1..20: note = Target: FXN; (-) strand; PAM type: YTN; PAM sequence: CTC
  source 1..20: mol_type = other DNA
ctgcctcaggctcccgagta

SEQ ID NO: 24882 - DNA, 20 bp, synthetic construct
  misc_feature 1..20: note = Description of Artificial Sequence: Synthetic oligonucleotide
  misc_feature 1..20: note = Target: FXN; (-) strand; PAM type: YTN; PAM sequence: TTC
  source 1..20: mol_type = other DNA
tcctgcctcaggctcccgag

SEQ ID NO: 24883 - DNA, 20 bp, synthetic construct
  misc_feature 1..20: note = Description of Artificial Sequence: Synthetic oligonucleotide
  misc_feature 1..20: note = Target: FXN; (-) strand; PAM type: YTN; PAM sequence: TTA
  source 1..20: mol_type = other DNA
agcgattctcctgcctcagg

SEQ ID NO: 24884 - DNA, 20 bp, synthetic construct
  misc_feature 1..20: note = Description of Artificial Sequence: Synthetic oligonucleotide
  misc_feature 1..20: note = Target: FXN; (-) strand; PAM type: YTN; PAM sequence: TTT
  source 1..20: mol_type = other DNA
aagcgattctcctgcctcag

SEQ ID NO: 24885 - DNA, 20 bp, synthetic construct
  misc_feature 1..20: note = Description of Artificial Sequence: Synthetic oligonucleotide
  misc_feature 1..20: note = Target: FXN; (-) strand; PAM type: YTN; PAM sequence: CTG
  source 1..20: mol_type = other DNA
ggtttaagcgattctcctgc

SEQ ID NO: 24886 - DNA, 20 bp, synthetic construct
  misc_feature 1..20: note = Description of Artificial Sequence: Synthetic oligonucleotide
  misc_feature 1..20: note = Target: FXN; (-) strand; PAM type: YTN; PAM sequence: CTC
  source 1..20: mol_type = other DNA
ctgggtttaagcgattctcc

SEQ ID NO: 24887 - DNA, 20 bp, synthetic construct
  misc_feature 1..20: note = Description of Artificial Sequence: Synthetic oligonucleotide
  misc_feature 1..20: note = Target: FXN; (-) strand; PAM type: YTN; PAM sequence: CTC
  source 1..20: mol_type = other DNA
catctcctgggtttaagcga

SEQ ID NO: 24888 - DNA, 20 bp, synthetic construct
  misc_feature 1..20: note = Description of Artificial Sequence: Synthetic oligonucleotide
  misc_feature 1..20: note = Target: FXN; (-) strand; PAM type: YTN; PAM sequence: CTG
  source 1..20: mol_type = other DNA
cagcctccatctcctgggtt

SEQ ID NO: 24889 - DNA, 20 bp, synthetic construct
  misc_feature 1..20: note = Description of Artificial Sequence: Synthetic oligonucleotide
  misc_feature 1..20: note = Target: FXN; (-) strand; PAM type: YTN; PAM sequence: CTC
  source 1..20: mol_type = other DNA
actgcagcctccatctcctg

SEQ ID NO: 24890 - DNA, 20 bp, synthetic construct
  misc_feature 1..20: note = Description of Artificial Sequence: Synthetic oligonucleotide
  misc_feature 1..20: note = Target: FXN; (-) strand; PAM type: YTN; PAM sequence: CTC
  source 1..20: mol_type = other DNA
agctcactgcagcctccatc

SEQ ID NO: 24891 - DNA, 20 bp, synthetic construct
  misc_feature 1..20: note = Description of Artificial Sequence: Synthetic oligonucleotide
  misc_feature 1..20: note = Target: FXN; (-) strand; PAM type: YTN; PAM sequence: CTG
  source 1..20: mol_type = other DNA
gagtgcaatggcatgatctc

SEQ ID NO: 24892 - DNA, 20 bp, synthetic construct
  misc_feature 1..20: note = Description of Artificial Sequence: Synthetic oligonucleotide
  misc_feature 1..20: note = Target: FXN; (-) strand; PAM type: YTN; PAM sequence: TTA
  source 1..20: mol_type = other DNA
cccaggctggagtgcaatgg

SEQ ID NO: 24893 - DNA, 20 bp, synthetic construct
  misc_feature 1..20: note = Description of Artificial Sequence: Synthetic oligonucleotide
  misc_feature 1..20: note = Target: FXN; (-) strand; PAM type: YTN; PAM sequence: CTC
  source 1..20: mol_type = other DNA
gttacccaggctggagtgca

SEQ ID NO: 24894 - DNA, 20 bp, synthetic construct
  misc_feature 1..20: note = Description of Artificial Sequence: Synthetic oligonucleotide
  misc_feature 1..20: note = Target: FXN; (-) strand; PAM type: YTN; PAM sequence: TTC
  source 1..20: mol_type = other DNA
gctcgttacccaggctggag

SEQ ID NO: 24895 - DNA, 20 bp, synthetic construct
  misc_feature 1..20: note = Description of Artificial Sequence: Synthetic oligonucleotide
  misc_feature 1..20: note = Target: FXN; (-) strand; PAM type: YTN; PAM sequence: TTT
  source 1..20: mol_type = other DNA
cgctcgttacccaggctgga

SEQ ID NO: 24896 - DNA, 20 bp, synthetic construct
  misc_feature 1..20: note = Description of Artificial Sequence: Synthetic oligonucleotide
  misc_feature 1..20: note = Target: FXN; (-) strand; PAM type: YTN; PAM sequence: TTA
  source 1..20: mol_type = other DNA
gagatggaatttcgctcgtt

SEQ ID NO: 24897 - DNA, 20 bp, synthetic construct
  misc_feature 1..20: note = Description of Artificial Sequence: Synthetic oligonucleotide
  misc_feature 1..20: note = Target: FXN; (-) strand; PAM type: YTN; PAM sequence: TTT
  source 1..20: mol_type = other DNA
agagatggaatttcgctcgt

SEQ ID NO: 24898 - DNA, 20 bp, synthetic construct
  misc_feature 1..20: note = Description of Artificial Sequence: Synthetic oligonucleotide
  misc_feature 1..20: note = Target: FXN; (-) strand; PAM type: YTN; PAM sequence: TTT
  source 1..20: mol_type = other DNA
tagagatggaatttcgctcg

SEQ ID NO: 24899 - DNA, 20 bp, synthetic construct
  misc_feature 1..20: note = Description of Artificial Sequence: Synthetic oligonucleotide
  misc_feature 1..20: note = Target: FXN; (-) strand; PAM type: YTN; PAM sequence: TTT
  source 1..20: mol_type = other DNA
ttagagatggaatttcgctc

SEQ ID NO: 24900 - DNA, 20 bp, synthetic construct
  misc_feature 1..20: note = Description of Artificial Sequence: Synthetic oligonucleotide
  misc_feature 1..20: note = Target: FXN; (-) strand; PAM type: YTN; PAM sequence: TTT
  source 1..20: mol_type = other DNA
tttagagatggaatttcgct

SEQ ID NO: 24901 - DNA, 20 bp, synthetic construct
  misc_feature 1..20: note = Description of Artificial Sequence: Synthetic oligonucleotide
  misc_feature 1..20: note = Target: FXN; (-) strand; PAM type: YTN; PAM sequence: TTT
  source 1..20: mol_type = other DNA
ttttagagatggaatttcgc

SEQ ID NO: 24902 - DNA, 20 bp, synthetic construct
  misc_feature 1..20: note = Description of Artificial Sequence: Synthetic oligonucleotide
  misc_feature 1..20: note = Target: FXN; (-) strand; PAM type: YTN; PAM sequence: TTT
  source 1..20: mol_type = other DNA
tttttagagatggaatttcg

SEQ ID NO: 24903 - DNA, 20 bp, synthetic construct
  misc_feature 1..20: note = Description of Artificial Sequence: Synthetic oligonucleotide
  misc_feature 1..20: note = Target: FXN; (-) strand; PAM type: YTN; PAM sequence: CTT
  source 1..20: mol_type = other DNA
ttttttagagatggaatttc

SEQ ID NO: 24904 - DNA, 20 bp, synthetic construct
  misc_feature 1..20: note = Description of Artificial Sequence: Synthetic oligonucleotide
  misc_feature 1..20: note = Target: FXN; (-) strand; PAM type: YTN; PAM sequence: TTC
  source 1..20: mol_type = other DNA
ttttttttagagatggaatt

SEQ ID NO: 24905 - DNA, 20 bp, synthetic construct
  misc_feature 1..20: note = Description of Artificial Sequence: Synthetic oligonucleotide
  misc_feature 1..20: note = Target: FXN; (-) strand; PAM type: YTN; PAM sequence: TTT
  source 1..20: mol_type = other DNA
cttttttttagagatggaat

SEQ ID NO: 24906 - DNA, 20 bp, synthetic construct
  misc_feature 1..20: note = Description of Artificial Sequence: Synthetic oligonucleotide
  misc_feature 1..20: note = Target: FXN; (-) strand; PAM type: YTN; PAM sequence: TTT
  source 1..20: mol_type = other DNA
tcttttttttagagatggaa

SEQ ID NO: 24907 - DNA, 20 bp, synthetic construct
  misc_feature 1..20: note = Description of Artificial Sequence: Synthetic oligonucleotide
  misc_feature 1..20: note = Target: FXN; (-) strand; PAM type: YTN; PAM sequence: TTT
  source 1..20: mol_type = other DNA
ttcttttttttagagatgga

SEQ ID NO: 24908 - DNA, 20 bp, synthetic construct
  misc_feature 1..20: note = Description of Artificial Sequence: Synthetic oligonucleotide
  misc_feature 1..20: note = Target: FXN; (-) strand; PAM type: YTN; PAM sequence: TTT
  source 1..20: mol_type = other DNA
tttcttttttttagagatgg

SEQ ID NO: 24909 - DNA, 20 bp, synthetic construct
  misc_feature 1..20: note = Description of Artificial Sequence: Synthetic oligonucleotide
  misc_feature 1..20: note = Target: FXN; (-) strand; PAM type: YTN; PAM sequence: TTT
  source 1..20: mol_type = other DNA
ttttcttttttttagagatg

SEQ ID NO: 24910 - DNA, 20 bp, synthetic construct
  misc_feature 1..20: note = Description of Artificial Sequence: Synthetic oligonucleotide
  misc_feature 1..20: note = Target: FXN; (-) strand; PAM type: YTN; PAM sequence: TTT
  source 1..20: mol_type = other DNA
tttttcttttttttagagat

SEQ ID NO: 24911 - DNA, 20 bp, synthetic construct
  misc_feature 1..20: note = Description of Artificial Sequence: Synthetic oligonucleotide
  misc_feature 1..20: note = Target: FXN; (-) strand; PAM type: YTN; PAM sequence: TTT
  source 1..20: mol_type = other DNA
ttttttcttttttttagaga

SEQ ID NO: 24912 - DNA, 20 bp, synthetic construct
  misc_feature 1..20: note = Description of Artificial Sequence: Synthetic oligonucleotide
  misc_feature 1..20: note = Target: FXN; (-) strand; PAM type: YTN; PAM sequence: TTT
  source 1..20: mol_type = other DNA
tttttttcttttttttagag

SEQ ID NO: 24913 - DNA, 20 bp, synthetic construct
  misc_feature 1..20: note = Description of Artificial Sequence: Synthetic oligonucleotide
  misc_feature 1..20: note = Target: FXN; (-) strand; PAM type: YTN; PAM sequence: CTT
  source 1..20: mol_type = other DNA
ttttttttcttttttttaga

SEQ ID NO: 24914 - DNA, 20 bp, synthetic construct
  misc_feature 1..20: note = Description of Artificial Sequence: Synthetic oligonucleotide
  misc_feature 1..20: note = Target: FXN; (-) strand; PAM type: YTN; PAM sequence: CTA
  source 1..20: mol_type = other DNA
aggccttttttttttctttt

SEQ ID NO: 24915 - DNA, 20 bp, synthetic construct
  misc_feature 1..20: note = Description of Artificial Sequence: Synthetic oligonucleotide
  misc_feature 1..20: note = Target: FXN; (-) strand; PAM type: YTN; PAM sequence: CTG
  source 1..20: mol_type = other DNA
cacaaacgtggaaagtcaaa

SEQ ID NO: 24916 - DNA, 20 bp, synthetic construct
  misc_feature 1..20: note = Description of Artificial Sequence: Synthetic oligonucleotide
  misc_feature 1..20: note = Target: FXN; (-) strand; PAM type: YTN; PAM sequence: TTG
  source 1..20: mol_type = other DNA
gagataaaaggctgcacaaa

SEQ ID NO: 24917 - DNA, 20 bp, synthetic construct
  misc_feature 1..20: note = Description of Artificial Sequence: Synthetic oligonucleotide
  misc_feature 1..20: note = Target: FXN; (-) strand; PAM type: YTN; PAM sequence: TTA
  source 1..20: mol_type = other DNA
gtagatgtgacaagaaaaga

SEQ ID NO: 24918 - DNA, 20 bp, synthetic construct
  misc_feature 1..20: note = Description of Artificial Sequence: Synthetic oligonucleotide
  misc_feature 1..20: note = Target: FXN; (-) strand; PAM type: YTN; PAM sequence: TTT
  source 1..20: mol_type = other DNA
agtagatgtgacaagaaaag

SEQ ID NO: 24919 - DNA, 20 bp, synthetic construct
  misc_feature 1..20: note = Description of Artificial Sequence: Synthetic oligonucleotide
  misc_feature 1..20: note = Target: FXN; (-) strand; PAM type: YTN; PAM sequence: TTT
  source 1..20: mol_type = other DNA
tagtagatgtgacaagaaaa

SEQ ID NO: 24920 - DNA, 20 bp, synthetic construct
  misc_feature 1..20: note = Description of Artificial Sequence: Synthetic oligonucleotide
  misc_feature 1..20: note = Target: FXN; (-) strand; PAM type: YTN; PAM sequence: CTT
  source 1..20: mol_type = other DNA
ttagtagatgtgacaagaaa

SEQ ID NO: 24921 - DNA, 20 bp, synthetic construct
  misc_feature 1..20: note = Description of Artificial Sequence: Synthetic oligonucleotide
  misc_feature 1..20: note = Target: FXN; (-) strand; PAM type: YTN; PAM sequence: TTG
  source 1..20: mol_type = other DNA
cttttagtagatgtgacaag

SEQ ID NO: 24922 - DNA, 20 bp, synthetic construct
  misc_feature 1..20: note = Description of Artificial Sequence: Synthetic oligonucleotide
  misc_feature 1..20: note = Target: FXN; (-) strand; PAM type: YTN; PAM sequence: TTG
  source 1..20: mol_type = other DNA
ttgcttttagtagatgtgac

SEQ ID NO: 24923 - DNA, 20 bp, synthetic construct
  misc_feature 1..20: note = Description of Artificial Sequence: Synthetic oligonucleotide
  misc_feature 1..20: note = Target: FXN; (-) strand; PAM type: YTN; PAM sequence: CTT
  source 1..20: mol_type = other DNA
gttgcttttagtagatgtga

SEQ ID NO: 24924 - DNA, 20 bp, synthetic construct
  misc_feature 1..20: note = Description of Artificial Sequence: Synthetic oligonucleotide
  misc_feature 1..20: note = Target: FXN; (-) strand; PAM type: YTN; PAM sequence: TTC
  source 1..20: mol_type = other DNA
ttgttgcttttagtagatgt

SEQ ID NO: 24925 - DNA, 20 bp, synthetic construct
  misc_feature 1..20: note = Description of Artificial Sequence: Synthetic oligonucleotide
  misc_feature 1..20: note = Target: FXN; (-) strand; PAM type: YTN; PAM sequence: CTT
  source 1..20: mol_type = other DNA
cttgttgcttttagtagatg

SEQ ID NO: 24926 - DNA, 20 bp, synthetic construct
  misc_feature 1..20: note = Description of Artificial Sequence: Synthetic oligonucleotide
  misc_feature 1..20: note = Target: FXN; (-) strand; PAM type: YTN; PAM sequence: CTG
  source 1..20: mol_type = other DNA
aataccggtggcttcttgtt

SEQ ID NO: 24927 - DNA, 20 bp, synthetic construct
  misc_feature 1..20: note = Description of Artificial Sequence: Synthetic oligonucleotide
  misc_feature 1..20: note = Target: FXN; (-) strand; PAM type: YTN; PAM sequence: TTC
  source 1..20: mol_type = other DNA
ctgaataccggtggcttctt

SEQ ID NO: 24928 - DNA, 20 bp, synthetic construct
  misc_feature 1..20: note = Description of Artificial Sequence: Synthetic oligonucleotide
  misc_feature 1..20: note = Target: FXN; (-) strand; PAM type: YTN; PAM sequence: CTG
  source 1..20: mol_type = other DNA
gggacaggtagaatgttcct

SEQ ID NO: 24929 - DNA, 20 bp, synthetic construct
  misc_feature 1..20: note = Description of Artificial Sequence: Synthetic oligonucleotide
  misc_feature 1..20: note = Target: FXN; (-) strand; PAM type: YTN; PAM sequence: CTC
  source 1..20: mol_type = other DNA
tggggacaggtagaatgttc

SEQ ID NO: 24930 - DNA, 20 bp, synthetic construct
  misc_feature 1..20: note = Description of Artificial Sequence: Synthetic oligonucleotide
  misc_feature 1..20: note = Target: FXN; (-) strand; PAM type: YTN; PAM sequence: CTG
  source 1..20: mol_type = other DNA
agcatatagctctggggaca

SEQ ID NO: 24931 - DNA, 20 bp, synthetic construct
  misc_feature 1..20: note = Description of Artificial Sequence: Synthetic oligonucleotide
  misc_feature 1..20: note = Target: FXN; (-) strand; PAM type: YTN; PAM sequence: CTA
  source 1..20: mol_type = other DNA
ctgagcatatagctctgggg

SEQ ID NO: 24932 - DNA, 20 bp, synthetic construct
  misc_feature 1..20: note = Description of Artificial Sequence: Synthetic oligonucleotide
  misc_feature 1..20: note = Target: FXN; (-) strand; PAM type: YTN; PAM sequence: CTG
  source 1..20: mol_type = other DNA
tatgcctactgagcatatag

SEQ ID NO: 24933 - DNA, 20 bp, synthetic construct
  misc_feature 1..20: note = Description of Artificial Sequence: Synthetic oligonucleotide
  misc_feature 1..20: note = Target: FXN; (-) strand; PAM type: YTN; PAM sequence: CTG
  source 1..20: mol_type = other DNA
gagggccaactgtatgccta

SEQ ID NO: 24934 - DNA, 20 bp, synthetic construct
  misc_feature 1..20: note = Description of Artificial Sequence: Synthetic oligonucleotide
  misc_feature 1..20: note = Target: FXN; (-) strand; PAM type: YTN; PAM sequence: CTC
  source 1..20: mol_type = other DNA
agataacctggagggccaac

SEQ ID NO: 24935 - DNA, 20 bp, synthetic construct
  misc_feature 1..20: note = Description of Artificial Sequence: Synthetic oligonucleotide
  misc_feature 1..20: note = Target: FXN; (-) strand; PAM type: YTN; PAM sequence: CTG
  source 1..20: mol_type = other DNA
agtctcagataacctggagg

SEQ ID NO: 24936 - DNA, 20 bp, synthetic construct
  misc_feature 1..20: note = Description of Artificial Sequence: Synthetic oligonucleotide
  misc_feature 1..20: note = Target: FXN; (-) strand; PAM type: YTN; PAM sequence: CTG
  source 1..20: mol_type = other DNA
gaaatctgagtctcagataa

SEQ ID NO: 24937 - DNA, 20 bp, synthetic construct
  misc_feature 1..20: note = Description of Artificial Sequence: Synthetic oligonucleotide
  misc_feature 1..20: note = Target: FXN; (-) strand; PAM type: YTN; PAM sequence: CTC
  source 1..20: mol_type = other DNA
tggaaatctgagtctcagat

SEQ ID NO: 24938 - DNA, 20 bp, synthetic construct
  misc_feature 1..20: note = Description of Artificial Sequence: Synthetic oligonucleotide
  misc_feature 1..20: note = Target: FXN; (-) strand; PAM type: YTN; PAM sequence: TTG
  source 1..20: mol_type = other DNA
tgagccatgcaaagccctct

SEQ ID NO: 24939 - DNA, 20 bp, synthetic construct
  misc_feature 1..20: note = Description of Artificial Sequence: Synthetic oligonucleotide
  misc_feature 1..20: note = Target: FXN; (-) strand; PAM type: YTN; PAM sequence: CTT
  source 1..20: mol_type = other DNA
gtgagccatgcaaagccctc

SEQ ID NO: 24940 - DNA, 20 bp, synthetic construct
  misc_feature 1..20: note = Description of Artificial Sequence: Synthetic oligonucleotide
  misc_feature 1..20: note = Target: FXN; (-) strand; PAM type: YTN; PAM sequence: TTC
  source 1..20: mol_type = other DNA
agaccttgtgagccatgcaa

SEQ ID NO: 24941 - DNA, 20 bp, synthetic construct
  misc_feature 1..20: note = Description of Artificial Sequence: Synthetic oligonucleotide
  misc_feature 1..20: note = Target: FXN; (-) strand; PAM type: YTN; PAM sequence: CTT
  source 1..20: mol_type = other DNA
cagaccttgtgagccatgca

SEQ ID NO: 24942 - DNA, 20 bp, synthetic construct
  misc_feature 1..20: note = Description of Artificial Sequence: Synthetic oligonucleotide
  misc_feature 1..20: note = Target: FXN; (-) strand; PAM type: YTN; PAM sequence: TTC
  source 1..20: mol_type = other DNA
ttcagaccttgtgagccatg

SEQ ID NO: 24943 - DNA, 20 bp, synthetic construct
  misc_feature 1..20: note = Description of Artificial Sequence: Synthetic oligonucleotide
  misc_feature 1..20: note = Target: FXN; (-) strand; PAM type: YTN; PAM sequence: CTC
  source 1..20: mol_type = other DNA
agaggttcttcagaccttgt

SEQ ID NO: 24944 - DNA, 20 bp, synthetic construct
  misc_feature 1..20: note = Description of Artificial Sequence: Synthetic oligonucleotide
  misc_feature 1..20: note = Target: FXN; (-) strand; PAM type: YTN; PAM sequence: CTG
  source 1..20: mol_type = other DNA
tggcaaagtcaatgaacaga

SEQ ID NO: 24945 - DNA, 20 bp, synthetic construct
  misc_feature 1..20: note = Description of Artificial Sequence: Synthetic oligonucleotide
  misc_feature 1..20: note = Target: FXN; (-) strand; PAM type: YTN; PAM sequence: TTG
  source 1..20: mol_type = other DNA
agactgtggcaaagtcaatg

SEQ ID NO: 24946 - DNA, 20 bp, synthetic construct
  misc_feature 1..20: note = Description of Artificial Sequence: Synthetic oligonucleotide
  misc_feature 1..20: note = Target: FXN; (-) strand; PAM type: YTN; PAM sequence: TTT
  source 1..20: mol_type = other DNA
gagactgtggcaaagtcaat

SEQ ID NO: 24947 - DNA, 20 bp, synthetic construct
  misc_feature 1..20: note = Description of Artificial Sequence: Synthetic oligonucleotide
  misc_feature 1..20: note = Target: FXN; (-) strand; PAM type: YTN; PAM sequence: CTT
  source 1..20: mol_type = other DNA
tgagactgtggcaaagtcaa

SEQ ID NO: 24948 - DNA, 20 bp, synthetic construct
  misc_feature 1..20: note = Description of Artificial Sequence: Synthetic oligonucleotide
  misc_feature 1..20: note = Target: FXN; (-) strand; PAM type: YTN; PAM sequence: CTC
  source 1..20: mol_type = other DNA
tttgagactgtggcaaagtc

SEQ ID NO: 24949 - DNA, 20 bp, synthetic construct
  misc_feature 1..20: note = Description of Artificial Sequence: Synthetic oligonucleotide
  misc_feature 1..20: note = Target: FXN; (-) strand; PAM type: YTN; PAM sequence: CTC
  source 1..20: mol_type = other DNA
aaacatgcagcatgcagtgc

SEQ ID NO: 24950 - DNA, 20 bp, synthetic construct
  misc_feature 1..20: note = Description of Artificial Sequence: Synthetic oligonucleotide
  misc_feature 1..20: note = Target: FXN; (-) strand; PAM type: YTN; PAM sequence: CTG
  source 1..20: mol_type = other DNA
gaaatggatgccaccaaagc

SEQ ID NO: 24951 - DNA, 20 bp, synthetic construct
  misc_feature 1..20: note = Description of Artificial Sequence: Synthetic oligonucleotide
  misc_feature 1..20: note = Target: FXN; (-) strand; PAM type: YTN; PAM sequence: CTG
  source 1..20: mol_type = other DNA
ggggaggaatgccggaagcc

SEQ ID NO: 24952 - DNA, 20 bp, synthetic construct
  misc_feature 1..20: note = Description of Artificial Sequence: Synthetic oligonucleotide
  misc_feature 1..20: note = Target: FXN; (-) strand; PAM type: YTN; PAM sequence: CTG
  source 1..20: mol_type = other DNA
ctgggggaggaatgccggaa

SEQ ID NO: 24953 - DNA, 20 bp, synthetic construct
  misc_feature 1..20: note = Description of Artificial Sequence: Synthetic oligonucleotide
  misc_feature 1..20: note = Target: FXN; (-) strand; PAM type: YTN; PAM sequence: CTG
  source 1..20: mol_type = other DNA
ccagaaggagtaaggggaaa

SEQ ID NO: 24954 - DNA, 20 bp, synthetic construct
  misc_feature 1..20: note = Description of Artificial Sequence: Synthetic oligonucleotide
  misc_feature 1..20: note = Target: FXN; (-) strand; PAM type: YTN; PAM sequence: CTC
  source 1..20: mol_type = other DNA
ccagaactgccagaaggagt

SEQ ID NO: 24955 - DNA, 20 bp, synthetic construct
  misc_feature 1..20: note = Description of Artificial Sequence: Synthetic oligonucleotide
  misc_feature 1..20: note = Target: FXN; (-) strand; PAM type: YTN; PAM sequence: CTA
  source 1..20: mol_type = other DNA
tgcaacctcccagaactgcc

SEQ ID NO: 24956 - DNA, 20 bp, synthetic construct
  misc_feature 1..20: note = Description of Artificial Sequence: Synthetic oligonucleotide
  misc_feature 1..20: note = Target: FXN; (-) strand; PAM type: YTN; PAM sequence: CTG
  source 1..20: mol_type = other DNA
caagggccctatgcaacctc

SEQ ID NO: 24957 - DNA, 20 bp, synthetic construct
  misc_feature 1..20: note = Description of Artificial Sequence: Synthetic oligonucleotide
  misc_feature 1..20: note = Target: FXN; (-) strand; PAM type: YTN; PAM sequence: TTG
  source 1..20: mol_type = other DNA
gggcatcctgcaagggccct

SEQ ID NO: 24958 - DNA, 20 bp, synthetic construct
  misc_feature 1..20: note = Description of Artificial Sequence: Synthetic oligonucleotide
  misc_feature 1..20: note = Target: FXN; (-) strand; PAM type: YTN; PAM sequence: CTT
  source 1..20: mol_type = other DNA
ggggcatcctgcaagggccc

SEQ ID NO: 24959 - DNA, 20 bp, synthetic construct
  misc_feature 1..20: note = Description of Artificial Sequence: Synthetic oligonucleotide
  misc_feature 1..20: note = Target: FXN; (-) strand; PAM type: YTN; PAM sequence: CTG
  source 1..20: mol_type = other DNA
gacttggggcatcctgcaag

SEQ ID NO: 24960 - DNA, 20 bp, synthetic construct
  misc_feature 1..20: note = Description of Artificial Sequence: Synthetic oligonucleotide
  misc_feature 1..20: note = Target: FXN; (-) strand; PAM type: YTN; PAM sequence: TTC
  source 1..20: mol_type = other DNA
ccagaggccagaggcagctg

SEQ ID NO: 24961 - DNA, 20 bp, synthetic construct
  misc_feature 1..20: note = Description of Artificial Sequence: Synthetic oligonucleotide
  misc_feature 1..20: note = Target: FXN; (-) strand; PAM type: YTN; PAM sequence: CTT
  source 1..20: mol_type = other DNA
cccagaggccagaggcagct

SEQ ID NO: 24962 - DNA, 20 bp, synthetic construct
  misc_feature 1..20: note = Description of Artificial Sequence: Synthetic oligonucleotide
  misc_feature 1..20: note = Target: FXN; (-) strand; PAM type: YTN; PAM sequence: CTA
  source 1..20: mol_type = other DNA
cacatggcaggtcaagggtg

SEQ ID NO: 24963 - DNA, 20 bp, synthetic construct
  misc_feature 1..20: note = Description of Artificial Sequence: Synthetic oligonucleotide
  misc_feature 1..20: note = Target: FXN; (-) strand; PAM type: YTN; PAM sequence: TTC
  source 1..20: mol_type = other DNA
ctacacatggcaggtcaagg

SEQ ID NO: 24964 - DNA, 20 bp, synthetic construct
  misc_feature 1..20: note = Description of Artificial Sequence: Synthetic oligonucleotide
  misc_feature 1..20: note = Target: FXN; (-) strand; PAM type: YTN; PAM sequence: CTT
  source 1..20: mol_type = other DNA
cctacacatggcaggtcaag

SEQ ID NO: 24965 - DNA, 20 bp, synthetic construct
  misc_feature 1..20: note = Description of Artificial Sequence: Synthetic oligonucleotide
  misc_feature 1..20: note = Target: FXN; (-) strand; PAM type: YTN; PAM sequence: CTG
  source 1..20: mol_type = other DNA
tcttcctacacatggcaggt

SEQ ID NO: 24966 - DNA, 20 bp, synthetic construct
  misc_feature 1..20: note = Description of Artificial Sequence: Synthetic oligonucleotide
  misc_feature 1..20: note = Target: FXN; (-) strand; PAM type: YTN; PAM sequence: CTG
  source 1..20: mol_type = other DNA
gcagaagcgggctgtcttcc

SEQ ID NO: 24967 - DNA, 20 bp, synthetic construct
  misc_feature 1..20: note = Description of Artificial Sequence: Synthetic oligonucleotide
  misc_feature 1..20: note = Target: FXN; (-) strand; PAM type: YTN; PAM sequence: TTG
  source 1..20: mol_type = other DNA
ggccctggcagaagcgggct

SEQ ID NO: 24968 - DNA, 20 bp, synthetic construct
  misc_feature 1..20: note = Description of Artificial Sequence: Synthetic oligonucleotide
  misc_feature 1..20: note = Target: FXN; (-) strand; PAM type: YTN; PAM sequence: CTG
  source 1..20: mol_type = other DNA
ccggcagagttgggccctgg

SEQ ID NO: 24969 - DNA, 20 bp, synthetic construct
  misc_feature 1..20: note = Description of Artificial Sequence: Synthetic oligonucleotide
  misc_feature 1..20: note = Target: FXN; (-) strand; PAM type: YTN; PAM sequence: CTA
  source 1..20: mol_type = other DNA
cctgccggcagagttgggcc

SEQ ID NO: 24970 - DNA, 20 bp, synthetic construct
  misc_feature 1..20: note = Description of Artificial Sequence: Synthetic oligonucleotide
  misc_feature 1..20: note = Target: FXN; (-) strand; PAM type: YTN; PAM sequence: TTG
  source 1..20: mol_type = other DNA
gaaggtgctacctgccggca

SEQ ID NO: 24971 - DNA, 20 bp, synthetic construct
  misc_feature 1..20: note = Description of Artificial Sequence: Synthetic oligonucleotide
  misc_feature 1..20: note = Target: FXN; (-) strand; PAM type: YTN; PAM sequence: TTA
  source 1..20: mol_type = other DNA
taaagtccaaagtgaagagg

SEQ ID NO: 24972 - DNA, 20 bp, synthetic construct
  misc_feature 1..20: note = Description of Artificial Sequence: Synthetic oligonucleotide
  misc_feature 1..20: note = Target: FXN; (-) strand; PAM type: YTN; PAM sequence: CTG
  source 1..20: mol_type = other DNA
acagttataaagtccaaagt

SEQ ID NO: 24973 - DNA, 20 bp, synthetic construct
  misc_feature 1..20: note = Description of Artificial Sequence: Synthetic oligonucleotide
  misc_feature 1..20: note = Target: FXN; (-) strand; PAM type: YTN; PAM sequence: TTA
  source 1..20: mol_type = other DNA
tacctgacagttataaagtc

SEQ ID NO: 24974 - DNA, 20 bp, synthetic construct
  misc_feature 1..20: note = Description of Artificial Sequence: Synthetic oligonucleotide
  misc_feature 1..20: note = Target: FXN; (-) strand; PAM type: YTN; PAM sequence: TTT
  source 1..20: mol_type = other DNA
atacctgacagttataaagt

SEQ ID NO: 24975 - DNA, 20 bp, synthetic construct
  misc_feature 1..20: note = Description of Artificial Sequence: Synthetic oligonucleotide
  misc_feature 1..20: note = Target: FXN; (-) strand; PAM type: YTN; PAM sequence: CTT
  source 1..20: mol_type = other DNA
tatacctgacagttataaag

SEQ ID NO: 24976 - DNA, 20 bp, synthetic construct
  misc_feature 1..20: note = Description of Artificial Sequence: Synthetic oligonucleotide
  misc_feature 1..20: note = Target: FXN; (-) strand; PAM type: YTN; PAM sequence: TTG
  source 1..20: mol_type = other DNA
agaaacgtaaggacacaacc

SEQ ID NO: 24977 - DNA, 20 bp, synthetic construct
  misc_feature 1..20: note = Description of Artificial Sequence: Synthetic oligonucleotide
  misc_feature 1..20: note = Target: FXN; (-) strand; PAM type: YTN; PAM sequence: TTT
  source 1..20: mol_type = other DNA
gagaaacgtaaggacacaac

SEQ ID NO: 24978 - DNA, 20 bp, synthetic construct
  misc_feature 1..20: note = Description of Artificial Sequence: Synthetic oligonucleotide
  misc_feature 1..20: note = Target: FXN; (-) strand; PAM type: YTN; PAM sequence: TTG
  source 1..20: mol_type = other DNA
aagaatttgagaaacgtaag

SEQ ID NO: 24979 - DNA, 20 bp, synthetic construct
  misc_feature 1..20: note = Description of Artificial Sequence: Synthetic oligonucleotide
  misc_feature 1..20: note = Target: FXN; (-) strand; PAM type: YTN; PAM sequence: CTT
  source 1..20: mol_type = other DNA
gaagaatttgagaaacgtaa

SEQ ID NO: 24980 - DNA, 20 bp, synthetic construct
  misc_feature 1..20: note = Description of Artificial Sequence: Synthetic oligonucleotide
  misc_feature 1..20: note = Target: FXN; (-) strand; PAM type: YTN; PAM sequence: TTG
  source 1..20: mol_type = other DNA
acgtgtcttgaagaatttga

SEQ ID NO: 24981 - DNA, 20 bp, synthetic construct
  misc_feature 1..20: note = Description of Artificial Sequence: Synthetic oligonucleotide
  misc_feature 1..20: note = Target: FXN; (-) strand; PAM type: YTN; PAM sequence: CTG
  source 1..20: mol_type = other DNA
gttgacgtgtcttgaagaat

SEQ ID NO: 24982 - DNA, 20 bp, synthetic construct
  misc_feature 1..20: note = Description of Artificial Sequence: Synthetic oligonucleotide
  misc_feature 1..20: note = Target: FXN; (-) strand; PAM type: YTN; PAM sequence: CTG
  source 1..20: mol_type = other DNA
gagagaatgcgtaggagagg

SEQ ID NO: 24983 - DNA, 20 bp, synthetic construct
  misc_feature 1..20: note = Description of Artificial Sequence: Synthetic oligonucleotide
  misc_feature 1..20: note = Target: FXN; (-) strand; PAM type: YTN; PAM sequence: CTG
  source 1..20: mol_type = other DNA
agctggagagaatgcgtagg

SEQ ID NO: 24984 - DNA, 20 bp, synthetic construct
  misc_feature 1..20: note = Description of Artificial Sequence: Synthetic oligonucleotide
  misc_feature 1..20: note = Target: FXN; (-) strand; PAM type: YTN; PAM sequence: TTG
  source 1..20: mol_type = other DNA
agactgagctggagagaatg

SEQ ID NO: 24985 - DNA, 20 bp, synthetic construct
  misc_feature 1..20: note = Description of Artificial Sequence: Synthetic oligonucleotide
  misc_feature 1..20: note = Target: FXN; (-) strand; PAM type: YTN; PAM sequence: TTT
  source 1..20: mol_type = other DNA
gagactgagctggagagaat

SEQ ID NO: 24986 - DNA, 20 bp, synthetic construct
  misc_feature 1..20: note = Description of Artificial Sequence: Synthetic oligonucleotide
  misc_feature 1..20: note = Target: FXN; (-) strand; PAM type: YTN; PAM sequence: TTT
  source 1..20: mol_type = other DNA
tgagactgagctggagagaa

SEQ ID NO: 24987 - DNA, 20 bp, synthetic construct
  misc_feature 1..20: note = Description of Artificial Sequence: Synthetic oligonucleotide
  misc_feature 1..20: note = Target: FXN; (-) strand; PAM type: YTN; PAM sequence: CTG
  source 1..20: mol_type = other DNA
gagagaaagggtgtgttttg

SEQ ID NO: 24988 - DNA, 20 bp, synthetic construct
  misc_feature 1..20: note = Description of Artificial Sequence: Synthetic oligonucleotide
  misc_feature 1..20: note = Target: FXN; (-) strand; PAM type: YTN; PAM sequence: TTG
  source 1..20: mol_type = other DNA
agagtgagctggagagaaag

SEQ ID NO: 24989 - DNA, 20 bp, synthetic construct
  misc_feature 1..20: note = Description of Artificial Sequence: Synthetic oligonucleotide
  misc_feature 1..20: note = Target: FXN; (-) strand; PAM type: YTN; PAM sequence: TTT
  source 1..20: mol_type = other DNA
gagagtgagctggagagaaa

SEQ ID NO: 24990 - DNA, 20 bp, synthetic construct
  misc_feature 1..20: note = Description of Artificial Sequence: Synthetic oligonucleotide
  misc_feature 1..20: note = Target: FXN; (-) strand; PAM type: YTN; PAM sequence: TTT
  source 1..20: mol_type = other DNA
tgagagtgagctggagagaa

SEQ ID NO: 24991 - DNA, 20 bp, synthetic construct
  misc_feature 1..20: note = Description of Artificial Sequence: Synthetic oligonucleotide
  misc_feature 1..20: note = Target: FXN; (-) strand; PAM type: YTN; PAM sequence: CTG
  source 1..20: mol_type = other DNA
atagggtgtgttttgagagt

SEQ ID NO: 24992 - DNA, 20 bp, synthetic construct
  misc_feature 1..20: note = Description of Artificial Sequence: Synthetic oligonucleotide
  misc_feature 1..20: note = Target: FXN; (-) strand; PAM type: YTN; PAM sequence: TTG
  source 1..20: mol_type = other DNA
gcctgatagggtgtgttttg

SEQ ID NO: 24993 - DNA, 20 bp, synthetic construct
  misc_feature 1..20: note = Description of Artificial Sequence: Synthetic oligonucleotide
  misc_feature 1..20: note = Target: FXN; (-) strand; PAM type: YTN; PAM sequence: TTA
  source 1..20: mol_type = other DNA
aaaagagtggttggcctgat

SEQ ID NO: 24994 - DNA, 20 bp, synthetic construct
  misc_feature 1..20: note = Description of Artificial Sequence: Synthetic oligonucleotide
  misc_feature 1..20: note = Target: FXN; (-) strand; PAM type: YTN; PAM sequence: TTT
  source 1..20: mol_type = other DNA
aaaaagagtggttggcctga

SEQ ID NO: 24995 - DNA, 20 bp, synthetic construct
  misc_feature 1..20: note = Description of Artificial Sequence: Synthetic oligonucleotide
  misc_feature 1..20: note = Target: FXN; (-) strand; PAM type: YTN; PAM sequence: CTT
  source 1..20: mol_type = other DNA
taaaaagagtggttggcctg

SEQ ID NO: 24996 - DNA, 20 bp, synthetic construct
  misc_feature 1..20: note = Description of Artificial Sequence: Synthetic oligonucleotide
  misc_feature 1..20: note = Target: FXN; (-) strand; PAM type: YTN; PAM sequence: CTG
  source 1..20: mol_type = other DNA
tcctttaaaaagagtggttg

SEQ ID NO: 24997 - DNA, 20 bp, synthetic construct
  misc_feature 1..20: note = Description of Artificial Sequence: Synthetic oligonucleotide
  misc_feature 1..20: note = Target: FXN; (-) strand; PAM type: YTN; PAM sequence: TTG
  source 1..20: mol_type = other DNA
gtgaggagctgtcctttaaa

SEQ ID NO: 24998 - DNA, 20 bp, synthetic construct
  misc_feature 1..20: note = Description of Artificial Sequence: Synthetic oligonucleotide
  misc_feature 1..20: note = Target: FXN; (-) strand; PAM type: YTN; PAM sequence: CTG
  source 1..20: mol_type = other DNA
gattggtgaggagctgtcct

SEQ ID NO: 24999 - DNA, 20 bp, synthetic construct
  misc_feature 1..20: note = Description of Artificial Sequence: Synthetic oligonucleotide
  misc_feature 1..20: note = Target: FXN; (-) strand; PAM type: YTN; PAM sequence: CTG
  source 1..20: mol_type = other DNA
actggattggtgaggagctg

SEQ ID NO: 25000 - DNA, 20 bp, synthetic construct
  misc_feature 1..20: note = Description of Artificial Sequence: Synthetic oligonucleotide
  misc_feature 1..20: note = Target: FXN; (-) strand; PAM type: YTN; PAM sequence: CTA
  source 1..20: mol_type = other DNA
cctgactggattggtgagga

SEQ ID NO: 25001 - DNA, 20 bp, synthetic construct
  misc_feature 1..20: note = Description of Artificial Sequence: Synthetic oligonucleotide
  misc_feature 1..20: note = Target: FXN; (-) strand; PAM type: YTN; PAM sequence: TTC
  source 1..20: mol_type = other DNA
caggatacaatgtggggaag

SEQ ID NO: 25002 - DNA, 20 bp, synthetic construct
  misc_feature 1..20: note = Description of Artificial Sequence: Synthetic oligonucleotide
  misc_feature 1..20: note = Target: FXN; (-) strand; PAM type: YTN; PAM sequence: CTT
  source 1..20: mol_type = other DNA
ccaggatacaatgtggggaa

SEQ ID NO: 25003 - DNA, 20 bp, synthetic construct
  misc_feature 1..20: note = Description of Artificial Sequence: Synthetic oligonucleotide
  misc_feature 1..20: note = Target: FXN; (-) strand; PAM type: YTN; PAM sequence: TTC
  source 1..20: mol_type = other DNA
cccacccagtccatcaccca

SEQ ID NO: 25004 - DNA, 20 bp, synthetic construct
  misc_feature 1..20: note = Description of Artificial Sequence: Synthetic oligonucleotide
  misc_feature 1..20: note = Target: FXN; (-) strand; PAM type: YTN; PAM sequence: CTT
  source 1..20: mol_type = other DNA
ccccacccagtccatcaccc

SEQ ID NO: 25005 - DNA, 20 bp, synthetic construct
  misc_feature 1..20: note = Description of Artificial Sequence: Synthetic oligonucleotide
  misc_feature 1..20: note = Target: FXN; (-) strand; PAM type: YTN; PAM sequence: CTC
  source 1..20: mol_type = other DNA
ttccccacccagtccatcac

SEQ ID NO: 25006 - DNA, 20 bp, synthetic construct
  misc_feature 1..20: note = Description of Artificial Sequence: Synthetic oligonucleotide
  misc_feature 1..20: note = Target: FXN; (-) strand; PAM type: YTN; PAM sequence: TTG
  source 1..20: mol_type = other DNA
ccatatgaccctcttcccca

SEQ ID NO: 25007 - DNA, 20 bp, synthetic construct
  misc_feature 1..20: note = Description of Artificial Sequence: Synthetic oligonucleotide
  misc_feature 1..20: note = Target: FXN; (-) strand; PAM type: YTN; PAM sequence: TTT
  source 1..20: mol_type = other DNA
gccatatgaccctcttcccc

SEQ ID NO: 25008 - DNA, 20 bp, synthetic construct
  misc_feature 1..20: note = Description of Artificial Sequence: Synthetic oligonucleotide
  misc_feature 1..20: note = Target: FXN; (-) strand; PAM type: YTN; PAM sequence: CTG
  source 1..20: mol_type = other DNA
taagacatacagatttgcca

SEQ ID NO: 25009 - DNA, 20 bp, synthetic construct
  misc_feature 1..20: note = Description of Artificial Sequence: Synthetic oligonucleotide
  misc_feature 1..20: note = Target: FXN; (-) strand; PAM type: YTN; PAM sequence: TTA
  source 1..20: mol_type = other DNA
ctgtaagacatacagatttg

SEQ ID NO: 25010 - DNA, 20 bp, synthetic construct
  misc_feature 1..20: note = Description of Artificial Sequence: Synthetic oligonucleotide
  misc_feature 1..20: note = Target: FXN; (-) strand; PAM type: YTN; PAM sequence: CTA
  source 1..20: mol_type = other DNA
gacaattactgtaagacata

SEQ ID NO: 25011 - DNA, 20 bp, synthetic construct
  misc_feature 1..20: note = Description of Artificial Sequence: Synthetic oligonucleotide
  misc_feature 1..20: note = Target: FXN; (-) strand; PAM type: YTN; PAM sequence: CTG
  source 1..20: mol_type = other DNA
ctagacaattactgtaagac

SEQ ID NO: 25012 - DNA, 20 bp, synthetic construct
  misc_feature 1..20: note = Description of Artificial Sequence: Synthetic oligonucleotide
  misc_feature 1..20: note = Target: FXN; (-) strand; PAM type: YTN; PAM sequence: CTA
  source 1..20: mol_type = other DNA
aagtaagacaccaggggctg

SEQ ID NO: 25013 - DNA, 20 bp, synthetic construct
  misc_feature 1..20: note = Description of Artificial Sequence: Synthetic oligonucleotide
  misc_feature 1..20: note = Target: FXN; (-) strand; PAM type: YTN; PAM sequence: TTC
  source 1..20: mol_type = other DNA
cagggggcctaaagtaagac

SEQ ID NO: 25014 - DNA, 20 bp, synthetic construct
  misc_feature 1..20: note = Description of Artificial Sequence: Synthetic oligonucleotide
  misc_feature 1..20: note = Target: FXN; (-) strand; PAM type: YTN; PAM sequence: TTT
  source 1..20: mol_type = other DNA
ccagggggcctaaagtaaga

SEQ ID NO: 25015 - DNA, 20 bp, synthetic construct
  misc_feature 1..20: note = Description of Artificial Sequence: Synthetic oligonucleotide
  misc_feature 1..20: note = Target: FXN; (-) strand; PAM type: YTN; PAM sequence: CTG
  source 1..20: mol_type = other DNA
aaagtttccagggggcctaa

SEQ ID NO: 25016 - DNA, 20 bp, synthetic construct
  misc_feature 1..20: note = Description of Artificial Sequence: Synthetic oligonucleotide
  misc_feature 1..20: note = Target: FXN; (-) strand; PAM type: YTN; PAM sequence: CTA
  source 1..20: mol_type = other DNA
tctgaaagtttccagggggc

SEQ ID NO: 25017 - DNA, 20 bp, synthetic construct
  misc_feature 1..20: note = Description of Artificial Sequence: Synthetic oligonucleotide
  misc_feature 1..20: note = Target: FXN; (-) strand; PAM type: YTN; PAM sequence: CTC
  source 1..20: mol_type = other DNA
cactatctgaaagtttccag

SEQ ID NO: 25018 - DNA, 20 bp, synthetic construct
  misc_feature 1..20: note = Description of Artificial Sequence: Synthetic oligonucleotide
  misc_feature 1..20: note = Target: FXN; (-) strand; PAM type: YTN; PAM sequence: TTA
  source 1..20: mol_type = other DNA
taagatatgtatcagacaac

SEQ ID NO: 25019 - DNA, 20 bp, synthetic construct
  misc_feature 1..20: note = Description of Artificial Sequence: Synthetic oligonucleotide
  misc_feature 1..20: note = Target: FXN; (-) strand; PAM type: YTN; PAM sequence: CTG
  source 1..20: mol_type = other DNA
taggttataagatatgtatc

SEQ ID NO: 25020 - DNA, 20 bp, synthetic construct
  misc_feature 1..20: note = Description of Artificial Sequence: Synthetic oligonucleotide
  misc_feature 1..20: note = Target: FXN; (-) strand; PAM type: YTN; PAM sequence: TTA
  source 1..20: mol_type = other DNA
atatctgtaggttataagat

SEQ ID NO: 25021 - DNA, 20 bp, synthetic construct
  misc_feature 1..20: note = Description of Artificial Sequence: Synthetic oligonucleotide
  misc_feature 1..20: note = Target: FXN; (-) strand; PAM type: YTN; PAM sequence: CTG
  source 1..20: mol_type = other DNA
tgaggatatattaatatctg

SEQ ID NO: 25022 - DNA, 20 bp, synthetic construct
  misc_feature 1..20: note = Description of Artificial Sequence: Synthetic oligonucleotide
  misc_feature 1..20: note = Target: FXN; (-) strand; PAM type: YTN; PAM sequence: TTG
  source 1..20: mol_type = other DNA
tgcccctgtgaggatatatt

SEQ ID NO: 25023 - DNA, 20 bp, synthetic construct
  misc_feature 1..20: note = Description of Artificial Sequence: Synthetic oligonucleotide
  misc_feature 1..20: note = Target: FXN; (-) strand; PAM type: YTN; PAM sequence: TTT
  source 1..20: mol_type = other DNA
gtgcccctgtgaggatatat

SEQ ID NO: 25024 - DNA, 20 bp, synthetic construct
  misc_feature 1..20: note = Description of Artificial Sequence: Synthetic oligonucleotide
  misc_feature 1..20: note = Target: FXN; (-) strand; PAM type: YTN; PAM sequence: TTT
  source 1..20: mol_type = other DNA
tgtgcccctgtgaggatata

SEQ ID NO: 25025 - DNA, 20 bp, synthetic construct
  misc_feature 1..20: note = Description of Artificial Sequence: Synthetic oligonucleotide
  misc_feature 1..20: note = Target: FXN; (-) strand; PAM type: YTN; PAM sequence: CTT
  source 1..20: mol_type = other DNA
ttgtgcccctgtgaggatat

SEQ ID NO: 25026 - DNA, 20 bp, synthetic construct
  misc_feature 1..20: note = Description of Artificial Sequence: Synthetic oligonucleotide
  misc_feature 1..20: note = Target: FXN; (-) strand; PAM type: YTN; PAM sequence: TTG
  source 1..20: mol_type = other DNA
taagagcttttgtgcccctg

SEQ ID NO: 25027 - DNA, 20 bp, synthetic construct
  misc_feature 1..20: note = Description of Artificial Sequence: Synthetic oligonucleotide
  misc_feature 1..20: note = Target: FXN; (-) strand; PAM type: YTN; PAM sequence: CTT
  source 1..20: mol_type = other DNA
gtaagagcttttgtgcccct

SEQ ID NO: 25028 - DNA, 20 bp, synthetic construct
  misc_feature 1..20: note = Description of Artificial Sequence: Synthetic oligonucleotide
  misc_feature 1..20: note = Target: FXN; (-) strand; PAM type: YTN; PAM sequence: TTA
  source 1..20: mol_type = other DNA
taataaacatccttgtaaga

SEQ ID NO: 25029 - DNA, 20 bp, synthetic construct
  misc_feature 1..20: note = Description of Artificial Sequence: Synthetic oligonucleotide
  misc_feature 1..20: note = Target: FXN; (-) strand; PAM type: YTN; PAM sequence: TTA
  source 1..20: mol_type = other DNA
ttataataaacatccttgta

SEQ ID NO: 25030 - DNA, 20 bp, synthetic construct
  misc_feature 1..20: note = Description of Artificial Sequence: Synthetic oligonucleotide
  misc_feature 1..20: note = Target: FXN; (-) strand; PAM type: YTN; PAM sequence: TTA
  source 1..20: mol_type = other DNA
taacaataaaaatattatta

SEQ ID NO: 25031 - DNA, 20 bp, synthetic construct
  misc_feature 1..20: note = Description of Artificial Sequence: Synthetic oligonucleotide
  misc_feature 1..20: note = Target: FXN; (-) strand; PAM type: YTN; PAM sequence: TTA
  source 1..20: mol_type = other DNA
tggcatgtaaattataacaa

SEQ ID NO: 25032 - DNA, 20 bp, synthetic construct
  misc_feature 1..20: note = Description of Artificial Sequence: Synthetic oligonucleotide
  misc_feature 1..20: note = Target: FXN; (-) strand; PAM type: YTN; PAM sequence: TTT
  source 1..20: mol_type = other DNA
atggcatgtaaattataaca

SEQ ID NO: 25033 - DNA, 20 bp, synthetic construct
  misc_feature 1..20: note = Description of Artificial Sequence: Synthetic oligonucleotide
  misc_feature 1..20: note = Target: FXN; (-) strand; PAM type: YTN; PAM sequence: TTT
  source 1..20: mol_type = other DNA
tatggcatgtaaattataac

SEQ ID NO: 25034 - DNA, 20 bp, synthetic construct
  misc_feature 1..20: note = Description of Artificial Sequence: Synthetic oligonucleotide
  misc_feature 1..20: note = Target: FXN; (-) strand; PAM type: YTN; PAM sequence: TTA
  source 1..20: mol_type = other DNA
gttttatggcatgtaaatta

SEQ ID NO: 25035 - DNA, 20 bp, synthetic construct
  misc_feature 1..20: note = Description of Artificial Sequence: Synthetic oligonucleotide
  misc_feature 1..20: note = Target: FXN; (-) strand; PAM type: YTN; PAM sequence: TTA
  source 1..20: mol_type = other DNA
aaatggttagttttatggca

SEQ ID NO: 25036 - DNA, 20 bp, synthetic construct
  misc_feature 1..20: note = Description of Artificial Sequence: Synthetic oligonucleotide
  misc_feature 1..20: note = Target: FXN; (-) strand; PAM type: YTN; PAM sequence: TTT
  source 1..20: mol_type = other DNA
aaaatggttagttttatggc

SEQ ID NO: 25037 - DNA, 20 bp, synthetic construct
  misc_feature 1..20: note = Description of Artificial Sequence: Synthetic oligonucleotide
  misc_feature 1..20: note = Target: FXN; (-) strand; PAM type: YTN; PAM sequence: TTT
  source 1..20: mol_type = other DNA
taaaatggttagttttatgg

SEQ ID NO: 25038 - DNA, 20 bp, synthetic construct
  misc_feature 1..20: note = Description of Artificial Sequence: Synthetic oligonucleotide
  misc_feature 1..20: note = Target: FXN; (-) strand; PAM type: YTN; PAM sequence: TTA
  source 1..20: mol_type = other DNA
tacattttaaaatggttagt

SEQ ID NO: 25039 - DNA, 20 bp, synthetic construct
  misc_feature 1..20: note = Description of Artificial Sequence: Synthetic oligonucleotide
  misc_feature 1..20: note = Target: FXN; (-) strand; PAM type: YTN; PAM sequence: TTG
  source 1..20: mol_type = other DNA
cattatacattttaaaatgg

SEQ ID NO: 25040 - DNA, 20 bp, synthetic construct
  misc_feature 1..20: note = Description of Artificial Sequence: Synthetic oligonucleotide
  misc_feature 1..20: note = Target: FXN; (-) strand; PAM type: YTN; PAM sequence: CTT
  source 1..20: mol_type = other DNA
gcattatacattttaaaatg

SEQ ID NO: 25041 - DNA, 20 bp, synthetic construct
  misc_feature 1..20: note = Description of Artificial Sequence: Synthetic oligonucleotide
  misc_feature 1..20: note = Target: FXN; (-) strand; PAM type: YTN; PAM sequence: CTA
  source 1..20: mol_type = other DNA
aaaacccttgcattatacat

SEQ ID NO: 25042 - DNA, 20 bp, synthetic construct
  misc_feature 1..20: note = Description of Artificial Sequence: Synthetic oligonucleotide
  misc_feature 1..20: note = Target: FXN; (-) strand; PAM type: YTN; PAM sequence: TTG
  source 1..20: mol_type = other DNA
tgaatatactaaaaaccctt

SEQ ID NO: 25043 - DNA, 20 bp, synthetic construct
  misc_feature 1..20: note = Description of Artificial Sequence: Synthetic oligonucleotide
  misc_feature 1..20: note = Target: FXN; (-) strand; PAM type: YTN; PAM sequence: CTT
  source 1..20: mol_type = other DNA
gtgaatatactaaaaaccct

SEQ ID NO: 25044 - DNA, 20 bp, synthetic construct
  misc_feature 1..20: note = Description of Artificial Sequence: Synthetic oligonucleotide
  misc_feature 1..20: note = Target: FXN; (-) strand; PAM type: YTN; PAM sequence: CTG
  source 1..20: mol_type = other DNA
cacaatcttgtgaatatact

SEQ ID NO: 25045 - DNA, 20 bp, synthetic construct
  misc_feature 1..20: note = Description of Artificial Sequence: Synthetic oligonucleotide
  misc_feature 1..20: note = Target: FXN; (-) strand; PAM type: YTN; PAM sequence: TTA
  source 1..20: mol_type = other DNA
gtagtgacagctgcacaatc

SEQ ID NO: 25046 - DNA, 20 bp, synthetic construct
  misc_feature 1..20: note = Description of Artificial Sequence: Synthetic oligonucleotide
  misc_feature 1..20: note = Target: FXN; (-) strand; PAM type: YTN; PAM sequence: CTG
  source 1..20: mol_type = other DNA
gaattagtagtgacagctgc

SEQ ID NO: 25047 - DNA, 20 bp, synthetic construct
  misc_feature 1..20: note = Description of Artificial Sequence: Synthetic oligonucleotide
  misc_feature 1..20: note = Target: FXN; (-) strand; PAM type: YTN; PAM sequence: TTC
  source 1..20: mol_type = other DNA
tggaattagtagtgacagct

SEQ ID NO: 25048 - DNA, 20 bp, synthetic construct
  misc_feature 1..20: note = Description of Artificial Sequence: Synthetic oligonucleotide
  misc_feature 1..20: note = Target: FXN; (-) strand; PAM type: YTN; PAM sequence: CTG
  source 1..20: mol_type = other DNA
gaataatgaaaatgttctgg

SEQ ID NO: 25049 - DNA, 20 bp, synthetic construct
  misc_feature 1..20: note = Description of Artificial Sequence: Synthetic oligonucleotide
  misc_feature 1..20: note = Target: FXN; (-) strand; PAM type: YTN; PAM sequence: TTC
  source 1..20: mol_type = other DNA
tggaataatgaaaatgttct

SEQ ID NO: 25050 - DNA, 20 bp, synthetic construct
  misc_feature 1..20: note = Description of Artificial Sequence: Synthetic oligonucleotide
  misc_feature 1..20: note = Target: FXN; (-) strand; PAM type: YTN; PAM sequence: CTT
  source 1..20: mol_type = other DNA
ctggaataatgaaaatgttc

SEQ ID NO: 25051 - DNA, 20 bp, synthetic construct
  misc_feature 1..20: note = Description of Artificial Sequence: Synthetic oligonucleotide
  misc_feature 1..20: note = Target: FXN; (-) strand; PAM type: YTN; PAM sequence: TTC
  source 1..20: mol_type = other DNA
cttctggaataatgaaaatg

SEQ ID NO: 25052 - DNA, 20 bp, synthetic construct
  misc_feature 1..20: note = Description of Artificial Sequence: Synthetic oligonucleotide
  misc_feature 1..20: note = Target: FXN; (-) strand; PAM type: YTN; PAM sequence: TTT
  source 1..20: mol_type = other DNA
ccttctggaataatgaaaat

SEQ ID NO: 25053 - DNA, 20 bp, synthetic construct
  misc_feature 1..20: note = Description of Artificial Sequence: Synthetic oligonucleotide
  misc_feature 1..20: note = Target: FXN; (-) strand; PAM type: YTN; PAM sequence: CTA
  source 1..20: mol_type = other DNA
atatgaatagggtttccttc

SEQ ID NO: 25054 - DNA, 20 bp, synthetic construct
  misc_feature 1..20: note = Description of Artificial Sequence: Synthetic oligonucleotide
  misc_feature 1..20: note = Target: FXN; (-) strand; PAM type: YTN; PAM sequence: TTG
  source 1..20: mol_type = other DNA
ctaatatgaatagggtttcc

SEQ ID NO: 25055 - DNA, 20 bp, synthetic construct
  misc_feature 1..20: note = Description of Artificial Sequence: Synthetic oligonucleotide
  misc_feature 1..20: note = Target: FXN; (-) strand; PAM type: YTN; PAM sequence: TTA
  source 1..20: mol_type = other DNA
gggaaaggcggaatggggga

SEQ ID NO: 25056 - DNA, 20 bp, synthetic construct
  misc_feature 1..20: note = Description of Artificial Sequence: Synthetic oligonucleotide
  misc_feature 1..20: note = Target: FXN; (-) strand; PAM type: YTN; PAM sequence: TTT
  source 1..20: mol_type = other DNA
agggaaaggcggaatggggg

SEQ ID NO: 25057 - DNA, 20 bp, synthetic construct
  misc_feature 1..20: note = Description of Artificial Sequence: Synthetic oligonucleotide
  misc_feature 1..20: note = Target: FXN; (-) strand; PAM type: YTN; PAM sequence: TTT
  source 1..20: mol_type = other DNA
tagggaaaggcggaatgggg

SEQ ID NO: 25058 - DNA, 20 bp, synthetic construct
  misc_feature 1..20: note = Description of Artificial Sequence: Synthetic oligonucleotide
  misc_feature 1..20: note = Target: FXN; (-) strand; PAM type: YTN; PAM sequence: CTG
  source 1..20: mol_type = other DNA
ggttttagggaaaggcggaa

SEQ ID NO: 25059 - DNA, 20 bp, synthetic construct
  misc_feature 1..20: note = Description of Artificial Sequence: Synthetic oligonucleotide
  misc_feature 1..20: note = Target: FXN; (-) strand; PAM type: YTN; PAM sequence: TTG
  source 1..20: mol_type = other DNA
ctgggttttagggaaaggcg

SEQ ID NO: 25060 - DNA, 20 bp, synthetic construct
  misc_feature 1..20: note = Description of Artificial Sequence: Synthetic oligonucleotide
  misc_feature 1..20: note = Target: FXN; (-) strand; PAM type: YTN; PAM sequence: TTA
  source 1..20: mol_type = other DNA
gtgattgctgggttttaggg

SEQ ID NO: 25061 - DNA, 20 bp, synthetic construct
  misc_feature 1..20: note = Description of Artificial Sequence: Synthetic oligonucleotide
  misc_feature 1..20: note = Target: FXN; (-) strand; PAM type: YTN; PAM sequence: TTA
  source 1..20: mol_type = other DNA
aatccacagagacagaaagt

SEQ ID NO: 25062 - DNA, 20 bp, synthetic construct
  misc_feature 1..20: note = Description of Artificial Sequence: Synthetic oligonucleotide
  misc_feature 1..20: note = Target: FXN; (-) strand; PAM type: YTN; PAM sequence: TTT
  source 1..20: mol_type = other DNA
aaatccacagagacagaaag

SEQ ID NO: 25063 - DNA, 20 bp, synthetic construct
  misc_feature 1..20: note = Description of Artificial Sequence: Synthetic oligonucleotide
  misc_feature 1..20: note = Target: FXN; (-) strand; PAM type: YTN; PAM sequence: CTT
  source 1..20: mol_type = other DNA
taaatccacagagacagaaa

SEQ ID NO: 25064 - DNA, 20 bp, synthetic construct
  misc_feature 1..20: note = Description of Artificial Sequence: Synthetic oligonucleotide
  misc_feature 1..20: note = Target: FXN; (-) strand; PAM type: YTN; PAM sequence: TTA
  source 1..20: mol_type = other DNA
ctttaaatccacagagacag

SEQ ID NO: 25065 - DNA, 20 bp, synthetic construct
  misc_feature 1..20: note = Description of Artificial Sequence: Synthetic oligonucleotide
  misc_feature 1..20: note = Target: FXN; (-) strand; PAM type: YTN; PAM sequence: TTA
  source 1..20: mol_type = other DNA
aaattactttaaatccacag

SEQ ID NO: 25066 - DNA, 20 bp, synthetic construct
  misc_feature 1..20: note = Description of Artificial Sequence: Synthetic oligonucleotide
  misc_feature 1..20: note = Target: FXN; (-) strand; PAM type: YTN; PAM sequence: TTT
  source 1..20: mol_type = other DNA
aaaattactttaaatccaca

SEQ ID NO: 25067 - DNA, 20 bp, synthetic construct
  misc_feature 1..20: note = Description of Artificial Sequence: Synthetic oligonucleotide
  misc_feature 1..20: note = Target: FXN; (-) strand; PAM type: YTN; PAM sequence: TTC
  source 1..20: mol_type = other DNA
aaatttaaaattactttaaa

SEQ ID NO: 25068 - DNA, 20 bp, synthetic construct
  misc_feature 1..20: note = Description of Artificial Sequence: Synthetic oligonucleotide
  misc_feature 1..20: note = Target: FXN; (-) strand; PAM type: YTN; PAM sequence: TTT
  source 1..20: mol_type = other DNA
caaatttaaaattactttaa

SEQ ID NO: 25069 - DNA, 20 bp, synthetic construct
  misc_feature 1..20: note = Description of Artificial Sequence: Synthetic oligonucleotide
  misc_feature 1..20: note = Target: FXN; (-) strand; PAM type: YTN; PAM sequence: TTT
  source 1..20: mol_type = other DNA
tcaaatttaaaattacttta

SEQ ID NO: 25070 - DNA, 20 bp, synthetic construct
  misc_feature 1..20: note = Description of Artificial Sequence: Synthetic oligonucleotide
  misc_feature 1..20: note = Target: FXN; (-) strand; PAM type: YTN; PAM sequence: TTT
  source 1..20: mol_type = other DNA
ttcaaatttaaaattacttt

SEQ ID NO: 25071 - DNA, 20 bp, synthetic construct
  misc_feature 1..20: note = Description of Artificial Sequence: Synthetic oligonucleotide
  misc_feature 1..20: note = Target: FXN; (-) strand; PAM type: YTN; PAM sequence: CTA
  source 1..20: mol_type = other DNA
tttttcaaatttaaaattac

SEQ ID NO: 25072 - DNA, 20 bp, synthetic construct
  misc_feature 1..20: note = Description of Artificial Sequence: Synthetic oligonucleotide
  misc_feature 1..20: note = Target: FXN; (-) strand; PAM type: YTN; PAM sequence: TTA
  source 1..20: mol_type = other DNA
tagatactatttttcaaatt

SEQ ID NO: 25073 - DNA, 20 bp, synthetic construct
  misc_feature 1..20: note = Description of Artificial Sequence: Synthetic oligonucleotide
  misc_feature 1..20: note = Target: FXN; (-) strand; PAM type: YTN; PAM sequence: CTT
  source 1..20: mol_type = other DNA
atagatactatttttcaaat

SEQ ID NO: 25074 - DNA, 20 bp, synthetic construct
  misc_feature 1..20: note = Description of Artificial Sequence: Synthetic oligonucleotide
  misc_feature 1..20: note = Target: FXN; (-) strand; PAM type: YTN; PAM sequence: TTC
  source 1..20: mol_type = other DNA
cttatagatactatttttca

SEQ ID NO: 25075 - DNA, 20 bp, synthetic construct
  misc_feature 1..20: note = Description of Artificial Sequence: Synthetic oligonucleotide
  misc_feature 1..20: note = Target: FXN; (-) strand; PAM type: YTN; PAM sequence: TTT
  source 1..20: mol_type = other DNA
ccttatagatactatttttc

SEQ ID NO: 25076 - DNA, 20 bp, synthetic construct
  misc_feature 1..20: note = Description of Artificial Sequence: Synthetic oligonucleotide
  misc_feature 1..20: note = Target: FXN; (-) strand; PAM type: YTN; PAM sequence: CTA
  source 1..20: mol_type = other DNA
gatacatttccttatagata

SEQ ID NO: 25077 - DNA, 20 bp, synthetic construct
  misc_feature 1..20: note = Description of Artificial Sequence: Synthetic oligonucleotide
  misc_feature 1..20: note = Target: FXN; (-) strand; PAM type: YTN; PAM sequence: TTG
  source 1..20: mol_type = other DNA
tgactagatacatttcctta

SEQ ID NO: 25078 - DNA, 20 bp, synthetic construct
  misc_feature 1..20: note = Description of Artificial Sequence: Synthetic oligonucleotide
  misc_feature 1..20: note = Target: FXN; (-) strand; PAM type: YTN; PAM sequence: CTT
  source 1..20: mol_type = other DNA
gtgactagatacatttcctt

SEQ ID NO: 25079 - DNA, 20 bp, synthetic construct
  misc_feature 1..20: note = Description of Artificial Sequence: Synthetic oligonucleotide
  misc_feature 1..20: note = Target: FXN; (-) strand; PAM type: YTN; PAM sequence: CTG
  source 1..20: mol_type = other DNA
tatgcttgtgactagataca

SEQ ID NO: 25080 - DNA, 20 bp, synthetic construct
  misc_feature 1..20: note = Description of Artificial Sequence: Synthetic oligonucleotide
  misc_feature 1..20: note = Target: FXN; (-) strand; PAM type: YTN; PAM sequence: TTC
  source 1..20: mol_type = other DNA
atcaagctgtatgcttgtga

SEQ ID NO: 25081 - DNA, 20 bp, synthetic construct
  misc_feature 1..20: note = Description of Artificial Sequence: Synthetic oligonucleotide
  misc_feature 1..20: note = Target: FXN; (-) strand; PAM type: YTN; PAM sequence: TTA
  source 1..20: mol_type = other DNA
caaattcatcaagctgtatg

SEQ ID NO: 25082 - DNA, 20 bp, synthetic construct
  misc_feature 1..20: note = Description of Artificial Sequence: Synthetic oligonucleotide
  misc_feature 1..20: note = Target: FXN; (-) strand; PAM type: YTN; PAM sequence: TTT
  source 1..20: mol_type = other DNA
acaaattcatcaagctgtat

SEQ ID NO: 25083 - DNA, 20 bp, synthetic construct
  misc_feature 1..20: note = Description of Artificial Sequence: Synthetic oligonucleotide
  misc_feature 1..20: note = Target: FXN; (-) strand; PAM type: YTN; PAM sequence: TTT
  source 1..20: mol_type = other DNA
tacaaattcatcaagctgta

SEQ ID NO: 25084 - DNA, 20 bp, synthetic construct
  misc_feature 1..20: note = Description of Artificial Sequence: Synthetic oligonucleotide
  misc_feature 1..20: note = Target: FXN; (-) strand; PAM type: YTN; PAM sequence: TTT
  source 1..20: mol_type = other DNA
ttacaaattcatcaagctgt

SEQ ID NO: 25085 - DNA, 20 bp, synthetic construct
  misc_feature 1..20: note = Description of Artificial Sequence: Synthetic oligonucleotide
  misc_feature 1..20: note = Target: FXN; (-) strand; PAM type: YTN; PAM sequence: TTC
  source 1..20: mol_type = other DNA
aatttttacaaattcatcaa

SEQ ID NO: 25086 - DNA, 20 bp, synthetic construct
  misc_feature 1..20: note = Description of Artificial Sequence: Synthetic oligonucleotide
  misc_feature 1..20: note = Target: FXN; (-) strand; PAM type: YTN; PAM sequence: CTG
  source 1..20: mol_type = other DNA
ttcaatttttacaaattcat

SEQ ID NO: 25087 - DNA, 20 bp, synthetic construct
  misc_feature 1..20: note = Description of Artificial Sequence: Synthetic oligonucleotide
  misc_feature 1..20: note = Target: FXN; (-) strand; PAM type: YTN; PAM sequence: TTC
  source 1..20: mol_type = other DNA
ataggactgttcaattttta

SEQ ID NO: 25088 - DNA, 20 bp, synthetic construct
  misc_feature 1..20: note = Description of Artificial Sequence: Synthetic oligonucleotide
  misc_feature 1..20: note = Target: FXN; (-) strand; PAM type: YTN; PAM sequence: TTA
  source 1..20: mol_type = other DNA
cagggtatgttcataggact

SEQ ID NO: 25089 - DNA, 20 bp, synthetic construct
  misc_feature 1..20: note = Description of Artificial Sequence: Synthetic oligonucleotide
  misc_feature 1..20: note = Target: FXN; (-) strand; PAM type: YTN; PAM sequence: CTT
  source 1..20: mol_type = other DNA
acagggtatgttcataggac

SEQ ID NO: 25090 - DNA, 20 bp, synthetic construct
  misc_feature 1..20: note = Description of Artificial Sequence: Synthetic oligonucleotide
  misc_feature 1..20: note = Target: FXN; (-) strand; PAM type: YTN; PAM sequence: TTG
  source 1..20: mol_type = other DNA
agcttacagggtatgttcat

SEQ ID NO: 25091 - DNA, 20 bp, synthetic construct
  misc_feature 1..20: note = Description of Artificial Sequence: Synthetic oligonucleotide
  misc_feature 1..20: note = Target: FXN; (-) strand; PAM type: YTN; PAM sequence: CTT
  source 1..20: mol_type = other DNA
gagcttacagggtatgttca

SEQ ID NO: 25092 - DNA, 20 bp, synthetic construct
  misc_feature 1..20: note = Description of Artificial Sequence: Synthetic oligonucleotide
  misc_feature 1..20: note = Target: FXN; (-) strand; PAM type: YTN; PAM sequence: CTA
  source 1..20: mol_type = other DNA
tgtcttgagcttacagggta

SEQ ID NO: 25093 - DNA, 20 bp, synthetic construct
  misc_feature 1..20: note = Description of Artificial Sequence: Synthetic oligonucleotide
  misc_feature 1..20: note = Target: FXN; (-) strand; PAM type: YTN; PAM sequence: TTC
  source 1..20: mol_type = other DNA
tatgtcttgagcttacaggg

SEQ ID NO: 25094 - DNA, 20 bp, synthetic construct
  misc_feature 1..20: note = Description of Artificial Sequence: Synthetic oligonucleotide
  misc_feature 1..20: note = Target: FXN; (-) strand; PAM type: YTN; PAM sequence: CTG
  source 1..20: mol_type = other DNA
gtaacattctatgtcttgag

SEQ ID NO: 25095 - DNA, 20 bp, synthetic construct
  misc_feature 1..20: note = Description of Artificial Sequence: Synthetic oligonucleotide
  misc_feature 1..20: note = Target: FXN; (-) strand; PAM type: YTN; PAM sequence: TTG
  source 1..20: mol_type = other DNA
caggggctggtaacattcta

SEQ ID NO: 25096 - DNA, 20 bp, synthetic construct
  misc_feature 1..20: note = Description of Artificial Sequence: Synthetic oligonucleotide
  misc_feature 1..20: note = Target: FXN; (-) strand; PAM type: YTN; PAM sequence: CTT
  source 1..20: mol_type = other DNA
gcaggggctggtaacattct

SEQ ID NO: 25097 - DNA, 20 bp, synthetic construct
  misc_feature 1..20: note = Description of Artificial Sequence: Synthetic oligonucleotide
  misc_feature 1..20: note = Target: FXN; (-) strand; PAM type: YTN; PAM sequence: TTG
  source 1..20: mol_type = other DNA
cttgcaggggctggtaacat

SEQ ID NO: 25098 - DNA, 20 bp, synthetic construct
  misc_feature 1..20: note = Description of Artificial Sequence: Synthetic oligonucleotide
  misc_feature 1..20: note = Target: FXN; (-) strand; PAM type: YTN; PAM sequence: CTT
  source 1..20: mol_type = other DNA
gcttgcaggggctggtaaca

SEQ ID NO: 25099 - DNA, 20 bp, synthetic construct
  misc_feature 1..20: note = Description of Artificial Sequence: Synthetic oligonucleotide
  misc_feature 1..20: note = Target: FXN; (-) strand; PAM type: YTN; PAM sequence: CTA
  source 1..20: mol_type = other DNA
gaagtgagcaggcagcttgc

SEQ ID NO: 25100 - DNA, 20 bp, synthetic construct
  misc_feature 1..20: note = Description of Artificial Sequence: Synthetic oligonucleotide
  misc_feature 1..20: note = Target: FXN; (-) strand; PAM type: YTN; PAM sequence: TTA
  source 1..20: mol_type = other DNA
atgactagaagtgagcaggc

SEQ ID NO: 25101 - DNA, 20 bp, synthetic construct
  misc_feature 1..20: note = Description of Artificial Sequence: Synthetic oligonucleotide
  misc_feature 1..20: note = Target: FXN; (-) strand; PAM type: YTN; PAM sequence: CTA
  source 1..20: mol_type = other DNA
gaaggaaaagagggaggggt

SEQ ID NO: 25102 - DNA, 20 bp, synthetic construct
  misc_feature 1..20: note = Description of Artificial Sequence: Synthetic oligonucleotide
  misc_feature 1..20: note = Target: FXN; (-) strand; PAM type: YTN; PAM sequence: TTA
  source 1..20: mol_type = other DNA
atgactagaaggaaaagagg

SEQ ID NO: 25103 - DNA, 20 bp, synthetic construct
  misc_feature 1..20: note = Description of Artificial Sequence: Synthetic oligonucleotide
  misc_feature 1..20: note = Target: FXN; (-) strand; PAM type: YTN; PAM sequence: CTG
  source 1..20: mol_type = other DNA
aagggttaatgactagaagg

SEQ ID NO: 25104 - DNA, 20 bp, synthetic construct
  misc_feature 1..20: note = Description of Artificial Sequence: Synthetic oligonucleotide
  misc_feature 1..20: note = Target: FXN; (-) strand; PAM type: YTN; PAM sequence: CTC
  source 1..20: mol_type = other DNA
tgaagggttaatgactagaa

SEQ ID NO: 25105 - DNA, 20 bp, synthetic construct
  misc_feature 1..20: note = Description of Artificial Sequence: Synthetic oligonucleotide
  misc_feature 1..20: note = Target: FXN; (-) strand; PAM type: YTN; PAM sequence: TTA
  source 1..20: mol_type = other DNA
ctctgaagggttaatgacta

SEQ ID NO: 25106 - DNA, 20 bp, synthetic construct
  misc_feature 1..20: note = Description of Artificial Sequence: Synthetic oligonucleotide
  misc_feature 1..20: note = Target: FXN; (-) strand; PAM type: YTN; PAM sequence: TTG
  source 1..20: mol_type = other DNA
gtaatcagaatagttactct

SEQ ID NO: 25107 - DNA, 20 bp, synthetic construct
  misc_feature 1..20: note = Description of Artificial Sequence: Synthetic oligonucleotide
  misc_feature 1..20: note = Target: FXN; (-) strand; PAM type: YTN; PAM sequence: CTA
  source 1..20: mol_type = other DNA
ttggtaatcagaatagttac

SEQ ID NO: 25108 - DNA, 20 bp, synthetic construct
  misc_feature 1..20: note = Description of Artificial Sequence: Synthetic oligonucleotide
  misc_feature 1..20: note = Target: FXN; (-) strand; PAM type: YTN; PAM sequence: CTA
  source 1..20: mol_type = other DNA
tgctattggtaatcagaata

SEQ ID NO: 25109 - DNA, 20 bp, synthetic construct
  misc_feature 1..20: note = Description of Artificial Sequence: Synthetic oligonucleotide
  misc_feature 1..20: note = Target: FXN; (-) strand; PAM type: YTN; PAM sequence: CTA
  source 1..20: mol_type = other DNA
atctatgctattggtaatca

SEQ ID NO: 25110 - DNA, 20 bp, synthetic construct
  misc_feature 1..20: note = Description of Artificial Sequence: Synthetic oligonucleotide
  misc_feature 1..20: note = Target: FXN; (-) strand; PAM type: YTN; PAM sequence: TTA
  source 1..20: mol_type = other DNA
tataaagtaaaacaacaggc

SEQ ID NO: 25111 - DNA, 20 bp, synthetic construct
  misc_feature 1..20: note = Description of Artificial Sequence: Synthetic oligonucleotide
  misc_feature 1..20: note = Target: FXN; (-) strand; PAM type: YTN; PAM sequence: TTT
  source 1..20: mol_type = other DNA
atataaagtaaaacaacagg

SEQ ID NO: 25112 - DNA, 20 bp, synthetic construct
  misc_feature 1..20: note = Description of Artificial Sequence: Synthetic oligonucleotide
  misc_feature 1..20: note = Target: FXN; (-) strand; PAM type: YTN; PAM sequence: TTA
  source 1..20: mol_type = other DNA
atgagacagtttatataaag

SEQ ID NO: 25113 - DNA, 20 bp, synthetic construct
  misc_feature 1..20: note = Description of Artificial Sequence: Synthetic oligonucleotide
  misc_feature 1..20: note = Target: FXN; (-) strand; PAM type: YTN; PAM sequence: CTT
  source 1..20: mol_type = other DNA
aatgagacagtttatataaa

SEQ ID NO: 25114 - DNA, 20 bp, synthetic construct
  misc_feature 1..20: note = Description of Artificial Sequence: Synthetic oligonucleotide
  misc_feature 1..20: note = Target: FXN; (-) strand; PAM type: YTN; PAM sequence: TTA
  source 1..20: mol_type = other DNA
tacttaatgagacagtttat

SEQ ID NO: 25115 - DNA, 20 bp, synthetic construct
  misc_feature 1..20: note = Description of Artificial Sequence: Synthetic oligonucleotide
  misc_feature 1..20: note = Target: FXN; (-) strand; PAM type: YTN; PAM sequence: TTT
  source 1..20: mol_type = other DNA
atacttaatgagacagttta

SEQ ID NO: 25116 - DNA, 20 bp, synthetic construct
  misc_feature 1..20: note = Description of Artificial Sequence: Synthetic oligonucleotide
  misc_feature 1..20: note = Target: FXN; (-) strand; PAM type: YTN; PAM sequence: TTG
  source 1..20: mol_type = other DNA
tgatagaaagaaatacacaa

SEQ ID NO: 25117 - DNA, 20 bp, synthetic construct
  misc_feature 1..20: note = Description of Artificial Sequence: Synthetic oligonucleotide
  misc_feature 1..20: note = Target: FXN; (-) strand; PAM type: YTN; PAM sequence: CTC
  source 1..20: mol_type = other DNA
acaaacatcattgtgataga

SEQ ID NO: 25118 - DNA, 20 bp, synthetic construct
  misc_feature 1..20: note = Description of Artificial Sequence: Synthetic oligonucleotide
  misc_feature 1..20: note = Target: FXN; (-) strand; PAM type: YTN; PAM sequence: CTA
  source 1..20: mol_type = other DNA
taggaacagcatggatgaat

SEQ ID NO: 25119 - DNA, 20 bp, synthetic construct
  misc_feature 1..20: note = Description of Artificial Sequence: Synthetic oligonucleotide
  misc_feature 1..20: note = Target: FXN; (-) strand; PAM type: YTN; PAM sequence: TTG
  source 1..20: mol_type = other DNA
tctataggaacagcatggat

SEQ ID NO: 25120 - DNA, 20 bp, synthetic construct
  misc_feature 1..20: note = Description of Artificial Sequence: Synthetic oligonucleotide
  misc_feature 1..20: note = Target: FXN; (-) strand; PAM type: YTN; PAM sequence: CTG
  source 1..20: mol_type = other DNA
caaaatagaattgtctatag

SEQ ID NO: 25121 - DNA, 20 bp, synthetic construct
  misc_feature 1..20: note = Description of Artificial Sequence: Synthetic oligonucleotide
  misc_feature 1..20: note = Target: FXN; (-) strand; PAM type: YTN; PAM sequence: CTA
  source 1..20: mol_type = other DNA
cgctgcaaaatagaattgtc

SEQ ID NO: 25122 - DNA, 20 bp, synthetic construct
  misc_feature 1..20: note = Description of Artificial Sequence: Synthetic oligonucleotide
  misc_feature 1..20: note = Target: FXN; (-) strand; PAM type: YTN; PAM sequence: TTG
  source 1..20: mol_type = other DNA
tggtatagtcatgcaatgga

SEQ ID NO: 25123 - DNA, 20 bp, synthetic construct
  misc_feature 1..20: note = Description of Artificial Sequence: Synthetic oligonucleotide
  misc_feature 1..20: note = Target: FXN; (-) strand; PAM type: YTN; PAM sequence: TTG
  source 1..20: mol_type = other DNA
taatatcacagataaattgt

SEQ ID NO: 25124 - DNA, 20 bp, synthetic construct
  misc_feature 1..20: note = Description of Artificial Sequence: Synthetic oligonucleotide
  misc_feature 1..20: note = Target: FXN; (-) strand; PAM type: YTN; PAM sequence: TTT
  source 1..20: mol_type = other DNA
gtaatatcacagataaattg

SEQ ID NO: 25125 - DNA, 20 bp, synthetic construct
  misc_feature 1..20: note = Description of Artificial Sequence: Synthetic oligonucleotide
  misc_feature 1..20: note = Target: FXN; (-) strand; PAM type: YTN; PAM sequence: CTT
  source 1..20: mol_type = other DNA
tgtaatatcacagataaatt

SEQ ID NO: 25126 - DNA, 20 bp, synthetic construct
  misc_feature 1..20: note = Description of Artificial Sequence: Synthetic oligonucleotide
  misc_feature 1..20: note = Target: FXN; (-) strand; PAM type: YTN; PAM sequence: TTC
  source 1..20: mol_type = other DNA
ctttgtaatatcacagataa

SEQ ID NO: 25127 - DNA, 20 bp, synthetic construct
  misc_feature 1..20: note = Description of Artificial Sequence: Synthetic oligonucleotide
  misc_feature 1..20: note = Target: FXN; (-) strand; PAM type: YTN; PAM sequence: CTG
  source 1..20: mol_type = other DNA
cccaagtattcctttgtaat

SEQ ID NO: 25128 - DNA, 20 bp, synthetic construct
  misc_feature 1..20: note = Description of Artificial Sequence: Synthetic oligonucleotide
  misc_feature 1..20: note = Target: FXN; (-) strand; PAM type: YTN; PAM sequence: CTG
  source 1..20: mol_type = other DNA
gaaactgcccaagtattcct

SEQ ID NO: 25129 - DNA, 20 bp, synthetic construct
  misc_feature 1..20: note = Description of Artificial Sequence: Synthetic oligonucleotide
  misc_feature 1..20: note = Target: FXN; (-) strand; PAM type: YTN; PAM sequence: CTA
  source 1..20: mol_type = other DNA
tagccccaaactggaaactg

SEQ ID NO: 25130 - DNA, 20 bp, synthetic construct
  misc_feature 1..20: note = Description of Artificial Sequence: Synthetic oligonucleotide
  misc_feature 1..20: note = Target: FXN; (-) strand; PAM type: YTN; PAM sequence: CTA
  source 1..20: mol_type = other DNA
tcctatagccccaaactgga

SEQ ID NO: 25131 - DNA, 20 bp, synthetic construct
  misc_feature 1..20: note = Description of Artificial Sequence: Synthetic oligonucleotide
  misc_feature 1..20: note = Target: FXN; (-) strand; PAM type: YTN; PAM sequence: TTG
  source 1..20: mol_type = other DNA
tatcacaactatcctatagc

SEQ ID NO: 25132 - DNA, 20 bp, synthetic construct
  misc_feature 1..20: note = Description of Artificial Sequence: Synthetic oligonucleotide
  misc_feature 1..20: note = Target: FXN; (-) strand; PAM type: YTN; PAM sequence: TTT
  source 1..20: mol_type = other DNA
gtatcacaactatcctatag

SEQ ID NO: 25133 - DNA, 20 bp, synthetic construct
  misc_feature 1..20: note = Description of Artificial Sequence: Synthetic oligonucleotide
  misc_feature 1..20: note = Target: FXN; (-) strand; PAM type: YTN; PAM sequence: CTA
  source 1..20: mol_type = other DNA
aaatatttgtatcacaacta

SEQ ID NO: 25134 - DNA, 20 bp, synthetic construct
  misc_feature 1..20: note = Description of Artificial Sequence: Synthetic oligonucleotide
  misc_feature 1..20: note = Target: FXN; (-) strand; PAM type: YTN; PAM sequence: CTA
  source 1..20: mol_type = other DNA
tactaaaatatttgtatcac

SEQ ID NO: 25135 - DNA, 20 bp, synthetic construct
  misc_feature 1..20: note = Description of Artificial Sequence: Synthetic oligonucleotide
  misc_feature 1..20: note = Target: FXN; (-) strand; PAM type: YTN; PAM sequence: TTC
  source 1..20: mol_type = other DNA
accaaaagacatgtactata

SEQ ID NO: 25136 - DNA, 20 bp, synthetic construct
  misc_feature 1..20: note = Description of Artificial Sequence: Synthetic oligonucleotide
  misc_feature 1..20: note = Target: FXN; (-) strand; PAM type: YTN; PAM sequence: TTA
  source 1..20: mol_type = other DNA
aggggtatacacaacagaaa

SEQ ID NO: 25137 - DNA, 20 bp, synthetic construct
  misc_feature 1..20: note = Description of Artificial Sequence: Synthetic oligonucleotide
  misc_feature 1..20: note = Target: FXN; (-) strand; PAM type: YTN; PAM sequence: CTT
  source 1..20: mol_type = other DNA
aaggggtatacacaacagaa

SEQ ID NO: 25138 - DNA, 20 bp, synthetic construct
  misc_feature 1..20: note = Description of Artificial Sequence: Synthetic oligonucleotide
  misc_feature 1..20: note = Target: FXN; (-) strand; PAM type: YTN; PAM sequence: CTC
  source 1..20: mol_type = other DNA
ttaaggggtatacacaacag

SEQ ID NO: 25139 - DNA, 20 bp, synthetic construct
  misc_feature 1..20: note = Description of Artificial Sequence: Synthetic oligonucleotide
  misc_feature 1..20: note = Target: FXN; (-) strand; PAM type: YTN; PAM sequence: CTC
  source 1..20: mol_type = other DNA
cactcttaaggggtatacac

SEQ ID NO: 25140 - DNA, 20 bp, synthetic construct
  misc_feature 1..20: note = Description of Artificial Sequence: Synthetic oligonucleotide
  misc_feature 1..20: note = Target: FXN; (-) strand; PAM type: YTN; PAM sequence: TTA
  source 1..20: mol_type = other DNA
gccaggatcatcagctccac

SEQ ID NO: 25141 - DNA, 20 bp, synthetic construct
  misc_feature 1..20: note = Description of Artificial Sequence: Synthetic oligonucleotide
  misc_feature 1..20: note = Target: FXN; (-) strand; PAM type: YTN; PAM sequence: TTG
  source 1..20: mol_type = other DNA
ttagccaggatcatcagctc

SEQ ID NO: 25142 - DNA, 20 bp, synthetic construct
  misc_feature 1..20: note = Description of Artificial Sequence: Synthetic oligonucleotide
  misc_feature 1..20: note = Target: FXN; (-) strand; PAM type: YTN; PAM sequence: CTT
  source 1..20: mol_type = other DNA
gttagccaggatcatcagct

SEQ ID NO: 25143 - DNA, 20 bp, synthetic construct
  misc_feature 1..20: note = Description of Artificial Sequence: Synthetic oligonucleotide
  misc_feature 1..20: note = Target: FXN; (-) strand; PAM type: YTN; PAM sequence: TTC
  source 1..20: mol_type = other DNA
accttgttagccaggatcat

SEQ ID NO: 25144 - DNA, 20 bp, synthetic construct
  misc_feature 1..20: note = Description of Artificial Sequence: Synthetic oligonucleotide
  misc_feature 1..20: note = Target: FXN; (-) strand; PAM type: YTN; PAM sequence: TTT
  source 1..20: mol_type = other DNA
caccttgttagccaggatca

SEQ ID NO: 25145 - DNA, 20 bp, synthetic construct
  misc_feature 1..20: note = Description of Artificial Sequence: Synthetic oligonucleotide
  misc_feature 1..20: note = Target: FXN; (-) strand; PAM type: YTN; PAM sequence: TTA
  source 1..20: mol_type = other DNA
gtagagacggggtttcacct

SEQ ID NO: 25146 - DNA, 20 bp, synthetic construct
  misc_feature 1..20: note = Description of Artificial Sequence: Synthetic oligonucleotide
  misc_feature 1..20: note = Target: FXN; (-) strand; PAM type: YTN; PAM sequence: TTT
  source 1..20: mol_type = other DNA
agtagagacggggtttcacc

SEQ ID NO: 25147 - DNA, 20 bp, synthetic construct
  misc_feature 1..20: note = Description of Artificial Sequence: Synthetic oligonucleotide
  misc_feature 1..20: note = Target: FXN; (-) strand; PAM type: YTN; PAM sequence: TTT
  source 1..20: mol_type = other DNA
tagtagagacggggtttcac

SEQ ID NO: 25148 - DNA, 20 bp, synthetic construct
  misc_feature 1..20: note = Description of Artificial Sequence: Synthetic oligonucleotide
  misc_feature 1..20: note = Target: FXN; (-) strand; PAM type: YTN; PAM sequence: TTT
  source 1..20: mol_type = other DNA
ttagtagagacggggtttca

SEQ ID NO: 25149 - DNA, 20 bp, synthetic construct
  misc_feature 1..20: note = Description of Artificial Sequence: Synthetic oligonucleotide
  misc_feature 1..20: note = Target: FXN; (-) strand; PAM type: YTN; PAM sequence: TTG
  source 1..20: mol_type = other DNA
tatttttagtagagacgggg

SEQ ID NO: 25150 - DNA, 20 bp, synthetic construct
  misc_feature 1..20: note = Description of Artificial Sequence: Synthetic oligonucleotide
  misc_feature 1..20: note = Target: FXN; (-) strand; PAM type: YTN; PAM sequence: TTT
  source 1..20: mol_type = other DNA
gtatttttagtagagacggg

SEQ ID NO: 25151 - DNA, 20 bp, synthetic construct
  misc_feature 1..20: note = Description of Artificial Sequence: Synthetic oligonucleotide
  misc_feature 1..20: note = Target: FXN; (-) strand; PAM type: YTN; PAM sequence: TTT
  source 1..20: mol_type = other DNA
tgtatttttagtagagacgg

SEQ ID NO: 25152 - DNA, 20 bp, synthetic construct
  misc_feature 1..20: note = Description of Artificial Sequence: Synthetic oligonucleotide
  misc_feature 1..20: note = Target: FXN; (-) strand; PAM type: YTN; PAM sequence: TTT
  source 1..20: mol_type = other DNA
ttgtatttttagtagagacg

SEQ ID NO: 25153 - DNA, 20 bp, synthetic construct
  misc_feature 1..20: note = Description of Artificial Sequence: Synthetic oligonucleotide
  misc_feature 1..20: note = Target: FXN; (-) strand; PAM type: YTN; PAM sequence: TTT
  source 1..20: mol_type = other DNA
tttgtatttttagtagagac

SEQ ID NO: 25154 - DNA, 20 bp, synthetic construct
  misc_feature 1..20: note = Description of Artificial Sequence: Synthetic oligonucleotide
  misc_feature 1..20: note = Target: FXN; (-) strand; PAM type: YTN; PAM sequence: CTA
  source 1..20: mol_type = other DNA
attttttgtatttttagtag

SEQ ID NO: 25155 - DNA, 20 bp, synthetic construct
  misc_feature 1..20: note = Description of Artificial Sequence: Synthetic oligonucleotide
  misc_feature 1..20: note = Target: FXN; (-) strand; PAM type: YTN; PAM sequence: CTA
  source 1..20: mol_type = other DNA
ccacgcccggctaatttttt

SEQ ID NO: 25156 - DNA, 20 bp, synthetic construct
  misc_feature 1..20: note = Description of Artificial Sequence: Synthetic oligonucleotide
  misc_feature 1..20: note = Target: FXN; (-) strand; PAM type: YTN; PAM sequence: CTA
  source 1..20: mol_type = other DNA
caggcgcccgctaccacgcc

SEQ ID NO: 25157 - DNA, 20 bp, synthetic construct
  misc_feature 1..20: note = Description of Artificial Sequence: Synthetic oligonucleotide
  misc_feature 1..20: note = Target: FXN; (-) strand; PAM type: YTN; PAM sequence: CTG
  source 1..20: mol_type = other DNA
ggactacaggcgcccgctac

SEQ ID NO: 25158 - DNA, 20 bp, synthetic construct
  misc_feature 1..20: note = Description of Artificial Sequence: Synthetic oligonucleotide
  misc_feature 1..20: note = Target: FXN; (-) strand; PAM type: YTN; PAM sequence: CTC
  source 1..20: mol_type = other DNA
ccgagtagctgggactacag

SEQ ID NO: 25159 - DNA, 20 bp, synthetic construct
  misc_feature 1..20: note = Description of Artificial Sequence: Synthetic oligonucleotide
  misc_feature 1..20: note = Target: FXN; (-) strand; PAM type: YTN; PAM sequence: CTC
  source 1..20: mol_type = other DNA
agcctcccgagtagctggga

SEQ ID NO: 25160 - DNA, 20 bp, synthetic construct
  misc_feature 1..20: note = Description of Artificial Sequence: Synthetic oligonucleotide
  misc_feature 1..20: note = Target: FXN; (-) strand; PAM type: YTN; PAM sequence: CTG
  source 1..20: mol_type = other DNA
cctcagcctcccgagtagct

SEQ ID NO: 25161 - DNA, 20 bp, synthetic construct
  misc_feature 1..20: note = Description of Artificial Sequence: Synthetic oligonucleotide
  misc_feature 1..20: note = Target: FXN; (-) strand; PAM type: YTN; PAM sequence: CTC
  source 1..20: mol_type = other DNA
ctgcctcagcctcccgagta

SEQ ID NO: 25162 - DNA, 20 bp, synthetic construct
  misc_feature 1..20: note = Description of Artificial Sequence: Synthetic oligonucleotide
  misc_feature 1..20: note = Target: FXN; (-) strand; PAM type: YTN; PAM sequence: TTC
  source 1..20: mol_type = other DNA
tcctgcctcagcctcccgag

SEQ ID NO: 25163 - DNA, 20 bp, synthetic construct
  misc_feature 1..20: note = Description of Artificial Sequence: Synthetic oligonucleotide
  misc_feature 1..20: note = Target: FXN; (-) strand; PAM type: YTN; PAM sequence: TTC
  source 1..20: mol_type = other DNA
acgccattctcctgcctcag

SEQ ID NO: 25164 - DNA, 20 bp, synthetic construct
  misc_feature 1..20: note = Description of Artificial Sequence: Synthetic oligonucleotide
  misc_feature 1..20: note = Target: FXN; (-) strand; PAM type: YTN; PAM sequence: CTC
  source 1..20: mol_type = other DNA
ccgggttcacgccattctcc

SEQ ID NO: 25165 - DNA, 20 bp, synthetic construct
  misc_feature 1..20: note = Description of Artificial Sequence: Synthetic oligonucleotide
  misc_feature 1..20: note = Target: FXN; (-) strand; PAM type: YTN; PAM sequence: CTC
  source 1..20: mol_type = other DNA
cgcctcccgggttcacgcca

SEQ ID NO: 25166 - DNA, 20 bp, synthetic construct
  misc_feature 1..20: note = Description of Artificial Sequence: Synthetic oligonucleotide
  misc_feature 1..20: note = Target: FXN; (-) strand; PAM type: YTN; PAM sequence: CTG
  source 1..20: mol_type = other DNA
caagcaagctccgcctcccg

SEQ ID NO: 25167 - DNA, 20 bp, synthetic construct
  misc_feature 1..20: note = Description of Artificial Sequence: Synthetic oligonucleotide
  misc_feature 1..20: note = Target: FXN; (-) strand; PAM type: YTN; PAM sequence: CTC
  source 1..20: mol_type = other DNA
actgcaagcaagctccgcct

SEQ ID NO: 25168 - DNA, 20 bp, synthetic construct
  misc_feature 1..20: note = Description of Artificial Sequence: Synthetic oligonucleotide
  misc_feature 1..20: note = Target: FXN; (-) strand; PAM type: YTN; PAM sequence: CTC
  source 1..20: mol_type = other DNA
ggctcactgcaagcaagctc

SEQ ID NO: 25169 - DNA, 20 bp, synthetic construct
  misc_feature 1..20: note = Description of Artificial Sequence: Synthetic oligonucleotide
  misc_feature 1..20: note = Target: FXN; (-) strand; PAM type: YTN; PAM sequence: CTG
  source 1..20: mol_type = other DNA
gagtgcagtggcgcgatctc

SEQ ID NO: 25170 - DNA, 20 bp, synthetic construct
  misc_feature 1..20: note = Description of Artificial Sequence: Synthetic oligonucleotide
  misc_feature 1..20: note = Target: FXN; (-) strand; PAM type: YTN; PAM sequence: CTG
  source 1..20: mol_type = other DNA
tcgcccaggctggagtgcag

SEQ ID NO: 25171 - DNA, 20 bp, synthetic construct
  misc_feature 1..20: note = Description of Artificial Sequence: Synthetic oligonucleotide
  misc_feature 1..20: note = Target: FXN; (-) strand; PAM type: YTN; PAM sequence: CTC
  source 1..20: mol_type = other DNA
tgtcgcccaggctggagtgc

SEQ ID NO: 25172 - DNA, 20 bp, synthetic construct
  misc_feature 1..20: note = Description of Artificial Sequence: Synthetic oligonucleotide
  misc_feature 1..20: note = Target: FXN; (-) strand; PAM type: YTN; PAM sequence: CTC
  source 1..20: mol_type = other DNA
gctctgtcgcccaggctgga

SEQ ID NO: 25173 - DNA, 20 bp, synthetic construct
  misc_feature 1..20: note = Description of Artificial Sequence: Synthetic oligonucleotide
  misc_feature 1..20: note = Target: FXN; (-) strand; PAM type: YTN; PAM sequence: TTG
  source 1..20: mol_type = other DNA
agacggagtctcgctctgtc

SEQ ID NO: 25174 - DNA, 20 bp, synthetic construct
  misc_feature 1..20: note = Description of Artificial Sequence: Synthetic oligonucleotide
  misc_feature 1..20: note = Target: FXN; (-) strand; PAM type: YTN; PAM sequence: TTT
  source 1..20: mol_type = other DNA
gagacggagtctcgctctgt

SEQ ID NO: 25175 - DNA, 20 bp, synthetic construct
  misc_feature 1..20: note = Description of Artificial Sequence: Synthetic oligonucleotide
  misc_feature 1..20: note = Target: FXN; (-) strand; PAM type: YTN; PAM sequence: TTT
  source 1..20: mol_type = other DNA
tgagacggagtctcgctctg

SEQ ID NO: 25176 - DNA, 20 bp, synthetic construct
  misc_feature 1..20: note = Description of Artificial Sequence: Synthetic oligonucleotide
  misc_feature 1..20: note = Target: FXN; (-) strand; PAM type: YTN; PAM sequence: TTT
  source 1..20: mol_type = other DNA
ttgagacggagtctcgctct

SEQ ID NO: 25177 - DNA, 20 bp, synthetic construct
  misc_feature 1..20: note = Description of Artificial Sequence: Synthetic oligonucleotide
  misc_feature 1..20: note = Target: FXN; (-) strand; PAM type: YTN; PAM sequence: TTT
  source 1..20: mol_type = other DNA
tttgagacggagtctcgctc

SEQ ID NO: 25178 - DNA, 20 bp, synthetic construct
  misc_feature 1..20: note = Description of Artificial Sequence: Synthetic oligonucleotide
  misc_feature 1..20: note = Target: FXN; (-) strand; PAM type: YTN; PAM sequence: TTT
  source 1..20: mol_type = other DNA
ttttgagacggagtctcgct

SEQ ID NO: 25179 - DNA, 20 bp, synthetic construct
  misc_feature 1..20: note = Description of Artificial Sequence: Synthetic oligonucleotide
  misc_feature 1..20: note = Target: FXN; (-) strand; PAM type: YTN; PAM sequence: TTT
  source 1..20: mol_type = other DNA
tttttgagacggagtctcgc

SEQ ID NO: 25180 - DNA, 20 bp, synthetic construct
  misc_feature 1..20: note = Description of Artificial Sequence: Synthetic oligonucleotide
  misc_feature 1..20: note = Target: FXN; (-) strand; PAM type: YTN; PAM sequence: TTT
  source 1..20: mol_type = other DNA
ttttttgagacggagtctcg

SEQ ID NO: 25181 - DNA, 20 bp, synthetic construct
  misc_feature 1..20: note = Description of Artificial Sequence: Synthetic oligonucleotide
  misc_feature 1..20: note = Target: FXN; (-) strand; PAM type: YTN; PAM sequence: TTT
  source 1..20: mol_type = other DNA
tttttttgagacggagtctc

SEQ ID NO: 25182 - DNA, 20 bp, synthetic construct
  misc_feature 1..20: note = Description of Artificial Sequence: Synthetic oligonucleotide
  misc_feature 1..20: note = Target: FXN; (-) strand; PAM type: YTN; PAM sequence: TTT
  source 1..20: mol_type = other DNA
ttttttttgagacggagtct

SEQ ID NO: 25183 - DNA, 20 bp, synthetic construct
  misc_feature 1..20: note = Description of Artificial Sequence: Synthetic oligonucleotide
  misc_feature 1..20: note = Target: FXN; (-) strand; PAM type: YTN; PAM sequence: TTT
  source 1..20: mol_type = other DNA
tttttttttgagacggagtc

SEQ ID NO: 25184 - DNA, 20 bp, synthetic construct
  misc_feature 1..20: note = Description of Artificial Sequence: Synthetic oligonucleotide
  misc_feature 1..20: note = Target: FXN; (-) strand; PAM type: YTN; PAM sequence: TTT
  source 1..20: mol_type = other DNA
ttttttttttgagacggagt

SEQ ID NO: 25185 - DNA, 20 bp, synthetic construct
  misc_feature 1..20: note = Description of Artificial Sequence: Synthetic oligonucleotide
  misc_feature 1..20: note = Target: FXN; (-) strand; PAM type: YTN; PAM sequence: TTT
  source 1..20: mol_type = other DNA
tttttttttttgagacggag

SEQ ID NO: 25186 - DNA, 20 bp, synthetic construct
  misc_feature 1..20: note = Description of Artificial Sequence: Synthetic oligonucleotide
  misc_feature 1..20: note = Target: FXN; (-) strand; PAM type: YTN; PAM sequence: TTT
  source 1..20: mol_type = other DNA
ttttttttttttgagacgga

SEQ ID NO: 25187 - DNA, 20 bp, synthetic construct
  misc_feature 1..20: note = Description of Artificial Sequence: Synthetic oligonucleotide
  misc_feature 1..20: note = Target: FXN; (-) strand; PAM type: YTN; PAM sequence: TTT
  source 1..20: mol_type = other DNA
tttttttttttttgagacgg

SEQ ID NO: 25188 - DNA, 20 bp, synthetic construct
  misc_feature 1..20: note = Description of Artificial Sequence: Synthetic oligonucleotide
  misc_feature 1..20: note = Target: FXN; (-) strand; PAM type: YTN; PAM sequence: TTT
  source 1..20: mol_type = other DNA
ttttttttttttttgagacg

SEQ ID NO: 25189 - DNA, 20 bp, synthetic construct
  misc_feature 1..20: note = Description of Artificial Sequence: Synthetic oligonucleotide
  misc_feature 1..20: note = Target: FXN; (-) strand; PAM type: YTN; PAM sequence: TTT
  source 1..20: mol_type = other DNA
tttttttttttttttgagac

SEQ ID NO: 25190 - DNA, 20 bp, synthetic construct
  misc_feature 1..20: note = Description of Artificial Sequence: Synthetic oligonucleotide
  misc_feature 1..20: note = Target: FXN; (-) strand; PAM type: YTN; PAM sequence: TTT
  source 1..20: mol_type = other DNA
ttttttttttttttttgaga

SEQ ID NO: 25191 - DNA, 20 bp, synthetic construct
  misc_feature 1..20: note = Description of Artificial Sequence: Synthetic oligonucleotide
  misc_feature 1..20: note = Target: FXN; (-) strand; PAM type: YTN; PAM sequence: CTT
  source 1..20: mol_type = other DNA
tttttttttttttttttgag

SEQ ID NO: 25192 - DNA, 20 bp, synthetic construct
  misc_feature 1..20: note = Description of Artificial Sequence: Synthetic oligonucleotide
  misc_feature 1..20: note = Target: FXN; (-) strand; PAM type: YTN; PAM sequence: CTC
  source 1..20: mol_type = other DNA
tttttttttttttttttttg

SEQ ID NO: 25193 - DNA, 20 bp, synthetic construct
  misc_feature 1..20: note = Description of Artificial Sequence: Synthetic oligonucleotide
  misc_feature 1..20: note = Target: FXN; (-) strand; PAM type: YTN; PAM sequence: CTC
  source 1..20: mol_type = other DNA
cactcttttttttttttttt

SEQ ID NO: 25194 - DNA, 20 bp, synthetic construct
  misc_feature 1..20: note = Description of Artificial Sequence: Synthetic oligonucleotide
  misc_feature 1..20: note = Target: FXN; (-) strand; PAM type: YTN; PAM sequence: CTA
  source 1..20: mol_type = other DNA
tgacccatcagctccactct

SEQ ID NO: 25195 - DNA, 20 bp, synthetic construct
  misc_feature 1..20: note = Description of Artificial Sequence: Synthetic oligonucleotide
  misc_feature 1..20: note = Target: FXN; (-) strand; PAM type: YTN; PAM sequence: TTA
  source 1..20: mol_type = other DNA
catgctatgacccatcagct

SEQ ID NO: 25196 - DNA, 20 bp, synthetic construct
  misc_feature 1..20: note = Description of Artificial Sequence: Synthetic oligonucleotide
  misc_feature 1..20: note = Target: FXN; (-) strand; PAM type: YTN; PAM sequence: TTT
  source 1..20: mol_type = other DNA
acatgctatgacccatcagc

SEQ ID NO: 25197 - DNA, 20 bp, synthetic construct
  misc_feature 1..20: note = Description of Artificial Sequence: Synthetic oligonucleotide
  misc_feature 1..20: note = Target: FXN; (-) strand; PAM type: YTN; PAM sequence: TTG
  source 1..20: mol_type = other DNA
aatgcatttacatgctatga

SEQ ID NO: 25198 - DNA, 20 bp, synthetic construct
  misc_feature 1..20: note = Description of Artificial Sequence: Synthetic oligonucleotide
  misc_feature 1..20: note = Target: FXN; (-) strand; PAM type: YTN; PAM sequence: CTA
  source 1..20: mol_type = other DNA
aagttgaatgcatttacatg

SEQ ID NO: 25199 - DNA, 20 bp, synthetic construct
  misc_feature 1..20: note = Description of Artificial Sequence: Synthetic oligonucleotide
  misc_feature 1..20: note = Target: FXN; (-) strand; PAM type: YTN; PAM sequence: CTA
  source 1..20: mol_type = other DNA
ctaaagttgaatgcatttac

SEQ ID NO: 25200 - DNA, 20 bp, synthetic construct
  misc_feature 1..20: note = Description of Artificial Sequence: Synthetic oligonucleotide
  misc_feature 1..20: note = Target: FXN; (-) strand; PAM type: YTN; PAM sequence: TTG
  source 1..20: mol_type = other DNA
gacagtatctactaaagttg

SEQ ID NO: 25201 - DNA, 20 bp, synthetic construct
  misc_feature 1..20: note = Description of Artificial Sequence: Synthetic oligonucleotide
  misc_feature 1..20: note = Target: FXN; (-) strand; PAM type: YTN; PAM sequence: CTG
  source 1..20: mol_type = other DNA
ttggacagtatctactaaag

SEQ ID NO: 25202 - DNA, 20 bp, synthetic construct
  misc_feature 1..20: note = Description of Artificial Sequence: Synthetic oligonucleotide
  misc_feature 1..20: note = Target: FXN; (-) strand; PAM type: YTN; PAM sequence: TTG
  source 1..20: mol_type = other DNA
gaaaactgttggacagtatc

SEQ ID NO: 25203 - DNA, 20 bp, synthetic construct
  misc_feature 1..20: note = Description of Artificial Sequence: Synthetic oligonucleotide
  misc_feature 1..20: note = Target: FXN; (-) strand; PAM type: YTN; PAM sequence: TTT
  source 1..20: mol_type = other DNA
ggaaaactgttggacagtat

SEQ ID NO: 25204 - DNA, 20 bp, synthetic construct
  misc_feature 1..20: note = Description of Artificial Sequence: Synthetic oligonucleotide
  misc_feature 1..20: note = Target: FXN; (-) strand; PAM type: YTN; PAM sequence: CTT
  source 1..20: mol_type = other DNA
tggaaaactgttggacagta

SEQ ID NO: 25205 - DNA, 20 bp, synthetic construct
  misc_feature 1..20: note = Description of Artificial Sequence: Synthetic oligonucleotide
  misc_feature 1..20: note = Target: FXN; (-) strand; PAM type: YTN; PAM sequence: TTG
  source 1..20: mol_type = other DNA
gacaatcactttggaaaact

SEQ ID NO: 25206 - DNA, 20 bp, synthetic construct
  misc_feature 1..20: note = Description of Artificial Sequence: Synthetic oligonucleotide
  misc_feature 1..20: note = Target: FXN; (-) strand; PAM type: YTN; PAM sequence: CTG
  source 1..20: mol_type = other DNA
ataggcaagtaagttggaca

SEQ ID NO: 25207 - DNA, 20 bp, synthetic construct
  misc_feature 1..20: note = Description of Artificial Sequence: Synthetic oligonucleotide
  misc_feature 1..20: note = Target: FXN; (-) strand; PAM type: YTN; PAM sequence: CTG
  source 1..20: mol_type = other DNA
ctgataggcaagtaagttgg

SEQ ID NO: 25208 - DNA, 20 bp, synthetic construct
  misc_feature 1..20: note = Description of Artificial Sequence: Synthetic oligonucleotide
  misc_feature 1..20: note = Target: FXN; (-) strand; PAM type: YTN; PAM sequence: TTC
  source 1..20: mol_type = other DNA
agatactgctgataggcaag

SEQ ID NO: 25209 - DNA, 20 bp, synthetic construct
  misc_feature 1..20: note = Description of Artificial Sequence: Synthetic oligonucleotide
  misc_feature 1..20: note = Target: FXN; (-) strand; PAM type: YTN; PAM sequence: TTT
  source 1..20: mol_type = other DNA
cagatactgctgataggcaa

SEQ ID NO: 25210 - DNA, 20 bp, synthetic construct
  misc_feature 1..20: note = Description of Artificial Sequence: Synthetic oligonucleotide
  misc_feature 1..20: note = Target: FXN; (-) strand; PAM type: YTN; PAM sequence: TTT
  source 1..20: mol_type = other DNA
tcagatactgctgataggca

SEQ ID NO: 25211 - DNA, 20 bp, synthetic construct
  misc_feature 1..20: note = Description of Artificial Sequence: Synthetic oligonucleotide
  misc_feature 1..20: note = Target: FXN; (-) strand; PAM type: YTN; PAM sequence: CTT
  source 1..20: mol_type = other DNA
ttcagatactgctgataggc

SEQ ID NO: 25212 - DNA, 20 bp, synthetic construct
  misc_feature 1..20: note = Description of Artificial Sequence: Synthetic oligonucleotide
  misc_feature 1..20: note = Target: FXN; (-) strand; PAM type: YTN; PAM sequence: CTA
  source 1..20: mol_type = other DNA
gacttttcagatactgctga

SEQ ID NO: 25213 - DNA, 20 bp, synthetic construct
  misc_feature 1..20: note = Description of Artificial Sequence: Synthetic oligonucleotide
  misc_feature 1..20: note = Target: FXN; (-) strand; PAM type: YTN; PAM sequence: TTG
  source 1..20: mol_type = other DNA
gccaagaaaagaagcaacta

SEQ ID NO: 25214 - DNA, 20 bp, synthetic construct
  misc_feature 1..20: note = Description of Artificial Sequence: Synthetic oligonucleotide
  misc_feature 1..20: note = Target: FXN; (-) strand; PAM type: YTN; PAM sequence: CTC
  source 1..20: mol_type = other DNA
aaaaaaaaaaaaagagttgg

SEQ ID NO: 25215 - DNA, 20 bp, synthetic construct
  misc_feature 1..20: note = Description of Artificial Sequence: Synthetic oligonucleotide
  misc_feature 1..20: note = Target: FXN; (-) strand; PAM type: YTN; PAM sequence: CTC
  source 1..20: mol_type = other DNA
catctcaaaaaaaaaaaaag

SEQ ID NO: 25216 - DNA, 20 bp, synthetic construct
  misc_feature 1..20: note = Description of Artificial Sequence: Synthetic oligonucleotide
  misc_feature 1..20: note = Target: FXN; (-) strand; PAM type: YTN; PAM sequence: CTG
  source 1..20: mol_type = other DNA
ggcaacaagagcaaaactcc

SEQ ID NO: 25217 - DNA, 20 bp, synthetic construct
  misc_feature 1..20: note = Description of Artificial Sequence: Synthetic oligonucleotide
  misc_feature 1..20: note = Target: FXN; (-) strand; PAM type: YTN; PAM sequence: CTC
  source 1..20: mol_type = other DNA
cagcctgggcaacaagagca

SEQ ID NO: 25218 - DNA, 20 bp, synthetic construct
  misc_feature 1..20: note = Description of Artificial Sequence: Synthetic oligonucleotide
  misc_feature 1..20: note = Target: FXN; (-) strand; PAM type: YTN; PAM sequence: TTG
  source 1..20: mol_type = other DNA
cgctccagcctgggcaacaa

SEQ ID NO: 25219 - DNA, 20 bp, synthetic construct
  misc_feature 1..20: note = Description of Artificial Sequence: Synthetic oligonucleotide
  misc_feature 1..20: note = Target: FXN; (-) strand; PAM type: YTN; PAM sequence: TTG
  source 1..20: mol_type = other DNA
cagtgagcagaggacgtgcc

SEQ ID NO: 25220 - DNA, 20 bp, synthetic construct
  misc_feature 1..20: note = Description of Artificial Sequence: Synthetic oligonucleotide
  misc_feature 1..20: note = Target: FXN; (-) strand; PAM type: YTN; PAM sequence: TTG
  source 1..20: mol_type = other DNA
aacccaggaggcggaggttg

SEQ ID NO: 25221 - DNA, 20 bp, synthetic construct
  misc_feature 1..20: note = Description of Artificial Sequence: Synthetic oligonucleotide
  misc_feature 1..20: note = Target: FXN; (-) strand; PAM type: YTN; PAM sequence: CTT
  source 1..20: mol_type = other DNA
gaacccaggaggcggaggtt

SEQ ID NO: 25222 - DNA, 20 bp, synthetic construct
  misc_feature 1..20: note = Description of Artificial Sequence: Synthetic oligonucleotide
  misc_feature 1..20: note = Target: FXN; (-) strand; PAM type: YTN; PAM sequence: TTG
  source 1..20: mol_type = other DNA
cttgaacccaggaggcggag

SEQ ID NO: 25223 - DNA, 20 bp, synthetic construct
  misc_feature 1..20: note = Description of Artificial Sequence: Synthetic oligonucleotide
  misc_feature 1..20: note = Target: FXN; (-) strand; PAM type: YTN; PAM sequence: CTG
  source 1..20: mol_type = other DNA
aggcaggagaattgcttgaa

SEQ ID NO: 25224 - DNA, 20 bp, synthetic construct
  misc_feature 1..20: note = Description of Artificial Sequence: Synthetic oligonucleotide
  misc_feature 1..20: note = Target: FXN; (-) strand; PAM type: YTN; PAM sequence: CTC
  source 1..20: mol_type = other DNA
gggaggctgaggcaggagaa

SEQ ID NO: 25225 - DNA, 20 bp, synthetic construct
  misc_feature 1..20: note = Description of Artificial Sequence: Synthetic oligonucleotide
  misc_feature 1..20: note = Target: FXN; (-) strand; PAM type: YTN; PAM sequence: CTA
  source 1..20: mol_type = other DNA
ctcgggaggctgaggcagga

SEQ ID NO: 25226 - DNA, 20 bp, synthetic construct
  misc_feature 1..20: note = Description of Artificial Sequence: Synthetic oligonucleotide
  misc_feature 1..20: note = Target: FXN; (-) strand; PAM type: YTN; PAM sequence: CTG
  source 1..20: mol_type = other DNA
taatcccagctactcgggag

SEQ ID NO: 25227 - DNA, 20 bp, synthetic construct
  misc_feature 1..20: note = Description of Artificial Sequence: Synthetic oligonucleotide
  misc_feature 1..20: note = Target: FXN; (-) strand; PAM type: YTN; PAM sequence: TTA
  source 1..20: mol_type = other DNA
gccgggcatagtggcgcatg

SEQ ID NO: 25228 - DNA, 20 bp, synthetic construct
  misc_feature 1..20: note = Description of Artificial Sequence: Synthetic oligonucleotide
  misc_feature 1..20: note = Target: FXN; (-) strand; PAM type: YTN; PAM sequence: CTA
  source 1..20: mol_type = other DNA
aaaatacaaaattagccggg

SEQ ID NO: 25229 - DNA, 20 bp, synthetic construct
  misc_feature 1..20: note = Description of Artificial Sequence: Synthetic oligonucleotide
  misc_feature 1..20: note = Target: FXN; (-) strand; PAM type: YTN; PAM sequence: CTA
  source 1..20: mol_type = other DNA
ctaaaaatacaaaattagcc

SEQ ID NO: 25230 - DNA, 20 bp, synthetic construct
  misc_feature 1..20: note = Description of Artificial Sequence: Synthetic oligonucleotide
  misc_feature 1..20: note = Target: FXN; (-) strand; PAM type: YTN; PAM sequence: CTC
  source 1..20: mol_type = other DNA
tactaaaaatacaaaattag

SEQ ID NO: 25231 - DNA, 20 bp, synthetic construct
  misc_feature 1..20: note = Description of Artificial Sequence: Synthetic oligonucleotide
  misc_feature 1..20: note = Target: FXN; (-) strand; PAM type: YTN; PAM sequence: CTG
  source 1..20: mol_type = other DNA
tctctactaaaaatacaaaa

SEQ ID NO: 25232 - DNA, 20 bp, synthetic construct
  misc_feature 1..20: note = Description of Artificial Sequence: Synthetic oligonucleotide
  misc_feature 1..20: note = Target: FXN; (-) strand; PAM type: YTN; PAM sequence: TTG
  source 1..20: mol_type = other DNA
accaacatggagaaaccctg

SEQ ID NO: 25233 - DNA, 20 bp, synthetic construct
  misc_feature 1..20: note = Description of Artificial Sequence: Synthetic oligonucleotide
  misc_feature 1..20: note = Target: FXN; (-) strand; PAM type: YTN; PAM sequence: CTT
  source 1..20: mol_type = other DNA
gaccaacatggagaaaccct

SEQ ID NO: 25234 - DNA, 20 bp, synthetic construct
  misc_feature 1..20: note = Description of Artificial Sequence: Synthetic oligonucleotide
  misc_feature 1..20: note = Target: FXN; (-) strand; PAM type: YTN; PAM sequence: TTC
  source 1..20: mol_type = other DNA
gagaccagcttgaccaacat

SEQ ID NO: 25235 - DNA, 20 bp, synthetic construct
  misc_feature 1..20: note = Description of Artificial Sequence: Synthetic oligonucleotide
  misc_feature 1..20: note = Target: FXN; (-) strand; PAM type: YTN; PAM sequence: TTA
  source 1..20: mol_type = other DNA
ggagttcgagaccagcttga

SEQ ID NO: 25236 - DNA, 20 bp, synthetic construct
  misc_feature 1..20: note = Description of Artificial Sequence: Synthetic oligonucleotide
  misc_feature 1..20: note = Target: FXN; (-) strand; PAM type: YTN; PAM sequence: CTG
  source 1..20: mol_type = other DNA
aggttaggagttcgagacca

SEQ ID NO: 25237 - DNA, 20 bp, synthetic construct
  misc_feature 1..20: note = Description of Artificial Sequence: Synthetic oligonucleotide
  misc_feature 1..20: note = Target: FXN; (-) strand; PAM type: YTN; PAM sequence: TTC
  source 1..20: mol_type = other DNA
gggaggccgaggcgggcgga

SEQ ID NO: 25238 - DNA, 20 bp, synthetic construct
  misc_feature 1..20: note = Description of Artificial Sequence: Synthetic oligonucleotide
  misc_feature 1..20: note = Target: FXN; (-) strand; PAM type: YTN; PAM sequence: CTT
  source 1..20: mol_type = other DNA
cgggaggccgaggcgggcgg

SEQ ID NO: 25239 - DNA, 20 bp, synthetic construct
  misc_feature 1..20: note = Description of Artificial Sequence: Synthetic oligonucleotide
  misc_feature 1..20: note = Target: FXN; (-) strand; PAM type: YTN; PAM sequence: CTG
  source 1..20: mol_type = other DNA
taatcccagcacttcgggag

SEQ ID NO: 25240 - DNA, 20 bp, synthetic construct
  misc_feature 1..20: note = Description of Artificial Sequence: Synthetic oligonucleotide
  misc_feature 1..20: note = Target: FXN; (-) strand; PAM type: YTN; PAM sequence: CTC
  source 1..20: mol_type = other DNA
atgcctgtaatcccagcact

SEQ ID NO: 25241 - DNA, 20 bp, synthetic construct
  misc_feature 1..20: note = Description of Artificial Sequence: Synthetic oligonucleotide
  misc_feature 1..20: note = Target: FXN; (-) strand; PAM type: YTN; PAM sequence: CTG
  source 1..20: mol_type = other DNA
gcgcggtggctcatgcctgt

SEQ ID NO: 25242 - DNA, 20 bp, synthetic construct
  misc_feature 1..20: note = Description of Artificial Sequence: Synthetic oligonucleotide
  misc_feature 1..20: note = Target: FXN; (-) strand; PAM type: YTN; PAM sequence: TTG
  source 1..20: mol_type = other DNA
gccggcctggcgcggtggct

SEQ ID NO: 25243 - DNA, 20 bp, synthetic construct
  misc_feature 1..20: note = Description of Artificial Sequence: Synthetic oligonucleotide
  misc_feature 1..20: note = Target: FXN; (-) strand; PAM type: YTN; PAM sequence: TTA
  source 1..20: mol_type = other DNA
aagtaaaataaaataaaata

SEQ ID NO: 25244 - DNA, 20 bp, synthetic construct
  misc_feature 1..20: note = Description of Artificial Sequence: Synthetic oligonucleotide
  misc_feature 1..20: note = Target: FXN; (-) strand; PAM type: YTN; PAM sequence: TTT
  source 1..20: mol_type = other DNA
aaagtaaaataaaataaaat

SEQ ID NO: 25245 - DNA, 20 bp, synthetic construct
  misc_feature 1..20: note = Description of Artificial Sequence: Synthetic oligonucleotide
  misc_feature 1..20: note = Target: FXN; (-) strand; PAM type: YTN; PAM sequence: CTT
  source 1..20: mol_type = other DNA
taaagtaaaataaaataaaa

SEQ ID NO: 25246 - DNA, 20 bp, synthetic construct
  misc_feature 1..20: note = Description of Artificial Sequence: Synthetic oligonucleotide
  misc_feature 1..20: note = Target: FXN; (-) strand; PAM type: YTN; PAM sequence: CTG
  source 1..20: mol_type = other DNA
tctttaaagtaaaataaaat

SEQ ID NO: 25247 - DNA, 20 bp, synthetic construct
  misc_feature 1..20: note = Description of Artificial Sequence: Synthetic oligonucleotide
  misc_feature 1..20: note = Target: FXN; (-) strand; PAM type: YTN; PAM sequence: CTG
  source 1..20: mol_type = other DNA
ggtgacaaagtgaaaccctg

SEQ ID NO: 25248 - DNA, 20 bp, synthetic construct
  misc_feature 1..20: note = Description of Artificial Sequence: Synthetic oligonucleotide
  misc_feature 1..20: note = Target: FXN; (-) strand; PAM type: YTN; PAM sequence: TTC
  source 1..20: mol_type = other DNA
catcctgggtgacaaagtga

SEQ ID NO: 25249 - DNA, 20 bp, synthetic construct
  misc_feature 1..20: note = Description of Artificial Sequence: Synthetic oligonucleotide
  misc_feature 1..20: note = Target: FXN; (-) strand; PAM type: YTN; PAM sequence: TTG
  source 1..20: mol_type = other DNA
cattccatcctgggtgacaa

SEQ ID NO: 25250 - DNA, 20 bp, synthetic construct
  misc_feature 1..20: note = Description of Artificial Sequence: Synthetic oligonucleotide
  misc_feature 1..20: note = Target: FXN; (-) strand; PAM type: YTN; PAM sequence: CTG
  source 1..20: mol_type = other DNA
tgatcgtgccattgcattcc

SEQ ID NO: 25251 - DNA, 20 bp, synthetic construct
  misc_feature 1..20: note = Description of Artificial Sequence: Synthetic oligonucleotide
  misc_feature 1..20: note = Target: FXN; (-) strand; PAM type: YTN; PAM sequence: CTG
  source 1..20: mol_type = other DNA
cagtgagctgtgatcgtgcc

SEQ ID NO: 25252 - DNA, 20 bp, synthetic construct
  misc_feature 1..20: note = Description of Artificial Sequence: Synthetic oligonucleotide
  misc_feature 1..20: note = Target: FXN; (-) strand; PAM type: YTN; PAM sequence: CTG
  source 1..20: mol_type = other DNA
aggtgggagggatcacccga

SEQ ID NO: 25253 - DNA, 20 bp, synthetic construct
  misc_feature 1..20: note = Description of Artificial Sequence: Synthetic oligonucleotide
  misc_feature 1..20: note = Target: FXN; (-) strand; PAM type: YTN; PAM sequence: CTC
  source 1..20: mol_type = other DNA
aggagcctgaggtgggaggg

SEQ ID NO: 25254 - DNA, 20 bp, synthetic construct
  misc_feature 1..20: note = Description of Artificial Sequence: Synthetic oligonucleotide
  misc_feature 1..20: note = Target: FXN; (-) strand; PAM type: YTN; PAM sequence: CTC
  source 1..20: mol_type = other DNA
ctcaggagcctgaggtggga

SEQ ID NO: 25255 - DNA, 20 bp, synthetic construct
  misc_feature 1..20: note = Description of Artificial Sequence: Synthetic oligonucleotide
  misc_feature 1..20: note = Target: FXN; (-) strand; PAM type: YTN; PAM sequence: CTA
  source 1..20: mol_type = other DNA
gctcctcaggagcctgaggt

SEQ ID NO: 25256 - DNA, 20 bp, synthetic construct
  misc_feature 1..20: note = Description of Artificial Sequence: Synthetic oligonucleotide
  misc_feature 1..20: note = Target: FXN; (-) strand; PAM type: YTN; PAM sequence: TTC
  source 1..20: mol_type = other DNA
tagctcctcaggagcctgag

SEQ ID NO: 25257 - DNA, 20 bp, synthetic construct
  misc_feature 1..20: note = Description of Artificial Sequence: Synthetic oligonucleotide
  misc_feature 1..20: note = Target: FXN; (-) strand; PAM type: YTN; PAM sequence: CTG
  source 1..20: mol_type = other DNA
tagttctagctcctcaggag

SEQ ID NO: 25258 - DNA, 20 bp, synthetic construct
  misc_feature 1..20: note = Description of Artificial Sequence: Synthetic oligonucleotide
  misc_feature 1..20: note = Target: FXN; (-) strand; PAM type: YTN; PAM sequence: CTG
  source 1..20: mol_type = other DNA
ggcatggcccatgcctgtag

SEQ ID NO: 25259 - DNA, 20 bp, synthetic construct
  misc_feature 1..20: note = Description of Artificial Sequence: Synthetic oligonucleotide
  misc_feature 1..20: note = Target: FXN; (-) strand; PAM type: YTN; PAM sequence: TTA
  source 1..20: mol_type = other DNA
gctgggcatggcccatgcct

SEQ ID NO: 25260 - DNA, 20 bp, synthetic construct
  misc_feature 1..20: note = Description of Artificial Sequence: Synthetic oligonucleotide
  misc_feature 1..20: note = Target: FXN; (-) strand; PAM type: YTN; PAM sequence: TTA
  source 1..20: mol_type = other DNA
aaaaattagctgggcatggc

SEQ ID NO: 25261 - DNA, 20 bp, synthetic construct
  misc_feature 1..20: note = Description of Artificial Sequence: Synthetic oligonucleotide
  misc_feature 1..20: note = Target: FXN; (-) strand; PAM type: YTN; PAM sequence: CTA
  source 1..20: mol_type = other DNA
ccaaaaattaaaaaattagc

SEQ ID NO: 25262 - DNA, 20 bp, synthetic construct
  misc_feature 1..20: note = Description of Artificial Sequence: Synthetic oligonucleotide
  misc_feature 1..20: note = Target: FXN; (-) strand; PAM type: YTN; PAM sequence: CTC
  source 1..20: mol_type = other DNA
taccaaaaattaaaaaatta

SEQ ID NO: 25263 - DNA, 20 bp, synthetic construct
  misc_feature 1..20: note = Description of Artificial Sequence: Synthetic oligonucleotide
  misc_feature 1..20: note = Target: FXN; (-) strand; PAM type: YTN; PAM sequence: CTG
  source 1..20: mol_type = other DNA
agacaacagagaccccgtct

SEQ ID NO: 25264 - DNA, 20 bp, synthetic construct
  misc_feature 1..20: note = Description of Artificial Sequence: Synthetic oligonucleotide
  misc_feature 1..20: note = Target: FXN; (-) strand; PAM type: YTN; PAM sequence: TTG
  source 1..20: mol_type = other DNA
aacccaggaatctgagacaa

SEQ ID NO: 25265 - DNA, 20 bp, synthetic construct
  misc_feature 1..20: note = Description of Artificial Sequence: Synthetic oligonucleotide
  misc_feature 1..20: note = Target: FXN; (-) strand; PAM type: YTN; PAM sequence: CTT
  source 1..20: mol_type = other DNA
gaacccaggaatctgagaca

SEQ ID NO: 25266 - DNA, 20 bp, synthetic construct
  misc_feature 1..20: note = Description of Artificial Sequence: Synthetic oligonucleotide
  misc_feature 1..20: note = Target: FXN; (-) strand; PAM type: YTN; PAM sequence: TTG
  source 1..20: mol_type = other DNA
ggaggccaagggagaaggat

SEQ ID NO: 25267 - DNA, 20 bp, synthetic construct
  misc_feature 1..20: note = Description of Artificial Sequence: Synthetic oligonucleotide
  misc_feature 1..20: note = Target: FXN; (-) strand; PAM type: YTN; PAM sequence: TTT
  source 1..20: mol_type = other DNA
gggaggccaagggagaagga

SEQ ID NO: 25268 - DNA, 20 bp, synthetic construct
  misc_feature 1..20: note = Description of Artificial Sequence: Synthetic oligonucleotide
  misc_feature 1..20: note = Target: FXN; (-) strand; PAM type: YTN; PAM sequence: CTT
  source 1..20: mol_type = other DNA
tgggaggccaagggagaagg

SEQ ID NO: 25269 - DNA, 20 bp, synthetic construct
  misc_feature 1..20: note = Description of Artificial Sequence: Synthetic oligonucleotide
  misc_feature 1..20: note = Target: FXN; (-) strand; PAM type: YTN; PAM sequence: CTG
  source 1..20: mol_type = other DNA
taataccagaactttgggag

SEQ ID NO: 25270 - DNA, 20 bp, synthetic construct
  misc_feature 1..20: note = Description of Artificial Sequence: Synthetic oligonucleotide
  misc_feature 1..20: note = Target: FXN; (-) strand; PAM type: YTN; PAM sequence: CTC
  source 1..20: mol_type = other DNA
atgcctgtaataccagaact

SEQ ID NO: 25271 - DNA, 20 bp, synthetic construct
  misc_feature 1..20: note = Description of Artificial Sequence: Synthetic oligonucleotide
  misc_feature 1..20: note = Target: FXN; (-) strand; PAM type: YTN; PAM sequence: CTG
  source 1..20: mol_type = other DNA
ggtgcagtggctcatgcctg

SEQ ID NO: 25272 - DNA, 20 bp, synthetic construct
  misc_feature 1..20: note = Description of Artificial Sequence: Synthetic oligonucleotide
  misc_feature 1..20: note = Target: FXN; (-) strand; PAM type: YTN; PAM sequence: CTG
  source 1..20: mol_type = other DNA
gccatgggctgggtgcagtg

SEQ ID NO: 25273 - DNA, 20 bp, synthetic construct
  misc_feature 1..20: note = Description of Artificial Sequence: Synthetic oligonucleotide
  misc_feature 1..20: note = Target: FXN; (-) strand; PAM type: YTN; PAM sequence: TTA
  source 1..20: mol_type = other DNA
aaaaaaaaaaaagaaaagaa

SEQ ID NO: 25274 - DNA, 20 bp, synthetic construct
  misc_feature 1..20: note = Description of Artificial Sequence: Synthetic oligonucleotide
  misc_feature 1..20: note = Target: FXN; (-) strand; PAM type: YTN; PAM sequence: CTC
  source 1..20: mol_type = other DNA
aaattaaaaaaaaaaaaaga

SEQ ID NO: 25275 - DNA, 20 bp, synthetic construct
  misc_feature 1..20: note = Description of Artificial Sequence: Synthetic oligonucleotide
  misc_feature 1..20: note = Target: FXN; (-) strand; PAM type: YTN; PAM sequence: TTC
  source 1..20: mol_type = other DNA
tcaaattaaaaaaaaaaaaa

SEQ ID NO: 25276 - DNA, 20 bp, synthetic construct
  misc_feature 1..20: note = Description of Artificial Sequence: Synthetic oligonucleotide
  misc_feature 1..20: note = Target: FXN; (-) strand; PAM type: YTN; PAM sequence: CTT
  source 1..20: mol_type = other DNA
ctcaaattaaaaaaaaaaaa

SEQ ID NO: 25277 - DNA, 20 bp, synthetic construct
  misc_feature 1..20: note = Description of Artificial Sequence: Synthetic oligonucleotide
  misc_feature 1..20: note = Target: FXN; (-) strand; PAM type: YTN; PAM sequence: TTA
  source 1..20: mol_type = other DNA
acacttctcaaattaaaaaa

SEQ ID NO: 25278 - DNA, 20 bp, synthetic construct
  misc_feature 1..20: note = Description of Artificial Sequence: Synthetic oligonucleotide
  misc_feature 1..20: note = Target: FXN; (-) strand; PAM type: YTN; PAM sequence: TTT
  source 1..20: mol_type = other DNA
aacacttctcaaattaaaaa

SEQ ID NO: 25279 - DNA, 20 bp, synthetic construct
  misc_feature 1..20: note = Description of Artificial Sequence: Synthetic oligonucleotide
  misc_feature 1..20: note = Target: FXN; (-) strand; PAM type: YTN; PAM sequence: TTA
  source 1..20: mol_type = other DNA
tttaacacttctcaaattaa

SEQ ID NO: 25280 - DNA, 20 bp, synthetic construct
  misc_feature 1..20: note = Description of Artificial Sequence: Synthetic oligonucleotide
  misc_feature 1..20: note = Target: FXN; (-) strand; PAM type: YTN; PAM sequence: TTA
  source 1..20: mol_type = other DNA
tgtataatatcaaagaaaga

SEQ ID NO: 25281 - DNA, 20 bp, synthetic construct
  misc_feature 1..20: note = Description of Artificial Sequence: Synthetic oligonucleotide
  misc_feature 1..20: note = Target: FXN; (-) strand; PAM type: YTN; PAM sequence: TTT
  source 1..20: mol_type = other DNA
atgtataatatcaaagaaag

SEQ ID NO: 25282 - DNA, 20 bp, synthetic construct
  misc_feature 1..20: note = Description of Artificial Sequence: Synthetic oligonucleotide
  misc_feature 1..20: note = Target: FXN; (-) strand; PAM type: YTN; PAM sequence: TTG
  source 1..20: mol_type = other DNA
gtgtggtttatgtataatat

SEQ ID NO: 25283 - DNA, 20 bp, synthetic construct
  misc_feature 1..20: note = Description of Artificial Sequence: Synthetic oligonucleotide
  misc_feature 1..20: note = Target: FXN; (-) strand; PAM type: YTN; PAM sequence: TTT
  source 1..20: mol_type = other DNA
ggtgtggtttatgtataata

SEQ ID NO: 25284 - DNA, 20 bp, synthetic construct
  misc_feature 1..20: note = Description of Artificial Sequence: Synthetic oligonucleotide
  misc_feature 1..20: note = Target: FXN; (-) strand; PAM type: YTN; PAM sequence: TTT
  source 1..20: mol_type = other DNA
tggtgtggtttatgtataat

SEQ ID NO: 25285 - DNA, 20 bp, synthetic construct
  misc_feature 1..20: note = Description of Artificial Sequence: Synthetic oligonucleotide
  misc_feature 1..20: note = Target: FXN; (-) strand; PAM type: YTN; PAM sequence: CTG
  source 1..20: mol_type = other DNA
aaagacattttggtgtggtt

SEQ ID NO: 25286 - DNA, 20 bp, synthetic construct
  misc_feature 1..20: note = Description of Artificial Sequence: Synthetic oligonucleotide
  misc_feature 1..20: note = Target: FXN; (-) strand; PAM type: YTN; PAM sequence: TTA
  source 1..20: mol_type = other DNA
ctgaaagacattttggtgtg

SEQ ID NO: 25287 - DNA, 20 bp, synthetic construct
  misc_feature 1..20: note = Description of Artificial Sequence: Synthetic oligonucleotide
  misc_feature 1..20: note = Target: FXN; (-) strand; PAM type: YTN; PAM sequence: CTT
  source 1..20: mol_type = other DNA
actgaaagacattttggtgt

SEQ ID NO: 25288 - DNA, 20 bp, synthetic construct
  misc_feature 1..20: note = Description of Artificial Sequence: Synthetic oligonucleotide
  misc_feature 1..20: note = Target: FXN; (-) strand; PAM type: YTN; PAM sequence: TTA
  source 1..20: mol_type = other DNA
cttactgaaagacattttgg

SEQ ID NO: 25289 - DNA, 20 bp, synthetic construct
  misc_feature 1..20: note = Description of Artificial Sequence: Synthetic oligonucleotide
  misc_feature 1..20: note = Target: FXN; (-) strand; PAM type: YTN; PAM sequence: TTT
  source 1..20: mol_type = other DNA
acttactgaaagacattttg

SEQ ID NO: 25290 - DNA, 20 bp, synthetic construct
  misc_feature 1..20: note = Description of Artificial Sequence: Synthetic oligonucleotide
  misc_feature 1..20: note = Target: FXN; (-) strand; PAM type: YTN; PAM sequence: TTT
  source 1..20: mol_type = other DNA
tacttactgaaagacatttt

SEQ ID NO: 25291 - DNA, 20 bp, synthetic construct
  misc_feature 1..20: note = Description of Artificial Sequence: Synthetic oligonucleotide
  misc_feature 1..20: note = Target: FXN; (-) strand; PAM type: YTN; PAM sequence: TTC
  source 1..20: mol_type = other DNA
attttacttactgaaagaca

SEQ ID NO: 25292 - DNA, 20 bp, synthetic construct
  misc_feature 1..20: note = Description of Artificial Sequence: Synthetic oligonucleotide
  misc_feature 1..20: note = Target: FXN; (-) strand; PAM type: YTN; PAM sequence: CTA
  source 1..20: mol_type = other DNA
aaatggttcattttacttac

SEQ ID NO: 25293 - DNA, 20 bp, synthetic construct
  misc_feature 1..20: note = Description of Artificial Sequence: Synthetic oligonucleotide
  misc_feature 1..20: note = Target: FXN; (-) strand; PAM type: YTN; PAM sequence: CTG
  source 1..20: mol_type = other DNA
tatctaaaatggttcatttt

SEQ ID NO: 25294 - DNA, 20 bp, synthetic construct
  misc_feature 1..20: note = Description of Artificial Sequence: Synthetic oligonucleotide
  misc_feature 1..20: note = Target: FXN; (-) strand; PAM type: YTN; PAM sequence: TTC
  source 1..20: mol_type = other DNA
tgtatctaaaatggttcatt

SEQ ID NO: 25295 - DNA, 20 bp, synthetic construct
  misc_feature 1..20: note = Description of Artificial Sequence: Synthetic oligonucleotide
  misc_feature 1..20: note = Target: FXN; (-) strand; PAM type: YTN; PAM sequence: TTT
  source 1..20: mol_type = other DNA
ctgtatctaaaatggttcat

SEQ ID NO: 25296 - DNA, 20 bp, synthetic construct
  misc_feature 1..20: note = Description of Artificial Sequence: Synthetic oligonucleotide
  misc_feature 1..20: note = Target: FXN; (-) strand; PAM type: YTN; PAM sequence: TTT
  source 1..20: mol_type = other DNA
tctgtatctaaaatggttca

SEQ ID NO: 25297 - DNA, 20 bp, synthetic construct
  misc_feature 1..20: note = Description of Artificial Sequence: Synthetic oligonucleotide
  misc_feature 1..20: note = Target: FXN; (-) strand; PAM type: YTN; PAM sequence: TTA
  source 1..20: mol_type = other DNA
gaattttctgtatctaaaat

SEQ ID NO: 25298 - DNA, 20 bp, synthetic construct
  misc_feature 1..20: note = Description of Artificial Sequence: Synthetic oligonucleotide
  misc_feature 1..20: note = Target: FXN; (-) strand; PAM type: YTN; PAM sequence: CTA
  source 1..20: mol_type = other DNA
attagaattttctgtatcta

SEQ ID NO: 25299 - DNA, 20 bp, synthetic construct
  misc_feature 1..20: note = Description of Artificial Sequence: Synthetic oligonucleotide
  misc_feature 1..20: note = Target: FXN; (-) strand; PAM type: YTN; PAM sequence: CTA
  source 1..20: mol_type = other DNA
tgccaatctaattagaattt

SEQ ID NO: 25300 - DNA, 20 bp, synthetic construct
  misc_feature 1..20: note = Description of Artificial Sequence: Synthetic oligonucleotide
  misc_feature 1..20: note = Target: FXN; (-) strand; PAM type: YTN; PAM sequence: TTA
  source 1..20: mol_type = other DNA
actatgccaatctaattaga

SEQ ID NO: 25301 - DNA, 20 bp, synthetic construct
  misc_feature 1..20: note = Description of Artificial Sequence: Synthetic oligonucleotide
  misc_feature 1..20: note = Target: FXN; (-) strand; PAM type: YTN; PAM sequence: CTT
  source 1..20: mol_type = other DNA
aactatgccaatctaattag

SEQ ID NO: 25302 - DNA, 20 bp, synthetic construct
  misc_feature 1..20: note = Description of Artificial Sequence: Synthetic oligonucleotide
  misc_feature 1..20: note = Target: FXN; (-) strand; PAM type: YTN; PAM sequence: TTG
  source 1..20: mol_type = other DNA
gccttaactatgccaatcta

SEQ ID NO: 25303 - DNA, 20 bp, synthetic construct
  misc_feature 1..20: note = Description of Artificial Sequence: Synthetic oligonucleotide
  misc_feature 1..20: note = Target: FXN; (-) strand; PAM type: YTN; PAM sequence: TTT
  source 1..20: mol_type = other DNA
ggccttaactatgccaatct

SEQ ID NO: 25304 - DNA, 20 bp, synthetic construct
  misc_feature 1..20: note = Description of Artificial Sequence: Synthetic oligonucleotide
  misc_feature 1..20: note = Target: FXN; (-) strand; PAM type: YTN; PAM sequence: TTT
  source 1..20: mol_type = other DNA
tggccttaactatgccaatc

SEQ ID NO: 25305 - DNA, 20 bp, synthetic construct
  misc_feature 1..20: note = Description of Artificial Sequence: Synthetic oligonucleotide
  misc_feature 1..20: note = Target: FXN; (-) strand; PAM type: YTN; PAM sequence: TTT
  source 1..20: mol_type = other DNA
ttggccttaactatgccaat

SEQ ID NO: 25306 - DNA, 20 bp, synthetic construct
  misc_feature 1..20: note = Description of Artificial Sequence: Synthetic oligonucleotide
  misc_feature 1..20: note = Target: FXN; (-) strand; PAM type: YTN; PAM sequence: TTA
  source 1..20: mol_type = other DNA
tatttttggccttaactatg

SEQ ID NO: 25307 - DNA, 20 bp, synthetic construct
  misc_feature 1..20: note = Description of Artificial Sequence: Synthetic oligonucleotide
  misc_feature 1..20: note = Target: FXN; (-) strand; PAM type: YTN; PAM sequence: TTT
  source 1..20: mol_type = other DNA
atatttttggccttaactat

SEQ ID NO: 25308 - DNA, 20 bp, synthetic construct
  misc_feature 1..20: note = Description of Artificial Sequence: Synthetic oligonucleotide
  misc_feature 1..20: note = Target: FXN; (-) strand; PAM type: YTN; PAM sequence: CTT
  source 1..20: mol_type = other DNA
tatatttttggccttaacta

SEQ ID NO: 25309 - DNA, 20 bp, synthetic construct
  misc_feature 1..20: note = Description of Artificial Sequence: Synthetic oligonucleotide
  misc_feature 1..20: note = Target: FXN; (-) strand; PAM type: YTN; PAM sequence: CTG
  source 1..20: mol_type = other DNA
aagataaggtagcaatgtca

SEQ ID NO: 25310 - DNA, 20 bp, synthetic construct
  misc_feature 1..20: note = Description of Artificial Sequence: Synthetic oligonucleotide
  misc_feature 1..20: note = Target: FXN; (-) strand; PAM type: YTN; PAM sequence: TTA
  source 1..20: mol_type = other DNA
aaggcaagggctgaagataa

SEQ ID NO: 25311 - DNA, 20 bp, synthetic construct
  misc_feature 1..20: note = Description of Artificial Sequence: Synthetic oligonucleotide
  misc_feature 1..20: note = Target: FXN; (-) strand; PAM type: YTN; PAM sequence: CTT
  source 1..20: mol_type = other DNA
aaaggcaagggctgaagata

SEQ ID NO: 25312 - DNA, 20 bp, synthetic construct
  misc_feature 1..20: note = Description of Artificial Sequence: Synthetic oligonucleotide
  misc_feature 1..20: note = Target: FXN; (-) strand; PAM type: YTN; PAM sequence: CTC
  source 1..20: mol_type = other DNA
ttaaaggcaagggctgaaga

SEQ ID NO: 25313 - DNA, 20 bp, synthetic construct
  misc_feature 1..20: note = Description of Artificial Sequence: Synthetic oligonucleotide
  misc_feature 1..20: note = Target: FXN; (-) strand; PAM type: YTN; PAM sequence: TTG
  source 1..20: mol_type = other DNA
cctcttaaaggcaagggctg

SEQ ID NO: 25314 - DNA, 20 bp, synthetic construct
  misc_feature 1..20: note = Description of Artificial Sequence: Synthetic oligonucleotide
  misc_feature 1..20: note = Target: FXN; (-) strand; PAM type: YTN; PAM sequence: TTT
  source 1..20: mol_type = other DNA
gcctcttaaaggcaagggct

SEQ ID NO: 25315 - DNA, 20 bp, synthetic construct
  misc_feature 1..20: note = Description of Artificial Sequence: Synthetic oligonucleotide
  misc_feature 1..20: note = Target: FXN; (-) strand; PAM type: YTN; PAM sequence: TTC
  source 1..20: mol_type = other DNA
atttgcctcttaaaggcaag

SEQ ID NO: 25316 - DNA, 20 bp, synthetic construct
  misc_feature 1..20: note = Description of Artificial Sequence: Synthetic oligonucleotide
  misc_feature 1..20: note = Target: FXN; (-) strand; PAM type: YTN; PAM sequence: TTG
  source 1..20: mol_type = other DNA
tgttcatttgcctcttaaag

SEQ ID NO: 25317 - DNA, 20 bp, synthetic construct
  misc_feature 1..20: note = Description of Artificial Sequence: Synthetic oligonucleotide
  misc_feature 1..20: note = Target: FXN; (-) strand; PAM type: YTN; PAM sequence: TTT
  source 1..20: mol_type = other DNA
gtgttcatttgcctcttaaa

SEQ ID NO: 25318 - DNA, 20 bp, synthetic construct
  misc_feature 1..20: note = Description of Artificial Sequence: Synthetic oligonucleotide
  misc_feature 1..20: note = Target: FXN; (-) strand; PAM type: YTN; PAM sequence: TTT
  source 1..20: mol_type = other DNA
tgtgttcatttgcctcttaa

SEQ ID NO: 25319 - DNA, 20 bp, synthetic construct
  misc_feature 1..20: note = Description of Artificial Sequence: Synthetic oligonucleotide
  misc_feature 1..20: note = Target: FXN; (-) strand; PAM type: YTN; PAM sequence: CTG
  source 1..20: mol_type = other DNA
tattttgtgttcatttgcct

SEQ ID NO: 25320 - DNA, 20 bp, synthetic construct
  misc_feature 1..20: note = Description of Artificial Sequence: Synthetic oligonucleotide
  misc_feature 1..20: note = Target: FXN; (-) strand; PAM type: YTN; PAM sequence: TTC
  source 1..20: mol_type = other DNA
acctgtattttgtgttcatt

SEQ ID NO: 25321 - DNA, 20 bp, synthetic construct
  misc_feature 1..20: note = Description of Artificial Sequence: Synthetic oligonucleotide
  misc_feature 1..20: note = Target: FXN; (-) strand; PAM type: YTN; PAM sequence: CTC
  source 1..20: mol_type = other DNA
agaaccaagcaagattcacc

SEQ ID NO: 25322 - DNA, 20 bp, synthetic construct
  misc_feature 1..20: note = Description of Artificial Sequence: Synthetic oligonucleotide
  misc_feature 1..20: note = Target: FXN; (-) strand; PAM type: YTN; PAM sequence: CTG
  source 1..20: mol_type = other DNA
tctcagaaccaagcaagatt

SEQ ID NO: 25323 - DNA, 20 bp, synthetic construct
  misc_feature 1..20: note = Description of Artificial Sequence: Synthetic oligonucleotide
  misc_feature 1..20: note = Target: FXN; (-) strand; PAM type: YTN; PAM sequence: TTC
  source 1..20: mol_type = other DNA
actgtctcagaaccaagcaa

SEQ ID NO: 25324 - DNA, 20 bp, synthetic construct
  misc_feature 1..20: note = Description of Artificial Sequence: Synthetic oligonucleotide
  misc_feature 1..20: note = Target: FXN; (-) strand; PAM type: YTN; PAM sequence: CTT
  source 1..20: mol_type = other DNA
cactgtctcagaaccaagca

SEQ ID NO: 25325 - DNA, 20 bp, synthetic construct
  misc_feature 1..20: note = Description of Artificial Sequence: Synthetic oligonucleotide
  misc_feature 1..20: note = Target: FXN; (-) strand; PAM type: YTN; PAM sequence: CTG
  source 1..20: mol_type = other DNA
ggggaaagtccttcactgtc

SEQ ID NO: 25326 - DNA, 20 bp, synthetic construct
  misc_feature 1..20: note = Description of Artificial Sequence: Synthetic oligonucleotide
  misc_feature 1..20: note = Target: FXN; (-) strand; PAM type: YTN; PAM sequence: TTA
  source 1..20: mol_type = other DNA
aatactgggggaaagtcctt

SEQ ID NO: 25327 - DNA, 20 bp, synthetic construct
  misc_feature 1..20: note = Description of Artificial Sequence: Synthetic oligonucleotide
  misc_feature 1..20: note = Target: FXN; (-) strand; PAM type: YTN; PAM sequence: TTT
  source 1..20: mol_type = other DNA
aaatactgggggaaagtcct

SEQ ID NO: 25328 - DNA, 20 bp, synthetic construct
  misc_feature 1..20: note = Description of Artificial Sequence: Synthetic oligonucleotide
  misc_feature 1..20: note = Target: FXN; (-) strand; PAM type: YTN; PAM sequence: TTA
  source 1..20: mol_type = other DNA
tgtaaatatatttaaatact

SEQ ID NO: 25329 - DNA, 20 bp, synthetic construct
  misc_feature 1..20: note = Description of Artificial Sequence: Synthetic oligonucleotide
  misc_feature 1..20: note = Target: FXN; (-) strand; PAM type: YTN; PAM sequence: CTG
  source 1..20: mol_type = other DNA
gttatgtaaatatatttaaa

SEQ ID NO: 25330 - DNA, 20 bp, synthetic construct
  misc_feature 1..20: note = Description of Artificial Sequence: Synthetic oligonucleotide
  misc_feature 1..20: note = Target: FXN; (-) strand; PAM type: YTN; PAM sequence: TTA
  source 1..20: mol_type = other DNA
tgtaactggttatgtaaata

SEQ ID NO: 25331 - DNA, 20 bp, synthetic construct
  misc_feature 1..20: note = Description of Artificial Sequence: Synthetic oligonucleotide
  misc_feature 1..20: note = Target: FXN; (-) strand; PAM type: YTN; PAM sequence: TTT
  source 1..20: mol_type = other DNA
atgtaactggttatgtaaat

SEQ ID NO: 25332 - DNA, 20 bp, synthetic construct
  misc_feature 1..20: note = Description of Artificial Sequence: Synthetic oligonucleotide
  misc_feature 1..20: note = Target: FXN; (-) strand; PAM type: YTN; PAM sequence: TTA
  source 1..20: mol_type = other DNA
gatttatgtaactggttatg

SEQ ID NO: 25333 - DNA, 20 bp, synthetic construct
  misc_feature 1..20: note = Description of Artificial Sequence: Synthetic oligonucleotide
  misc_feature 1..20: note = Target: FXN; (-) strand; PAM type: YTN; PAM sequence: TTT
  source 1..20: mol_type = other DNA
agatttatgtaactggttat

SEQ ID NO: 25334 - DNA, 20 bp, synthetic construct
  misc_feature 1..20: note = Description of Artificial Sequence: Synthetic oligonucleotide
  misc_feature 1..20: note = Target: FXN; (-) strand; PAM type: YTN; PAM sequence: TTA
  source 1..20: mol_type = other DNA
atatttagatttatgtaact

SEQ ID NO: 25335 - DNA, 20 bp, synthetic construct
  misc_feature 1..20: note = Description of Artificial Sequence: Synthetic oligonucleotide
  misc_feature 1..20: note = Target: FXN; (-) strand; PAM type: YTN; PAM sequence: TTT
  source 1..20: mol_type = other DNA
aatatttagatttatgtaac

SEQ ID NO: 25336 - DNA, 20 bp, synthetic construct
  misc_feature 1..20: note = Description of Artificial Sequence: Synthetic oligonucleotide
  misc_feature 1..20: note = Target: FXN; (-) strand; PAM type: YTN; PAM sequence: TTT
  source 1..20: mol_type = other DNA
taatatttagatttatgtaa

SEQ ID NO: 25337 - DNA, 20 bp, synthetic construct
  misc_feature 1..20: note = Description of Artificial Sequence: Synthetic oligonucleotide
  misc_feature 1..20: note = Target: FXN; (-) strand; PAM type: YTN; PAM sequence: TTT
  source 1..20: mol_type = other DNA
ttaatatttagatttatgta

SEQ ID NO: 25338 - DNA, 20 bp, synthetic construct
  misc_feature 1..20: note = Description of Artificial Sequence: Synthetic oligonucleotide
  misc_feature 1..20: note = Target: FXN; (-) strand; PAM type: YTN; PAM sequence: TTT
  source 1..20: mol_type = other DNA
tttaatatttagatttatgt

SEQ ID NO: 25339 - DNA, 20 bp, synthetic construct
  misc_feature 1..20: note = Description of Artificial Sequence: Synthetic oligonucleotide
  misc_feature 1..20: note = Target: FXN; (-) strand; PAM type: YTN; PAM sequence: TTT
  source 1..20: mol_type = other DNA
ttttaatatttagatttatg

SEQ ID NO: 25340 - DNA, 20 bp, synthetic construct
  misc_feature 1..20: note = Description of Artificial Sequence: Synthetic oligonucleotide
  misc_feature 1..20: note = Target: FXN; (-) strand; PAM type: YTN; PAM sequence: TTG
  source 1..20: mol_type = other DNA
gagatttttttaatatttag

SEQ ID NO: 25341 - DNA, 20 bp, synthetic construct
  misc_feature 1..20: note = Description of Artificial Sequence: Synthetic oligonucleotide
  misc_feature 1..20: note = Target: FXN; (-) strand; PAM type: YTN; PAM sequence: CTA
  source 1..20: mol_type = other DNA
ttggagatttttttaatatt

SEQ ID NO: 25342 - DNA, 20 bp, synthetic construct
  misc_feature 1..20: note = Description of Artificial Sequence: Synthetic oligonucleotide
  misc_feature 1..20: note = Target: FXN; (-) strand; PAM type: YTN; PAM sequence: CTA
  source 1..20: mol_type = other DNA
aaatctattggagatttttt

SEQ ID NO: 25343 - DNA, 20 bp, synthetic construct
  misc_feature 1..20: note = Description of Artificial Sequence: Synthetic oligonucleotide
  misc_feature 1..20: note = Target: FXN; (-) strand; PAM type: YTN; PAM sequence: TTC
  source 1..20: mol_type = other DNA
acaaagatggtgaatgccat

SEQ ID NO: 25344 - DNA, 20 bp, synthetic construct
  misc_feature 1..20: note = Description of Artificial Sequence: Synthetic oligonucleotide
  misc_feature 1..20: note = Target: FXN; (-) strand; PAM type: YTN; PAM sequence: TTT
  source 1..20: mol_type = other DNA
cacaaagatggtgaatgcca

SEQ ID NO: 25345 - DNA, 20 bp, synthetic construct
  misc_feature 1..20: note = Description of Artificial Sequence: Synthetic oligonucleotide
  misc_feature 1..20: note = Target: FXN; (-) strand; PAM type: YTN; PAM sequence: TTT
  source 1..20: mol_type = other DNA
tcacaaagatggtgaatgcc

SEQ ID NO: 25346 - DNA, 20 bp, synthetic construct
  misc_feature 1..20: note = Description of Artificial Sequence: Synthetic oligonucleotide
  misc_feature 1..20: note = Target: FXN; (-) strand; PAM type: YTN; PAM sequence: CTT
  source 1..20: mol_type = other DNA
ttcacaaagatggtgaatgc

SEQ ID NO: 25347 - DNA, 20 bp, synthetic construct
  misc_feature 1..20: note = Description of Artificial Sequence: Synthetic oligonucleotide
  misc_feature 1..20: note = Target: FXN; (-) strand; PAM type: YTN; PAM sequence: TTC
  source 1..20: mol_type = other DNA
aacttttcacaaagatggtg

SEQ ID NO: 25348 - DNA, 20 bp, synthetic construct
  misc_feature 1..20: note = Description of Artificial Sequence: Synthetic oligonucleotide
  misc_feature 1..20: note = Target: FXN; (-) strand; PAM type: YTN; PAM sequence: TTA
  source 1..20: mol_type = other DNA
gtaatgttcaacttttcaca

SEQ ID NO: 25349 - DNA, 20 bp, synthetic construct
  misc_feature 1..20: note = Description of Artificial Sequence: Synthetic oligonucleotide
  misc_feature 1..20: note = Target: FXN; (-) strand; PAM type: YTN; PAM sequence: TTC
  source 1..20: mol_type = other DNA
attagtaatgttcaactttt

SEQ ID NO: 25350 - DNA, 20 bp, synthetic construct
  misc_feature 1..20: note = Description of Artificial Sequence: Synthetic oligonucleotide
  misc_feature 1..20: note = Target: FXN; (-) strand; PAM type: YTN; PAM sequence: TTT
  source 1..20: mol_type = other DNA
cattagtaatgttcaacttt

SEQ ID NO: 25351 - DNA, 20 bp, synthetic construct
  misc_feature 1..20: note = Description of Artificial Sequence: Synthetic oligonucleotide
  misc_feature 1..20: note = Target: FXN; (-) strand; PAM type: YTN; PAM sequence: CTA
  source 1..20: mol_type = other DNA
aagatatgatcagatttcat

SEQ ID NO: 25352 - DNA, 20 bp, synthetic construct
  misc_feature 1..20: note = Description of Artificial Sequence: Synthetic oligonucleotide
  misc_feature 1..20: note = Target: FXN; (-) strand; PAM type: YTN; PAM sequence: TTC
  source 1..20: mol_type = other DNA
taaagatatgatcagatttc

SEQ ID NO: 25353 - DNA, 20 bp, synthetic construct
  misc_feature 1..20: note = Description of Artificial Sequence: Synthetic oligonucleotide
  misc_feature 1..20: note = Target: FXN; (-) strand; PAM type: YTN; PAM sequence: CTT
  source 1..20: mol_type = other DNA
ctaaagatatgatcagattt

SEQ ID NO: 25354 - DNA, 20 bp, synthetic construct
  misc_feature 1..20: note = Description of Artificial Sequence: Synthetic oligonucleotide
  misc_feature 1..20: note = Target: FXN; (-) strand; PAM type: YTN; PAM sequence: TTA
  source 1..20: mol_type = other DNA
tccttctaaagatatgatca

SEQ ID NO: 25355 - DNA, 20 bp, synthetic construct
  misc_feature 1..20: note = Description of Artificial Sequence: Synthetic oligonucleotide
  misc_feature 1..20: note = Target: FXN; (-) strand; PAM type: YTN; PAM sequence: TTT
  source 1..20: mol_type = other DNA
atccttctaaagatatgatc

SEQ ID NO: 25356 - DNA, 20 bp, synthetic construct
  misc_feature 1..20: note = Description of Artificial Sequence: Synthetic oligonucleotide
  misc_feature 1..20: note = Target: FXN; (-) strand; PAM type: YTN; PAM sequence: CTG
  source 1..20: mol_type = other DNA
tttatccttctaaagatatg

SEQ ID NO: 25357 - DNA, 20 bp, synthetic construct
  misc_feature 1..20: note = Description of Artificial Sequence: Synthetic oligonucleotide
  misc_feature 1..20: note = Target: FXN; (-) strand; PAM type: YTN; PAM sequence: CTA
  source 1..20: mol_type = other DNA
tcactgtttatccttctaaa

SEQ ID NO: 25358 - DNA, 20 bp, synthetic construct
  misc_feature 1..20: note = Description of Artificial Sequence: Synthetic oligonucleotide
  misc_feature 1..20: note = Target: FXN; (-) strand; PAM type: YTN; PAM sequence: TTC
  source 1..20: mol_type = other DNA
agtaaatgctatcactgttt

SEQ ID NO: 25359 - DNA, 20 bp, synthetic construct
  misc_feature 1..20: note = Description of Artificial Sequence: Synthetic oligonucleotide
  misc_feature 1..20: note = Target: FXN; (-) strand; PAM type: YTN; PAM sequence: CTG
  source 1..20: mol_type = other DNA
attcagtaaatgctatcact

SEQ ID NO: 25360 - DNA, 20 bp, synthetic construct
  misc_feature 1..20: note = Description of Artificial Sequence: Synthetic oligonucleotide
  misc_feature 1..20: note = Target: FXN; (-) strand; PAM type: YTN; PAM sequence: TTC
  source 1..20: mol_type = other DNA
tgattcagtaaatgctatca

SEQ ID NO: 25361 - DNA, 20 bp, synthetic construct
  misc_feature 1..20: note = Description of Artificial Sequence: Synthetic oligonucleotide
  misc_feature 1..20: note = Target: FXN; (-) strand; PAM type: YTN; PAM sequence: TTA
  source 1..20: mol_type = other DNA
ttctgattcagtaaatgcta

SEQ ID NO: 25362 - DNA, 20 bp, synthetic construct
  misc_feature 1..20: note = Description of Artificial Sequence: Synthetic oligonucleotide
  misc_feature 1..20: note = Target: FXN; (-) strand; PAM type: YTN; PAM sequence: CTC
  source 1..20: mol_type = other DNA
aaagaaaaccccaaaaaaca

SEQ ID NO: 25363 - DNA, 20 bp, synthetic construct
  misc_feature 1..20: note = Description of Artificial Sequence: Synthetic oligonucleotide
  misc_feature 1..20: note = Target: FXN; (-) strand; PAM type: YTN; PAM sequence: CTC
  source 1..20: mol_type = other DNA
cgtctcaaagaaaaccccaa

SEQ ID NO: 25364 - DNA, 20 bp, synthetic construct
  misc_feature 1..20: note = Description of Artificial Sequence: Synthetic oligonucleotide
  misc_feature 1..20: note = Target: FXN; (-) strand; PAM type: YTN; PAM sequence: CTG
  source 1..20: mol_type = other DNA
ggcaacaagagcaaaactcc

SEQ ID NO: 25365 - DNA, 20 bp, synthetic construct
  misc_feature 1..20: note = Description of Artificial Sequence: Synthetic oligonucleotide
  misc_feature 1..20: note = Target: FXN; (-) strand; PAM type: YTN; PAM sequence: CTC
  source 1..20: mol_type = other DNA
cagcctgggcaacaagagca

SEQ ID NO: 25366 - DNA, 20 bp, synthetic construct
  misc_feature 1..20: note = Description of Artificial Sequence: Synthetic oligonucleotide
  misc_feature 1..20: note = Target: FXN; (-) strand; PAM type: YTN; PAM sequence: CTG
  source 1..20: mol_type = other DNA
cactccagcctgggcaacaa

SEQ ID NO: 25367 - DNA, 20 bp, synthetic construct
  misc_feature 1..20: note = Description of Artificial Sequence: Synthetic oligonucleotide
  misc_feature 1..20: note = Target: FXN; (-) strand; PAM type: YTN; PAM sequence: CTG
  source 1..20: mol_type = other DNA
aggtggcaccactgcactcc

SEQ ID NO: 25368 - DNA, 20 bp, synthetic construct
  misc_feature 1..20: note = Description of Artificial Sequence: Synthetic oligonucleotide
  misc_feature 1..20: note = Target: FXN; (-) strand; PAM type: YTN; PAM sequence: TTG
  source 1..20: mol_type = other DNA
cagtgagctgaggtggcacc

SEQ ID NO: 25369 - DNA, 20 bp, synthetic construct
  misc_feature 1..20: note = Description of Artificial Sequence: Synthetic oligonucleotide
  misc_feature 1..20: note = Target: FXN; (-) strand; PAM type: YTN; PAM sequence: TTG
  source 1..20: mol_type = other DNA
aatccagggggcggaggttg

SEQ ID NO: 25370 - DNA, 20 bp, synthetic construct
  misc_feature 1..20: note = Description of Artificial Sequence: Synthetic oligonucleotide
  misc_feature 1..20: note = Target: FXN; (-) strand; PAM type: YTN; PAM sequence: CTT
  source 1..20: mol_type = other DNA
gaatccagggggcggaggtt

SEQ ID NO: 25371 - DNA, 20 bp, synthetic construct
  misc_feature 1..20: note = Description of Artificial Sequence: Synthetic oligonucleotide
  misc_feature 1..20: note = Target: FXN; (-) strand; PAM type: YTN; PAM sequence: CTC
  source 1..20: mol_type = other DNA
ttgaatccagggggcggagg

SEQ ID NO: 25372 - DNA, 20 bp, synthetic construct
  misc_feature 1..20: note = Description of Artificial Sequence: Synthetic oligonucleotide
  misc_feature 1..20: note = Target: FXN; (-) strand; PAM type: YTN; PAM sequence: CTG
  source 1..20: mol_type = other DNA
aggcaggataatctcttgaa

SEQ ID NO: 25373 - DNA, 20 bp, synthetic construct
  misc_feature 1..20: note = Description of Artificial Sequence: Synthetic oligonucleotide
  misc_feature 1..20: note = Target: FXN; (-) strand; PAM type: YTN; PAM sequence: CTC
  source 1..20: mol_type = other DNA
gggaggctgaggcaggataa

SEQ ID NO: 25374 - DNA, 20 bp, synthetic construct
  misc_feature 1..20: note = Description of Artificial Sequence: Synthetic oligonucleotide
  misc_feature 1..20: note = Target: FXN; (-) strand; PAM type: YTN; PAM sequence: CTA
  source 1..20: mol_type = other DNA
ctcgggaggctgaggcagga

SEQ ID NO: 25375 - DNA, 20 bp, synthetic construct
  misc_feature 1..20: note = Description of Artificial Sequence: Synthetic oligonucleotide
  misc_feature 1..20: note = Target: FXN; (-) strand; PAM type: YTN; PAM sequence: CTG
  source 1..20: mol_type = other DNA
taatcccagctactcgggag

SEQ ID NO: 25376 - DNA, 20 bp, synthetic construct
  misc_feature 1..20: note = Description of Artificial Sequence: Synthetic oligonucleotide
  misc_feature 1..20: note = Target: FXN; (-) strand; PAM type: YTN; PAM sequence: CTG
  source 1..20: mol_type = other DNA
ggcatggtggggcgagcctg

SEQ ID NO: 25377 - DNA, 20 bp, synthetic construct
  misc_feature 1..20: note = Description of Artificial Sequence: Synthetic oligonucleotide
  misc_feature 1..20: note = Target: FXN; (-) strand; PAM type: YTN; PAM sequence: TTA
  source 1..20: mol_type = other DNA
gctgggcatggtggggcgag

SEQ ID NO: 25378 - DNA, 20 bp, synthetic construct
  misc_feature 1..20: note = Description of Artificial Sequence: Synthetic oligonucleotide
  misc_feature 1..20: note = Target: FXN; (-) strand; PAM type: YTN; PAM sequence: CTA
  source 1..20: mol_type = other DNA
aaaatacaaaaattagctgg

SEQ ID NO: 25379 - DNA, 20 bp, synthetic construct
  misc_feature 1..20: note = Description of Artificial Sequence: Synthetic oligonucleotide
  misc_feature 1..20: note = Target: FXN; (-) strand; PAM type: YTN; PAM sequence: CTA
  source 1..20: mol_type = other DNA
ctaaaaatacaaaaattagc

SEQ ID NO: 25380 - DNA, 20 bp, synthetic construct
  misc_feature 1..20: note = Description of Artificial Sequence: Synthetic oligonucleotide
  misc_feature 1..20: note = Target: FXN; (-) strand; PAM type: YTN; PAM sequence: CTC
  source 1..20: mol_type = other DNA
tactaaaaatacaaaaatta

SEQ ID NO: 25381 - DNA, 20 bp, synthetic construct
  misc_feature 1..20: note = Description of Artificial Sequence: Synthetic oligonucleotide
  misc_feature 1..20: note = Target: FXN; (-) strand; PAM type: YTN; PAM sequence: CTC
  source 1..20: mol_type = other DNA
gcctctactaaaaatacaaa

SEQ ID NO: 25382 - DNA, 20 bp, synthetic construct
  misc_feature 1..20: note = Description of Artificial Sequence: Synthetic oligonucleotide
  misc_feature 1..20: note = Target: FXN; (-) strand; PAM type: YTN; PAM sequence: CTG
  source 1..20: mol_type = other DNA
acatggtgaaacctcgcctc

SEQ ID NO: 25383 - DNA, 20 bp, synthetic construct
  misc_feature 1..20: note = Description of Artificial Sequence: Synthetic oligonucleotide
  misc_feature 1..20: note = Target: FXN; (-) strand; PAM type: YTN; PAM sequence: CTG
  source 1..20: mol_type = other DNA
gctgacatggtgaaacctcg

SEQ ID NO: 25384 - DNA, 20 bp, synthetic construct
  misc_feature 1..20: note = Description of Artificial Sequence: Synthetic oligonucleotide
  misc_feature 1..20: note = Target: FXN; (-) strand; PAM type: YTN; PAM sequence: TTC
  source 1..20: mol_type = other DNA
aagaccagcctggctgacat

SEQ ID NO: 25385 - DNA, 20 bp, synthetic construct
  misc_feature 1..20: note = Description of Artificial Sequence: Synthetic oligonucleotide
  misc_feature 1..20: note = Target: FXN; (-) strand; PAM type: YTN; PAM sequence: CTG
  source 1..20: mol_type = other DNA
aggtcaggagttcaagacca

SEQ ID NO: 25386 - DNA, 20 bp, synthetic construct
  misc_feature 1..20: note = Description of Artificial Sequence: Synthetic oligonucleotide
  misc_feature 1..20: note = Target: FXN; (-) strand; PAM type: YTN; PAM sequence: CTG
  source 1..20: mol_type = other DNA
aggcgggtggatcacctgag

SEQ ID NO: 25387 - DNA, 20 bp, synthetic construct
  misc_feature 1..20: note = Description of Artificial Sequence: Synthetic oligonucleotide
  misc_feature 1..20: note = Target: FXN; (-) strand; PAM type: YTN; PAM sequence: TTG
  source 1..20: mol_type = other DNA
ggaggctgaggcgggtggat

SEQ ID NO: 25388 - DNA, 20 bp, synthetic construct
  misc_feature 1..20: note = Description of Artificial Sequence: Synthetic oligonucleotide
  misc_feature 1..20: note = Target: FXN; (-) strand; PAM type: YTN; PAM sequence: TTT
  source 1..20: mol_type = other DNA
gggaggctgaggcgggtgga

SEQ ID NO: 25389 - DNA, 20 bp, synthetic construct
  misc_feature 1..20: note = Description of Artificial Sequence: Synthetic oligonucleotide
  misc_feature 1..20: note = Target: FXN; (-) strand; PAM type: YTN; PAM sequence: TTT
  source 1..20: mol_type = other DNA
tgggaggctgaggcgggtgg

SEQ ID NO: 25390 - DNA, 20 bp, synthetic construct
  misc_feature 1..20: note = Description of Artificial Sequence: Synthetic oligonucleotide
  misc_feature 1..20: note = Target: FXN; (-) strand; PAM type: YTN; PAM sequence: CTA
  source 1..20: mol_type = other DNA
gcattttgggaggctgaggc

SEQ ID NO: 25391 - DNA, 20 bp, synthetic construct
  misc_feature 1..20: note = Description of Artificial Sequence: Synthetic oligonucleotide
  misc_feature 1..20: note = Target: FXN; (-) strand; PAM type: YTN; PAM sequence: CTG
  source 1..20: mol_type = other DNA
taatcctagcattttgggag

SEQ ID NO: 25392 - DNA, 20 bp, synthetic construct
  misc_feature 1..20: note = Description of Artificial Sequence: Synthetic oligonucleotide
  misc_feature 1..20: note = Target: FXN; (-) strand; PAM type: YTN; PAM sequence: CTC
  source 1..20: mol_type = other DNA
acgcctgtaatcctagcatt

SEQ ID NO: 25393 - DNA, 20 bp, synthetic construct
  misc_feature 1..20: note = Description of Artificial Sequence: Synthetic oligonucleotide
  misc_feature 1..20: note = Target: FXN; (-) strand; PAM type: YTN; PAM sequence: CTG
  source 1..20: mol_type = other DNA
gtggctcacgcctgtaatcc

SEQ ID NO: 25394 - DNA, 20 bp, synthetic construct
  misc_feature 1..20: note = Description of Artificial Sequence: Synthetic oligonucleotide
  misc_feature 1..20: note = Target: FXN; (-) strand; PAM type: YTN; PAM sequence: CTG
  source 1..20: mol_type = other DNA
ggcctggtggctcacgcctg

SEQ ID NO: 25395 - DNA, 20 bp, synthetic construct
  misc_feature 1..20: note = Description of Artificial Sequence: Synthetic oligonucleotide
  misc_feature 1..20: note = Target: FXN; (-) strand; PAM type: YTN; PAM sequence: CTC
  source 1..20: mol_type = other DNA
aaaaaaagaaaaaaaaaaaa

SEQ ID NO: 25396 - DNA, 20 bp, synthetic construct
  misc_feature 1..20: note = Description of Artificial Sequence: Synthetic oligonucleotide
  misc_feature 1..20: note = Target: FXN; (-) strand; PAM type: YTN; PAM sequence: CTC
  source 1..20: mol_type = other DNA
cgtctcaaaaaaagaaaaaa

SEQ ID NO: 25397 - DNA, 20 bp, synthetic construct
  misc_feature 1..20: note = Description of Artificial Sequence: Synthetic oligonucleotide
  misc_feature 1..20: note = Target: FXN; (-) strand; PAM type: YTN; PAM sequence: CTG
  source 1..20: mol_type = other DNA
ggtgacagagtgagactccg

SEQ ID NO: 25398 - DNA, 20 bp, synthetic construct
  misc_feature 1..20: note = Description of Artificial Sequence: Synthetic oligonucleotide
  misc_feature 1..20: note = Target: FXN; (-) strand; PAM type: YTN; PAM sequence: CTC
  source 1..20: mol_type = other DNA
cagcctgggtgacagagtga

SEQ ID NO: 25399 - DNA, 20 bp, synthetic construct
  misc_feature 1..20: note = Description of Artificial Sequence: Synthetic oligonucleotide
  misc_feature 1..20: note = Target: FXN; (-) strand; PAM type: YTN; PAM sequence: CTG
  source 1..20: mol_type = other DNA
cactccagcctgggtgacag

SEQ ID NO: 25400 - DNA, 20 bp, synthetic construct
  misc_feature 1..20: note = Description of Artificial Sequence: Synthetic oligonucleotide
  misc_feature 1..20: note = Target: FXN; (-) strand; PAM type: YTN; PAM sequence: TTG
  source 1..20: mol_type = other DNA
tgccactgcactccagcctg

SEQ ID NO: 25401 - DNA, 20 bp, synthetic construct
  misc_feature 1..20: note = Description of Artificial Sequence: Synthetic oligonucleotide
  misc_feature 1..20: note = Target: FXN; (-) strand; PAM type: YTN; PAM sequence: CTG
  source 1..20: mol_type = other DNA
acattgtgccactgcactcc

SEQ ID NO: 25402 - DNA, 20 bp, synthetic construct
  misc_feature 1..20: note = Description of Artificial Sequence: Synthetic oligonucleotide
  misc_feature 1..20: note = Target: FXN; (-) strand; PAM type: YTN; PAM sequence: TTG
  source 1..20: mol_type = other DNA
caatgagctgacattgtgcc

SEQ ID NO: 25403 - DNA, 20 bp, synthetic construct
  misc_feature 1..20: note = Description of Artificial Sequence: Synthetic oligonucleotide
  misc_feature 1..20: note = Target: FXN; (-) strand; PAM type: YTN; PAM sequence: CTG
  source 1..20: mol_type = other DNA
aaaccccggaggtggaggtt

SEQ ID NO: 25404 - DNA, 20 bp, synthetic construct
  misc_feature 1..20: note = Description of Artificial Sequence: Synthetic oligonucleotide
  misc_feature 1..20: note = Target: FXN; (-) strand; PAM type: YTN; PAM sequence: CTG
  source 1..20: mol_type = other DNA
agacaggagaatcactgaaa

SEQ ID NO: 25405 - DNA, 20 bp, synthetic construct
  misc_feature 1..20: note = Description of Artificial Sequence: Synthetic oligonucleotide
  misc_feature 1..20: note = Target: FXN; (-) strand; PAM type: YTN; PAM sequence: TTG
  source 1..20: mol_type = other DNA
ggaggctgagacaggagaat

SEQ ID NO: 25406 - DNA, 20 bp, synthetic construct
  misc_feature 1..20: note = Description of Artificial Sequence: Synthetic oligonucleotide
  misc_feature 1..20: note = Target: FXN; (-) strand; PAM type: YTN; PAM sequence: CTT
  source 1..20: mol_type = other DNA
gggaggctgagacaggagaa

SEQ ID NO: 25407 - DNA, 20 bp, synthetic construct
  misc_feature 1..20: note = Description of Artificial Sequence: Synthetic oligonucleotide
  misc_feature 1..20: note = Target: FXN; (-) strand; PAM type: YTN; PAM sequence: CTA
  source 1..20: mol_type = other DNA
cttgggaggctgagacagga

SEQ ID NO: 25408 - DNA, 20 bp, synthetic construct
  misc_feature 1..20: note = Description of Artificial Sequence: Synthetic oligonucleotide
  misc_feature 1..20: note = Target: FXN; (-) strand; PAM type: YTN; PAM sequence: TTC
  source 1..20: mol_type = other DNA
ccagctacttgggaggctga

SEQ ID NO: 25409 - DNA, 20 bp, synthetic construct
  misc_feature 1..20: note = Description of Artificial Sequence: Synthetic oligonucleotide
  misc_feature 1..20: note = Target: FXN; (-) strand; PAM type: YTN; PAM sequence: CTG
  source 1..20: mol_type = other DNA
tagttcccagctacttggga

SEQ ID NO: 25410 - DNA, 20 bp, synthetic construct
  misc_feature 1..20: note = Description of Artificial Sequence: Synthetic oligonucleotide
  misc_feature 1..20: note = Target: FXN; (-) strand; PAM type: YTN; PAM sequence: TTG
  source 1..20: mol_type = other DNA
tggtgcacgcctgtagttcc

SEQ ID NO: 25411 - DNA, 20 bp, synthetic construct
  misc_feature 1..20: note = Description of Artificial Sequence: Synthetic oligonucleotide
  misc_feature 1..20: note = Target: FXN; (-) strand; PAM type: YTN; PAM sequence: CTT
  source 1..20: mol_type = other DNA
gtggtgcacgcctgtagttc

SEQ ID NO: 25412 - DNA, 20 bp, synthetic construct
  misc_feature 1..20: note = Description of Artificial Sequence: Synthetic oligonucleotide
  misc_feature 1..20: note = Target: FXN; (-) strand; PAM type: YTN; PAM sequence: CTG
  source 1..20: mol_type = other DNA
ggcttgtggtgcacgcctgt

SEQ ID NO: 25413 - DNA, 20 bp, synthetic construct
  misc_feature 1..20: note = Description of Artificial Sequence: Synthetic oligonucleotide
  misc_feature 1..20: note = Target: FXN; (-) strand; PAM type: YTN; PAM sequence: TTA
  source 1..20: mol_type = other DNA
gctgggcttgtggtgcacgc

SEQ ID NO: 25414 - DNA, 20 bp, synthetic construct
  misc_feature 1..20: note = Description of Artificial Sequence: Synthetic oligonucleotide
  misc_feature 1..20: note = Target: FXN; (-) strand; PAM type: YTN; PAM sequence: CTA
  source 1..20: mol_type = other DNA
aaaatacaaaaattagctgg

SEQ ID NO: 25415 - DNA, 20 bp, synthetic construct
  misc_feature 1..20: note = Description of Artificial Sequence: Synthetic oligonucleotide
  misc_feature 1..20: note = Target: FXN; (-) strand; PAM type: YTN; PAM sequence: CTA
  source 1..20: mol_type = other DNA
ctaaaaatacaaaaattagc

SEQ ID NO: 25416 - DNA, 20 bp, synthetic construct
  misc_feature 1..20: note = Description of Artificial Sequence: Synthetic oligonucleotide
  misc_feature 1..20: note = Target: FXN; (-) strand; PAM type: YTN; PAM sequence: CTC
  source 1..20: mol_type = other DNA
tactaaaaatacaaaaatta

SEQ ID NO: 25417 - DNA, 20 bp, synthetic construct
  misc_feature 1..20: note = Description of Artificial Sequence: Synthetic oligonucleotide
  misc_feature 1..20: note = Target: FXN; (-) strand; PAM type: YTN; PAM sequence: CTG
  source 1..20: mol_type = other DNA
tctctactaaaaatacaaaa

SEQ ID NO: 25418 - DNA, 20 bp, synthetic construct
  misc_feature 1..20: note = Description of Artificial Sequence: Synthetic oligonucleotide
  misc_feature 1..20: note = Target: FXN; (-) strand; PAM type: YTN; PAM sequence: CTA
  source 1..20: mol_type = other DNA
gccaggccaatatggcaaaa

SEQ ID NO: 25419 - DNA, 20 bp, synthetic construct
  misc_feature 1..20: note = Description of Artificial Sequence: Synthetic oligonucleotide
  misc_feature 1..20: note = Target: FXN; (-) strand; PAM type: YTN; PAM sequence: TTG
  source 1..20: mol_type = other DNA
aaactagccaggccaatatg

SEQ ID NO: 25420 - DNA, 20 bp, synthetic construct
  misc_feature 1..20: note = Description of Artificial Sequence: Synthetic oligonucleotide
  misc_feature 1..20: note = Target: FXN; (-) strand; PAM type: YTN; PAM sequence: TTT
  source 1..20: mol_type = other DNA
gaaactagccaggccaatat

SEQ ID NO: 25421 - DNA, 20 bp, synthetic construct
  misc_feature 1..20: note = Description of Artificial Sequence: Synthetic oligonucleotide
  misc_feature 1..20: note = Target: FXN; (-) strand; PAM type: YTN; PAM sequence: CTG
  source 1..20: mol_type = other DNA
aggtcaggagtttgaaacta

SEQ ID NO: 25422 - DNA, 20 bp, synthetic construct
  misc_feature 1..20: note = Description of Artificial Sequence: Synthetic oligonucleotide
  misc_feature 1..20: note = Target: FXN; (-) strand; PAM type: YTN; PAM sequence: CTC
  source 1..20: mol_type = other DNA
acctgaggtcaggagtttga

SEQ ID NO: 25423 - DNA, 20 bp, synthetic construct
  misc_feature 1..20: note = Description of Artificial Sequence: Synthetic oligonucleotide
  misc_feature 1..20: note = Target: FXN; (-) strand; PAM type: YTN; PAM sequence: TTC
  source 1..20: mol_type = other DNA
ggaggccgaggtaggtggct

SEQ ID NO: 25424 - DNA, 20 bp, synthetic construct
  misc_feature 1..20: note = Description of Artificial Sequence: Synthetic oligonucleotide
  misc_feature 1..20: note = Target: FXN; (-) strand; PAM type: YTN; PAM sequence: TTT
  source 1..20: mol_type = other DNA
cggaggccgaggtaggtggc

SEQ ID NO: 25425 - DNA, 20 bp, synthetic construct
  misc_feature 1..20: note = Description of Artificial Sequence: Synthetic oligonucleotide
  misc_feature 1..20: note = Target: FXN; (-) strand; PAM type: YTN; PAM sequence: CTT
  source 1..20: mol_type = other DNA
tcggaggccgaggtaggtgg

SEQ ID NO: 25426 - DNA, 20 bp, synthetic construct
  misc_feature 1..20: note = Description of Artificial Sequence: Synthetic oligonucleotide
  misc_feature 1..20: note = Target: FXN; (-) strand; PAM type: YTN; PAM sequence: CTG
  source 1..20: mol_type = other DNA
taatcccaggactttcggag

SEQ ID NO: 25427 - DNA, 20 bp, synthetic construct
  misc_feature 1..20: note = Description of Artificial Sequence: Synthetic oligonucleotide
  misc_feature 1..20: note = Target: FXN; (-) strand; PAM type: YTN; PAM sequence: CTC
  source 1..20: mol_type = other DNA
acgtctgtaatcccaggact

SEQ ID NO: 25428 - DNA, 20 bp, synthetic construct
  misc_feature 1..20: note = Description of Artificial Sequence: Synthetic oligonucleotide
  misc_feature 1..20: note = Target: FXN; (-) strand; PAM type: YTN; PAM sequence: CTG
  source 1..20: mol_type = other DNA
ggccaggcagtgcagtggct

SEQ ID NO: 25429 - DNA, 20 bp, synthetic construct
  misc_feature 1..20: note = Description of Artificial Sequence: Synthetic oligonucleotide
  misc_feature 1..20: note = Target: FXN; (-) strand; PAM type: YTN; PAM sequence: TTC
  source 1..20: mol_type = other DNA
tgggccaggcagtgcagtgg

SEQ ID NO: 25430 - DNA, 20 bp, synthetic construct
  misc_feature 1..20: note = Description of Artificial Sequence: Synthetic oligonucleotide
  misc_feature 1..20: note = Target: FXN; (-) strand; PAM type: YTN; PAM sequence: TTT
  source 1..20: mol_type = other DNA
ctgggccaggcagtgcagtg

SEQ ID NO: 25431 - DNA, 20 bp, synthetic construct
  misc_feature 1..20: note = Description of Artificial Sequence: Synthetic oligonucleotide
  misc_feature 1..20: note = Target: FXN; (-) strand; PAM type: YTN; PAM sequence: CTT
  source 1..20: mol_type = other DNA
tctgggccaggcagtgcagt

SEQ ID NO: 25432 - DNA, 20 bp, synthetic construct
  misc_feature 1..20: note = Description of Artificial Sequence: Synthetic oligonucleotide
  misc_feature 1..20: note = Target: FXN; (-) strand; PAM type: YTN; PAM sequence: TTA
  source 1..20: mol_type = other DNA
atagtcctttctgggccagg

SEQ ID NO: 25433 - DNA, 20 bp, synthetic construct
  misc_feature 1..20: note = Description of Artificial Sequence: Synthetic oligonucleotide
  misc_feature 1..20: note = Target: FXN; (-) strand; PAM type: YTN; PAM sequence: CTA
  source 1..20: mol_type = other DNA
caattaatagtcctttctgg

SEQ ID NO: 25434 - DNA, 20 bp, synthetic construct
  misc_feature 1..20: note = Description of Artificial Sequence: Synthetic oligonucleotide
  misc_feature 1..20: note = Target: FXN; (-) strand; PAM type: YTN; PAM sequence: TTC
  source 1..20: mol_type = other DNA
ccagaggcaactacaattaa

SEQ ID NO: 25435 - DNA, 20 bp, synthetic construct
  misc_feature 1..20: note = Description of Artificial Sequence: Synthetic oligonucleotide
  misc_feature 1..20: note = Target: FXN; (-) strand; PAM type: YTN; PAM sequence: TTA
  source 1..20: mol_type = other DNA
cagaaagaagcaggcagccc

SEQ ID NO: 25436 - DNA, 20 bp, synthetic construct
  misc_feature 1..20: note = Description of Artificial Sequence: Synthetic oligonucleotide
  misc_feature 1..20: note = Target: FXN; (-) strand; PAM type: YTN; PAM sequence: TTA
  source 1..20: mol_type = other DNA
aacagcacagaaggggttac

SEQ ID NO: 25437 - DNA, 20 bp, synthetic construct
  misc_feature 1..20: note = Description of Artificial Sequence: Synthetic oligonucleotide
  misc_feature 1..20: note = Target: FXN; (-) strand; PAM type: YTN; PAM sequence: TTT
  source 1..20: mol_type = other DNA
aaacagcacagaaggggtta

SEQ ID NO: 25438 - DNA, 20 bp, synthetic construct
  misc_feature 1..20: note = Description of Artificial Sequence: Synthetic oligonucleotide
  misc_feature 1..20: note = Target: FXN; (-) strand; PAM type: YTN; PAM sequence: CTC
  source 1..20: mol_type = other DNA
aaaaaaaaaaaaaaaaaaaa

SEQ ID NO: 25439 - DNA, 20 bp, synthetic construct
  misc_feature 1..20: note = Description of Artificial Sequence: Synthetic oligonucleotide
  misc_feature 1..20: note = Target: FXN; (-) strand; PAM type: YTN; PAM sequence: CTG
  source 1..20: mol_type = other DNA
tctcaaaaaaaaaaaaaaaa

SEQ ID NO: 25440 - DNA, 20 bp, synthetic construct
  misc_feature 1..20: note = Description of Artificial Sequence: Synthetic oligonucleotide
  misc_feature 1..20: note = Target: FXN; (-) strand; PAM type: YTN; PAM sequence: CTC
  source 1..20: mol_type = other DNA
tgtctcaaaaaaaaaaaaaa

SEQ ID NO: 25441 - DNA, 20 bp, synthetic construct
  misc_feature 1..20: note = Description of Artificial Sequence: Synthetic oligonucleotide
  misc_feature 1..20: note = Target: FXN; (-) strand; PAM type: YTN; PAM sequence: CTG
  source 1..20: mol_type = other DNA
ggcgacagagcgagactctg

SEQ ID NO: 25442 - DNA, 20 bp, synthetic construct
  misc_feature 1..20: note = Description of Artificial Sequence: Synthetic oligonucleotide
  misc_feature 1..20: note = Target: FXN; (-) strand; PAM type: YTN; PAM sequence: CTC
  source 1..20: mol_type = other DNA
cagcctgggcgacagagcga

SEQ ID NO: 25443 - DNA, 20 bp, synthetic construct
  misc_feature 1..20: note = Description of Artificial Sequence: Synthetic oligonucleotide
  misc_feature 1..20: note = Target: FXN; (-) strand; PAM type: YTN; PAM sequence: CTG
  source 1..20: mol_type = other DNA
cactccagcctgggcgacag

SEQ ID NO: 25444 - DNA, 20 bp, synthetic construct
  misc_feature 1..20: note = Description of Artificial Sequence: Synthetic oligonucleotide
  misc_feature 1..20: note = Target: FXN; (-) strand; PAM type: YTN; PAM sequence: TTG
  source 1..20: mol_type = other DNA
cgccactgcactccagcctg

SEQ ID NO: 25445 - DNA, 20 bp, synthetic construct
  misc_feature 1..20: note = Description of Artificial Sequence: Synthetic oligonucleotide
  misc_feature 1..20: note = Target: FXN; (-) strand; PAM type: YTN; PAM sequence: TTG
  source 1..20: mol_type = other DNA
cagtgagccgagattgcgcc

SEQ ID NO: 25446 - DNA, 20 bp, synthetic construct
  misc_feature 1..20: note = Description of Artificial Sequence: Synthetic oligonucleotide
  misc_feature 1..20: note = Target: FXN; (-) strand; PAM type: YTN; PAM sequence: CTT
  source 1..20: mol_type = other DNA
gcagtgagccgagattgcgc

SEQ ID NO: 25447 - DNA, 20 bp, synthetic construct
  misc_feature 1..20: note = Description of Artificial Sequence: Synthetic oligonucleotide
  misc_feature 1..20: note = Target: FXN; (-) strand; PAM type: YTN; PAM sequence: CTG
  source 1..20: mol_type = other DNA
ggaggcggagcttgcagtga

SEQ ID NO: 25448 - DNA, 20 bp, synthetic construct
  misc_feature 1..20: note = Description of Artificial Sequence: Synthetic oligonucleotide
  misc_feature 1..20: note = Target: FXN; (-) strand; PAM type: YTN; PAM sequence: CTG
  source 1..20: mol_type = other DNA
aggcaggagaatggcgtgaa

SEQ ID NO: 25449 - DNA, 20 bp, synthetic construct
  misc_feature 1..20: note = Description of Artificial Sequence: Synthetic oligonucleotide
  misc_feature 1..20: note = Target: FXN; (-) strand; PAM type: YTN; PAM sequence: CTC
  source 1..20: mol_type = other DNA
aggaggctgaggcaggagaa

SEQ ID NO: 25450 - DNA, 20 bp, synthetic construct
  misc_feature 1..20: note = Description of Artificial Sequence: Synthetic oligonucleotide
  misc_feature 1..20: note = Target: FXN; (-) strand; PAM type: YTN; PAM sequence: CTA
  source 1..20: mol_type = other DNA
ctcaggaggctgaggcagga

SEQ ID NO: 25451 - DNA, 20 bp, synthetic construct
  misc_feature 1..20: note = Description of Artificial Sequence: Synthetic oligonucleotide
  misc_feature 1..20: note = Target: FXN; (-) strand; PAM type: YTN; PAM sequence: CTG
  source 1..20: mol_type = other DNA
tagtcccagctactcaggag

SEQ ID NO: 25452 - DNA, 20 bp, synthetic construct
  misc_feature 1..20: note = Description of Artificial Sequence: Synthetic oligonucleotide
  misc_feature 1..20: note = Target: FXN; (-) strand; PAM type: YTN; PAM sequence: TTA
  source 1..20: mol_type = other DNA
gccgggcgtggtgacgggtg

SEQ ID NO: 25453 - DNA, 20 bp, synthetic construct
  misc_feature 1..20: note = Description of Artificial Sequence: Synthetic oligonucleotide
  misc_feature 1..20: note = Target: FXN; (-) strand; PAM type: YTN; PAM sequence: CTG
  source 1..20: mol_type = other DNA
aaaatacaaaaaattagccg

SEQ ID NO: 25454 - DNA, 20 bp, synthetic construct
  misc_feature 1..20: note = Description of Artificial Sequence: Synthetic oligonucleotide
  misc_feature 1..20: note = Target: FXN; (-) strand; PAM type: YTN; PAM sequence: CTA
  source 1..20: mol_type = other DNA
ctgaaaatacaaaaaattag

SEQ ID NO: 25455 - DNA, 20 bp, synthetic construct
  misc_feature 1..20: note = Description of Artificial Sequence: Synthetic oligonucleotide
  misc_feature 1..20: note = Target: FXN; (-) strand; PAM type: YTN; PAM sequence: CTC
  source 1..20: mol_type = other DNA
tactgaaaatacaaaaaatt

SEQ ID NO: 25456 - DNA, 20 bp, synthetic construct
  misc_feature 1..20: note = Description of Artificial Sequence: Synthetic oligonucleotide
  misc_feature 1..20: note = Target: FXN; (-) strand; PAM type: YTN; PAM sequence: CTA
  source 1..20: mol_type = other DNA
acatggtgaaaccccgtctc

SEQ ID NO: 25457 - DNA, 20 bp, synthetic construct
  misc_feature 1..20: note = Description of Artificial Sequence: Synthetic oligonucleotide
  misc_feature 1..20: note = Target: FXN; (-) strand; PAM type: YTN; PAM sequence: CTG
  source 1..20: mol_type = other DNA
gctaacatggtgaaaccccg

SEQ ID NO: 25458 - DNA, 20 bp, synthetic construct
  misc_feature 1..20: note = Description of Artificial Sequence: Synthetic oligonucleotide
  misc_feature 1..20: note = Target: FXN; (-) strand; PAM type: YTN; PAM sequence: CTG
  source 1..20: mol_type = other DNA
ggaggccgaggcaggcagat

SEQ ID NO: 25459 - DNA, 20 bp, synthetic construct
  misc_feature 1..20: note = Description of Artificial Sequence: Synthetic oligonucleotide
  misc_feature 1..20: note = Target: FXN; (-) strand; PAM type: YTN; PAM sequence: CTC
  source 1..20: mol_type = other DNA
tgggaggccgaggcaggcag

SEQ ID NO: 25460 - DNA, 20 bp, synthetic construct
  misc_feature 1..20: note = Description of Artificial Sequence: Synthetic oligonucleotide
  misc_feature 1..20: note = Target: FXN; (-) strand; PAM type: YTN; PAM sequence: CTG
  source 1..20: mol_type = other DNA
taatcccagcactctgggag

SEQ ID NO: 25461 - DNA, 20 bp, synthetic construct
  misc_feature 1..20: note = Description of Artificial Sequence: Synthetic oligonucleotide
  misc_feature 1..20: note = Target: FXN; (-) strand; PAM type: YTN; PAM sequence: CTC
  source 1..20: mol_type = other DNA
atgcctgtaatcccagcact

SEQ ID NO: 25462 - DNA, 20 bp, synthetic construct
  misc_feature 1..20: note = Description of Artificial Sequence: Synthetic oligonucleotide
  misc_feature 1..20: note = Target: FXN; (-) strand; PAM type: YTN; PAM sequence: TTA
  source 1..20: mol_type = other DNA
aaggccgggcgtggtagctc

SEQ ID NO: 25463 - DNA, 20 bp, synthetic construct
  misc_feature 1..20: note = Description of Artificial Sequence: Synthetic oligonucleotide
  misc_feature 1..20: note = Target: FXN; (-) strand; PAM type: YTN; PAM sequence: TTT
  source 1..20: mol_type = other DNA
aaaggccgggcgtggtagct

SEQ ID NO: 25464 - DNA, 20 bp, synthetic construct
  misc_feature 1..20: note = Description of Artificial Sequence: Synthetic oligonucleotide
  misc_feature 1..20: note = Target: FXN; (-) strand; PAM type: YTN; PAM sequence: TTA
  source 1..20: mol_type = other DNA
caggcgtaaggcaccgtgcc

SEQ ID NO: 25465 - DNA, 20 bp, synthetic construct
  misc_feature 1..20: note = Description of Artificial Sequence: Synthetic oligonucleotide
  misc_feature 1..20: note = Target: FXN; (-) strand; PAM type: YTN; PAM sequence: TTA
  source 1..20: mol_type = other DNA
ggattacaggcgtaaggcac

SEQ ID NO: 25466 - DNA, 20 bp, synthetic construct
  misc_feature 1..20: note = Description of Artificial Sequence: Synthetic oligonucleotide
  misc_feature 1..20: note = Target: FXN; (-) strand; PAM type: YTN; PAM sequence: CTC
  source 1..20: mol_type = other DNA
gaaatgttaggattacaggc

SEQ ID NO: 25467 - DNA, 20 bp, synthetic construct
  misc_feature 1..20: note = Description of Artificial Sequence: Synthetic oligonucleotide
  misc_feature 1..20: note = Target: FXN; (-) strand; PAM type: YTN; PAM sequence: TTC
  source 1..20: mol_type = other DNA
tcgaaatgttaggattacag

SEQ ID NO: 25468 - DNA, 20 bp, synthetic construct
  misc_feature 1..20: note = Description of Artificial Sequence: Synthetic oligonucleotide
  misc_feature 1..20: note = Target: FXN; (-) strand; PAM type: YTN; PAM sequence: CTT
  source 1..20: mol_type = other DNA
ctcgaaatgttaggattaca

SEQ ID NO: 25469 - DNA, 20 bp, synthetic construct
  misc_feature 1..20: note = Description of Artificial Sequence: Synthetic oligonucleotide
  misc_feature 1..20: note = Target: FXN; (-) strand; PAM type: YTN; PAM sequence: CTC
  source 1..20: mol_type = other DNA
agcttctcgaaatgttagga

SEQ ID NO: 25470 - DNA, 20 bp, synthetic construct
  misc_feature 1..20: note = Description of Artificial Sequence: Synthetic oligonucleotide
  misc_feature 1..20: note = Target: FXN; (-) strand; PAM type: YTN; PAM sequence: CTC
  source 1..20: mol_type = other DNA
gtgacatcaagtgatccacc

SEQ ID NO: 25471 - DNA, 20 bp, synthetic construct
  misc_feature 1..20: note = Description of Artificial Sequence: Synthetic oligonucleotide
  misc_feature 1..20: note = Target: FXN; (-) strand; PAM type: YTN; PAM sequence: CTG
  source 1..20: mol_type = other DNA
aactcgtgacatcaagtgat

SEQ ID NO: 25472 - DNA, 20 bp, synthetic construct
  misc_feature 1..20: note = Description of Artificial Sequence: Synthetic oligonucleotide
  misc_feature 1..20: note = Target: FXN; (-) strand; PAM type: YTN; PAM sequence: CTG
  source 1..20: mol_type = other DNA
gtctgaactcgtgacatcaa

SEQ ID NO: 25473 - DNA, 20 bp, synthetic construct
  misc_feature 1..20: note = Description of Artificial Sequence: Synthetic oligonucleotide
  misc_feature 1..20: note = Target: FXN; (-) strand; PAM type: YTN; PAM sequence: CTG
  source 1..20: mol_type = other DNA
gagtgcagtggctggtctga

SEQ ID NO: 25474 - DNA, 20 bp, synthetic construct
  misc_feature 1..20: note = Description of Artificial Sequence: Synthetic oligonucleotide
  misc_feature 1..20: note = Target: FXN; (-) strand; PAM type: YTN; PAM sequence: CTG
  source 1..20: mol_type = other DNA
tcacccaggctggagtgcag

SEQ ID NO: 25475 - DNA, 20 bp, synthetic construct
  misc_feature 1..20: note = Description of Artificial Sequence: Synthetic oligonucleotide
  misc_feature 1..20: note = Target: FXN; (-) strand; PAM type: YTN; PAM sequence: CTC
  source 1..20: mol_type = other DNA
tgtcacccaggctggagtgc

SEQ ID NO: 25476 - DNA, 20 bp, synthetic construct
  misc_feature 1..20: note = Description of Artificial Sequence: Synthetic oligonucleotide
  misc_feature 1..20: note = Target: FXN; (-) strand; PAM type: YTN; PAM sequence: CTC
  source 1..20: mol_type = other DNA
actctgtcacccaggctgga

SEQ ID NO: 25477 - DNA, 20 bp, synthetic construct
  misc_feature 1..20: note = Description of Artificial Sequence: Synthetic oligonucleotide
  misc_feature 1..20: note = Target: FXN; (-) strand; PAM type: YTN; PAM sequence: TTG
  source 1..20: mol_type = other DNA
agacagagtctcactctgtc

SEQ ID NO: 25478 - DNA, 20 bp, synthetic construct
  misc_feature 1..20: note = Description of Artificial Sequence: Synthetic oligonucleotide
  misc_feature 1..20: note = Target: FXN; (-) strand; PAM type: YTN; PAM sequence: TTT
  source 1..20: mol_type = other DNA
gagacagagtctcactctgt

SEQ ID NO: 25479 - DNA, 20 bp, synthetic construct
  misc_feature 1..20: note = Description of Artificial Sequence: Synthetic oligonucleotide
  misc_feature 1..20: note = Target: FXN; (-) strand; PAM type: YTN; PAM sequence: TTT
  source 1..20: mol_type = other DNA
tgagacagagtctcactctg

SEQ ID NO: 25480 - DNA, 20 bp, synthetic construct
  misc_feature 1..20: note = Description of Artificial Sequence: Synthetic oligonucleotide
  misc_feature 1..20: note = Target: FXN; (-) strand; PAM type: YTN; PAM sequence: TTT
  source 1..20: mol_type = other DNA
ttgagacagagtctcactct

SEQ ID NO: 25481 - DNA, 20 bp, synthetic construct
  misc_feature 1..20: note = Description of Artificial Sequence: Synthetic oligonucleotide
  misc_feature 1..20: note = Target: FXN; (-) strand; PAM type: YTN; PAM sequence: TTT
  source 1..20: mol_type = other DNA
tttgagacagagtctcactc

SEQ ID NO: 25482 - DNA, 20 bp, synthetic construct
  misc_feature 1..20: note = Description of Artificial Sequence: Synthetic oligonucleotide
  misc_feature 1..20: note = Target: FXN; (-) strand; PAM type: YTN; PAM sequence: TTT
  source 1..20: mol_type = other DNA
ttttgagacagagtctcact

SEQ ID NO: 25483 - DNA, 20 bp, synthetic construct
  misc_feature 1..20: note = Description of Artificial Sequence: Synthetic oligonucleotide
  misc_feature 1..20: note = Target: FXN; (-) strand; PAM type: YTN; PAM sequence: TTT
  source 1..20: mol_type = other DNA
tttttgagacagagtctcac

SEQ ID NO: 25484 - DNA, 20 bp, synthetic construct
  misc_feature 1..20: note = Description of Artificial Sequence: Synthetic oligonucleotide
  misc_feature 1..20: note = Target: FXN; (-) strand; PAM type: YTN; PAM sequence: TTT
  source 1..20: mol_type = other DNA
ttttttgagacagagtctca

SEQ ID NO: 25485 - DNA, 20 bp, synthetic construct
  misc_feature 1..20: note = Description of Artificial Sequence: Synthetic oligonucleotide
  misc_feature 1..20: note = Target: FXN; (-) strand; PAM type: YTN; PAM sequence: TTT
  source 1..20: mol_type = other DNA
tttttttgagacagagtctc

SEQ ID NO: 25486 - DNA, 20 bp, synthetic construct
  misc_feature 1..20: note = Description of Artificial Sequence: Synthetic oligonucleotide
  misc_feature 1..20: note = Target: FXN; (-) strand; PAM type: YTN; PAM sequence: TTT
  source 1..20: mol_type = other DNA
ttttttttgagacagagtct

SEQ ID NO: 25487 - DNA, 20 bp, synthetic construct
  misc_feature 1..20: note = Description of Artificial Sequence: Synthetic oligonucleotide
  misc_feature 1..20: note = Target: FXN; (-) strand; PAM type: YTN; PAM sequence: TTT
  source 1..20: mol_type = other DNA
tttttttttgagacagagtc

SEQ ID NO: 25488 - DNA, 20 bp, synthetic construct
  misc_feature 1..20: note = Description of Artificial Sequence: Synthetic oligonucleotide
  misc_feature 1..20: note = Target: FXN; (-) strand; PAM type: YTN; PAM sequence: TTT
  source 1..20: mol_type = other DNA
ttttttttttgagacagagt

SEQ ID NO: 25489 - DNA, 20 bp, synthetic construct
  misc_feature 1..20: note = Description of Artificial Sequence: Synthetic oligonucleotide
  misc_feature 1..20: note = Target: FXN; (-) strand; PAM type: YTN; PAM sequence: TTT
  source 1..20: mol_type = other DNA
tttttttttttgagacagag

SEQ ID NO: 25490 - DNA, 20 bp, synthetic construct
  misc_feature 1..20: note = Description of Artificial Sequence: Synthetic oligonucleotide
  misc_feature 1..20: note = Target: FXN; (-) strand; PAM type: YTN; PAM sequence: TTT
  source 1..20: mol_type = other DNA
ttttttttttttgagacaga

SEQ ID NO: 25491 - DNA, 20 bp, synthetic construct
  misc_feature 1..20: note = Description of Artificial Sequence: Synthetic oligonucleotide
  misc_feature 1..20: note = Target: FXN; (-) strand; PAM type: YTN; PAM sequence: TTT
  source 1..20: mol_type = other DNA
tttttttttttttgagacag

SEQ ID NO: 25492 - DNA, 20 bp, synthetic construct
  misc_feature 1..20: note = Description of Artificial Sequence: Synthetic oligonucleotide
  misc_feature 1..20: note = Target: FXN; (-) strand; PAM type: YTN; PAM sequence: CTT
  source 1..20: mol_type = other DNA
ttttttttttttttgagaca

SEQ ID NO: 25493 - DNA, 20 bp, synthetic construct
  misc_feature 1..20: note = Description of Artificial Sequence: Synthetic oligonucleotide
  misc_feature 1..20: note = Target: FXN; (-) strand; PAM type: YTN; PAM sequence: TTC
  source 1..20: mol_type = other DNA
ttttttttttttttttgaga

SEQ ID NO: 25494 - DNA, 20 bp, synthetic construct
  misc_feature 1..20: note = Description of Artificial Sequence: Synthetic oligonucleotide
  misc_feature 1..20: note = Target: FXN; (-) strand; PAM type: YTN; PAM sequence: TTT
  source 1..20: mol_type = other DNA
cttttttttttttttttgag

SEQ ID NO: 25495 - DNA, 20 bp, synthetic construct
  misc_feature 1..20: note = Description of Artificial Sequence: Synthetic oligonucleotide
  misc_feature 1..20: note = Target: FXN; (-) strand; PAM type: YTN; PAM sequence: CTT
  source 1..20: mol_type = other DNA
tcttttttttttttttttga

SEQ ID NO: 25496 - DNA, 20 bp, synthetic construct
  misc_feature 1..20: note = Description of Artificial Sequence: Synthetic oligonucleotide
  misc_feature 1..20: note = Target: FXN; (-) strand; PAM type: YTN; PAM sequence: TTC
  source 1..20: mol_type = other DNA
tttctttttttttttttttt

SEQ ID NO: 25497 - DNA, 20 bp, synthetic construct
  misc_feature 1..20: note = Description of Artificial Sequence: Synthetic oligonucleotide
  misc_feature 1..20: note = Target: FXN; (-) strand; PAM type: YTN; PAM sequence: TTT
  source 1..20: mol_type = other DNA
ctttcttttttttttttttt

SEQ ID NO: 25498 - DNA, 20 bp, synthetic construct
  misc_feature 1..20: note = Description of Artificial Sequence: Synthetic oligonucleotide
  misc_feature 1..20: note = Target: FXN; (-) strand; PAM type: YTN; PAM sequence: TTT
  source 1..20: mol_type = other DNA
tctttctttttttttttttt

SEQ ID NO: 25499 - DNA, 20 bp, synthetic construct
  misc_feature 1..20: note = Description of Artificial Sequence: Synthetic oligonucleotide
  misc_feature 1..20: note = Target: FXN; (-) strand; PAM type: YTN; PAM sequence: TTT
  source 1..20: mol_type = other DNA
ttctttcttttttttttttt

SEQ ID NO: 25500 - DNA, 20 bp, synthetic construct
  misc_feature 1..20: note = Description of Artificial Sequence: Synthetic oligonucleotide
  misc_feature 1..20: note = Target: FXN; (-) strand; PAM type: YTN; PAM sequence: TTG
  source 1..20: mol_type = other DNA
atgaaaataacatgtaaaaa

SEQ ID NO: 25501 - DNA, 20 bp, synthetic construct
  misc_feature 1..20: note = Description of Artificial Sequence: Synthetic oligonucleotide
  misc_feature 1..20: note = Target: FXN; (-) strand; PAM type: YTN; PAM sequence: TTA
  source 1..20: mol_type = other DNA
aattgatgaaaataacatgt

SEQ ID NO: 25502 - DNA, 20 bp, synthetic construct
  misc_feature 1..20: note = Description of Artificial Sequence: Synthetic oligonucleotide
  misc_feature 1..20: note = Target: FXN; (-) strand; PAM type: YTN; PAM sequence: TTC
  source 1..20: mol_type = other DNA
attaaattgatgaaaataac

SEQ ID NO: 25503 - DNA, 20 bp, synthetic construct
  misc_feature 1..20: note = Description of Artificial Sequence: Synthetic oligonucleotide
  misc_feature 1..20: note = Target: FXN; (-) strand; PAM type: YTN; PAM sequence: TTA
  source 1..20: mol_type = other DNA
aattcattaaattgatgaaa

SEQ ID NO: 25504 - DNA, 20 bp, synthetic construct
  misc_feature 1..20: note = Description of Artificial Sequence: Synthetic oligonucleotide
  misc_feature 1..20: note = Target: FXN; (-) strand; PAM type: YTN; PAM sequence: TTT
  source 1..20: mol_type = other DNA
aaattcattaaattgatgaa

SEQ ID NO: 25505 - DNA, 20 bp, synthetic construct
  misc_feature 1..20: note = Description of Artificial Sequence: Synthetic oligonucleotide
  misc_feature 1..20: note = Target: FXN; (-) strand; PAM type: YTN; PAM sequence: TTA
  source 1..20: mol_type = other DNA
tttaaattcattaaattgat

SEQ ID NO: 25506 - DNA, 20 bp, synthetic construct
  misc_feature 1..20: note = Description of Artificial Sequence: Synthetic oligonucleotide
  misc_feature 1..20: note = Target: FXN; (-) strand; PAM type: YTN; PAM sequence: TTG
  source 1..20: mol_type = other DNA
ttatttaaattcattaaatt

SEQ ID NO: 25507 - DNA, 20 bp, synthetic construct
  misc_feature 1..20: note = Description of Artificial Sequence: Synthetic oligonucleotide
  misc_feature 1..20: note = Target: FXN; (-) strand; PAM type: YTN; PAM sequence: TTT
  source 1..20: mol_type = other DNA
gttatttaaattcattaaat

SEQ ID NO: 25508 - DNA, 20 bp, synthetic construct
  misc_feature 1..20: note = Description of Artificial Sequence: Synthetic oligonucleotide
  misc_feature 1..20: note = Target: FXN; (-) strand; PAM type: YTN; PAM sequence: TTA
  source 1..20: mol_type = other DNA
tacatttgttatttaaattc

SEQ ID NO: 25509 - DNA, 20 bp, synthetic construct
  misc_feature 1..20: note = Description of Artificial Sequence: Synthetic oligonucleotide
  misc_feature 1..20: note = Target: FXN; (-) strand; PAM type: YTN; PAM sequence: TTT
  source 1..20: mol_type = other DNA
atacatttgttatttaaatt

SEQ ID NO: 25510 - DNA, 20 bp, synthetic construct
  misc_feature 1..20: note = Description of Artificial Sequence: Synthetic oligonucleotide
  misc_feature 1..20: note = Target: FXN; (-) strand; PAM type: YTN; PAM sequence: TTA
  source 1..20: mol_type = other DNA
atatcaaatttatacatttg

SEQ ID NO: 25511 - DNA, 20 bp, synthetic construct
  misc_feature 1..20: note = Description of Artificial Sequence: Synthetic oligonucleotide
  misc_feature 1..20: note = Target: FXN; (-) strand; PAM type: YTN; PAM sequence: TTA
  source 1..20: mol_type = other DNA
ttaatatcaaatttatacat

SEQ ID NO: 25512 - DNA, 20 bp, synthetic construct
  misc_feature 1..20: note = Description of Artificial Sequence: Synthetic oligonucleotide
  misc_feature 1..20: note = Target: FXN; (-) strand; PAM type: YTN; PAM sequence: TTT
  source 1..20: mol_type = other DNA
attaatatcaaatttataca

SEQ ID NO: 25513 - DNA, 20 bp, synthetic construct
  misc_feature 1..20: note = Description of Artificial Sequence: Synthetic oligonucleotide
  misc_feature 1..20: note = Target: FXN; (-) strand; PAM type: YTN; PAM sequence: TTT
  source 1..20: mol_type = other DNA
tattaatatcaaatttatac

SEQ ID NO: 25514 - DNA, 20 bp, synthetic construct
  misc_feature 1..20: note = Description of Artificial Sequence: Synthetic oligonucleotide
  misc_feature 1..20: note = Target: FXN; (-) strand; PAM type: YTN; PAM sequence: TTC
  source 1..20: mol_type = other DNA
cattttattaatatcaaatt

SEQ ID NO: 25515 - DNA, 20 bp, synthetic construct
  misc_feature 1..20: note = Description of Artificial Sequence: Synthetic oligonucleotide
  misc_feature 1..20: note = Target: FXN; (-) strand; PAM type: YTN; PAM sequence: CTT
  source 1..20: mol_type = other DNA
ccattttattaatatcaaat

SEQ ID NO: 25516 - DNA, 20 bp, synthetic construct
  misc_feature 1..20: note = Description of Artificial Sequence: Synthetic oligonucleotide
  misc_feature 1..20: note = Target: FXN; (-) strand; PAM type: YTN; PAM sequence: TTA
  source 1..20: mol_type = other DNA
ccaaatgcttccattttatt

SEQ ID NO: 25517 - DNA, 20 bp, synthetic construct
  misc_feature 1..20: note = Description of Artificial Sequence: Synthetic oligonucleotide
  misc_feature 1..20: note = Target: FXN; (-) strand; PAM type: YTN; PAM sequence: CTG
  source 1..20: mol_type = other DNA
cagaggaagcacaaaaccca

SEQ ID NO: 25518 - DNA, 20 bp, synthetic construct
  misc_feature 1..20: note = Description of Artificial Sequence: Synthetic oligonucleotide
  misc_feature 1..20: note = Target: FXN; (-) strand; PAM type: YTN; PAM sequence: CTA
  source 1..20: mol_type = other DNA
gagagctgcagaggaagcac

SEQ ID NO: 25519 - DNA, 20 bp, synthetic construct
  misc_feature 1..20: note = Description of Artificial Sequence: Synthetic oligonucleotide
  misc_feature 1..20: note = Target: FXN; (-) strand; PAM type: YTN; PAM sequence: CTC
  source 1..20: mol_type = other DNA
atctagagagctgcagagga

SEQ ID NO: 25520 - DNA, 20 bp, synthetic construct
  misc_feature 1..20: note = Description of Artificial Sequence: Synthetic oligonucleotide
  misc_feature 1..20: note = Target: FXN; (-) strand; PAM type: YTN; PAM sequence: TTC
  source 1..20: mol_type = other DNA
ataggtggtctcatctagag

SEQ ID NO: 25521 - DNA, 20 bp, synthetic construct
  misc_feature 1..20: note = Description of Artificial Sequence: Synthetic oligonucleotide
  misc_feature 1..20: note = Target: FXN; (-) strand; PAM type: YTN; PAM sequence: TTT
  source 1..20: mol_type = other DNA
cataggtggtctcatctaga

SEQ ID NO: 25522 - DNA, 20 bp, synthetic construct
  misc_feature 1..20: note = Description of Artificial Sequence: Synthetic oligonucleotide
  misc_feature 1..20: note = Target: FXN; (-) strand; PAM type: YTN; PAM sequence: CTT
  source 1..20: mol_type = other DNA
tcataggtggtctcatctag

SEQ ID NO: 25523 - DNA, 20 bp, synthetic construct
  misc_feature 1..20: note = Description of Artificial Sequence: Synthetic oligonucleotide
  misc_feature 1..20: note = Target: FXN; (-) strand; PAM type: YTN; PAM sequence: CTA
  source 1..20: mol_type = other DNA
gtctttcataggtggtctca

SEQ ID NO: 25524 - DNA, 20 bp, synthetic construct
  misc_feature 1..20: note = Description of Artificial Sequence: Synthetic oligonucleotide
  misc_feature 1..20: note = Target: FXN; (-) strand; PAM type: YTN; PAM sequence: CTG
  source 1..20: mol_type = other DNA
ctagtctttcataggtggtc

SEQ ID NO: 25525 - DNA, 20 bp, synthetic construct
  misc_feature 1..20: note = Description of Artificial Sequence: Synthetic oligonucleotide
  misc_feature 1..20: note = Target: FXN; (-) strand; PAM type: YTN; PAM sequence: CTC
  source 1..20: mol_type = other DNA
tgctagtctttcataggtgg

SEQ ID NO: 25526 - DNA, 20 bp, synthetic construct
  misc_feature 1..20: note = Description of Artificial Sequence: Synthetic oligonucleotide
  misc_feature 1..20: note = Target: FXN; (-) strand; PAM type: YTN; PAM sequence: TTC
  source 1..20: mol_type = other DNA
ctctgctagtctttcatagg

SEQ ID NO: 25527 - DNA, 20 bp, synthetic construct
  misc_feature 1..20: note = Description of Artificial Sequence: Synthetic oligonucleotide
  misc_feature 1..20: note = Target: FXN; (-) strand; PAM type: YTN; PAM sequence: TTT
  source 1..20: mol_type = other DNA
cctctgctagtctttcatag

SEQ ID NO: 25528 - DNA, 20 bp, synthetic construct
  misc_feature 1..20: note = Description of Artificial Sequence: Synthetic oligonucleotide
  misc_feature 1..20: note = Target: FXN; (-) strand; PAM type: YTN; PAM sequence: CTA
  source 1..20: mol_type = other DNA
aagagtccagcgtttcctct

SEQ ID NO: 25529 - DNA, 20 bp, synthetic construct
  misc_feature 1..20: note = Description of Artificial Sequence: Synthetic oligonucleotide
  misc_feature 1..20: note = Target: FXN; (-) strand; PAM type: YTN; PAM sequence: CTG
  source 1..20: mol_type = other DNA
ctaaagagtccagcgtttcc

SEQ ID NO: 25530 - DNA, 20 bp, synthetic construct
  misc_feature 1..20: note = Description of Artificial Sequence: Synthetic oligonucleotide
  misc_feature 1..20: note = Target: FXN; (-) strand; PAM type: YTN; PAM sequence: CTC
  source 1..20: mol_type = other DNA
tgctaaagagtccagcgttt

SEQ ID NO: 25531 - DNA, 20 bp, synthetic construct
  misc_feature 1..20: note = Description of Artificial Sequence: Synthetic oligonucleotide
  misc_feature 1..20: note = Target: FXN; (-) strand; PAM type: YTN; PAM sequence: TTC
  source 1..20: mol_type = other DNA
aaaaaactctgctaaagagt

SEQ ID NO: 25532 - DNA, 20 bp, synthetic construct
  misc_feature 1..20: note = Description of Artificial Sequence: Synthetic oligonucleotide
  misc_feature 1..20: note = Target: FXN; (-) strand; PAM type: YTN; PAM sequence: CTT
  source 1..20: mol_type = other DNA
caaaaaactctgctaaagag

SEQ ID NO: 25533 - DNA, 20 bp, synthetic construct
  misc_feature 1..20: note = Description of Artificial Sequence: Synthetic oligonucleotide
  misc_feature 1..20: note = Target: FXN; (-) strand; PAM type: YTN; PAM sequence: CTG
  source 1..20: mol_type = other DNA
caaggtcttcaaaaaactct

SEQ ID NO: 25534 - DNA, 20 bp, synthetic construct
  misc_feature 1..20: note = Description of Artificial Sequence: Synthetic oligonucleotide
  misc_feature 1..20: note = Target: FXN; (-) strand; PAM type: YTN; PAM sequence: TTG
  source 1..20: mol_type = other DNA
tctgcaaggtcttcaaaaaa

SEQ ID NO: 25535 - DNA, 20 bp, synthetic construct
  misc_feature 1..20: note = Description of Artificial Sequence: Synthetic oligonucleotide
  misc_feature 1..20: note = Target: FXN; (-) strand; PAM type: YTN; PAM sequence: CTT
  source 1..20: mol_type = other DNA
gtctgcaaggtcttcaaaaa

SEQ ID NO: 25536 - DNA, 20 bp, synthetic construct
  misc_feature 1..20: note = Description of Artificial Sequence: Synthetic oligonucleotide
  misc_feature 1..20: note = Target: FXN; (-) strand; PAM type: YTN; PAM sequence: CTC
  source 1..20: mol_type = other DNA
aaacgtgtatggcttgtctg

SEQ ID NO: 25537 - DNA, 20 bp, synthetic construct
  misc_feature 1..20: note = Description of Artificial Sequence: Synthetic oligonucleotide
  misc_feature 1..20: note = Target: FXN; (-) strand; PAM type: YTN; PAM sequence: TTA
  source 1..20: mol_type = other DNA
gagggggaaacagaaaaata

SEQ ID NO: 25538 - DNA, 20 bp, synthetic construct
  misc_feature 1..20: note = Description of Artificial Sequence: Synthetic oligonucleotide
  misc_feature 1..20: note = Target: FXN; (-) strand; PAM type: YTN; PAM sequence: CTT
  source 1..20: mol_type = other DNA
agagggggaaacagaaaaat

SEQ ID NO: 25539 - DNA, 20 bp, synthetic construct
  misc_feature 1..20: note = Description of Artificial Sequence: Synthetic oligonucleotide
  misc_feature 1..20: note = Target: FXN; (-) strand; PAM type: YTN; PAM sequence: TTC
  source 1..20: mol_type = other DNA
ttagagggggaaacagaaaa

SEQ ID NO: 25540 - DNA, 20 bp, synthetic construct
  misc_feature 1..20: note = Description of Artificial Sequence: Synthetic oligonucleotide
  misc_feature 1..20: note = Target: FXN; (-) strand; PAM type: YTN; PAM sequence: CTA
  source 1..20: mol_type = other DNA
aaattcttagagggggaaac

SEQ ID NO: 25541 - DNA, 20 bp, synthetic construct
  misc_feature 1..20: note = Description of Artificial Sequence: Synthetic oligonucleotide
  misc_feature 1..20: note = Target: FXN; (-) strand; PAM type: YTN; PAM sequence: TTA
  source 1..20: mol_type = other DNA
gtgaactaaaattcttagag

SEQ ID NO: 25542 - DNA, 20 bp, synthetic construct
  misc_feature 1..20: note = Description of Artificial Sequence: Synthetic oligonucleotide
  misc_feature 1..20: note = Target: FXN; (-) strand; PAM type: YTN; PAM sequence: TTT
  source 1..20: mol_type = other DNA
agtgaactaaaattcttaga

SEQ ID NO: 25543 - DNA, 20 bp, synthetic construct
  misc_feature 1..20: note = Description of Artificial Sequence: Synthetic oligonucleotide
  misc_feature 1..20: note = Target: FXN; (-) strand; PAM type: YTN; PAM sequence: TTT
  source 1..20: mol_type = other DNA
tagtgaactaaaattcttag

SEQ ID NO: 25544 - DNA, 20 bp, synthetic construct
  misc_feature 1..20: note = Description of Artificial Sequence: Synthetic oligonucleotide
  misc_feature 1..20: note = Target: FXN; (-) strand; PAM type: YTN; PAM sequence: TTC
  source 1..20: mol_type = other DNA
attttagtgaactaaaattc

SEQ ID NO: 25545 - DNA, 20 bp, synthetic construct
  misc_feature 1..20: note = Description of Artificial Sequence: Synthetic oligonucleotide
  misc_feature 1..20: note = Target: FXN; (-) strand; PAM type: YTN; PAM sequence: CTT
  source 1..20: mol_type = other DNA
cattttagtgaactaaaatt

SEQ ID NO: 25546 - DNA, 20 bp, synthetic construct
  misc_feature 1..20: note = Description of Artificial Sequence: Synthetic oligonucleotide
  misc_feature 1..20: note = Target: FXN; (-) strand; PAM type: YTN; PAM sequence: TTC
  source 1..20: mol_type = other DNA
ttcattttagtgaactaaaa

SEQ ID NO: 25547 - DNA, 20 bp, synthetic construct
  misc_feature 1..20: note = Description of Artificial Sequence: Synthetic oligonucleotide
  misc_feature 1..20: note = Target: FXN; (-) strand; PAM type: YTN; PAM sequence: CTG
  source 1..20: mol_type = other DNA
gagggaaattcttcatttta

SEQ ID NO: 25548 - DNA, 20 bp, synthetic construct
  misc_feature 1..20: note = Description of Artificial Sequence: Synthetic oligonucleotide
  misc_feature 1..20: note = Target: FXN; (-) strand; PAM type: YTN; PAM sequence: CTG
  source 1..20: mol_type = other DNA
ctggagggaaattcttcatt

SEQ ID NO: 25549 - DNA, 20 bp, synthetic construct
  misc_feature 1..20: note = Description of Artificial Sequence: Synthetic oligonucleotide
  misc_feature 1..20: note = Target: FXN; (-) strand; PAM type: YTN; PAM sequence: CTC
  source 1..20: mol_type = other DNA
tgctggagggaaattcttca

SEQ ID NO: 25550 - DNA, 20 bp, synthetic construct
  misc_feature 1..20: note = Description of Artificial Sequence: Synthetic oligonucleotide
  misc_feature 1..20: note = Target: FXN; (-) strand; PAM type: YTN; PAM sequence: TTA
  source 1..20: mol_type = other DNA
gctctgctggagggaaattc

SEQ ID NO: 25551 - DNA, 20 bp, synthetic construct
  misc_feature 1..20: note = Description of Artificial Sequence: Synthetic oligonucleotide
  misc_feature 1..20: note = Target: FXN; (-) strand; PAM type: YTN; PAM sequence: CTT
  source 1..20: mol_type = other DNA
agctctgctggagggaaatt

SEQ ID NO: 25552 - DNA, 20 bp, synthetic construct
  misc_feature 1..20: note = Description of Artificial Sequence: Synthetic oligonucleotide
  misc_feature 1..20: note = Target: FXN; (-) strand; PAM type: YTN; PAM sequence: TTG
  source 1..20: mol_type = other DNA
atgcttagctctgctggagg

SEQ ID NO: 25553 - DNA, 20 bp, synthetic construct
  misc_feature 1..20: note = Description of Artificial Sequence: Synthetic oligonucleotide
  misc_feature 1..20: note = Target: FXN; (-) strand; PAM type: YTN; PAM sequence: CTT
  source 1..20: mol_type = other DNA
gatgcttagctctgctggag

SEQ ID NO: 25554 - DNA, 20 bp, synthetic construct
  misc_feature 1..20: note = Description of Artificial Sequence: Synthetic oligonucleotide
  misc_feature 1..20: note = Target: FXN; (-) strand; PAM type: YTN; PAM sequence: CTA
  source 1..20: mol_type = other DNA
cttgatgcttagctctgctg

SEQ ID NO: 25555 - DNA, 20 bp, synthetic construct
  misc_feature 1..20: note = Description of Artificial Sequence: Synthetic oligonucleotide
  misc_feature 1..20: note = Target: FXN; (-) strand; PAM type: YTN; PAM sequence: CTA
  source 1..20: mol_type = other DNA
catgctacttgatgcttagc

SEQ ID NO: 25556 - DNA, 20 bp, synthetic construct
  misc_feature 1..20: note = Description of Artificial Sequence: Synthetic oligonucleotide
  misc_feature 1..20: note = Target: FXN; (-) strand; PAM type: YTN; PAM sequence: CTA
  source 1..20: mol_type = other DNA
caactacatgctacttgatg

SEQ ID NO: 25557 - DNA, 20 bp, synthetic construct
  misc_feature 1..20: note = Description of Artificial Sequence: Synthetic oligonucleotide
  misc_feature 1..20: note = Target: FXN; (-) strand; PAM type: YTN; PAM sequence: CTA
  source 1..20: mol_type = other DNA
cctacaactacatgctactt

SEQ ID NO: 25558 - DNA, 20 bp, synthetic construct
  misc_feature 1..20: note = Description of Artificial Sequence: Synthetic oligonucleotide
  misc_feature 1..20: note = Target: FXN; (-) strand; PAM type: YTN; PAM sequence: TTA
  source 1..20: mol_type = other DNA
atcctacctacaactacatg

SEQ ID NO: 25559 - DNA, 20 bp, synthetic construct
  misc_feature 1..20: note = Description of Artificial Sequence: Synthetic oligonucleotide
  misc_feature 1..20: note = Target: FXN; (-) strand; PAM type: YTN; PAM sequence: TTT
  source 1..20: mol_type = other DNA
aatcctacctacaactacat

SEQ ID NO: 25560 - DNA, 20 bp, synthetic construct
  misc_feature 1..20: note = Description of Artificial Sequence: Synthetic oligonucleotide
  misc_feature 1..20: note = Target: FXN; (-) strand; PAM type: YTN; PAM sequence: TTT
  source 1..20: mol_type = other DNA
taatcctacctacaactaca

SEQ ID NO: 25561 - DNA, 20 bp, synthetic construct
  misc_feature 1..20: note = Description of Artificial Sequence: Synthetic oligonucleotide
  misc_feature 1..20: note = Target: FXN; (-) strand; PAM type: YTN; PAM sequence: CTT
  source 1..20: mol_type = other DNA
ttaatcctacctacaactac

SEQ ID NO: 25562 - DNA, 20 bp, synthetic construct
  misc_feature 1..20: note = Description of Artificial Sequence: Synthetic oligonucleotide
  misc_feature 1..20: note = Target: FXN; (-) strand; PAM type: YTN; PAM sequence: CTA
  source 1..20: mol_type = other DNA
gtcttttaatcctacctaca

SEQ ID NO: 25563 - DNA, 20 bp, synthetic construct
  misc_feature 1..20: note = Description of Artificial Sequence: Synthetic oligonucleotide
  misc_feature 1..20: note = Target: FXN; (-) strand; PAM type: YTN; PAM sequence: CTC
  source 1..20: mol_type = other DNA
ccggaaccctagtcttttaa

SEQ ID NO: 25564 - DNA, 20 bp, synthetic construct
  misc_feature 1..20: note = Description of Artificial Sequence: Synthetic oligonucleotide
  misc_feature 1..20: note = Target: FXN; (-) strand; PAM type: YTN; PAM sequence: TTC
  source 1..20: mol_type = other DNA
acctcccggaaccctagtct

SEQ ID NO: 25565 - DNA, 20 bp, synthetic construct
  misc_feature 1..20: note = Description of Artificial Sequence: Synthetic oligonucleotide
  misc_feature 1..20: note = Target: FXN; (-) strand; PAM type: YTN; PAM sequence: CTT
  source 1..20: mol_type = other DNA
cacctcccggaaccctagtc

SEQ ID NO: 25566 - DNA, 20 bp, synthetic construct
  misc_feature 1..20: note = Description of Artificial Sequence: Synthetic oligonucleotide
  misc_feature 1..20: note = Target: FXN; (-) strand; PAM type: YTN; PAM sequence: CTG
  source 1..20: mol_type = other DNA
caaccttcacctcccggaac

SEQ ID NO: 25567 - DNA, 20 bp, synthetic construct
  misc_feature 1..20: note = Description of Artificial Sequence: Synthetic oligonucleotide
  misc_feature 1..20: note = Target: FXN; (-) strand; PAM type: YTN; PAM sequence: CTC
  source 1..20: mol_type = other DNA
actgcaaccttcacctcccg

SEQ ID NO: 25568 - DNA, 20 bp, synthetic construct
  misc_feature 1..20: note = Description of Artificial Sequence: Synthetic oligonucleotide
  misc_feature 1..20: note = Target: FXN; (-) strand; PAM type: YTN; PAM sequence: TTG
  source 1..20: mol_type = other DNA
gctcactgcaaccttcacct

SEQ ID NO: 25569 - DNA, 20 bp, synthetic construct
  misc_feature 1..20: note = Description of Artificial Sequence: Synthetic oligonucleotide
  misc_feature 1..20: note = Target: FXN; (-) strand; PAM type: YTN; PAM sequence: TTT
  source 1..20: mol_type = other DNA
ggctcactgcaaccttcacc

SEQ ID NO: 25570 - DNA, 20 bp, synthetic construct
  misc_feature 1..20: note = Description of Artificial Sequence: Synthetic oligonucleotide
  misc_feature 1..20: note = Target: FXN; (-) strand; PAM type: YTN; PAM sequence: TTT
  source 1..20: mol_type = other DNA
tggctcactgcaaccttcac

SEQ ID NO: 25571 - DNA, 20 bp, synthetic construct
  misc_feature 1..20: note = Description of Artificial Sequence: Synthetic oligonucleotide
  misc_feature 1..20: note = Target: FXN; (-) strand; PAM type: YTN; PAM sequence: CTG
  source 1..20: mol_type = other DNA
gagtgcagtggcgtgatttt

SEQ ID NO: 25572 - DNA, 20 bp, synthetic construct
  misc_feature 1..20: note = Description of Artificial Sequence: Synthetic oligonucleotide
  misc_feature 1..20: note = Target: FXN; (-) strand; PAM type: YTN; PAM sequence: CTG
  source 1..20: mol_type = other DNA
tcacccaggctggagtgcag

SEQ ID NO: 25573 - DNA, 20 bp, synthetic construct
  misc_feature 1..20: note = Description of Artificial Sequence: Synthetic oligonucleotide
  misc_feature 1..20: note = Target: FXN; (-) strand; PAM type: YTN; PAM sequence: CTC
  source 1..20: mol_type = other DNA
tgtcacccaggctggagtgc

SEQ ID NO: 25574 - DNA, 20 bp, synthetic construct
  misc_feature 1..20: note = Description of Artificial Sequence: Synthetic oligonucleotide
  misc_feature 1..20: note = Target: FXN; (-) strand; PAM type: YTN; PAM sequence: CTC
  source 1..20: mol_type = other DNA
gctctgtcacccaggctgga

SEQ ID NO: 25575 - DNA, 20 bp, synthetic construct
  misc_feature 1..20: note = Description of Artificial Sequence: Synthetic oligonucleotide
  misc_feature 1..20: note = Target: FXN; (-) strand; PAM type: YTN; PAM sequence: CTA
  source 1..20: mol_type = other DNA
tgacagagtctcgctctgtc

SEQ ID NO: 25576 - DNA, 20 bp, synthetic construct
  misc_feature 1..20: note = Description of Artificial Sequence: Synthetic oligonucleotide
  misc_feature 1..20: note = Target: FXN; (-) strand; PAM type: YTN; PAM sequence: CTA
  source 1..20: mol_type = other DNA
tccatccatccatccatcca

SEQ ID NO: 25577 - DNA, 20 bp, synthetic construct
  misc_feature 1..20: note = Description of Artificial Sequence: Synthetic oligonucleotide
  misc_feature 1..20: note = Target: FXN; (-) strand; PAM type: YTN; PAM sequence: CTA
  source 1..20: mol_type = other DNA
tctatccatccatccatcca

SEQ ID NO: 25578 - DNA, 20 bp, synthetic construct
  misc_feature 1..20: note = Description of Artificial Sequence: Synthetic oligonucleotide
  misc_feature 1..20: note = Target: FXN; (-) strand; PAM type: YTN; PAM sequence: CTA
  source 1..20: mol_type = other DNA
tctatctatccatccatcca

SEQ ID NO: 25579 - DNA, 20 bp, synthetic construct
  misc_feature 1..20: note = Description of Artificial Sequence: Synthetic oligonucleotide
  misc_feature 1..20: note = Target: FXN; (-) strand; PAM type: YTN; PAM sequence: CTA
  source 1..20: mol_type = other DNA
tctatctatctatccatcca

SEQ ID NO: 25580 - DNA, 20 bp, synthetic construct
  misc_feature 1..20: note = Description of Artificial Sequence: Synthetic oligonucleotide
  misc_feature 1..20: note = Target: FXN; (-) strand; PAM type: YTN; PAM sequence: CTA
  source 1..20: mol_type = other DNA
tctatctatctatctatcca

SEQ ID NO: 25581 - DNA, 20 bp, synthetic construct
  misc_feature 1..20: note = Description of Artificial Sequence: Synthetic oligonucleotide
  misc_feature 1..20: note = Target: FXN; (-) strand; PAM type: YTN; PAM sequence: CTA
  source 1..20: mol_type = other DNA
tctatctatctatctatcta

SEQ ID NO: 25582 - DNA, 20 bp, synthetic construct
  misc_feature 1..20: note = Description of Artificial Sequence: Synthetic oligonucleotide
  misc_feature 1..20: note = Target: FXN; (-) strand; PAM type: YTN; PAM sequence: CTA
  source 1..20: mol_type = other DNA
tctatctatctatctatcta

SEQ ID NO: 25583 - DNA, 20 bp, synthetic construct
  misc_feature 1..20: note = Description of Artificial Sequence: Synthetic oligonucleotide
  misc_feature 1..20: note = Target: FXN; (-) strand; PAM type: YTN; PAM sequence: CTA
  source 1..20: mol_type = other DNA
tccagctatctatctatcta

SEQ ID NO: 25584 - DNA, 20 bp, synthetic construct
  misc_feature 1..20: note = Description of Artificial Sequence: Synthetic oligonucleotide
  misc_feature 1..20: note = Target: FXN; (-) strand; PAM type: YTN; PAM sequence: CTA
  source 1..20: mol_type = other DNA
tctatccagctatctatcta

SEQ ID NO: 25585 - DNA, 20 bp, synthetic construct
  misc_feature 1..20: note = Description of Artificial Sequence: Synthetic oligonucleotide
  misc_feature 1..20: note = Target: FXN; (-) strand; PAM type: YTN; PAM sequence: TTA
  source 1..20: mol_type = other DNA
tctatctatccagctatcta

SEQ ID NO: 25586 - DNA, 20 bp, synthetic construct
  misc_feature 1..20: note = Description of Artificial Sequence: Synthetic oligonucleotide
  misc_feature 1..20: note = Target: FXN; (-) strand; PAM type: YTN; PAM sequence: CTT
  source 1..20: mol_type = other DNA
atctatctatccagctatct

SEQ ID NO: 25587 - DNA, 20 bp, synthetic construct
  misc_feature 1..20: note = Description of Artificial Sequence: Synthetic oligonucleotide
  misc_feature 1..20: note = Target: FXN; (-) strand; PAM type: YTN; PAM sequence: CTA
  source 1..20: mol_type = other DNA
tcttatctatctatccagct

SEQ ID NO: 25588 - DNA, 20 bp, synthetic construct
  misc_feature 1..20: note = Description of Artificial Sequence: Synthetic oligonucleotide
  misc_feature 1..20: note = Target: FXN; (-) strand; PAM type: YTN; PAM sequence: TTA
  source 1..20: mol_type = other DNA
tctatcttatctatctatcc

SEQ ID NO: 25589 - DNA, 20 bp, synthetic construct
  misc_feature 1..20: note = Description of Artificial Sequence: Synthetic oligonucleotide
  misc_feature 1..20: note = Target: FXN; (-) strand; PAM type: YTN; PAM sequence: CTT
  source 1..20: mol_type = other DNA
atctatcttatctatctatc

SEQ ID NO: 25590 - DNA, 20 bp, synthetic construct
  misc_feature 1..20: note = Description of Artificial Sequence: Synthetic oligonucleotide
  misc_feature 1..20: note = Target: FXN; (-) strand; PAM type: YTN; PAM sequence: TTG
  source 1..20: mol_type = other DNA
tcttatctatcttatctatc

SEQ ID NO: 25591 - DNA, 20 bp, synthetic construct
  misc_feature 1..20: note = Description of Artificial Sequence: Synthetic oligonucleotide
  misc_feature 1..20: note = Target: FXN; (-) strand; PAM type: YTN; PAM sequence: CTT
  source 1..20: mol_type = other DNA
gtcttatctatcttatctat

SEQ ID NO: 25592 - DNA, 20 bp, synthetic construct
  misc_feature 1..20: note = Description of Artificial Sequence: Synthetic oligonucleotide
  misc_feature 1..20: note = Target: FXN; (-) strand; PAM type: YTN; PAM sequence: CTA
  source 1..20: mol_type = other DNA
gtcttgtcttatctatctta

SEQ ID NO: 25593 - DNA, 20 bp, synthetic construct
  misc_feature 1..20: note = Description of Artificial Sequence: Synthetic oligonucleotide
  misc_feature 1..20: note = Target: FXN; (-) strand; PAM type: YTN; PAM sequence: TTG
  source 1..20: mol_type = other DNA
aagcctagtcttgtcttatc

SEQ ID NO: 25594 - DNA, 20 bp, synthetic construct
  misc_feature 1..20: note = Description of Artificial Sequence: Synthetic oligonucleotide
  misc_feature 1..20: note = Target: FXN; (-) strand; PAM type: YTN; PAM sequence: CTT
  source 1..20: mol_type = other DNA
gaagcctagtcttgtcttat

SEQ ID NO: 25595 - DNA, 20 bp, synthetic construct
  misc_feature 1..20: note = Description of Artificial Sequence: Synthetic oligonucleotide
  misc_feature 1..20: note = Target: FXN; (-) strand; PAM type: YTN; PAM sequence: CTG
  source 1..20: mol_type = other DNA
cagcttgaagcctagtcttg

SEQ ID NO: 25596 - DNA, 20 bp, synthetic construct
  misc_feature 1..20: note = Description of Artificial Sequence: Synthetic oligonucleotide
  misc_feature 1..20: note = Target: FXN; (-) strand; PAM type: YTN; PAM sequence: CTG
  source 1..20: mol_type = other DNA
gactgcagcttgaagcctag

SEQ ID NO: 25597 - DNA, 20 bp, synthetic construct
  misc_feature 1..20: note = Description of Artificial Sequence: Synthetic oligonucleotide
  misc_feature 1..20: note = Target: FXN; (-) strand; PAM type: YTN; PAM sequence: CTG
  source 1..20: mol_type = other DNA
gtagagctggactgcagctt

SEQ ID NO: 25598 - DNA, 20 bp, synthetic construct
  misc_feature 1..20: note = Description of Artificial Sequence: Synthetic oligonucleotide
  misc_feature 1..20: note = Target: FXN; (-) strand; PAM type: YTN; PAM sequence: TTG
  source 1..20: mol_type = other DNA
cccagagtcacaacaagcct

SEQ ID NO: 25599 - DNA, 20 bp, synthetic construct
  misc_feature 1..20: note = Description of Artificial Sequence: Synthetic oligonucleotide
  misc_feature 1..20: note = Target: FXN; (-) strand; PAM type: YTN; PAM sequence: CTT
  source 1..20: mol_type = other DNA
gcccagagtcacaacaagcc

SEQ ID NO: 25600 - DNA, 20 bp, synthetic construct
  misc_feature 1..20: note = Description of Artificial Sequence: Synthetic oligonucleotide
  misc_feature 1..20: note = Target: FXN; (-) strand; PAM type: YTN; PAM sequence: CTG
  source 1..20: mol_type = other DNA
agtgacttgcccagagtcac

SEQ ID NO: 25601 - DNA, 20 bp, synthetic construct
  misc_feature 1..20: note = Description of Artificial Sequence: Synthetic oligonucleotide
  misc_feature 1..20: note = Target: FXN; (-) strand; PAM type: YTN; PAM sequence: CTC
  source 1..20: mol_type = other DNA
agagaggctgagtgacttgc

SEQ ID NO: 25602 - DNA, 20 bp, synthetic construct
  misc_feature 1..20: note = Description of Artificial Sequence: Synthetic oligonucleotide
  misc_feature 1..20: note = Target: FXN; (-) strand; PAM type: YTN; PAM sequence: CTG
  source 1..20: mol_type = other DNA
gaaaatgaggctcagagagg

SEQ ID NO: 25603 - DNA, 20 bp, synthetic construct
  misc_feature 1..20: note = Description of Artificial Sequence: Synthetic oligonucleotide
  misc_feature 1..20: note = Target: FXN; (-) strand; PAM type: YTN; PAM sequence: CTG
  source 1..20: mol_type = other DNA
aagctggaaaatgaggctca

SEQ ID NO: 25604 - DNA, 20 bp, synthetic construct
  misc_feature 1..20: note = Description of Artificial Sequence: Synthetic oligonucleotide
  misc_feature 1..20: note = Target: FXN; (-) strand; PAM type: YTN; PAM sequence: TTC
  source 1..20: mol_type = other DNA
atgggtatccactgaagctg

SEQ ID NO: 25605 - DNA, 20 bp, synthetic construct
  misc_feature 1..20: note = Description of Artificial Sequence: Synthetic oligonucleotide
  misc_feature 1..20: note = Target: FXN; (-) strand; PAM type: YTN; PAM sequence: CTT
  source 1..20: mol_type = other DNA
catgggtatccactgaagct

SEQ ID NO: 25606 - DNA, 20 bp, synthetic construct
  misc_feature 1..20: note = Description of Artificial Sequence: Synthetic oligonucleotide
  misc_feature 1..20: note = Target: FXN; (-) strand; PAM type: YTN; PAM sequence: TTG
  source 1..20: mol_type = other DNA
ccttcatgggtatccactga

SEQ ID NO: 25607 - DNA, 20 bp, synthetic construct
  misc_feature 1..20: note = Description of Artificial Sequence: Synthetic oligonucleotide
  misc_feature 1..20: note = Target: FXN; (-) strand; PAM type: YTN; PAM sequence: TTT
  source 1..20: mol_type = other DNA
gccttcatgggtatccactg

SEQ ID NO: 25608 - DNA, 20 bp, synthetic construct
  misc_feature 1..20: note = Description of Artificial Sequence: Synthetic oligonucleotide
  misc_feature 1..20: note = Target: FXN; (-) strand; PAM type: YTN; PAM sequence: CTG
  source 1..20: mol_type = other DNA
atttgccttcatgggtatcc

SEQ ID NO: 25609 - DNA, 20 bp, synthetic construct
  misc_feature 1..20: note = Description of Artificial Sequence: Synthetic oligonucleotide
  misc_feature 1..20: note = Target: FXN; (-) strand; PAM type: YTN; PAM sequence: CTC
  source 1..20: mol_type = other DNA
tgatttgccttcatgggtat

SEQ ID NO: 25610 - DNA, 20 bp, synthetic construct
  misc_feature 1..20: note = Description of Artificial Sequence: Synthetic oligonucleotide
  misc_feature 1..20: note = Target: FXN; (-) strand; PAM type: YTN; PAM sequence: CTC
  source 1..20: mol_type = other DNA
tctgatttgccttcatgggt

SEQ ID NO: 25611 - DNA, 20 bp, synthetic construct
  misc_feature 1..20: note = Description of Artificial Sequence: Synthetic oligonucleotide
  misc_feature 1..20: note = Target: FXN; (-) strand; PAM type: YTN; PAM sequence: CTC
  source 1..20: mol_type = other DNA
aggcccctctctgatttgcc

SEQ ID NO: 25612 - DNA, 20 bp, synthetic construct
  misc_feature 1..20: note = Description of Artificial Sequence: Synthetic oligonucleotide
  misc_feature 1..20: note = Target: FXN; (-) strand; PAM type: YTN; PAM sequence: CTG
  source 1..20: mol_type = other DNA
gacaaatacacactcaggcc

SEQ ID NO: 25613 - DNA, 20 bp, synthetic construct
  misc_feature 1..20: note = Description of Artificial Sequence: Synthetic oligonucleotide
  misc_feature 1..20: note = Target: FXN; (-) strand; PAM type: YTN; PAM sequence: CTG
  source 1..20: mol_type = other DNA
ctggacaaatacacactcag

SEQ ID NO: 25614 - DNA, 20 bp, synthetic construct
  misc_feature 1..20: note = Description of Artificial Sequence: Synthetic oligonucleotide
  misc_feature 1..20: note = Target: FXN; (-) strand; PAM type: YTN; PAM sequence: CTG
  source 1..20: mol_type = other DNA
cctgctggacaaatacacac

SEQ ID NO: 25615 - DNA, 20 bp, synthetic construct
  misc_feature 1..20: note = Description of Artificial Sequence: Synthetic oligonucleotide
  misc_feature 1..20: note = Target: FXN; (-) strand; PAM type: YTN; PAM sequence: CTC
  source 1..20: mol_type = other DNA
catctgcctgctggacaaat

SEQ ID NO: 25616 - DNA, 20 bp, synthetic construct
  misc_feature 1..20: note = Description of Artificial Sequence: Synthetic oligonucleotide
  misc_feature 1..20: note = Target: FXN; (-) strand; PAM type: YTN; PAM sequence: TTC
  source 1..20: mol_type = other DNA
cctccatctgcctgctggac

SEQ ID NO: 25617 - DNA, 20 bp, synthetic construct
  misc_feature 1..20: note = Description of Artificial Sequence: Synthetic oligonucleotide
  misc_feature 1..20: note = Target: FXN; (-) strand; PAM type: YTN; PAM sequence: TTG
  source 1..20: mol_type = other DNA
ttccctccatctgcctgctg

SEQ ID NO: 25618 - DNA, 20 bp, synthetic construct
  misc_feature 1..20: note = Description of Artificial Sequence: Synthetic oligonucleotide
  misc_feature 1..20: note = Target: FXN; (-) strand; PAM type: YTN; PAM sequence: TTG
  source 1..20: mol_type = other DNA
ttgttccctccatctgcctg

SEQ ID NO: 25619 - DNA, 20 bp, synthetic construct
  misc_feature 1..20: note = Description of Artificial Sequence: Synthetic oligonucleotide
  misc_feature 1..20: note = Target: FXN; (-) strand; PAM type: YTN; PAM sequence: TTT
  source 1..20: mol_type = other DNA
gttgttccctccatctgcct

SEQ ID NO: 25620 - DNA, 20 bp, synthetic construct
  misc_feature 1..20: note = Description of Artificial Sequence: Synthetic oligonucleotide
  misc_feature 1..20: note = Target: FXN; (-) strand; PAM type: YTN; PAM sequence: CTA
  source 1..20: mol_type = other DNA
gtttgttgttccctccatct

SEQ ID NO: 25621 - DNA, 20 bp, synthetic construct
  misc_feature 1..20: note = Description of Artificial Sequence: Synthetic oligonucleotide
  misc_feature 1..20: note = Target: FXN; (-) strand; PAM type: YTN; PAM sequence: CTA
  source 1..20: mol_type = other DNA
cgggtctagtttgttgttcc

SEQ ID NO: 25622 - DNA, 20 bp, synthetic construct
  misc_feature 1..20: note = Description of Artificial Sequence: Synthetic oligonucleotide
  misc_feature 1..20: note = Target: FXN; (-) strand; PAM type: YTN; PAM sequence: CTG
  source 1..20: mol_type = other DNA
aagaactacgggtctagttt

SEQ ID NO: 25623 - DNA, 20 bp, synthetic construct
  misc_feature 1..20: note = Description of Artificial Sequence: Synthetic oligonucleotide
  misc_feature 1..20: note = Target: FXN; (-) strand; PAM type: YTN; PAM sequence: CTA
  source 1..20: mol_type = other DNA
ctgaagaactacgggtctag

SEQ ID NO: 25624 - DNA, 20 bp, synthetic construct
  misc_feature 1..20: note = Description of Artificial Sequence: Synthetic oligonucleotide
  misc_feature 1..20: note = Target: FXN; (-) strand; PAM type: YTN; PAM sequence: TTA
  source 1..20: mol_type = other DNA
tccctactgaagaactacgg

SEQ ID NO: 25625 - DNA, 20 bp, synthetic construct
  misc_feature 1..20: note = Description of Artificial Sequence: Synthetic oligonucleotide
  misc_feature 1..20: note = Target: FXN; (-) strand; PAM type: YTN; PAM sequence: CTT
  source 1..20: mol_type = other DNA
atccctactgaagaactacg

SEQ ID NO: 25626 - DNA, 20 bp, synthetic construct
  misc_feature 1..20: note = Description of Artificial Sequence: Synthetic oligonucleotide
  misc_feature 1..20: note = Target: FXN; (-) strand; PAM type: YTN; PAM sequence: TTA
  source 1..20: mol_type = other DNA
tcttatccctactgaagaac

SEQ ID NO: 25627 - DNA, 20 bp, synthetic construct
  misc_feature 1..20: note = Description of Artificial Sequence: Synthetic oligonucleotide
  misc_feature 1..20: note = Target: FXN; (-) strand; PAM type: YTN; PAM sequence: TTG
  source 1..20: mol_type = other DNA
ggcagttatcttatccctac

SEQ ID NO: 25628 - DNA, 20 bp, synthetic construct
  misc_feature 1..20: note = Description of Artificial Sequence: Synthetic oligonucleotide
  misc_feature 1..20: note = Target: FXN; (-) strand; PAM type: YTN; PAM sequence: TTT
  source 1..20: mol_type = other DNA
gggcagttatcttatcccta

SEQ ID NO: 25629 - DNA, 20 bp, synthetic construct
  misc_feature 1..20: note = Description of Artificial Sequence: Synthetic oligonucleotide
  misc_feature 1..20: note = Target: FXN; (-) strand; PAM type: YTN; PAM sequence: TTT
  source 1..20: mol_type = other DNA
tgggcagttatcttatccct

SEQ ID NO: 25630 - DNA, 20 bp, synthetic construct
  misc_feature 1..20: note = Description of Artificial Sequence: Synthetic oligonucleotide
  misc_feature 1..20: note = Target: FXN; (-) strand; PAM type: YTN; PAM sequence: CTT
  source 1..20: mol_type = other DNA
ttgggcagttatcttatccc

SEQ ID NO: 25631 - DNA, 20 bp, synthetic construct
  misc_feature 1..20: note = Description of Artificial Sequence: Synthetic oligonucleotide
  misc_feature 1..20: note = Target: FXN; (-) strand; PAM type: YTN; PAM sequence: CTA
  source 1..20: mol_type = other DNA
aataacttttgggcagttat

SEQ ID NO: 25632 - DNA, 20 bp, synthetic construct
  misc_feature 1..20: note = Description of Artificial Sequence: Synthetic oligonucleotide
  misc_feature 1..20: note = Target: FXN; (-) strand; PAM type: YTN; PAM sequence: TTG
  source 1..20: mol_type = other DNA
taatctaaataacttttggg

SEQ ID NO: 25633 - DNA, 20 bp, synthetic construct
  misc_feature 1..20: note = Description of Artificial Sequence: Synthetic oligonucleotide
  misc_feature 1..20: note = Target: FXN; (-) strand; PAM type: YTN; PAM sequence: TTT
  source 1..20: mol_type = other DNA
gtaatctaaataacttttgg

SEQ ID NO: 25634 - DNA, 20 bp, synthetic construct
  misc_feature 1..20: note = Description of Artificial Sequence: Synthetic oligonucleotide
  misc_feature 1..20: note = Target: FXN; (-) strand; PAM type: YTN; PAM sequence: CTT
  source 1..20: mol_type = other DNA
tgtaatctaaataacttttg

SEQ ID NO: 25635 - DNA, 20 bp, synthetic construct
  misc_feature 1..20: note = Description of Artificial Sequence: Synthetic oligonucleotide
  misc_feature 1..20: note = Target: FXN; (-) strand; PAM type: YTN; PAM sequence: CTC
  source 1..20: mol_type = other DNA
aagtctttgtaatctaaata

SEQ ID NO: 25636 - DNA, 20 bp, synthetic construct
  misc_feature 1..20: note = Description of Artificial Sequence: Synthetic oligonucleotide
  misc_feature 1..20: note = Target: FXN; (-) strand; PAM type: YTN; PAM sequence: CTC
  source 1..20: mol_type = other DNA
acaggagcagggctcaagtc

SEQ ID NO: 25637 - DNA, 20 bp, synthetic construct
  misc_feature 1..20: note = Description of Artificial Sequence: Synthetic oligonucleotide
  misc_feature 1..20: note = Target: FXN; (-) strand; PAM type: YTN; PAM sequence: CTG
  source 1..20: mol_type = other DNA
tctcacaggagcagggctca

SEQ ID NO: 25638 - DNA, 20 bp, synthetic construct
  misc_feature 1..20: note = Description of Artificial Sequence: Synthetic oligonucleotide
  misc_feature 1..20: note = Target: FXN; (-) strand; PAM type: YTN; PAM sequence: CTA
  source 1..20: mol_type = other DNA
ccccatcactgtctcacagg

SEQ ID NO: 25639 - DNA, 20 bp, synthetic construct
  misc_feature 1..20: note = Description of Artificial Sequence: Synthetic oligonucleotide
  misc_feature 1..20: note = Target: FXN; (-) strand; PAM type: YTN; PAM sequence: TTC
  source 1..20: mol_type = other DNA
ccaggaatgcacccgaccta

SEQ ID NO: 25640 - DNA, 20 bp, synthetic construct
  misc_feature 1..20: note = Description of Artificial Sequence: Synthetic oligonucleotide
  misc_feature 1..20: note = Target: FXN; (-) strand; PAM type: YTN; PAM sequence: CTT
  source 1..20: mol_type = other DNA
cccaggaatgcacccgacct

SEQ ID NO: 25641 - DNA, 20 bp, synthetic construct
  misc_feature 1..20: note = Description of Artificial Sequence: Synthetic oligonucleotide
  misc_feature 1..20: note = Target: FXN; (-) strand; PAM type: YTN; PAM sequence: TTC
  source 1..20: mol_type = other DNA
aaaaatatgcttcccaggaa

SEQ ID NO: 25642 - DNA, 20 bp, synthetic construct
  misc_feature 1..20: note = Description of Artificial Sequence: Synthetic oligonucleotide
  misc_feature 1..20: note = Target: FXN; (-) strand; PAM type: YTN; PAM sequence: TTT
  source 1..20: mol_type = other DNA
caaaaatatgcttcccagga

SEQ ID NO: 25643 - DNA, 20 bp, synthetic construct
  misc_feature 1..20: note = Description of Artificial Sequence: Synthetic oligonucleotide
  misc_feature 1..20: note = Target: FXN; (-) strand; PAM type: YTN; PAM sequence: TTT
  source 1..20: mol_type = other DNA
tcaaaaatatgcttcccagg

SEQ ID NO: 25644 - DNA, 20 bp, synthetic construct
  misc_feature 1..20: note = Description of Artificial Sequence: Synthetic oligonucleotide
  misc_feature 1..20: note = Target: FXN; (-) strand; PAM type: YTN; PAM sequence: CTT
  source 1..20: mol_type = other DNA
ttcaaaaatatgcttcccag

SEQ ID NO: 25645 - DNA, 20 bp, synthetic construct
  misc_feature 1..20: note = Description of Artificial Sequence: Synthetic oligonucleotide
  misc_feature 1..20: note = Target: FXN; (-) strand; PAM type: YTN; PAM sequence: TTA
  source 1..20: mol_type = other DNA
gaatcccaggtgagcttttc

SEQ ID NO: 25646 - DNA, 20 bp, synthetic construct
  misc_feature 1..20: note = Description of Artificial Sequence: Synthetic oligonucleotide
  misc_feature 1..20: note = Target: FXN; (-) strand; PAM type: YTN; PAM sequence: CTA
  source 1..20: mol_type = other DNA
gggatacacattagaatccc

SEQ ID NO: 25647 - DNA, 20 bp, synthetic construct
  misc_feature 1..20: note = Description of Artificial Sequence: Synthetic oligonucleotide
  misc_feature 1..20: note = Target: FXN; (-) strand; PAM type: YTN; PAM sequence: CTA
  source 1..20: mol_type = other DNA
ggaataagacctagggatac

SEQ ID NO: 25648 - DNA, 20 bp, synthetic construct
  misc_feature 1..20: note = Description of Artificial Sequence: Synthetic oligonucleotide
  misc_feature 1..20: note = Target: FXN; (-) strand; PAM type: YTN; PAM sequence: CTC
  source 1..20: mol_type = other DNA
taggaataagacctagggat

SEQ ID NO: 25649 - DNA, 20 bp, synthetic construct
  misc_feature 1..20: note = Description of Artificial Sequence: Synthetic oligonucleotide
  misc_feature 1..20: note = Target: FXN; (-) strand; PAM type: YTN; PAM sequence: CTG
  source 1..20: mol_type = other DNA
cccaggtcatgccacacccc

SEQ ID NO: 25650 - DNA, 20 bp, synthetic construct
  misc_feature 1..20: note = Description of Artificial Sequence: Synthetic oligonucleotide
  misc_feature 1..20: note = Target: FXN; (-) strand; PAM type: YTN; PAM sequence: TTA
  source 1..20: mol_type = other DNA
aaaatcccagtgccctgccc

SEQ ID NO: 25651 - DNA, 20 bp, synthetic construct
  misc_feature 1..20: note = Description of Artificial Sequence: Synthetic oligonucleotide
  misc_feature 1..20: note = Target: FXN; (-) strand; PAM type: YTN; PAM sequence: CTT
  source 1..20: mol_type = other DNA
aaaaatcccagtgccctgcc

SEQ ID NO: 25652 - DNA, 20 bp, synthetic construct
  misc_feature 1..20: note = Description of Artificial Sequence: Synthetic oligonucleotide
  misc_feature 1..20: note = Target: FXN; (-) strand; PAM type: YTN; PAM sequence: CTG
  source 1..20: mol_type = other DNA
tggagcttaaaaatcccagt

SEQ ID NO: 25653 - DNA, 20 bp, synthetic construct
  misc_feature 1..20: note = Description of Artificial Sequence: Synthetic oligonucleotide
  misc_feature 1..20: note = Target: FXN; (-) strand; PAM type: YTN; PAM sequence: TTG
  source 1..20: mol_type = other DNA
gaatcatctgtggagcttaa

SEQ ID NO: 25654 - DNA, 20 bp, synthetic construct
  misc_feature 1..20: note = Description of Artificial Sequence: Synthetic oligonucleotide
  misc_feature 1..20: note = Target: FXN; (-) strand; PAM type: YTN; PAM sequence: CTG
  source 1..20: mol_type = other DNA
catattggaatcatctgtgg

SEQ ID NO: 25655 - DNA, 20 bp, synthetic construct
  misc_feature 1..20: note = Description of Artificial Sequence: Synthetic oligonucleotide
  misc_feature 1..20: note = Target: FXN; (-) strand; PAM type: YTN; PAM sequence: CTA
  source 1..20: mol_type = other DNA
gctgcatattggaatcatct

SEQ ID NO: 25656 - DNA, 20 bp, synthetic construct
  misc_feature 1..20: note = Description of Artificial Sequence: Synthetic oligonucleotide
  misc_feature 1..20: note = Target: FXN; (-) strand; PAM type: YTN; PAM sequence: CTC
  source 1..20: mol_type = other DNA
atactagctgcatattggaa

SEQ ID NO: 25657 - DNA, 20 bp, synthetic construct
  misc_feature 1..20: note = Description of Artificial Sequence: Synthetic oligonucleotide
  misc_feature 1..20: note = Target: FXN; (-) strand; PAM type: YTN; PAM sequence: TTC
  source 1..20: mol_type = other DNA
tcatactagctgcatattgg

SEQ ID NO: 25658 - DNA, 20 bp, synthetic construct
  misc_feature 1..20: note = Description of Artificial Sequence: Synthetic oligonucleotide
  misc_feature 1..20: note = Target: FXN; (-) strand; PAM type: YTN; PAM sequence: TTC
  source 1..20: mol_type = other DNA
aaaaaaaaacaagttctcat

SEQ ID NO: 25659 - DNA, 20 bp, synthetic construct
  misc_feature 1..20: note = Description of Artificial Sequence: Synthetic oligonucleotide
  misc_feature 1..20: note = Target: FXN; (-) strand; PAM type: YTN; PAM sequence: CTT
  source 1..20: mol_type = other DNA
caaaaaaaaacaagttctca

SEQ ID NO: 25660 - DNA, 20 bp, synthetic construct
  misc_feature 1..20: note = Description of Artificial Sequence: Synthetic oligonucleotide
  misc_feature 1..20: note = Target: FXN; (-) strand; PAM type: YTN; PAM sequence: CTC
  source 1..20: mol_type = other DNA
cttcaaaaaaaaacaagttc

SEQ ID NO: 25661 - DNA, 20 bp, synthetic construct
  misc_feature 1..20: note = Description of Artificial Sequence: Synthetic oligonucleotide
  misc_feature 1..20: note = Target: FXN; (-) strand; PAM type: YTN; PAM sequence: CTG
  source 1..20: mol_type = other DNA
ggtgacagagtgagactcct

SEQ ID NO: 25662 - DNA, 20 bp, synthetic construct
  misc_feature 1..20: note = Description of Artificial Sequence: Synthetic oligonucleotide
  misc_feature 1..20: note = Target: FXN; (-) strand; PAM type: YTN; PAM sequence: CTC
  source 1..20: mol_type = other DNA
cagcctgggtgacagagtga

SEQ ID NO: 25663 - DNA, 20 bp, synthetic construct
  misc_feature 1..20: note = Description of Artificial Sequence: Synthetic oligonucleotide
  misc_feature 1..20: note = Target: FXN; (-) strand; PAM type: YTN; PAM sequence: CTG
  source 1..20: mol_type = other DNA
cactccagcctgggtgacag

SEQ ID NO: 25664 - DNA, 20 bp, synthetic construct
  misc_feature 1..20: note = Description of Artificial Sequence: Synthetic oligonucleotide
  misc_feature 1..20: note = Target: FXN; (-) strand; PAM type: YTN; PAM sequence: TTG
  source 1..20: mol_type = other DNA
cgccactgcactccagcctg

SEQ ID NO: 25665 - DNA, 20 bp, synthetic construct
  misc_feature 1..20: note = Description of Artificial Sequence: Synthetic oligonucleotide
  misc_feature 1..20: note = Target: FXN; (-) strand; PAM type: YTN; PAM sequence: TTG
  source 1..20: mol_type = other DNA
aacccaggaagcggagcagt

SEQ ID NO: 25666 - DNA, 20 bp, synthetic construct
  misc_feature 1..20: note = Description of Artificial Sequence: Synthetic oligonucleotide
  misc_feature 1..20: note = Target: FXN; (-) strand; PAM type: YTN; PAM sequence: CTT
  source 1..20: mol_type = other DNA
gaacccaggaagcggagcag

SEQ ID NO: 25667 - DNA, 20 bp, synthetic construct
  misc_feature 1..20: note = Description of Artificial Sequence: Synthetic oligonucleotide
  misc_feature 1..20: note = Target: FXN; (-) strand; PAM type: YTN; PAM sequence: CTG
  source 1..20: mol_type = other DNA
cttgaacccaggaagcggag

SEQ ID NO: 25668 - DNA, 20 bp, synthetic construct
  misc_feature 1..20: note = Description of Artificial Sequence: Synthetic oligonucleotide
  misc_feature 1..20: note = Target: FXN; (-) strand; PAM type: YTN; PAM sequence: CTG
  source 1..20: mol_type = other DNA
aggcaggagaactgcttgaa

SEQ ID NO: 25669 - DNA, 20 bp, synthetic construct
  misc_feature 1..20: note = Description of Artificial Sequence: Synthetic oligonucleotide
  misc_feature 1..20: note = Target: FXN; (-) strand; PAM type: YTN; PAM sequence: CTC
  source 1..20: mol_type = other DNA
gggaggctgaggcaggagaa

SEQ ID NO: 25670 - DNA, 20 bp, synthetic construct
  misc_feature 1..20: note = Description of Artificial Sequence: Synthetic oligonucleotide
  misc_feature 1..20: note = Target: FXN; (-) strand; PAM type: YTN; PAM sequence: CTA
  source 1..20: mol_type = other DNA
ctcgggaggctgaggcagga

SEQ ID NO: 25671 - DNA, 20 bp, synthetic construct
  misc_feature 1..20: note = Description of Artificial Sequence: Synthetic oligonucleotide
  misc_feature 1..20: note = Target: FXN; (-) strand; PAM type: YTN; PAM sequence: CTA
  source 1..20: mol_type = other DNA
taatcccagctactcgggag

SEQ ID NO: 25672 - DNA, 20 bp, synthetic construct
  misc_feature 1..20: note = Description of Artificial Sequence: Synthetic oligonucleotide
  misc_feature 1..20: note = Target: FXN; (-) strand; PAM type: YTN; PAM sequence: CTG
  source 1..20: mol_type = other DNA
ggcatggtggcagatgccta

SEQ ID NO: 25673 - DNA, 20 bp, synthetic construct
  misc_feature 1..20: note = Description of Artificial Sequence: Synthetic oligonucleotide
  misc_feature 1..20: note = Target: FXN; (-) strand; PAM type: YTN; PAM sequence: TTA
  source 1..20: mol_type = other DNA
gctgggcatggtggcagatg

SEQ ID NO: 25674 - DNA, 20 bp, synthetic construct
  misc_feature 1..20: note = Description of Artificial Sequence: Synthetic oligonucleotide
  misc_feature 1..20: note = Target: FXN; (-) strand; PAM type: YTN; PAM sequence: CTA
  source 1..20: mol_type = other DNA
aaatgcaaaaattagctggg

SEQ ID NO: 25675 - DNA, 20 bp, synthetic construct
  misc_feature 1..20: note = Description of Artificial Sequence: Synthetic oligonucleotide
  misc_feature 1..20: note = Target: FXN; (-) strand; PAM type: YTN; PAM sequence: TTA
  source 1..20: mol_type = other DNA
ctaaaatgcaaaaattagct

SEQ ID NO: 25676 - DNA, 20 bp, synthetic construct
  misc_feature 1..20: note = Description of Artificial Sequence: Synthetic oligonucleotide
  misc_feature 1..20: note = Target: FXN; (-) strand; PAM type: YTN; PAM sequence: TTT
  source 1..20: mol_type = other DNA
actaaaatgcaaaaattagc

SEQ ID NO: 25677 - DNA, 20 bp, synthetic construct
  misc_feature 1..20: note = Description of Artificial Sequence: Synthetic oligonucleotide
  misc_feature 1..20: note = Target: FXN; (-) strand; PAM type: YTN; PAM sequence: CTT
  source 1..20: mol_type = other DNA
tactaaaatgcaaaaattag

SEQ ID NO: 25678 - DNA, 20 bp, synthetic construct
  misc_feature 1..20: note = Description of Artificial Sequence: Synthetic oligonucleotide
  misc_feature 1..20: note = Target: FXN; (-) strand; PAM type: YTN; PAM sequence: CTA
  source 1..20: mol_type = other DNA
accaacatggtgaaaccccg

SEQ ID NO: 25679 - DNA, 20 bp, synthetic construct
  misc_feature 1..20: note = Description of Artificial Sequence: Synthetic oligonucleotide
  misc_feature 1..20: note = Target: FXN; (-) strand; PAM type: YTN; PAM sequence: TTG
  source 1..20: mol_type = other DNA
aggtcaggagatcgagacca

SEQ ID NO: 25680 - DNA, 20 bp, synthetic construct
  misc_feature 1..20: note = Description of Artificial Sequence: Synthetic oligonucleotide
  misc_feature 1..20: note = Target: FXN; (-) strand; PAM type: YTN; PAM sequence: TTT
  source 1..20: mol_type = other DNA
gaggtcaggagatcgagacc

SEQ ID NO: 25681 - DNA, 20 bp, synthetic construct
  misc_feature 1..20: note = Description of Artificial Sequence: Synthetic oligonucleotide
  misc_feature 1..20: note = Target: FXN; (-) strand; PAM type: YTN; PAM sequence: CTG
  source 1..20: mol_type = other DNA
atgggggtggaccatttgag

SEQ ID NO: 25682 - DNA, 20 bp, synthetic construct
  misc_feature 1..20: note = Description of Artificial Sequence: Synthetic oligonucleotide
  misc_feature 1..20: note = Target: FXN; (-) strand; PAM type: YTN; PAM sequence: TTG
  source 1..20: mol_type = other DNA
gaaggctgatgggggtggac

SEQ ID NO: 25683 - DNA, 20 bp, synthetic construct
  misc_feature 1..20: note = Description of Artificial Sequence: Synthetic oligonucleotide
  misc_feature 1..20: note = Target: FXN; (-) strand; PAM type: YTN; PAM sequence: TTT
  source 1..20: mol_type = other DNA
ggaaggctgatgggggtgga

SEQ ID NO: 25684 - DNA, 20 bp, synthetic construct
  misc_feature 1..20: note = Description of Artificial Sequence: Synthetic oligonucleotide
  misc_feature 1..20: note = Target: FXN; (-) strand; PAM type: YTN; PAM sequence: CTT
  source 1..20: mol_type = other DNA
tggaaggctgatgggggtgg

SEQ ID NO: 25685 - DNA, 20 bp, synthetic construct
  misc_feature 1..20: note = Description of Artificial Sequence: Synthetic oligonucleotide
  misc_feature 1..20: note = Target: FXN; (-) strand; PAM type: YTN; PAM sequence: TTA
  source 1..20: mol_type = other DNA
tcccaaaactttggaaggct

SEQ ID NO: 25686 - DNA, 20 bp, synthetic construct
  misc_feature 1..20: note = Description of Artificial Sequence: Synthetic oligonucleotide
  misc_feature 1..20: note = Target: FXN; (-) strand; PAM type: YTN; PAM sequence: CTG
  source 1..20: mol_type = other DNA
ttatcccaaaactttggaag

SEQ ID NO: 25687 - DNA, 20 bp, synthetic construct
  misc_feature 1..20: note = Description of Artificial Sequence: Synthetic oligonucleotide
  misc_feature 1..20: note = Target: FXN; (-) strand; PAM type: YTN; PAM sequence: CTC
  source 1..20: mol_type = other DNA
acgcctgttatcccaaaact

SEQ ID NO: 25688 - DNA, 20 bp, synthetic construct
  misc_feature 1..20: note = Description of Artificial Sequence: Synthetic oligonucleotide
  misc_feature 1..20: note = Target: FXN; (-) strand; PAM type: YTN; PAM sequence: CTG
  source 1..20: mol_type = other DNA
gtggctcacgcctgttatcc

SEQ ID NO: 25689 - DNA, 20 bp, synthetic construct
  misc_feature 1..20: note = Description of Artificial Sequence: Synthetic oligonucleotide
  misc_feature 1..20: note = Target: FXN; (-) strand; PAM type: YTN; PAM sequence: CTC
  source 1..20: mol_type = other DNA
acaccaggccggacctggtg

SEQ ID NO: 25690 - DNA, 20 bp, synthetic construct
  misc_feature 1..20: note = Description of Artificial Sequence: Synthetic oligonucleotide
  misc_feature 1..20: note = Target: FXN; (-) strand; PAM type: YTN; PAM sequence: TTC
  source 1..20: mol_type = other DNA
tcacaccaggccggacctgg

SEQ ID NO: 25691 - DNA, 20 bp, synthetic construct
  misc_feature 1..20: note = Description of Artificial Sequence: Synthetic oligonucleotide
  misc_feature 1..20: note = Target: FXN; (-) strand; PAM type: YTN; PAM sequence: CTC
  source 1..20: mol_type = other DNA
agaagttctcacaccaggcc

SEQ ID NO: 25692 - DNA, 20 bp, synthetic construct
  misc_feature 1..20: note = Description of Artificial Sequence: Synthetic oligonucleotide
  misc_feature 1..20: note = Target: FXN; (-) strand; PAM type: YTN; PAM sequence: TTC
  source 1..20: mol_type = other DNA
atccaactcagaagttctca

SEQ ID NO: 25693 - DNA, 20 bp, synthetic construct
  misc_feature 1..20: note = Description of Artificial Sequence: Synthetic oligonucleotide
  misc_feature 1..20: note = Target: FXN; (-) strand; PAM type: YTN; PAM sequence: TTT
  source 1..20: mol_type = other DNA
catccaactcagaagttctc

SEQ ID NO: 25694 - DNA, 20 bp, synthetic construct
  misc_feature 1..20: note = Description of Artificial Sequence: Synthetic oligonucleotide
  misc_feature 1..20: note = Target: FXN; (-) strand; PAM type: YTN; PAM sequence: CTA
  source 1..20: mol_type = other DNA
atgtttcatccaactcagaa

SEQ ID NO: 25695 - DNA, 20 bp, synthetic construct
  misc_feature 1..20: note = Description of Artificial Sequence: Synthetic oligonucleotide
  misc_feature 1..20: note = Target: FXN; (-) strand; PAM type: YTN; PAM sequence: CTG
  source 1..20: mol_type = other DNA
gggctaatgtttcatccaac

SEQ ID NO: 25696 - DNA, 20 bp, synthetic construct
  misc_feature 1..20: note = Description of Artificial Sequence: Synthetic oligonucleotide
  misc_feature 1..20: note = Target: FXN; (-) strand; PAM type: YTN; PAM sequence: CTA
  source 1..20: mol_type = other DNA
ggatctggggctaatgtttc

SEQ ID NO: 25697 - DNA, 20 bp, synthetic construct
  misc_feature 1..20: note = Description of Artificial Sequence: Synthetic oligonucleotide
  misc_feature 1..20: note = Target: FXN; (-) strand; PAM type: YTN; PAM sequence: TTC
  source 1..20: mol_type = other DNA
taggatctggggctaatgtt

SEQ ID NO: 25698 - DNA, 20 bp, synthetic construct
  misc_feature 1..20: note = Description of Artificial Sequence: Synthetic oligonucleotide
  misc_feature 1..20: note = Target: FXN; (-) strand; PAM type: YTN; PAM sequence: CTT
  source 1..20: mol_type = other DNA
ctaggatctggggctaatgt

SEQ ID NO: 25699 - DNA, 20 bp, synthetic construct
  misc_feature 1..20: note = Description of Artificial Sequence: Synthetic oligonucleotide
  misc_feature 1..20: note = Target: FXN; (-) strand; PAM type: YTN; PAM sequence: CTG
  source 1..20: mol_type = other DNA
gcttctaggatctggggcta

SEQ ID NO: 25700 - DNA, 20 bp, synthetic construct
  misc_feature 1..20: note = Description of Artificial Sequence: Synthetic oligonucleotide
  misc_feature 1..20: note = Target: FXN; (-) strand; PAM type: YTN; PAM sequence: TTC
  source 1..20: mol_type = other DNA
cctggcttctaggatctggg

SEQ ID NO: 25701 - DNA, 20 bp, synthetic construct
  misc_feature 1..20: note = Description of Artificial Sequence: Synthetic oligonucleotide
  misc_feature 1..20: note = Target: FXN; (-) strand; PAM type: YTN; PAM sequence: CTT
  source 1..20: mol_type = other DNA
ccctggcttctaggatctgg

SEQ ID NO: 25702 - DNA, 20 bp, synthetic construct
  misc_feature 1..20: note = Description of Artificial Sequence: Synthetic oligonucleotide
  misc_feature 1..20: note = Target: FXN; (-) strand; PAM type: YTN; PAM sequence: CTG
  source 1..20: mol_type = other DNA
gtggccagtcgataaagacc

SEQ ID NO: 25703 - DNA, 20 bp, synthetic construct
  misc_feature 1..20: note = Description of Artificial Sequence: Synthetic oligonucleotide
  misc_feature 1..20: note = Target: FXN; (-) strand; PAM type: YTN; PAM sequence: CTG
  source 1..20: mol_type = other DNA
ccacctggtggccagtcgat

SEQ ID NO: 25704 - DNA, 20 bp, synthetic construct
  misc_feature 1..20: note = Description of Artificial Sequence: Synthetic oligonucleotide
  misc_feature 1..20: note = Target: FXN; (-) strand; PAM type: YTN; PAM sequence: TTG
  source 1..20: mol_type = other DNA
cccaaatctgccacctggtg

SEQ ID NO: 25705 - DNA, 20 bp, synthetic construct
  misc_feature 1..20: note = Description of Artificial Sequence: Synthetic oligonucleotide
  misc_feature 1..20: note = Target: FXN; (-) strand; PAM type: YTN; PAM sequence: CTT
  source 1..20: mol_type = other DNA
gcccaaatctgccacctggt

SEQ ID NO: 25706 - DNA, 20 bp, synthetic construct
  misc_feature 1..20: note = Description of Artificial Sequence: Synthetic oligonucleotide
  misc_feature 1..20: note = Target: FXN; (-) strand; PAM type: YTN; PAM sequence: CTA
  source 1..20: mol_type = other DNA
aacccaaaggcagacccttg

SEQ ID NO: 25707 - DNA, 20 bp, synthetic construct
  misc_feature 1..20: note = Description of Artificial Sequence: Synthetic oligonucleotide
  misc_feature 1..20: note = Target: FXN; (-) strand; PAM type: YTN; PAM sequence: TTC
  source 1..20: mol_type = other DNA
taaacccaaaggcagaccct

SEQ ID NO: 25708 - DNA, 20 bp, synthetic construct
  misc_feature 1..20: note = Description of Artificial Sequence: Synthetic oligonucleotide
  misc_feature 1..20: note = Target: FXN; (-) strand; PAM type: YTN; PAM sequence: CTA
  source 1..20: mol_type = other DNA
agcaataattctaaacccaa

SEQ ID NO: 25709 - DNA, 20 bp, synthetic construct
  misc_feature 1..20: note = Description of Artificial Sequence: Synthetic oligonucleotide
  misc_feature 1..20: note = Target: FXN; (-) strand; PAM type: YTN; PAM sequence: TTA
  source 1..20: mol_type = other DNA
aggcctaagcaataattcta

SEQ ID NO: 25710 - DNA, 20 bp, synthetic construct
  misc_feature 1..20: note = Description of Artificial Sequence: Synthetic oligonucleotide
  misc_feature 1..20: note = Target: FXN; (-) strand; PAM type: YTN; PAM sequence: TTT
  source 1..20: mol_type = other DNA
aaggcctaagcaataattct

SEQ ID NO: 25711 - DNA, 20 bp, synthetic construct
  misc_feature 1..20: note = Description of Artificial Sequence: Synthetic oligonucleotide
  misc_feature 1..20: note = Target: FXN; (-) strand; PAM type: YTN; PAM sequence: CTT
  source 1..20: mol_type = other DNA
taaggcctaagcaataattc

SEQ ID NO: 25712 - DNA, 20 bp, synthetic construct
  misc_feature 1..20: note = Description of Artificial Sequence: Synthetic oligonucleotide
  misc_feature 1..20: note = Target: FXN; (-) strand; PAM type: YTN; PAM sequence: CTA
  source 1..20: mol_type = other DNA
ctttaaggcctaagcaataa

SEQ ID NO: 25713 - DNA, 20 bp, synthetic construct
  misc_feature 1..20: note = Description of Artificial Sequence: Synthetic oligonucleotide
  misc_feature 1..20: note = Target: FXN; (-) strand; PAM type: YTN; PAM sequence: CTG
  source 1..20: mol_type = other DNA
gcaaaaaagaactactttaa

SEQ ID NO: 25714 - DNA, 20 bp, synthetic construct
  misc_feature 1..20: note = Description of Artificial Sequence: Synthetic oligonucleotide
  misc_feature 1..20: note = Target: FXN; (-) strand; PAM type: YTN; PAM sequence: CTC
  source 1..20: mol_type = other DNA
ccactggcaaaaaagaacta

SEQ ID NO: 25715 - DNA, 20 bp, synthetic construct
  misc_feature 1..20: note = Description of Artificial Sequence: Synthetic oligonucleotide
  misc_feature 1..20: note = Target: FXN; (-) strand; PAM type: YTN; PAM sequence: TTC
  source 1..20: mol_type = other DNA
tcccactggcaaaaaagaac

SEQ ID NO: 25716 - DNA, 20 bp, synthetic construct
  misc_feature 1..20: note = Description of Artificial Sequence: Synthetic oligonucleotide
  misc_feature 1..20: note = Target: FXN; (-) strand; PAM type: YTN; PAM sequence: TTT
  source 1..20: mol_type = other DNA
ctcccactggcaaaaaagaa

SEQ ID NO: 25717 - DNA, 20 bp, synthetic construct
  misc_feature 1..20: note = Description of Artificial Sequence: Synthetic oligonucleotide
  misc_feature 1..20: note = Target: FXN; (-) strand; PAM type: YTN; PAM sequence: TTT
  source 1..20: mol_type = other DNA
tctcccactggcaaaaaaga

SEQ ID NO: 25718 - DNA, 20 bp, synthetic construct
  misc_feature 1..20: note = Description of Artificial Sequence: Synthetic oligonucleotide
  misc_feature 1..20: note = Target: FXN; (-) strand; PAM type: YTN; PAM sequence: TTG
  source 1..20: mol_type = other DNA
agggattttctcccactggc

SEQ ID NO: 25719 - DNA, 20 bp, synthetic construct
  misc_feature 1..20: note = Description of Artificial Sequence: Synthetic oligonucleotide
  misc_feature 1..20: note = Target: FXN; (-) strand; PAM type: YTN; PAM sequence: TTT
  source 1..20: mol_type = other DNA
gagggattttctcccactgg

SEQ ID NO: 25720 - DNA, 20 bp, synthetic construct
  misc_feature 1..20: note = Description of Artificial Sequence: Synthetic oligonucleotide
  misc_feature 1..20: note = Target: FXN; (-) strand; PAM type: YTN; PAM sequence: CTT
  source 1..20: mol_type = other DNA
tgagggattttctcccactg

SEQ ID NO: 25721 - DNA, 20 bp, synthetic construct
  misc_feature 1..20: note = Description of Artificial Sequence: Synthetic oligonucleotide
  misc_feature 1..20: note = Target: FXN; (-) strand; PAM type: YTN; PAM sequence: CTC
  source 1..20: mol_type = other DNA
aaaaaacaaacaaacagaca

SEQ ID NO: 25722 - DNA, 20 bp, synthetic construct
  misc_feature 1..20: note = Description of Artificial Sequence: Synthetic oligonucleotide
  misc_feature 1..20: note = Target: FXN; (-) strand; PAM type: YTN; PAM sequence: CTG
  source 1..20: mol_type = other DNA
tctcaaaaaacaaacaaaca

SEQ ID NO: 25723 - DNA, 20 bp, synthetic construct
  misc_feature 1..20: note = Description of Artificial Sequence: Synthetic oligonucleotide
  misc_feature 1..20: note = Target: FXN; (-) strand; PAM type: YTN; PAM sequence: CTC
  source 1..20: mol_type = other DNA
tgtctcaaaaaacaaacaaa

SEQ ID NO: 25724 - DNA, 20 bp, synthetic construct
  misc_feature 1..20: note = Description of Artificial Sequence: Synthetic oligonucleotide
  misc_feature 1..20: note = Target: FXN; (-) strand; PAM type: YTN; PAM sequence: CTG
  source 1..20: mol_type = other DNA
aataacagagggagactctg

SEQ ID NO: 25725 - DNA, 20 bp, synthetic construct
  misc_feature 1..20: note = Description of Artificial Sequence: Synthetic oligonucleotide
  misc_feature 1..20: note = Target: FXN; (-) strand; PAM type: YTN; PAM sequence: CTC
  source 1..20: mol_type = other DNA
caggctgaataacagaggga

SEQ ID NO: 25726 - DNA, 20 bp, synthetic construct
  misc_feature 1..20: note = Description of Artificial Sequence: Synthetic oligonucleotide
  misc_feature 1..20: note = Target: FXN; (-) strand; PAM type: YTN; PAM sequence: CTG
  source 1..20: mol_type = other DNA
cactccaggctgaataacag

SEQ ID NO: 25727 - DNA, 20 bp, synthetic construct
  misc_feature 1..20: note = Description of Artificial Sequence: Synthetic oligonucleotide
  misc_feature 1..20: note = Target: FXN; (-) strand; PAM type: YTN; PAM sequence: TTG
  source 1..20: mol_type = other DNA
cagtgagatcatgccactgc

SEQ ID NO: 25728 - DNA, 20 bp, synthetic construct
  misc_feature 1..20: note = Description of Artificial Sequence: Synthetic oligonucleotide
  misc_feature 1..20: note = Target: FXN; (-) strand; PAM type: YTN; PAM sequence: TTG
  source 1..20: mol_type = other DNA
aacccgagaggcagaggttg

SEQ ID NO: 25729 - DNA, 20 bp, synthetic construct
  misc_feature 1..20: note = Description of Artificial Sequence: Synthetic oligonucleotide
  misc_feature 1..20: note = Target: FXN; (-) strand; PAM type: YTN; PAM sequence: CTT
  source 1..20: mol_type = other DNA
gaacccgagaggcagaggtt

SEQ ID NO: 25730 - DNA, 20 bp, synthetic construct
  misc_feature 1..20: note = Description of Artificial Sequence: Synthetic oligonucleotide
  misc_feature 1..20: note = Target: FXN; (-) strand; PAM type: YTN; PAM sequence: CTG
  source 1..20: mol_type = other DNA
cttgaacccgagaggcagag

SEQ ID NO: 25731 - DNA, 20 bp, synthetic construct
  misc_feature 1..20: note = Description of Artificial Sequence: Synthetic oligonucleotide
  misc_feature 1..20: note = Target: FXN; (-) strand; PAM type: YTN; PAM sequence: TTG
  source 1..20: mol_type = other DNA
aggcaggagaactgcttgaa

SEQ ID NO: 25732 - DNA, 20 bp, synthetic construct
  misc_feature 1..20: note = Description of Artificial Sequence: Synthetic oligonucleotide
  misc_feature 1..20: note = Target: FXN; (-) strand; PAM type: YTN; PAM sequence: TTG
  source 1..20: mol_type = other DNA
ggaggttgaggcaggagaac

SEQ ID NO: 25733 - DNA, 20 bp, synthetic construct
  misc_feature 1..20: note = Description of Artificial Sequence: Synthetic oligonucleotide
  misc_feature 1..20: note = Target: FXN; (-) strand; PAM type: YTN; PAM sequence: CTT
  source 1..20: mol_type = other DNA
gggaggttgaggcaggagaa

SEQ ID NO: 25734 - DNA, 20 bp, synthetic construct
  misc_feature 1..20: note = Description of Artificial Sequence: Synthetic oligonucleotide
  misc_feature 1..20: note = Target: FXN; (-) strand; PAM type: YTN; PAM sequence: CTA
  source 1..20: mol_type = other DNA
cttgggaggttgaggcagga

SEQ ID NO: 25735 - DNA, 20 bp, synthetic construct
  misc_feature 1..20: note = Description of Artificial Sequence: Synthetic oligonucleotide
  misc_feature 1..20: note = Target: FXN; (-) strand; PAM type: YTN; PAM sequence: TTC
  source 1..20: mol_type = other DNA
cagctacttgggaggttgag

SEQ ID NO: 25736 - DNA, 20 bp, synthetic construct
  misc_feature 1..20: note = Description of Artificial Sequence: Synthetic oligonucleotide
  misc_feature 1..20: note = Target: FXN; (-) strand; PAM type: YTN; PAM sequence: CTA
  source 1..20: mol_type = other DNA
taattccagctacttgggag

SEQ ID NO: 25737 - DNA, 20 bp, synthetic construct
  misc_feature 1..20: note = Description of Artificial Sequence: Synthetic oligonucleotide
  misc_feature 1..20: note = Target: FXN; (-) strand; PAM type: YTN; PAM sequence: CTG
  source 1..20: mol_type = other DNA
ggtgtgggggcgtgtgccta

SEQ ID NO: 25738 - DNA, 20 bp, synthetic construct
  misc_feature 1..20: note = Description of Artificial Sequence: Synthetic oligonucleotide
  misc_feature 1..20: note = Target: FXN; (-) strand; PAM type: YTN; PAM sequence: TTA
  source 1..20: mol_type = other DNA
gctgggtgtgggggcgtgtg

SEQ ID NO: 25739 - DNA, 20 bp, synthetic construct
  misc_feature 1..20: note = Description of Artificial Sequence: Synthetic oligonucleotide
  misc_feature 1..20: note = Target: FXN; (-) strand; PAM type: YTN; PAM sequence: CTA
  source 1..20: mol_type = other DNA
aaaatacaaaaattagctgg

SEQ ID NO: 25740 - DNA, 20 bp, synthetic construct
  misc_feature 1..20: note = Description of Artificial Sequence: Synthetic oligonucleotide
  misc_feature 1..20: note = Target: FXN; (-) strand; PAM type: YTN; PAM sequence: CTA
  source 1..20: mol_type = other DNA
ctaaaaatacaaaaattagc

SEQ ID NO: 25741 - DNA, 20 bp, synthetic construct
  misc_feature 1..20: note = Description of Artificial Sequence: Synthetic oligonucleotide
  misc_feature 1..20: note = Target: FXN; (-) strand; PAM type: YTN; PAM sequence: CTC
  source 1..20: mol_type = other DNA
tactaaaaatacaaaaatta

SEQ ID NO: 25742 - DNA, 20 bp, synthetic construct
  misc_feature 1..20: note = Description of Artificial Sequence: Synthetic oligonucleotide
  misc_feature 1..20: note = Target: FXN; (-) strand; PAM type: YTN; PAM sequence: CTG
  source 1..20: mol_type = other DNA
tctctactaaaaatacaaaa

SEQ ID NO: 25743 - DNA, 20 bp, synthetic construct
  misc_feature 1..20: note = Description of Artificial Sequence: Synthetic oligonucleotide
  misc_feature 1..20: note = Target: FXN; (-) strand; PAM type: YTN; PAM sequence: CTG
  source 1..20: mol_type = other DNA
gccaacgtggtgaaacactg

SEQ ID NO: 25744 - DNA, 20 bp, synthetic construct
  misc_feature 1..20: note = Description of Artificial Sequence: Synthetic oligonucleotide
  misc_feature 1..20: note = Target: FXN; (-) strand; PAM type: YTN; PAM sequence: TTC
  source 1..20: mol_type = other DNA
aaaaccagcctggccaacgt

SEQ ID NO: 25745 - DNA, 20 bp, synthetic construct
  misc_feature 1..20: note = Description of Artificial Sequence: Synthetic oligonucleotide
  misc_feature 1..20: note = Target: FXN; (-) strand; PAM type: YTN; PAM sequence: TTC
  source 1..20: mol_type = other DNA
aggagttcaaaaccagcctg

SEQ ID NO: 25746 - DNA, 20 bp, synthetic construct
  misc_feature 1..20: note = Description of Artificial Sequence: Synthetic oligonucleotide
  misc_feature 1..20: note = Target: FXN; (-) strand; PAM type: YTN; PAM sequence: TTG
  source 1..20: mol_type = other DNA
agttcaggagttcaaaacca

SEQ ID NO: 25747 - DNA, 20 bp, synthetic construct
  misc_feature 1..20: note = Description of Artificial Sequence: Synthetic oligonucleotide
  misc_feature 1..20: note = Target: FXN; (-) strand; PAM type: YTN; PAM sequence: CTT
  source 1..20: mol_type = other DNA
gagttcaggagttcaaaacc

SEQ ID NO: 25748 - DNA, 20 bp, synthetic construct
  misc_feature 1..20: note = Description of Artificial Sequence: Synthetic oligonucleotide
  misc_feature 1..20: note = Target: FXN; (-) strand; PAM type: YTN; PAM sequence: TTA
  source 1..20: mol_type = other DNA
cttgagttcaggagttcaaa

SEQ ID NO: 25749 - DNA, 20 bp, synthetic construct
  misc_feature 1..20: note = Description of Artificial Sequence: Synthetic oligonucleotide
  misc_feature 1..20: note = Target: FXN; (-) strand; PAM type: YTN; PAM sequence: CTG
  source 1..20: mol_type = other DNA
aggtgggaggattacttgag

SEQ ID NO: 25750 - DNA, 20 bp, synthetic construct
  misc_feature 1..20: note = Description of Artificial Sequence: Synthetic oligonucleotide
  misc_feature 1..20: note = Target: FXN; (-) strand; PAM type: YTN; PAM sequence: TTG
  source 1..20: mol_type = other DNA
ggaggctgaggtgggaggat

SEQ ID NO: 25751 - DNA, 20 bp, synthetic construct
  misc_feature 1..20: note = Description of Artificial Sequence: Synthetic oligonucleotide
  misc_feature 1..20: note = Target: FXN; (-) strand; PAM type: YTN; PAM sequence: TTT
  source 1..20: mol_type = other DNA
gggaggctgaggtgggagga

SEQ ID NO: 25752 - DNA, 20 bp, synthetic construct
  misc_feature 1..20: note = Description of Artificial Sequence: Synthetic oligonucleotide
  misc_feature 1..20: note = Target: FXN; (-) strand; PAM type: YTN; PAM sequence: CTT
  source 1..20: mol_type = other DNA
tgggaggctgaggtgggagg

SEQ ID NO: 25753 - DNA, 20 bp, synthetic construct
  misc_feature 1..20: note = Description of Artificial Sequence: Synthetic oligonucleotide
  misc_feature 1..20: note = Target: FXN; (-) strand; PAM type: YTN; PAM sequence: CTA
  source 1..20: mol_type = other DNA
gcactttgggaggctgaggt

SEQ ID NO: 25754 - DNA, 20 bp, synthetic construct
  misc_feature 1..20: note = Description of Artificial Sequence: Synthetic oligonucleotide
  misc_feature 1..20: note = Target: FXN; (-) strand; PAM type: YTN; PAM sequence: CTG
  source 1..20: mol_type = other DNA
taatcctagcactttgggag

SEQ ID NO: 25755 - DNA, 20 bp, synthetic construct
  misc_feature 1..20: note = Description of Artificial Sequence: Synthetic oligonucleotide
  misc_feature 1..20: note = Target: FXN; (-) strand; PAM type: YTN; PAM sequence: CTC
  source 1..20: mol_type = other DNA
acacctgtaatcctagcact

SEQ ID NO: 25756 - DNA, 20 bp, synthetic construct
  misc_feature 1..20: note = Description of Artificial Sequence: Synthetic oligonucleotide
  misc_feature 1..20: note = Target: FXN; (-) strand; PAM type: YTN; PAM sequence: TTG
  source 1..20: mol_type = other DNA
aggagccaggcgcggtggct

SEQ ID NO: 25757 - DNA, 20 bp, synthetic construct
  misc_feature 1..20: note = Description of Artificial Sequence: Synthetic oligonucleotide
  misc_feature 1..20: note = Target: FXN; (-) strand; PAM type: YTN; PAM sequence: TTT
  source 1..20: mol_type = other DNA
gaggagccaggcgcggtggc

SEQ ID NO: 25758 - DNA, 20 bp, synthetic construct
  misc_feature 1..20: note = Description of Artificial Sequence: Synthetic oligonucleotide
  misc_feature 1..20: note = Target: FXN; (-) strand; PAM type: YTN; PAM sequence: CTT
  source 1..20: mol_type = other DNA
tgaggagccaggcgcggtgg

SEQ ID NO: 25759 - DNA, 20 bp, synthetic construct
  misc_feature 1..20: note = Description of Artificial Sequence: Synthetic oligonucleotide
  misc_feature 1..20: note = Target: FXN; (-) strand; PAM type: YTN; PAM sequence: TTA
  source 1..20: mol_type = other DNA
acatctttgaggagccaggc

SEQ ID NO: 25760 - DNA, 20 bp, synthetic construct
  misc_feature 1..20: note = Description of Artificial Sequence: Synthetic oligonucleotide
  misc_feature 1..20: note = Target: FXN; (-) strand; PAM type: YTN; PAM sequence: TTG
  source 1..20: mol_type = other DNA
ccatcaagaggattaacatc

SEQ ID NO: 25761 - DNA, 20 bp, synthetic construct
  misc_feature 1..20: note = Description of Artificial Sequence: Synthetic oligonucleotide
  misc_feature 1..20: note = Target: FXN; (-) strand; PAM type: YTN; PAM sequence: TTA
  source 1..20: mol_type = other DNA
gtcaattgccatcaagagga

SEQ ID NO: 25762 - DNA, 20 bp, synthetic construct
  misc_feature 1..20: note = Description of Artificial Sequence: Synthetic oligonucleotide
  misc_feature 1..20: note = Target: FXN; (-) strand; PAM type: YTN; PAM sequence: CTG
  source 1..20: mol_type = other DNA
gtattagtcaattgccatca

SEQ ID NO: 25763 - DNA, 20 bp, synthetic construct
  misc_feature 1..20: note = Description of Artificial Sequence: Synthetic oligonucleotide
  misc_feature 1..20: note = Target: FXN; (-) strand; PAM type: YTN; PAM sequence: TTC
  source 1..20: mol_type = other DNA
tggtattagtcaattgccat

SEQ ID NO: 25764 - DNA, 20 bp, synthetic construct
  misc_feature 1..20: note = Description of Artificial Sequence: Synthetic oligonucleotide
  misc_feature 1..20: note = Target: FXN; (-) strand; PAM type: YTN; PAM sequence: TTT
  source 1..20: mol_type = other DNA
ctggtattagtcaattgcca

SEQ ID NO: 25765 - DNA, 20 bp, synthetic construct
  misc_feature 1..20: note = Description of Artificial Sequence: Synthetic oligonucleotide
  misc_feature 1..20: note = Target: FXN; (-) strand; PAM type: YTN; PAM sequence: TTT
  source 1..20: mol_type = other DNA
tctggtattagtcaattgcc

SEQ ID NO: 25766 - DNA, 20 bp, synthetic construct
  misc_feature 1..20: note = Description of Artificial Sequence: Synthetic oligonucleotide
  misc_feature 1..20: note = Target: FXN; (-) strand; PAM type: YTN; PAM sequence: TTC
  source 1..20: mol_type = other DNA
gtgacattttctggtattag

SEQ ID NO: 25767 - DNA, 20 bp, synthetic construct
  misc_feature 1..20: note = Description of Artificial Sequence: Synthetic oligonucleotide
  misc_feature 1..20: note = Target: FXN; (-) strand; PAM type: YTN; PAM sequence: CTT
  source 1..20: mol_type = other DNA
cgtgacattttctggtatta

SEQ ID NO: 25768 - DNA, 20 bp, synthetic construct
  misc_feature 1..20: note = Description of Artificial Sequence: Synthetic oligonucleotide
  misc_feature 1..20: note = Target: FXN; (-) strand; PAM type: YTN; PAM sequence: TTG
  source 1..20: mol_type = other DNA
aatccaaaatgcacgcttcg

SEQ ID NO: 25769 - DNA, 20 bp, synthetic construct
  misc_feature 1..20: note = Description of Artificial Sequence: Synthetic oligonucleotide
  misc_feature 1..20: note = Target: FXN; (-) strand; PAM type: YTN; PAM sequence: TTC
  source 1..20: mol_type = other DNA
catgattgaatccaaaatgc

SEQ ID NO: 25770 - DNA, 20 bp, synthetic construct
  misc_feature 1..20: note = Description of Artificial Sequence: Synthetic oligonucleotide
  misc_feature 1..20: note = Target: FXN; (-) strand; PAM type: YTN; PAM sequence: CTC
  source 1..20: mol_type = other DNA
aacaattccatgattgaatc

SEQ ID NO: 25771 - DNA, 20 bp, synthetic construct
  misc_feature 1..20: note = Description of Artificial Sequence: Synthetic oligonucleotide
  misc_feature 1..20: note = Target: FXN; (-) strand; PAM type: YTN; PAM sequence: TTG
  source 1..20: mol_type = other DNA
tcctcaacaattccatgatt

SEQ ID NO: 25772 - DNA, 20 bp, synthetic construct
  misc_feature 1..20: note = Description of Artificial Sequence: Synthetic oligonucleotide
  misc_feature 1..20: note = Target: FXN; (-) strand; PAM type: YTN; PAM sequence: CTG
  source 1..20: mol_type = other DNA
attgtcctcaacaattccat

SEQ ID NO: 25773 - DNA, 20 bp, synthetic construct
  misc_feature 1..20: note = Description of Artificial Sequence: Synthetic oligonucleotide
  misc_feature 1..20: note = Target: FXN; (-) strand; PAM type: YTN; PAM sequence: CTG
  source 1..20: mol_type = other DNA
atggctgattgtcctcaaca

SEQ ID NO: 25774 - DNA, 20 bp, synthetic construct
  misc_feature 1..20: note = Description of Artificial Sequence: Synthetic oligonucleotide
  misc_feature 1..20: note = Target: FXN; (-) strand; PAM type: YTN; PAM sequence: TTA
  source 1..20: mol_type = other DNA
gtctgatggctgattgtcct

SEQ ID NO: 25775 - DNA, 20 bp, synthetic construct
  misc_feature 1..20: note = Description of Artificial Sequence: Synthetic oligonucleotide
  misc_feature 1..20: note = Target: FXN; (-) strand; PAM type: YTN; PAM sequence: TTT
  source 1..20: mol_type = other DNA
agtctgatggctgattgtcc

SEQ ID NO: 25776 - DNA, 20 bp, synthetic construct
  misc_feature 1..20: note = Description of Artificial Sequence: Synthetic oligonucleotide
  misc_feature 1..20: note = Target: FXN; (-) strand; PAM type: YTN; PAM sequence: CTT
  source 1..20: mol_type = other DNA
tagtctgatggctgattgtc

SEQ ID NO: 25777 - DNA, 20 bp, synthetic construct
  misc_feature 1..20: note = Description of Artificial Sequence: Synthetic oligonucleotide
  misc_feature 1..20: note = Target: FXN; (-) strand; PAM type: YTN; PAM sequence: CTA
  source 1..20: mol_type = other DNA
tcgctttagtctgatggctg

SEQ ID NO: 25778 - DNA, 20 bp, synthetic construct
  misc_feature 1..20: note = Description of Artificial Sequence: Synthetic oligonucleotide
  misc_feature 1..20: note = Target: FXN; (-) strand; PAM type: YTN; PAM sequence: TTC
  source 1..20: mol_type = other DNA
tatcgctttagtctgatggc

SEQ ID NO: 25779 - DNA, 20 bp, synthetic construct
  misc_feature 1..20: note = Description of Artificial Sequence: Synthetic oligonucleotide
  misc_feature 1..20: note = Target: FXN; (-) strand; PAM type: YTN; PAM sequence: TTT
  source 1..20: mol_type = other DNA
ctatcgctttagtctgatgg

SEQ ID NO: 25780 - DNA, 20 bp, synthetic construct
  misc_feature 1..20: note = Description of Artificial Sequence: Synthetic oligonucleotide
  misc_feature 1..20: note = Target: FXN; (-) strand; PAM type: YTN; PAM sequence: CTA
  source 1..20: mol_type = other DNA
tttctatcgctttagtctga

SEQ ID NO: 25781 - DNA, 20 bp, synthetic construct
  misc_feature 1..20: note = Description of Artificial Sequence: Synthetic oligonucleotide
  misc_feature 1..20: note = Target: FXN; (-) strand; PAM type: YTN; PAM sequence: TTC
  source 1..20: mol_type = other DNA
caatactatttctatcgctt

SEQ ID NO: 25782 - DNA, 20 bp, synthetic construct
  misc_feature 1..20: note = Description of Artificial Sequence: Synthetic oligonucleotide
  misc_feature 1..20: note = Target: FXN; (-) strand; PAM type: YTN; PAM sequence: TTT
  source 1..20: mol_type = other DNA
ccaatactatttctatcgct

SEQ ID NO: 25783 - DNA, 20 bp, synthetic construct
  misc_feature 1..20: note = Description of Artificial Sequence: Synthetic oligonucleotide
  misc_feature 1..20: note = Target: FXN; (-) strand; PAM type: YTN; PAM sequence: CTG
  source 1..20: mol_type = other DNA
caatttccaatactatttct

SEQ ID NO: 25784 - DNA, 20 bp, synthetic construct
  misc_feature 1..20: note = Description of Artificial Sequence: Synthetic oligonucleotide
  misc_feature 1..20: note = Target: FXN; (-) strand; PAM type: YTN; PAM sequence: CTC
  source 1..20: mol_type = other DNA
ccgctgcaatttccaatact

SEQ ID NO: 25785 - DNA, 20 bp, synthetic construct
  misc_feature 1..20: note = Description of Artificial Sequence: Synthetic oligonucleotide
  misc_feature 1..20: note = Target: FXN; (-) strand; PAM type: YTN; PAM sequence: TTC
  source 1..20: mol_type = other DNA
agtgctcccgctgcaatttc

SEQ ID NO: 25786 - DNA, 20 bp, synthetic construct
  misc_feature 1..20: note = Description of Artificial Sequence: Synthetic oligonucleotide
  misc_feature 1..20: note = Target: FXN; (-) strand; PAM type: YTN; PAM sequence: CTC
  source 1..20: mol_type = other DNA
cattcagtgctcccgctgca

SEQ ID NO: 25787 - DNA, 20 bp, synthetic construct
  misc_feature 1..20: note = Description of Artificial Sequence: Synthetic oligonucleotide
  misc_feature 1..20: note = Target: FXN; (-) strand; PAM type: YTN; PAM sequence: TTC
  source 1..20: mol_type = other DNA
tccattcagtgctcccgctg

SEQ ID NO: 25788 - DNA, 20 bp, synthetic construct
  misc_feature 1..20: note = Description of Artificial Sequence: Synthetic oligonucleotide
  misc_feature 1..20: note = Target: FXN; (-) strand; PAM type: YTN; PAM sequence: CTT
  source 1..20: mol_type = other DNA
ctccattcagtgctcccgct

SEQ ID NO: 25789 - DNA, 20 bp, synthetic construct
  misc_feature 1..20: note = Description of Artificial Sequence: Synthetic oligonucleotide
  misc_feature 1..20: note = Target: FXN; (-) strand; PAM type: YTN; PAM sequence: TTA
  source 1..20: mol_type = other DNA
tgtggagtgccttctccatt

SEQ ID NO: 25790 - DNA, 20 bp, synthetic construct
  misc_feature 1..20: note = Description of Artificial Sequence: Synthetic oligonucleotide
  misc_feature 1..20: note = Target: FXN; (-) strand; PAM type: YTN; PAM sequence: CTC
  source 1..20: mol_type = other DNA
cattatgtggagtgccttct

SEQ ID NO: 25791 - DNA, 20 bp, synthetic construct
  misc_feature 1..20: note = Description of Artificial Sequence: Synthetic oligonucleotide
  misc_feature 1..20: note = Target: FXN; (-) strand; PAM type: YTN; PAM sequence: CTC
  source 1..20: mol_type = other DNA
ctccattatgtggagtgcct

SEQ ID NO: 25792 - DNA, 20 bp, synthetic construct
  misc_feature 1..20: note = Description of Artificial Sequence: Synthetic oligonucleotide
  misc_feature 1..20: note = Target: FXN; (-) strand; PAM type: YTN; PAM sequence: TTG
  source 1..20: mol_type = other DNA
cctcctccattatgtggagt

SEQ ID NO: 25793 - DNA, 20 bp, synthetic construct
  misc_feature 1..20: note = Description of Artificial Sequence: Synthetic oligonucleotide
  misc_feature 1..20: note = Target: FXN; (-) strand; PAM type: YTN; PAM sequence: TTG
  source 1..20: mol_type = other DNA
gttgcctcctccattatgtg

SEQ ID NO: 25794 - DNA, 20 bp, synthetic construct
  misc_feature 1..20: note = Description of Artificial Sequence: Synthetic oligonucleotide
  misc_feature 1..20: note = Target: FXN; (-) strand; PAM type: YTN; PAM sequence: CTT
  source 1..20: mol_type = other DNA
ggttgcctcctccattatgt

SEQ ID NO: 25795 - DNA, 20 bp, synthetic construct
  misc_feature 1..20: note = Description of Artificial Sequence: Synthetic oligonucleotide
  misc_feature 1..20: note = Target: FXN; (-) strand; PAM type: YTN; PAM sequence: CTA
  source 1..20: mol_type = other DNA
agacttggttgcctcctcca

SEQ ID NO: 25796 - DNA, 20 bp, synthetic construct
  misc_feature 1..20: note = Description of Artificial Sequence: Synthetic oligonucleotide
  misc_feature 1..20: note = Target: FXN; (-) strand; PAM type: YTN; PAM sequence: CTC
  source 1..20: mol_type = other DNA
taagacttggttgcctcctc

SEQ ID NO: 25797 - DNA, 20 bp, synthetic construct
  misc_feature 1..20: note = Description of Artificial Sequence: Synthetic oligonucleotide
  misc_feature 1..20: note = Target: FXN; (-) strand; PAM type: YTN; PAM sequence: TTC
  source 1..20: mol_type = other DNA
tctaagacttggttgcctcc

SEQ ID NO: 25798 - DNA, 20 bp, synthetic construct
  misc_feature 1..20: note = Description of Artificial Sequence: Synthetic oligonucleotide
  misc_feature 1..20: note = Target: FXN; (-) strand; PAM type: YTN; PAM sequence: CTT
  source 1..20: mol_type = other DNA
ctctaagacttggttgcctc

SEQ ID NO: 25799 - DNA, 20 bp, synthetic construct
  misc_feature 1..20: note = Description of Artificial Sequence: Synthetic oligonucleotide
  misc_feature 1..20: note = Target: FXN; (-) strand; PAM type: YTN; PAM sequence: TTG
  source 1..20: mol_type = other DNA
ataccttctctaagacttgg

SEQ ID NO: 25800 - DNA, 20 bp, synthetic construct
  misc_feature 1..20: note = Description of Artificial Sequence: Synthetic oligonucleotide
  misc_feature 1..20: note = Target: FXN; (-) strand; PAM type: YTN; PAM sequence: CTT
  source 1..20: mol_type = other DNA
gataccttctctaagacttg

SEQ ID NO: 25801 - DNA, 20 bp, synthetic construct
  misc_feature 1..20: note = Description of Artificial Sequence: Synthetic oligonucleotide
  misc_feature 1..20: note = Target: FXN; (-) strand; PAM type: YTN; PAM sequence: TTA
  source 1..20: mol_type = other DNA
tagtcaggcttgataccttc

SEQ ID NO: 25802 - DNA, 20 bp, synthetic construct
  misc_feature 1..20: note = Description of Artificial Sequence: Synthetic oligonucleotide
  misc_feature 1..20: note = Target: FXN; (-) strand; PAM type: YTN; PAM sequence: CTT
  source 1..20: mol_type = other DNA
atagtcaggcttgatacctt

SEQ ID NO: 25803 - DNA, 20 bp, synthetic construct
  misc_feature 1..20: note = Description of Artificial Sequence: Synthetic oligonucleotide
  misc_feature 1..20: note = Target: FXN; (-) strand; PAM type: YTN; PAM sequence: CTG
  source 1..20: mol_type = other DNA
tccttatagtcaggcttgat

SEQ ID NO: 25804 - DNA, 20 bp, synthetic construct
  misc_feature 1..20: note = Description of Artificial Sequence: Synthetic oligonucleotide
  misc_feature 1..20: note = Target: FXN; (-) strand; PAM type: YTN; PAM sequence: CTC
  source 1..20: mol_type = other DNA
actgtccttatagtcaggct

SEQ ID NO: 25805 - DNA, 20 bp, synthetic construct
  misc_feature 1..20: note = Description of Artificial Sequence: Synthetic oligonucleotide
  misc_feature 1..20: note = Target: FXN; (-) strand; PAM type: YTN; PAM sequence: TTC
  source 1..20: mol_type = other DNA
cctcactgtccttatagtca

SEQ ID NO: 25806 - DNA, 20 bp, synthetic construct
  misc_feature 1..20: note = Description of Artificial Sequence: Synthetic oligonucleotide
  misc_feature 1..20: note = Target: FXN; (-) strand; PAM type: YTN; PAM sequence: TTC
  source 1..20: mol_type = other DNA
aattccctcactgtccttat

SEQ ID NO: 25807 - DNA, 20 bp, synthetic construct
  misc_feature 1..20: note = Description of Artificial Sequence: Synthetic oligonucleotide
  misc_feature 1..20: note = Target: FXN; (-) strand; PAM type: YTN; PAM sequence: TTT
  source 1..20: mol_type = other DNA
caattccctcactgtcctta

SEQ ID NO: 25808 - DNA, 20 bp, synthetic construct
  misc_feature 1..20: note = Description of Artificial Sequence: Synthetic oligonucleotide
  misc_feature 1..20: note = Target: FXN; (-) strand; PAM type: YTN; PAM sequence: TTT
  source 1..20: mol_type = other DNA
tcaattccctcactgtcctt

SEQ ID NO: 25809 - DNA, 20 bp, synthetic construct
  misc_feature 1..20: note = Description of Artificial Sequence: Synthetic oligonucleotide
  misc_feature 1..20: note = Target: FXN; (-) strand; PAM type: YTN; PAM sequence: TTT
  source 1..20: mol_type = other DNA
ttcaattccctcactgtcct

SEQ ID NO: 25810 - DNA, 20 bp, synthetic construct
  misc_feature 1..20: note = Description of Artificial Sequence: Synthetic oligonucleotide
  misc_feature 1..20: note = Target: FXN; (-) strand; PAM type: YTN; PAM sequence: TTT
  source 1..20: mol_type = other DNA
tttcaattccctcactgtcc

SEQ ID NO: 25811 - DNA, 20 bp, synthetic construct
  misc_feature 1..20: note = Description of Artificial Sequence: Synthetic oligonucleotide
  misc_feature 1..20: note = Target: FXN; (-) strand; PAM type: YTN; PAM sequence: TTG
  source 1..20: mol_type = other DNA
ttttttcaattccctcactg

SEQ ID NO: 25812 - DNA, 20 bp, synthetic construct
  misc_feature 1..20: note = Description of Artificial Sequence: Synthetic oligonucleotide
  misc_feature 1..20: note = Target: FXN; (-) strand; PAM type: YTN; PAM sequence: TTT
  source 1..20: mol_type = other DNA
gttttttcaattccctcact

SEQ ID NO: 25813 - DNA, 20 bp, synthetic construct
  misc_feature 1..20: note = Description of Artificial Sequence: Synthetic oligonucleotide
  misc_feature 1..20: note = Target: FXN; (-) strand; PAM type: YTN; PAM sequence: TTT
  source 1..20: mol_type = other DNA
tgttttttcaattccctcac

SEQ ID NO: 25814 - DNA, 20 bp, synthetic construct
  misc_feature 1..20: note = Description of Artificial Sequence: Synthetic oligonucleotide
  misc_feature 1..20: note = Target: FXN; (-) strand; PAM type: YTN; PAM sequence: TTT
  source 1..20: mol_type = other DNA
ttgttttttcaattccctca

SEQ ID NO: 25815 - DNA, 20 bp, synthetic construct
  misc_feature 1..20: note = Description of Artificial Sequence: Synthetic oligonucleotide
  misc_feature 1..20: note = Target: FXN; (-) strand; PAM type: YTN; PAM sequence: TTT
  source 1..20: mol_type = other DNA
tttgttttttcaattccctc

SEQ ID NO: 25816 - DNA, 20 bp, synthetic construct
  misc_feature 1..20: note = Description of Artificial Sequence: Synthetic oligonucleotide
  misc_feature 1..20: note = Target: FXN; (-) strand; PAM type: YTN; PAM sequence: CTT
  source 1..20: mol_type = other DNA
ttttgttttttcaattccct

SEQ ID NO: 25817 - DNA, 20 bp, synthetic construct
  misc_feature 1..20: note = Description of Artificial Sequence: Synthetic oligonucleotide
  misc_feature 1..20: note = Target: FXN; (-) strand; PAM type: YTN; PAM sequence: CTC
  source 1..20: mol_type = other DNA
cttttttgttttttcaattc

SEQ ID NO: 25818 - DNA, 20 bp, synthetic construct
  misc_feature 1..20: note = Description of Artificial Sequence: Synthetic oligonucleotide
  misc_feature 1..20: note = Target: FXN; (-) strand; PAM type: YTN; PAM sequence: TTG
  source 1..20: mol_type = other DNA
ctccttttttgttttttcaa

SEQ ID NO: 25819 - DNA, 20 bp, synthetic construct
  misc_feature 1..20: note = Description of Artificial Sequence: Synthetic oligonucleotide
  misc_feature 1..20: note = Target: FXN; (-) strand; PAM type: YTN; PAM sequence: CTC
  source 1..20: mol_type = other DNA
cattgctccttttttgtttt

SEQ ID NO: 25820 - DNA, 20 bp, synthetic construct
  misc_feature 1..20: note = Description of Artificial Sequence: Synthetic oligonucleotide
  misc_feature 1..20: note = Target: FXN; (-) strand; PAM type: YTN; PAM sequence: CTG
  source 1..20: mol_type = other DNA
ctccattgctccttttttgt

SEQ ID NO: 25821 - DNA, 20 bp, synthetic construct
  misc_feature 1..20: note = Description of Artificial Sequence: Synthetic oligonucleotide
  misc_feature 1..20: note = Target: FXN; (-) strand; PAM type: YTN; PAM sequence: TTC
  source 1..20: mol_type = other DNA
cctgctccattgctcctttt

SEQ ID NO: 25822 - DNA, 20 bp, synthetic construct
  misc_feature 1..20: note = Description of Artificial Sequence: Synthetic oligonucleotide
  misc_feature 1..20: note = Target: FXN; (-) strand; PAM type: YTN; PAM sequence: CTT
  source 1..20: mol_type = other DNA
ccctgctccattgctccttt

SEQ ID NO: 25823 - DNA, 20 bp, synthetic construct
  misc_feature 1..20: note = Description of Artificial Sequence: Synthetic oligonucleotide
  misc_feature 1..20: note = Target: FXN; (-) strand; PAM type: YTN; PAM sequence: TTC
  source 1..20: mol_type = other DNA
aatccttccctgctccattg

SEQ ID NO: 25824 - DNA, 20 bp, synthetic construct
  misc_feature 1..20: note = Description of Artificial Sequence: Synthetic oligonucleotide
  misc_feature 1..20: note = Target: FXN; (-) strand; PAM type: YTN; PAM sequence: TTG
  source 1..20: mol_type = other DNA
aaaggcattcaatccttccc

SEQ ID NO: 25825 - DNA, 20 bp, synthetic construct
  misc_feature 1..20: note = Description of Artificial Sequence: Synthetic oligonucleotide
  misc_feature 1..20: note = Target: FXN; (-) strand; PAM type: YTN; PAM sequence: CTT
  source 1..20: mol_type = other DNA
gaaaggcattcaatccttcc

SEQ ID NO: 25826 - DNA, 20 bp, synthetic construct
  misc_feature 1..20: note = Description of Artificial Sequence: Synthetic oligonucleotide
  misc_feature 1..20: note = Target: FXN; (-) strand; PAM type: YTN; PAM sequence: CTA
  source 1..20: mol_type = other DNA
cttgaaaggcattcaatcct

SEQ ID NO: 25827 - DNA, 20 bp, synthetic construct
  misc_feature 1..20: note = Description of Artificial Sequence: Synthetic oligonucleotide
  misc_feature 1..20: note = Target: FXN; (-) strand; PAM type: YTN; PAM sequence: CTG
  source 1..20: mol_type = other DNA
aatctacttgaaaggcattc

SEQ ID NO: 25828 - DNA, 20 bp, synthetic construct
  misc_feature 1..20: note = Description of Artificial Sequence: Synthetic oligonucleotide
  misc_feature 1..20: note = Target: FXN; (-) strand; PAM type: YTN; PAM sequence: TTA
  source 1..20: mol_type = other DNA
ctgaatctacttgaaaggca

SEQ ID NO: 25829 - DNA, 20 bp, synthetic construct
  misc_feature 1..20: note = Description of Artificial Sequence: Synthetic oligonucleotide
  misc_feature 1..20: note = Target: FXN; (-) strand; PAM type: YTN; PAM sequence: CTA
  source 1..20: mol_type = other DNA
acagcaattactgaatctac

SEQ ID NO: 25830 - DNA, 20 bp, synthetic construct
  misc_feature 1..20: note = Description of Artificial Sequence: Synthetic oligonucleotide
  misc_feature 1..20: note = Target: FXN; (-) strand; PAM type: YTN; PAM sequence: CTG
  source 1..20: mol_type = other DNA
ctaacagcaattactgaatc

SEQ ID NO: 25831 - DNA, 20 bp, synthetic construct
  misc_feature 1..20: note = Description of Artificial Sequence: Synthetic oligonucleotide
  misc_feature 1..20: note = Target: FXN; (-) strand; PAM type: YTN; PAM sequence: TTG
  source 1..20: mol_type = other DNA
ctgctaacagcaattactga

SEQ ID NO: 25832 - DNA, 20 bp, synthetic construct
  misc_feature 1..20: note = Description of Artificial Sequence: Synthetic oligonucleotide
  misc_feature 1..20: note = Target: FXN; (-) strand; PAM type: YTN; PAM sequence: TTT
  source 1..20: mol_type = other DNA
gctgctaacagcaattactg

SEQ ID NO: 25833 - DNA, 20 bp, synthetic construct
  misc_feature 1..20: note = Description of Artificial Sequence: Synthetic oligonucleotide
  misc_feature 1..20: note = Target: FXN; (-) strand; PAM type: YTN; PAM sequence: TTT
  source 1..20: mol_type = other DNA
tgctgctaacagcaattact

SEQ ID NO: 25834 - DNA, 20 bp, synthetic construct
  misc_feature 1..20: note = Description of Artificial Sequence: Synthetic oligonucleotide
  misc_feature 1..20: note = Target: FXN; (-) strand; PAM type: YTN; PAM sequence: TTT
  source 1..20: mol_type = other DNA
ttgctgctaacagcaattac

SEQ ID NO: 25835 - DNA, 20 bp, synthetic construct
  misc_feature 1..20: note = Description of Artificial Sequence: Synthetic oligonucleotide
  misc_feature 1..20: note = Target: FXN; (-) strand; PAM type: YTN; PAM sequence: TTT
  source 1..20: mol_type = other DNA
tttgctgctaacagcaatta

SEQ ID NO: 25836 - DNA, 20 bp, synthetic construct
  misc_feature 1..20: note = Description of Artificial Sequence: Synthetic oligonucleotide
  misc_feature 1..20: note = Target: FXN; (-) strand; PAM type: YTN; PAM sequence: CTG
  source 1..20: mol_type = other DNA
cattttttgctgctaacagc

SEQ ID NO: 25837 - DNA, 20 bp, synthetic construct
  misc_feature 1..20: note = Description of Artificial Sequence: Synthetic oligonucleotide
  misc_feature 1..20: note = Target: FXN; (-) strand; PAM type: YTN; PAM sequence: CTA
  source 1..20: mol_type = other DNA
ctgcattttttgctgctaac

SEQ ID NO: 25838 - DNA, 20 bp, synthetic construct
  misc_feature 1..20: note = Description of Artificial Sequence: Synthetic oligonucleotide
  misc_feature 1..20: note = Target: FXN; (-) strand; PAM type: YTN; PAM sequence: CTG
  source 1..20: mol_type = other DNA
cccaggcactactgcatttt

SEQ ID NO: 25839 - DNA, 20 bp, synthetic construct
  misc_feature 1..20: note = Description of Artificial Sequence: Synthetic oligonucleotide
  misc_feature 1..20: note = Target: FXN; (-) strand; PAM type: YTN; PAM sequence: TTA
  source 1..20: mol_type = other DNA
aagccctgcccaggcactac

SEQ ID NO: 25840 - DNA, 20 bp, synthetic construct
  misc_feature 1..20: note = Description of Artificial Sequence: Synthetic oligonucleotide
  misc_feature 1..20: note = Target: FXN; (-) strand; PAM type: YTN; PAM sequence: TTT
  source 1..20: mol_type = other DNA
aaagccctgcccaggcacta

SEQ ID NO: 25841 - DNA, 20 bp, synthetic construct
  misc_feature 1..20: note = Description of Artificial Sequence: Synthetic oligonucleotide
  misc_feature 1..20: note = Target: FXN; (-) strand; PAM type: YTN; PAM sequence: CTT
  source 1..20: mol_type = other DNA
taaagccctgcccaggcact

SEQ ID NO: 25842 - DNA, 20 bp, synthetic construct
  misc_feature 1..20: note = Description of Artificial Sequence: Synthetic oligonucleotide
  misc_feature 1..20: note = Target: FXN; (-) strand; PAM type: YTN; PAM sequence: CTG
  source 1..20: mol_type = other DNA
tgcaagcactttaaagccct

SEQ ID NO: 25843 - DNA, 20 bp, synthetic construct
  misc_feature 1..20: note = Description of Artificial Sequence: Synthetic oligonucleotide
  misc_feature 1..20: note = Target: FXN; (-) strand; PAM type: YTN; PAM sequence: CTG
  source 1..20: mol_type = other DNA
cctgtgcaagcactttaaag

SEQ ID NO: 25844 - DNA, 20 bp, synthetic construct
  misc_feature 1..20: note = Description of Artificial Sequence: Synthetic oligonucleotide
  misc_feature 1..20: note = Target: FXN; (-) strand; PAM type: YTN; PAM sequence: CTA
  source 1..20: mol_type = other DNA
gggctgcctgtgcaagcact

SEQ ID NO: 25845 - DNA, 20 bp, synthetic construct
  misc_feature 1..20: note = Description of Artificial Sequence: Synthetic oligonucleotide
  misc_feature 1..20: note = Target: FXN; (-) strand; PAM type: YTN; PAM sequence: CTC
  source 1..20: mol_type = other DNA
tagggctgcctgtgcaagca

SEQ ID NO: 25846 - DNA, 20 bp, synthetic construct
  misc_feature 1..20: note = Description of Artificial Sequence: Synthetic oligonucleotide
  misc_feature 1..20: note = Target: FXN; (-) strand; PAM type: YTN; PAM sequence: TTC
  source 1..20: mol_type = other DNA
ccaagcagcccggccctcta

SEQ ID NO: 25847 - DNA, 20 bp, synthetic construct
  misc_feature 1..20: note = Description of Artificial Sequence: Synthetic oligonucleotide
  misc_feature 1..20: note = Target: FXN; (-) strand; PAM type: YTN; PAM sequence: TTG
  source 1..20: mol_type = other DNA
taagagttcccaagcagccc

SEQ ID NO: 25848 - DNA, 20 bp, synthetic construct
  misc_feature 1..20: note = Description of Artificial Sequence: Synthetic oligonucleotide
  misc_feature 1..20: note = Target: FXN; (-) strand; PAM type: YTN; PAM sequence: TTT
  source 1..20: mol_type = other DNA
gtaagagttcccaagcagcc

SEQ ID NO: 25849 - DNA, 20 bp, synthetic construct
  misc_feature 1..20: note = Description of Artificial Sequence: Synthetic oligonucleotide
  misc_feature 1..20: note = Target: FXN; (-) strand; PAM type: YTN; PAM sequence: TTG
  source 1..20: mol_type = other DNA
gtaggtcagtttgtaagagt

SEQ ID NO: 25850 - DNA, 20 bp, synthetic construct
  misc_feature 1..20: note = Description of Artificial Sequence: Synthetic oligonucleotide
  misc_feature 1..20: note = Target: FXN; (-) strand; PAM type: YTN; PAM sequence: CTC
  source 1..20: mol_type = other DNA
aagttggtaggtcagtttgt

SEQ ID NO: 25851 - DNA, 20 bp, synthetic construct
  misc_feature 1..20: note = Description of Artificial Sequence: Synthetic oligonucleotide
  misc_feature 1..20: note = Target: FXN; (-) strand; PAM type: YTN; PAM sequence: CTG
  source 1..20: mol_type = other DNA
tggatgctcaagttggtagg

SEQ ID NO: 25852 - DNA, 20 bp, synthetic construct
  misc_feature 1..20: note = Description of Artificial Sequence: Synthetic oligonucleotide
  misc_feature 1..20: note = Target: FXN; (-) strand; PAM type: YTN; PAM sequence: CTG
  source 1..20: mol_type = other DNA
atcaggctgtggatgctcaa

SEQ ID NO: 25853 - DNA, 20 bp, synthetic construct
  misc_feature 1..20: note = Description of Artificial Sequence: Synthetic oligonucleotide
  misc_feature 1..20: note = Target: FXN; (-) strand; PAM type: YTN; PAM sequence: CTC
  source 1..20: mol_type = other DNA
tgatcaggctgtggatgctc

SEQ ID NO: 25854 - DNA, 20 bp, synthetic construct
  misc_feature 1..20: note = Description of Artificial Sequence: Synthetic oligonucleotide
  misc_feature 1..20: note = Target: FXN; (-) strand; PAM type: YTN; PAM sequence: CTC
  source 1..20: mol_type = other DNA
ccccacctctgatcaggctg

SEQ ID NO: 25855 - DNA, 20 bp, synthetic construct
  misc_feature 1..20: note = Description of Artificial Sequence: Synthetic oligonucleotide
  misc_feature 1..20: note = Target: FXN; (-) strand; PAM type: YTN; PAM sequence: TTA
  source 1..20: mol_type = other DNA
actcccccacctctgatcag

SEQ ID NO: 25856 - DNA, 20 bp, synthetic construct
  misc_feature 1..20: note = Description of Artificial Sequence: Synthetic oligonucleotide
  misc_feature 1..20: note = Target: FXN; (-) strand; PAM type: YTN; PAM sequence: CTT
  source 1..20: mol_type = other DNA
aactcccccacctctgatca

SEQ ID NO: 25857 - DNA, 20 bp, synthetic construct
  misc_feature 1..20: note = Description of Artificial Sequence: Synthetic oligonucleotide
  misc_feature 1..20: note = Target: FXN; (-) strand; PAM type: YTN; PAM sequence: CTA
  source 1..20: mol_type = other DNA
ggggagagaaggcccttaac

SEQ ID NO: 25858 - DNA, 20 bp, synthetic construct
  misc_feature 1..20: note = Description of Artificial Sequence: Synthetic oligonucleotide
  misc_feature 1..20: note = Target: FXN; (-) strand; PAM type: YTN; PAM sequence: CTA
  source 1..20: mol_type = other DNA
gtagaggctaggggagagaa

SEQ ID NO: 25859 - DNA, 20 bp, synthetic construct
  misc_feature 1..20: note = Description of Artificial Sequence: Synthetic oligonucleotide
  misc_feature 1..20: note = Target: FXN; (-) strand; PAM type: YTN; PAM sequence: CTC
  source 1..20: mol_type = other DNA
tagtagaggctaggggagag

SEQ ID NO: 25860 - DNA, 20 bp, synthetic construct
  misc_feature 1..20: note = Description of Artificial Sequence: Synthetic oligonucleotide
  misc_feature 1..20: note = Target: FXN; (-) strand; PAM type: YTN; PAM sequence: TTA
  source 1..20: mol_type = other DNA
caggctctagtagaggctag

SEQ ID NO: 25861 - DNA, 20 bp, synthetic construct
  misc_feature 1..20: note = Description of Artificial Sequence: Synthetic oligonucleotide
  misc_feature 1..20: note = Target: FXN; (-) strand; PAM type: YTN; PAM sequence: CTG
  source 1..20: mol_type = other DNA
cagttacaggctctagtaga

SEQ ID NO: 25862 - DNA, 20 bp, synthetic construct
  misc_feature 1..20: note = Description of Artificial Sequence: Synthetic oligonucleotide
  misc_feature 1..20: note = Target: FXN; (-) strand; PAM type: YTN; PAM sequence: TTC
  source 1..20: mol_type = other DNA
cctgcagttacaggctctag

SEQ ID NO: 25863 - DNA, 20 bp, synthetic construct
  misc_feature 1..20: note = Description of Artificial Sequence: Synthetic oligonucleotide
  misc_feature 1..20: note = Target: FXN; (-) strand; PAM type: YTN; PAM sequence: TTT
  source 1..20: mol_type = other DNA
ccctgcagttacaggctcta

SEQ ID NO: 25864 - DNA, 20 bp, synthetic construct
  misc_feature 1..20: note = Description of Artificial Sequence: Synthetic oligonucleotide
  misc_feature 1..20: note = Target: FXN; (-) strand; PAM type: YTN; PAM sequence: TTG
  source 1..20: mol_type = other DNA
gtttccctgcagttacaggc

SEQ ID NO: 25865 - DNA, 20 bp, synthetic construct
  misc_feature 1..20: note = Description of Artificial Sequence: Synthetic oligonucleotide
  misc_feature 1..20: note = Target: FXN; (-) strand; PAM type: YTN; PAM sequence: CTT
  source 1..20: mol_type = other DNA
ggtttccctgcagttacagg

SEQ ID NO: 25866 - DNA, 20 bp, synthetic construct
  misc_feature 1..20: note = Description of Artificial Sequence: Synthetic oligonucleotide
  misc_feature 1..20: note = Target: FXN; (-) strand; PAM type: YTN; PAM sequence: CTG
  source 1..20: mol_type = other DNA
caacttggtttccctgcagt

SEQ ID NO: 25867 - DNA, 20 bp, synthetic construct
  misc_feature 1..20: note = Description of Artificial Sequence: Synthetic oligonucleotide
  misc_feature 1..20: note = Target: FXN; (-) strand; PAM type: YTN; PAM sequence: TTA
  source 1..20: mol_type = other DNA
gcctgcaacttggtttccct

SEQ ID NO: 25868 - DNA, 20 bp, synthetic construct
  misc_feature 1..20: note = Description of Artificial Sequence: Synthetic oligonucleotide
  misc_feature 1..20: note = Target: FXN; (-) strand; PAM type: YTN; PAM sequence: TTT
  source 1..20: mol_type = other DNA
agcctgcaacttggtttccc

SEQ ID NO: 25869 - DNA, 20 bp, synthetic construct
  misc_feature 1..20: note = Description of Artificial Sequence: Synthetic oligonucleotide
  misc_feature 1..20: note = Target: FXN; (-) strand; PAM type: YTN; PAM sequence: CTG
  source 1..20: mol_type = other DNA
catgtgtgggcagagtttag

SEQ ID NO: 25870 - DNA, 20 bp, synthetic construct
  misc_feature 1..20: note = Description of Artificial Sequence: Synthetic oligonucleotide
  misc_feature 1..20: note = Target: FXN; (-) strand; PAM type: YTN; PAM sequence: CTA
  source 1..20: mol_type = other DNA
atcaatgtctgcatgtgtgg

SEQ ID NO: 25871 - DNA, 20 bp, synthetic construct
  misc_feature 1..20: note = Description of Artificial Sequence: Synthetic oligonucleotide
  misc_feature 1..20: note = Target: FXN; (-) strand; PAM type: YTN; PAM sequence: TTG
  source 1..20: mol_type = other DNA
ctaatcaatgtctgcatgtg

SEQ ID NO: 25872 - DNA, 20 bp, synthetic construct
  misc_feature 1..20: note = Description of Artificial Sequence: Synthetic oligonucleotide
  misc_feature 1..20: note = Target: FXN; (-) strand; PAM type: YTN; PAM sequence: CTT
  source 1..20: mol_type = other DNA
gctaatcaatgtctgcatgt

SEQ ID NO: 25873 - DNA, 20 bp, synthetic construct
  misc_feature 1..20: note = Description of Artificial Sequence: Synthetic oligonucleotide
  misc_feature 1..20: note = Target: FXN; (-) strand; PAM type: YTN; PAM sequence: TTG
  source 1..20: mol_type = other DNA
tagcttgctaatcaatgtct

SEQ ID NO: 25874 - DNA, 20 bp, synthetic construct
  misc_feature 1..20: note = Description of Artificial Sequence: Synthetic oligonucleotide
  misc_feature 1..20: note = Target: FXN; (-) strand; PAM type: YTN; PAM sequence: TTT
  source 1..20: mol_type = other DNA
gtagcttgctaatcaatgtc

SEQ ID NO: 25875 - DNA, 20 bp, synthetic construct
  misc_feature 1..20: note = Description of Artificial Sequence: Synthetic oligonucleotide
  misc_feature 1..20: note = Target: FXN; (-) strand; PAM type: YTN; PAM sequence: TTT
  source 1..20: mol_type = other DNA
tgtagcttgctaatcaatgt

SEQ ID NO: 25876 - DNA, 20 bp, synthetic construct
  misc_feature 1..20: note = Description of Artificial Sequence: Synthetic oligonucleotide
  misc_feature 1..20: note = Target: FXN; (-) strand; PAM type: YTN; PAM sequence: TTT
  source 1..20: mol_type = other DNA
ttgtagcttgctaatcaatg

SEQ ID NO: 25877 - DNA, 20 bp, synthetic construct
  misc_feature 1..20: note = Description of Artificial Sequence: Synthetic oligonucleotide
  misc_feature 1..20: note = Target: FXN; (-) strand; PAM type: YTN; PAM sequence: CTG
  source 1..20: mol_type = other DNA
tttttgtagcttgctaatca

SEQ ID NO: 25878 - DNA, 20 bp, synthetic construct
  misc_feature 1..20: note = Description of Artificial Sequence: Synthetic oligonucleotide
  misc_feature 1..20: note = Target: FXN; (-) strand; PAM type: YTN; PAM sequence: TTC
  source 1..20: mol_type = other DNA
atgactgtttttgtagcttg

SEQ ID NO: 25879 - DNA, 20 bp, synthetic construct
  misc_feature 1..20: note = Description of Artificial Sequence: Synthetic oligonucleotide
  misc_feature 1..20: note = Target: FXN; (-) strand; PAM type: YTN; PAM sequence: TTT
  source 1..20: mol_type = other DNA
catgactgtttttgtagctt

SEQ ID NO: 25880 - DNA, 20 bp, synthetic construct
  misc_feature 1..20: note = Description of Artificial Sequence: Synthetic oligonucleotide
  misc_feature 1..20: note = Target: FXN; (-) strand; PAM type: YTN; PAM sequence: CTA
  source 1..20: mol_type = other DNA
taaaaacaggtttcatgact

SEQ ID NO: 25881 - DNA, 20 bp, synthetic construct
  misc_feature 1..20: note = Description of Artificial Sequence: Synthetic oligonucleotide
  misc_feature 1..20: note = Target: FXN; (-) strand; PAM type: YTN; PAM sequence: CTA
  source 1..20: mol_type = other DNA
atcctataaaaacaggtttc

SEQ ID NO: 25882 - DNA, 20 bp, synthetic construct
  misc_feature 1..20: note = Description of Artificial Sequence: Synthetic oligonucleotide
  misc_feature 1..20: note = Target: FXN; (-) strand; PAM type: YTN; PAM sequence: TTC
  source 1..20: mol_type = other DNA
actaatcctataaaaacagg

SEQ ID NO: 25883 - DNA, 20 bp, synthetic construct
  misc_feature 1..20: note = Description of Artificial Sequence: Synthetic oligonucleotide
  misc_feature 1..20: note = Target: FXN; (-) strand; PAM type: YTN; PAM sequence: CTT
  source 1..20: mol_type = other DNA
cactaatcctataaaaacag

SEQ ID NO: 25884 - DNA, 20 bp, synthetic construct
  misc_feature 1..20: note = Description of Artificial Sequence: Synthetic oligonucleotide
  misc_feature 1..20: note = Target: FXN; (-) strand; PAM type: YTN; PAM sequence: CTG
  source 1..20: mol_type = other DNA
gggcttcactaatcctataa

SEQ ID NO: 25885 - DNA, 20 bp, synthetic construct
  misc_feature 1..20: note = Description of Artificial Sequence: Synthetic oligonucleotide
  misc_feature 1..20: note = Target: FXN; (-) strand; PAM type: YTN; PAM sequence: CTG
  source 1..20: mol_type = other DNA
gtcaaactggggcttcacta

SEQ ID NO: 25886 - DNA, 20 bp, synthetic construct
  misc_feature 1..20: note = Description of Artificial Sequence: Synthetic oligonucleotide
  misc_feature 1..20: note = Target: FXN; (-) strand; PAM type: YTN; PAM sequence: CTC
  source 1..20: mol_type = other DNA
tggtcaaactggggcttcac

SEQ ID NO: 25887 - DNA, 20 bp, synthetic construct
  misc_feature 1..20: note = Description of Artificial Sequence: Synthetic oligonucleotide
  misc_feature 1..20: note = Target: FXN; (-) strand; PAM type: YTN; PAM sequence: TTC
  source 1..20: mol_type = other DNA
atgcaaagtactctggtcaa

SEQ ID NO: 25888 - DNA, 20 bp, synthetic construct
  misc_feature 1..20: note = Description of Artificial Sequence: Synthetic oligonucleotide
  misc_feature 1..20: note = Target: FXN; (-) strand; PAM type: YTN; PAM sequence: CTA
  source 1..20: mol_type = other DNA
acaaaacattcatgcaaagt

SEQ ID NO: 25889 - DNA, 20 bp, synthetic construct
  misc_feature 1..20: note = Description of Artificial Sequence: Synthetic oligonucleotide
  misc_feature 1..20: note = Target: FXN; (-) strand; PAM type: YTN; PAM sequence: TTC
  source 1..20: mol_type = other DNA
taacaaaacattcatgcaaa

SEQ ID NO: 25890 - DNA, 20 bp, synthetic construct
  misc_feature 1..20: note = Description of Artificial Sequence: Synthetic oligonucleotide
  misc_feature 1..20: note = Target: FXN; (-) strand; PAM type: YTN; PAM sequence: CTT
  source 1..20: mol_type = other DNA
ctaacaaaacattcatgcaa

SEQ ID NO: 25891 - DNA, 20 bp, synthetic construct
  misc_feature 1..20: note = Description of Artificial Sequence: Synthetic oligonucleotide
  misc_feature 1..20: note = Target: FXN; (-) strand; PAM type: YTN; PAM sequence: TTG
  source 1..20: mol_type = other DNA
cttctaacaaaacattcatg

SEQ ID NO: 25892 - DNA, 20 bp, synthetic construct
  misc_feature 1..20: note = Description of Artificial Sequence: Synthetic oligonucleotide
  misc_feature 1..20: note = Target: FXN; (-) strand; PAM type: YTN; PAM sequence: TTT
  source 1..20: mol_type = other DNA
gcttctaacaaaacattcat

SEQ ID NO: 25893 - DNA, 20 bp, synthetic construct
  misc_feature 1..20: note = Description of Artificial Sequence: Synthetic oligonucleotide
  misc_feature 1..20: note = Target: FXN; (-) strand; PAM type: YTN; PAM sequence: TTG
  source 1..20: mol_type = other DNA
gcacatttgcttctaacaaa

SEQ ID NO: 25894 - DNA, 20 bp, synthetic construct
  misc_feature 1..20: note = Description of Artificial Sequence: Synthetic oligonucleotide
  misc_feature 1..20: note = Target: FXN; (-) strand; PAM type: YTN; PAM sequence: CTA
  source 1..20: mol_type = other DNA
gaatattggcacatttgctt

SEQ ID NO: 25895 - DNA, 20 bp, synthetic construct
  misc_feature 1..20: note = Description of Artificial Sequence: Synthetic oligonucleotide
  misc_feature 1..20: note = Target: FXN; (-) strand; PAM type: YTN; PAM sequence: CTG
  source 1..20: mol_type = other DNA
ctagaatattggcacatttg

SEQ ID NO: 25896 - DNA, 20 bp, synthetic construct
  misc_feature 1..20: note = Description of Artificial Sequence: Synthetic oligonucleotide
  misc_feature 1..20: note = Target: FXN; (-) strand; PAM type: YTN; PAM sequence: CTC
  source 1..20: mol_type = other DNA
aaaaaaaaaaaaaaagaaga

SEQ ID NO: 25897 - DNA, 20 bp, synthetic construct
  misc_feature 1..20: note = Description of Artificial Sequence: Synthetic oligonucleotide
  misc_feature 1..20: note = Target: FXN; (-) strand; PAM type: YTN; PAM sequence: TTC
  source 1..20: mol_type = other DNA
aactcaaaaaaaaaaaaaaa

SEQ ID NO: 25898 - DNA, 20 bp, synthetic construct
  misc_feature 1..20: note = Description of Artificial Sequence: Synthetic oligonucleotide
  misc_feature 1..20: note = Target: FXN; (-) strand; PAM type: YTN; PAM sequence: CTT
  source 1..20: mol_type = other DNA
caactcaaaaaaaaaaaaaa

SEQ ID NO: 25899 - DNA, 20 bp, synthetic construct
  misc_feature 1..20: note = Description of Artificial Sequence: Synthetic oligonucleotide
  misc_feature 1..20: note = Target: FXN; (-) strand; PAM type: YTN; PAM sequence: CTA
  source 1..20: mol_type = other DNA
ggcttcaactcaaaaaaaaa

SEQ ID NO: 25900 - DNA, 20 bp, synthetic construct
  misc_feature 1..20: note = Description of Artificial Sequence: Synthetic oligonucleotide
  misc_feature 1..20: note = Target: FXN; (-) strand; PAM type: YTN; PAM sequence: CTG
  source 1..20: mol_type = other DNA
ggtgacagagctaggcttca

SEQ ID NO: 25901 - DNA, 20 bp, synthetic construct
  misc_feature 1..20: note = Description of Artificial Sequence: Synthetic oligonucleotide
  misc_feature 1..20: note = Target: FXN; (-) strand; PAM type: YTN; PAM sequence: CTC
  source 1..20: mol_type = other DNA
cagcctgggtgacagagcta

SEQ ID NO: 25902 - DNA, 20 bp, synthetic construct
  misc_feature 1..20: note = Description of Artificial Sequence: Synthetic oligonucleotide
  misc_feature 1..20: note = Target: FXN; (-) strand; PAM type: YTN; PAM sequence: CTG
  source 1..20: mol_type = other DNA
cactccagcctgggtgacag

SEQ ID NO: 25903 - DNA, 20 bp, synthetic construct
  misc_feature 1..20: note = Description of Artificial Sequence: Synthetic oligonucleotide
  misc_feature 1..20: note = Target: FXN; (-) strand; PAM type: YTN; PAM sequence: CTG
  source 1..20: mol_type = other DNA
agatcacacaactgcactcc

SEQ ID NO: 25904 - DNA, 20 bp, synthetic construct
  misc_feature 1..20: note = Description of Artificial Sequence: Synthetic oligonucleotide
  misc_feature 1..20: note = Target: FXN; (-) strand; PAM type: YTN; PAM sequence: TTG
  source 1..20: mol_type = other DNA
cagtgagctgagatcacaca

SEQ ID NO: 25905 - DNA, 20 bp, synthetic construct
  misc_feature 1..20: note = Description of Artificial Sequence: Synthetic oligonucleotide
  misc_feature 1..20: note = Target: FXN; (-) strand; PAM type: YTN; PAM sequence: CTG
  source 1..20: mol_type = other DNA
ggaggcagaggttgcagtga

SEQ ID NO: 25906 - DNA, 20 bp, synthetic construct
  misc_feature 1..20: note = Description of Artificial Sequence: Synthetic oligonucleotide
  misc_feature 1..20: note = Target: FXN; (-) strand; PAM type: YTN; PAM sequence: TTG
  source 1..20: mol_type = other DNA
aacctgggaggcagaggttg

SEQ ID NO: 25907 - DNA, 20 bp, synthetic construct
  misc_feature 1..20: note = Description of Artificial Sequence: Synthetic oligonucleotide
  misc_feature 1..20: note = Target: FXN; (-) strand; PAM type: YTN; PAM sequence: CTT
  source 1..20: mol_type = other DNA
gaacctgggaggcagaggtt

SEQ ID NO: 25908 - DNA, 20 bp, synthetic construct
  misc_feature 1..20: note = Description of Artificial Sequence: Synthetic oligonucleotide
  misc_feature 1..20: note = Target: FXN; (-) strand; PAM type: YTN; PAM sequence: TTG
  source 1..20: mol_type = other DNA
aggcgggagaatcgcttgaa

SEQ ID NO: 25909 - DNA, 20 bp, synthetic construct
  misc_feature 1..20: note = Description of Artificial Sequence: Synthetic oligonucleotide
  misc_feature 1..20: note = Target: FXN; (-) strand; PAM type: YTN; PAM sequence: CTC
  source 1..20: mol_type = other DNA
aggaggttgaggcgggagaa

SEQ ID NO: 25910 - DNA, 20 bp, synthetic construct
  misc_feature 1..20: note = Description of Artificial Sequence: Synthetic oligonucleotide
  misc_feature 1..20: note = Target: FXN; (-) strand; PAM type: YTN; PAM sequence: CTA
  source 1..20: mol_type = other DNA
ctcaggaggttgaggcggga

SEQ ID NO: 25911 - DNA, 20 bp, synthetic construct
  misc_feature 1..20: note = Description of Artificial Sequence: Synthetic oligonucleotide
  misc_feature 1..20: note = Target: FXN; (-) strand; PAM type: YTN; PAM sequence: CTG
  source 1..20: mol_type = other DNA
taatcccagctactcaggag

SEQ ID NO: 25912 - DNA, 20 bp, synthetic construct
  misc_feature 1..20: note = Description of Artificial Sequence: Synthetic oligonucleotide
  misc_feature 1..20: note = Target: FXN; (-) strand; PAM type: YTN; PAM sequence: TTG
  source 1..20: mol_type = other DNA
tggtacatgtctgtaatccc

SEQ ID NO: 25913 - DNA, 20 bp, synthetic construct
  misc_feature 1..20: note = Description of Artificial Sequence: Synthetic oligonucleotide
  misc_feature 1..20: note = Target: FXN; (-) strand; PAM type: YTN; PAM sequence: CTG
  source 1..20: mol_type = other DNA
tattgtggtacatgtctgta

SEQ ID NO: 25914 - DNA, 20 bp, synthetic construct
  misc_feature 1..20: note = Description of Artificial Sequence: Synthetic oligonucleotide
  misc_feature 1..20: note = Target: FXN; (-) strand; PAM type: YTN; PAM sequence: TTA
  source 1..20: mol_type = other DNA
gccctgtattgtggtacatg

SEQ ID NO: 25915 - DNA, 20 bp, synthetic construct
  misc_feature 1..20: note = Description of Artificial Sequence: Synthetic oligonucleotide
  misc_feature 1..20: note = Target: FXN; (-) strand; PAM type: YTN; PAM sequence: CTT
  source 1..20: mol_type = other DNA
agccctgtattgtggtacat

SEQ ID NO: 25916 - DNA, 20 bp, synthetic construct
  misc_feature 1..20: note = Description of Artificial Sequence: Synthetic oligonucleotide
  misc_feature 1..20: note = Target: FXN; (-) strand; PAM type: YTN; PAM sequence: CTA
  source 1..20: mol_type = other DNA
aaaatacaaaacttagccct

SEQ ID NO: 25917 - DNA, 20 bp, synthetic construct
  misc_feature 1..20: note = Description of Artificial Sequence: Synthetic oligonucleotide
  misc_feature 1..20: note = Target: FXN; (-) strand; PAM type: YTN; PAM sequence: CTA
  source 1..20: mol_type = other DNA
ctaaaaatacaaaacttagc

SEQ ID NO: 25918 - DNA, 20 bp, synthetic construct
  misc_feature 1..20: note = Description of Artificial Sequence: Synthetic oligonucleotide
  misc_feature 1..20: note = Target: FXN; (-) strand; PAM type: YTN; PAM sequence: TTC
  source 1..20: mol_type = other DNA
tactaaaaatacaaaactta

SEQ ID NO: 25919 - DNA, 20 bp, synthetic construct
  misc_feature 1..20: note = Description of Artificial Sequence: Synthetic oligonucleotide
  misc_feature 1..20: note = Target: FXN; (-) strand; PAM type: YTN; PAM sequence: TTT
  source 1..20: mol_type = other DNA
ctactaaaaatacaaaactt

SEQ ID NO: 25920 - DNA, 20 bp, synthetic construct
  misc_feature 1..20: note = Description of Artificial Sequence: Synthetic oligonucleotide
  misc_feature 1..20: note = Target: FXN; (-) strand; PAM type: YTN; PAM sequence: CTG
  source 1..20: mol_type = other DNA
gccaacatggtgaaacccca

SEQ ID NO: 25921 - DNA, 20 bp, synthetic construct
  misc_feature 1..20: note = Description of Artificial Sequence: Synthetic oligonucleotide
  misc_feature 1..20: note = Target: FXN; (-) strand; PAM type: YTN; PAM sequence: TTG
  source 1..20: mol_type = other DNA
agaccagcctggccaacatg

SEQ ID NO: 25922 - DNA, 20 bp, synthetic construct
  misc_feature 1..20: note = Description of Artificial Sequence: Synthetic oligonucleotide
  misc_feature 1..20: note = Target: FXN; (-) strand; PAM type: YTN; PAM sequence: TTT
  source 1..20: mol_type = other DNA
gagaccagcctggccaacat

SEQ ID NO: 25923 - DNA, 20 bp, synthetic construct
  misc_feature 1..20: note = Description of Artificial Sequence: Synthetic oligonucleotide
  misc_feature 1..20: note = Target: FXN; (-) strand; PAM type: YTN; PAM sequence: TTG
  source 1..20: mol_type = other DNA
agatcaggagtttgagacca

SEQ ID NO: 25924 - DNA, 20 bp, synthetic construct
  misc_feature 1..20: note = Description of Artificial Sequence: Synthetic oligonucleotide
  misc_feature 1..20: note = Target: FXN; (-) strand; PAM type: YTN; PAM sequence: CTT
  source 1..20: mol_type = other DNA
gagatcaggagtttgagacc

SEQ ID NO: 25925 - DNA, 20 bp, synthetic construct
  misc_feature 1..20: note = Description of Artificial Sequence: Synthetic oligonucleotide
  misc_feature 1..20: note = Target: FXN; (-) strand; PAM type: YTN; PAM sequence: CTG
  source 1..20: mol_type = other DNA
aggcgggtggatcacttgag

SEQ ID NO: 25926 - DNA, 20 bp, synthetic construct
  misc_feature 1..20: note = Description of Artificial Sequence: Synthetic oligonucleotide
  misc_feature 1..20: note = Target: FXN; (-) strand; PAM type: YTN; PAM sequence: TTA
  source 1..20: mol_type = other DNA
ggaggctgaggcgggtggat

SEQ ID NO: 25927 - DNA, 20 bp, synthetic construct
  misc_feature 1..20: note = Description of Artificial Sequence: Synthetic oligonucleotide
  misc_feature 1..20: note = Target: FXN; (-) strand; PAM type: YTN; PAM sequence: TTT
  source 1..20: mol_type = other DNA
aggaggctgaggcgggtgga

SEQ ID NO: 25928 - DNA, 20 bp, synthetic construct
  misc_feature 1..20: note = Description of Artificial Sequence: Synthetic oligonucleotide
  misc_feature 1..20: note = Target: FXN; (-) strand; PAM type: YTN; PAM sequence: CTT
  source 1..20: mol_type = other DNA
taggaggctgaggcgggtgg

SEQ ID NO: 25929 - DNA, 20 bp, synthetic construct
  misc_feature 1..20: note = Description of Artificial Sequence: Synthetic oligonucleotide
  misc_feature 1..20: note = Target: FXN; (-) strand; PAM type: YTN; PAM sequence: TTA
  source 1..20: mol_type = other DNA
acccagcactttaggaggct

SEQ ID NO: 25930 - DNA, 20 bp, synthetic construct
  misc_feature 1..20: note = Description of Artificial Sequence: Synthetic oligonucleotide
  misc_feature 1..20: note = Target: FXN; (-) strand; PAM type: YTN; PAM sequence: CTG
  source 1..20: mol_type = other DNA
ttaacccagcactttaggag

SEQ ID NO: 25931 - DNA, 20 bp, synthetic construct
  misc_feature 1..20: note = Description of Artificial Sequence: Synthetic oligonucleotide
  misc_feature 1..20: note = Target: FXN; (-) strand; PAM type: YTN; PAM sequence: CTC
  source 1..20: mol_type = other DNA
atgcctgttaacccagcact

SEQ ID NO: 25932 - DNA, 20 bp, synthetic construct
  misc_feature 1..20: note = Description of Artificial Sequence: Synthetic oligonucleotide
  misc_feature 1..20: note = Target: FXN; (-) strand; PAM type: YTN; PAM sequence: TTG
  source 1..20: mol_type = other DNA
ccaggtgccgtggctcatgc

SEQ ID NO: 25933 - DNA, 20 bp, synthetic construct
  misc_feature 1..20: note = Description of Artificial Sequence: Synthetic oligonucleotide
  misc_feature 1..20: note = Target: FXN; (-) strand; PAM type: YTN; PAM sequence: TTT
  source 1..20: mol_type = other DNA
gccaggtgccgtggctcatg

SEQ ID NO: 25934 - DNA, 20 bp, synthetic construct
  misc_feature 1..20: note = Description of Artificial Sequence: Synthetic oligonucleotide
  misc_feature 1..20: note = Target: FXN; (-) strand; PAM type: YTN; PAM sequence: TTT
  source 1..20: mol_type = other DNA
tgccaggtgccgtggctcat

SEQ ID NO: 25935 - DNA, 20 bp, synthetic construct
  misc_feature 1..20: note = Description of Artificial Sequence: Synthetic oligonucleotide
  misc_feature 1..20: note = Target: FXN; (-) strand; PAM type: YTN; PAM sequence: CTT
  source 1..20: mol_type = other DNA
ttgccaggtgccgtggctca

SEQ ID NO: 25936 - DNA, 20 bp, synthetic construct
  misc_feature 1..20: note = Description of Artificial Sequence: Synthetic oligonucleotide
  misc_feature 1..20: note = Target: FXN; (-) strand; PAM type: YTN; PAM sequence: TTC
  source 1..20: mol_type = other DNA
aatagaagtaaaccaaaaga

SEQ ID NO: 25937 - DNA, 20 bp, synthetic construct
  misc_feature 1..20: note = Description of Artificial Sequence: Synthetic oligonucleotide
  misc_feature 1..20: note = Target: FXN; (-) strand; PAM type: YTN; PAM sequence: TTC
  source 1..20: mol_type = other DNA
agttcaatagaagtaaacca

SEQ ID NO: 25938 - DNA, 20 bp, synthetic construct
  misc_feature 1..20: note = Description of Artificial Sequence: Synthetic oligonucleotide
  misc_feature 1..20: note = Target: FXN; (-) strand; PAM type: YTN; PAM sequence: TTT
  source 1..20: mol_type = other DNA
cagttcaatagaagtaaacc

SEQ ID NO: 25939 - DNA, 20 bp, synthetic construct
  misc_feature 1..20: note = Description of Artificial Sequence: Synthetic oligonucleotide
  misc_feature 1..20: note = Target: FXN; (-) strand; PAM type: YTN; PAM sequence: TTT
  source 1..20: mol_type = other DNA
tcagttcaatagaagtaaac

SEQ ID NO: 25940 - DNA, 20 bp, synthetic construct
  misc_feature 1..20: note = Description of Artificial Sequence: Synthetic oligonucleotide
  misc_feature 1..20: note = Target: FXN; (-) strand; PAM type: YTN; PAM sequence: TTT
  source 1..20: mol_type = other DNA
ttcagttcaatagaagtaaa

SEQ ID NO: 25941 - DNA, 20 bp, synthetic construct
  misc_feature 1..20: note = Description of Artificial Sequence: Synthetic oligonucleotide
  misc_feature 1..20: note = Target: FXN; (-) strand; PAM type: YTN; PAM sequence: CTT
  source 1..20: mol_type = other DNA
tttcagttcaatagaagtaa

SEQ ID NO: 25942 - DNA, 20 bp, synthetic construct
  misc_feature 1..20: note = Description of Artificial Sequence: Synthetic oligonucleotide
  misc_feature 1..20: note = Target: FXN; (-) strand; PAM type: YTN; PAM sequence: TTG
  source 1..20: mol_type = other DNA
tgactttttcagttcaatag

SEQ ID NO: 25943 - DNA, 20 bp, synthetic construct
  misc_feature 1..20: note = Description of Artificial Sequence: Synthetic oligonucleotide
  misc_feature 1..20: note = Target: FXN; (-) strand; PAM type: YTN; PAM sequence: TTT
  source 1..20: mol_type = other DNA
gtgactttttcagttcaata

SEQ ID NO: 25944 - DNA, 20 bp, synthetic construct
  misc_feature 1..20: note = Description of Artificial Sequence: Synthetic oligonucleotide
  misc_feature 1..20: note = Target: FXN; (-) strand; PAM type: YTN; PAM sequence: TTA
  source 1..20: mol_type = other DNA
aatataaatatatttgtgac

SEQ ID NO: 25945 - DNA, 20 bp, synthetic construct
  misc_feature 1..20: note = Description of Artificial Sequence: Synthetic oligonucleotide
  misc_feature 1..20: note = Target: FXN; (-) strand; PAM type: YTN; PAM sequence: TTA
  source 1..20: mol_type = other DNA
attaaatataaatatatttg

SEQ ID NO: 25946 - DNA, 20 bp, synthetic construct
  misc_feature 1..20: note = Description of Artificial Sequence: Synthetic oligonucleotide
  misc_feature 1..20: note = Target: FXN; (-) strand; PAM type: YTN; PAM sequence: TTT
  source 1..20: mol_type = other DNA
aattaaatataaatatattt

SEQ ID NO: 25947 - DNA, 20 bp, synthetic construct
  misc_feature 1..20: note = Description of Artificial Sequence: Synthetic oligonucleotide
  misc_feature 1..20: note = Target: FXN; (-) strand; PAM type: YTN; PAM sequence: TTA
  source 1..20: mol_type = other DNA
tataaatatatttaattaaa

SEQ ID NO: 25948 - DNA, 20 bp, synthetic construct
  misc_feature 1..20: note = Description of Artificial Sequence: Synthetic oligonucleotide
  misc_feature 1..20: note = Target: FXN; (-) strand; PAM type: YTN; PAM sequence: TTT
  source 1..20: mol_type = other DNA
atataaatatatttaattaa

SEQ ID NO: 25949 - DNA, 20 bp, synthetic construct
  misc_feature 1..20: note = Description of Artificial Sequence: Synthetic oligonucleotide
  misc_feature 1..20: note = Target: FXN; (-) strand; PAM type: YTN; PAM sequence: TTT
  source 1..20: mol_type = other DNA
tatataaatatatttaatta

SEQ ID NO: 25950 - DNA, 20 bp, synthetic construct
  misc_feature 1..20: note = Description of Artificial Sequence: Synthetic oligonucleotide
  misc_feature 1..20: note = Target: FXN; (-) strand; PAM type: YTN; PAM sequence: TTT
  source 1..20: mol_type = other DNA
ttatataaatatatttaatt

SEQ ID NO: 25951 - DNA, 20 bp, synthetic construct
  misc_feature 1..20: note = Description of Artificial Sequence: Synthetic oligonucleotide
  misc_feature 1..20: note = Target: FXN; (-) strand; PAM type: YTN; PAM sequence: CTA
  source 1..20: mol_type = other DNA
aataccatatttttatataa

SEQ ID NO: 25952 - DNA, 20 bp, synthetic construct
  misc_feature 1..20: note = Description of Artificial Sequence: Synthetic oligonucleotide
  misc_feature 1..20: note = Target: FXN; (-) strand; PAM type: YTN; PAM sequence: CTA
  source 1..20: mol_type = other DNA
aaaataataatactaaatac

SEQ ID NO: 25953 - DNA, 20 bp, synthetic construct
  misc_feature 1..20: note = Description of Artificial Sequence: Synthetic oligonucleotide
  misc_feature 1..20: note = Target: FXN; (-) strand; PAM type: YTN; PAM sequence: CTC
  source 1..20: mol_type = other DNA
taaaaataataatactaaat

SEQ ID NO: 25954 - DNA, 20 bp, synthetic construct
  misc_feature 1..20: note = Description of Artificial Sequence: Synthetic oligonucleotide
  misc_feature 1..20: note = Target: FXN; (-) strand; PAM type: YTN; PAM sequence: CTG
  source 1..20: mol_type = other DNA
tctctaaaaataataatact

SEQ ID NO: 25955 - DNA, 20 bp, synthetic construct
  misc_feature 1..20: note = Description of Artificial Sequence: Synthetic oligonucleotide
  misc_feature 1..20: note = Target: FXN; (-) strand; PAM type: YTN; PAM sequence: CTG
  source 1..20: mol_type = other DNA
ggtgacagagcgaggccctg

SEQ ID NO: 25956 - DNA, 20 bp, synthetic construct
  misc_feature 1..20: note = Description of Artificial Sequence: Synthetic oligonucleotide
  misc_feature 1..20: note = Target: FXN; (-) strand; PAM type: YTN; PAM sequence: CTC
  source 1..20: mol_type = other DNA
cagcctgggtgacagagcga

SEQ ID NO: 25957 - DNA, 20 bp, synthetic construct
  misc_feature 1..20: note = Description of Artificial Sequence: Synthetic oligonucleotide
  misc_feature 1..20: note = Target: FXN; (-) strand; PAM type: YTN; PAM sequence: CTG
  source 1..20: mol_type = other DNA
cactccagcctgggtgacag

SEQ ID NO: 25958 - DNA, 20 bp, synthetic construct
  misc_feature 1..20: note = Description of Artificial Sequence: Synthetic oligonucleotide
  misc_feature 1..20: note = Target: FXN; (-) strand; PAM type: YTN; PAM sequence: TTG
  source 1..20: mol_type = other DNA
tgccactgcactccagcctg

SEQ ID NO: 25959 - DNA, 20 bp, synthetic construct
  misc_feature 1..20: note = Description of Artificial Sequence: Synthetic oligonucleotide
  misc_feature 1..20: note = Target: FXN; (-) strand; PAM type: YTN; PAM sequence: CTA
  source 1..20: mol_type = other DNA
tgattgtgccactgcactcc

SEQ ID NO: 25960 - DNA, 20 bp, synthetic construct
  misc_feature 1..20: note = Description of Artificial Sequence: Synthetic oligonucleotide
  misc_feature 1..20: note = Target: FXN; (-) strand; PAM type: YTN; PAM sequence: CTG
  source 1..20: mol_type = other DNA
cagtgagctatgattgtgcc

SEQ ID NO: 25961 - DNA, 20 bp, synthetic construct
  misc_feature 1..20: note = Description of Artificial Sequence: Synthetic oligonucleotide
  misc_feature 1..20: note = Target: FXN; (-) strand; PAM type: YTN; PAM sequence: TTG
  source 1..20: mol_type = other DNA
aggctgcagtgagctatgat

SEQ ID NO: 25962 - DNA, 20 bp, synthetic construct
  misc_feature 1..20: note = Description of Artificial Sequence: Synthetic oligonucleotide
  misc_feature 1..20: note = Target: FXN; (-) strand; PAM type: YTN; PAM sequence: CTT
  source 1..20: mol_type = other DNA
gaggctgcagtgagctatga

SEQ ID NO: 25963 - DNA, 20 bp, synthetic construct
  misc_feature 1..20: note = Description of Artificial Sequence: Synthetic oligonucleotide
  misc_feature 1..20: note = Target: FXN; (-) strand; PAM type: YTN; PAM sequence: TTG
  source 1..20: mol_type = other DNA
agcccagaagcttgaggctg

SEQ ID NO: 25964 - DNA, 20 bp, synthetic construct
  misc_feature 1..20: note = Description of Artificial Sequence: Synthetic oligonucleotide
  misc_feature 1..20: note = Target: FXN; (-) strand; PAM type: YTN; PAM sequence: CTT
  source 1..20: mol_type = other DNA
gagcccagaagcttgaggct

SEQ ID NO: 25965 - DNA, 20 bp, synthetic construct
  misc_feature 1..20: note = Description of Artificial Sequence: Synthetic oligonucleotide
  misc_feature 1..20: note = Target: FXN; (-) strand; PAM type: YTN; PAM sequence: CTG
  source 1..20: mol_type = other DNA
aggtggaacgatcacttgag

SEQ ID NO: 25966 - DNA, 20 bp, synthetic construct
  misc_feature 1..20: note = Description of Artificial Sequence: Synthetic oligonucleotide
  misc_feature 1..20: note = Target: FXN; (-) strand; PAM type: YTN; PAM sequence: CTA
  source 1..20: mol_type = other DNA
gggaggctgaggtggaacga

SEQ ID NO: 25967 - DNA, 20 bp, synthetic construct
  misc_feature 1..20: note = Description of Artificial Sequence: Synthetic oligonucleotide
  misc_feature 1..20: note = Target: FXN; (-) strand; PAM type: YTN; PAM sequence: CTA
  source 1..20: mol_type = other DNA
ctagggaggctgaggtggaa

SEQ ID NO: 25968 - DNA, 20 bp, synthetic construct
  misc_feature 1..20: note = Description of Artificial Sequence: Synthetic oligonucleotide
  misc_feature 1..20: note = Target: FXN; (-) strand; PAM type: YTN; PAM sequence: CTG
  source 1..20: mol_type = other DNA
tagtcccagctactagggag

SEQ ID NO: 25969 - DNA, 20 bp, synthetic construct
  misc_feature 1..20: note = Description of Artificial Sequence: Synthetic oligonucleotide
  misc_feature 1..20: note = Target: FXN; (-) strand; PAM type: YTN; PAM sequence: TTA
  source 1..20: mol_type = other DNA
gccgagtatggtggcatgtg

SEQ ID NO: 25970 - DNA, 20 bp, synthetic construct
  misc_feature 1..20: note = Description of Artificial Sequence: Synthetic oligonucleotide
  misc_feature 1..20: note = Target: FXN; (-) strand; PAM type: YTN; PAM sequence: CTG
  source 1..20: mol_type = other DNA
ggaaacatagcgagacccat

SEQ ID NO: 25971 - DNA, 20 bp, synthetic construct
  misc_feature 1..20: note = Description of Artificial Sequence: Synthetic oligonucleotide
  misc_feature 1..20: note = Target: FXN; (-) strand; PAM type: YTN; PAM sequence: TTG
  source 1..20: mol_type = other DNA
agaccagcctgggaaacata

SEQ ID NO: 25972 - DNA, 20 bp, synthetic construct
  misc_feature 1..20: note = Description of Artificial Sequence: Synthetic oligonucleotide
  misc_feature 1..20: note = Target: FXN; (-) strand; PAM type: YTN; PAM sequence: TTT
  source 1..20: mol_type = other DNA
gagaccagcctgggaaacat

SEQ ID NO: 25973 - DNA, 20 bp, synthetic construct
  misc_feature 1..20: note = Description of Artificial Sequence: Synthetic oligonucleotide
  misc_feature 1..20: note = Target: FXN; (-) strand; PAM type: YTN; PAM sequence: TTG
  source 1..20: mol_type = other DNA
aggccaggagtttgagacca

SEQ ID NO: 25974 - DNA, 20 bp, synthetic construct
  misc_feature 1..20: note = Description of Artificial Sequence: Synthetic oligonucleotide
  misc_feature 1..20: note = Target: FXN; (-) strand; PAM type: YTN; PAM sequence: CTT
  source 1..20: mol_type = other DNA
gaggccaggagtttgagacc

SEQ ID NO: 25975 - DNA, 20 bp, synthetic construct
  misc_feature 1..20: note = Description of Artificial Sequence: Synthetic oligonucleotide
  misc_feature 1..20: note = Target: FXN; (-) strand; PAM type: YTN; PAM sequence: TTG
  source 1..20: mol_type = other DNA
ggaggccgaggtgagagaat

SEQ ID NO: 25976 - DNA, 20 bp, synthetic construct
  misc_feature 1..20: note = Description of Artificial Sequence: Synthetic oligonucleotide
  misc_feature 1..20: note = Target: FXN; (-) strand; PAM type: YTN; PAM sequence: TTT
  source 1..20: mol_type = other DNA
gggaggccgaggtgagagaa

SEQ ID NO: 25977 - DNA, 20 bp, synthetic construct
  misc_feature 1..20: note = Description of Artificial Sequence: Synthetic oligonucleotide
  misc_feature 1..20: note = Target: FXN; (-) strand; PAM type: YTN; PAM sequence: CTT
  source 1..20: mol_type = other DNA
tgggaggccgaggtgagaga

SEQ ID NO: 25978 - DNA, 20 bp, synthetic construct
  misc_feature 1..20: note = Description of Artificial Sequence: Synthetic oligonucleotide
  misc_feature 1..20: note = Target: FXN; (-) strand; PAM type: YTN; PAM sequence: CTG
  source 1..20: mol_type = other DNA
taatcccggtgctttgggag

SEQ ID NO: 25979 - DNA, 20 bp, synthetic construct
  misc_feature 1..20: note = Description of Artificial Sequence: Synthetic oligonucleotide
  misc_feature 1..20: note = Target: FXN; (-) strand; PAM type: YTN; PAM sequence: CTG
  source 1..20: mol_type = other DNA
gcacacacctgtaatcccgg

SEQ ID NO: 25980 - DNA, 20 bp, synthetic construct
  misc_feature 1..20: note = Description of Artificial Sequence: Synthetic oligonucleotide
  misc_feature 1..20: note = Target: FXN; (-) strand; PAM type: YTN; PAM sequence: CTG
  source 1..20: mol_type = other DNA
ggtgtgctggcacacacctg

SEQ ID NO: 25981 - DNA, 20 bp, synthetic construct
  misc_feature 1..20: note = Description of Artificial Sequence: Synthetic oligonucleotide
  misc_feature 1..20: note = Target: FXN; (-) strand; PAM type: YTN; PAM sequence: TTG
  source 1..20: mol_type = other DNA
tggctgggtgtgctggcaca

SEQ ID NO: 25982 - DNA, 20 bp, synthetic construct
  misc_feature 1..20: note = Description of Artificial Sequence: Synthetic oligonucleotide
  misc_feature 1..20: note = Target: FXN; (-) strand; PAM type: YTN; PAM sequence: TTT
  source 1..20: mol_type = other DNA
gtggctgggtgtgctggcac

SEQ ID NO: 25983 - DNA, 20 bp, synthetic construct
  misc_feature 1..20: note = Description of Artificial Sequence: Synthetic oligonucleotide
  misc_feature 1..20: note = Target: FXN; (-) strand; PAM type: YTN; PAM sequence: TTA
  source 1..20: mol_type = other DNA
tagatttgtggctgggtgtg

SEQ ID NO: 25984 - DNA, 20 bp, synthetic construct
  misc_feature 1..20: note = Description of Artificial Sequence: Synthetic oligonucleotide
  misc_feature 1..20: note = Target: FXN; (-) strand; PAM type: YTN; PAM sequence: TTT
  source 1..20: mol_type = other DNA
atagatttgtggctgggtgt

SEQ ID NO: 25985 - DNA, 20 bp, synthetic construct
  misc_feature 1..20: note = Description of Artificial Sequence: Synthetic oligonucleotide
  misc_feature 1..20: note = Target: FXN; (-) strand; PAM type: YTN; PAM sequence: CTA
  source 1..20: mol_type = other DNA
aatttatagatttgtggctg

SEQ ID NO: 25986 - DNA, 20 bp, synthetic construct
  misc_feature 1..20: note = Description of Artificial Sequence: Synthetic oligonucleotide
  misc_feature 1..20: note = Target: FXN; (-) strand; PAM type: YTN; PAM sequence: TTC
  source 1..20: mol_type = other DNA
taaatttatagatttgtggc

SEQ ID NO: 25987 - DNA, 20 bp, synthetic construct
  misc_feature 1..20: note = Description of Artificial Sequence: Synthetic oligonucleotide
  misc_feature 1..20: note = Target: FXN; (-) strand; PAM type: YTN; PAM sequence: TTT
  source 1..20: mol_type = other DNA
ctaaatttatagatttgtgg

SEQ ID NO: 25988 - DNA, 20 bp, synthetic construct
  misc_feature 1..20: note = Description of Artificial Sequence: Synthetic oligonucleotide
  misc_feature 1..20: note = Target: FXN; (-) strand; PAM type: YTN; PAM sequence: CTT
  source 1..20: mol_type = other DNA
tctaaatttatagatttgtg

SEQ ID NO: 25989 - DNA, 20 bp, synthetic construct
  misc_feature 1..20: note = Description of Artificial Sequence: Synthetic oligonucleotide
  misc_feature 1..20: note = Target: FXN; (-) strand; PAM type: YTN; PAM sequence: CTC
  source 1..20: mol_type = other DNA
ctttctaaatttatagattt

SEQ ID NO: 25990 - DNA, 20 bp, synthetic construct
  misc_feature 1..20: note = Description of Artificial Sequence: Synthetic oligonucleotide
  misc_feature 1..20: note = Target: FXN; (-) strand; PAM type: YTN; PAM sequence: TTA
  source 1..20: mol_type = other DNA
gaaatagtcctcctttctaa

SEQ ID NO: 25991 - DNA, 20 bp, synthetic construct
  misc_feature 1..20: note = Description of Artificial Sequence: Synthetic oligonucleotide
  misc_feature 1..20: note = Target: FXN; (-) strand; PAM type: YTN; PAM sequence: TTT
  source 1..20: mol_type = other DNA
agaaatagtcctcctttcta

SEQ ID NO: 25992 - DNA, 20 bp, synthetic construct
  misc_feature 1..20: note = Description of Artificial Sequence: Synthetic oligonucleotide
  misc_feature 1..20: note = Target: FXN; (-) strand; PAM type: YTN; PAM sequence: CTT
  source 1..20: mol_type = other DNA
tagaaatagtcctcctttct

SEQ ID NO: 25993 - DNA, 20 bp, synthetic construct
  misc_feature 1..20: note = Description of Artificial Sequence: Synthetic oligonucleotide
  misc_feature 1..20: note = Target: FXN; (-) strand; PAM type: YTN; PAM sequence: CTC
  source 1..20: mol_type = other DNA
tttagaaatagtcctccttt

SEQ ID NO: 25994 - DNA, 20 bp, synthetic construct
  misc_feature 1..20: note = Description of Artificial Sequence: Synthetic oligonucleotide
  misc_feature 1..20: note = Target: FXN; (-) strand; PAM type: YTN; PAM sequence: CTA
  source 1..20: mol_type = other DNA
caggtagtgggaccctcttt

SEQ ID NO: 25995 - DNA, 20 bp, synthetic construct
  misc_feature 1..20: note = Description of Artificial Sequence: Synthetic oligonucleotide
  misc_feature 1..20: note = Target: FXN; (-) strand; PAM type: YTN; PAM sequence: CTG
  source 1..20: mol_type = other DNA
cctacaggtagtgggaccct

SEQ ID NO: 25996 - DNA, 20 bp, synthetic construct
  misc_feature 1..20: note = Description of Artificial Sequence: Synthetic oligonucleotide
  misc_feature 1..20: note = Target: FXN; (-) strand; PAM type: YTN; PAM sequence: TTC
  source 1..20: mol_type = other DNA
ctgcctacaggtagtgggac

SEQ ID NO: 25997 - DNA, 20 bp, synthetic construct
  misc_feature 1..20: note = Description of Artificial Sequence: Synthetic oligonucleotide
  misc_feature 1..20: note = Target: FXN; (-) strand; PAM type: YTN; PAM sequence: CTT
  source 1..20: mol_type = other DNA
cctgcctacaggtagtggga

SEQ ID NO: 25998 - DNA, 20 bp, synthetic construct
  misc_feature 1..20: note = Description of Artificial Sequence: Synthetic oligonucleotide
  misc_feature 1..20: note = Target: FXN; (-) strand; PAM type: YTN; PAM sequence: CTG
  source 1..20: mol_type = other DNA
cttcctgcctacaggtagtg

SEQ ID NO: 25999 - DNA, 20 bp, synthetic construct
  misc_feature 1..20: note = Description of Artificial Sequence: Synthetic oligonucleotide
  misc_feature 1..20: note = Target: FXN; (-) strand; PAM type: YTN; PAM sequence: CTC
  source 1..20: mol_type = other DNA
tgcttcctgcctacaggtag

SEQ ID NO: 26000 - DNA, 20 bp, synthetic construct
  misc_feature 1..20: note = Description of Artificial Sequence: Synthetic oligonucleotide
  misc_feature 1..20: note = Target: FXN; (-) strand; PAM type: YTN; PAM sequence: TTA
  source 1..20: mol_type = other DNA
tggccagaggctctgcttcc

SEQ ID NO: 26001 - DNA, 20 bp, synthetic construct
  misc_feature 1..20: note = Description of Artificial Sequence: Synthetic oligonucleotide
  misc_feature 1..20: note = Target: FXN; (-) strand; PAM type: YTN; PAM sequence: TTC
  source 1..20: mol_type = other DNA
agttatggccagaggctctg

SEQ ID NO: 26002 - DNA, 20 bp, synthetic construct
  misc_feature 1..20: note = Description of Artificial Sequence: Synthetic oligonucleotide
  misc_feature 1..20: note = Target: FXN; (-) strand; PAM type: YTN; PAM sequence: TTT
  source 1..20: mol_type = other DNA
cagttatggccagaggctct

SEQ ID NO: 26003 - DNA, 20 bp, synthetic construct
  misc_feature 1..20: note = Description of Artificial Sequence: Synthetic oligonucleotide
  misc_feature 1..20: note = Target: FXN; (-) strand; PAM type: YTN; PAM sequence: TTT
  source 1..20: mol_type = other DNA
tcagttatggccagaggctc

SEQ ID NO: 26004 - DNA, 20 bp, synthetic construct
  misc_feature 1..20: note = Description of Artificial Sequence: Synthetic oligonucleotide
  misc_feature 1..20: note = Target: FXN; (-) strand; PAM type: YTN; PAM sequence: TTT
  source 1..20: mol_type = other DNA
ttcagttatggccagaggct

SEQ ID NO: 26005 - DNA, 20 bp, synthetic construct
  misc_feature 1..20: note = Description of Artificial Sequence: Synthetic oligonucleotide
  misc_feature 1..20: note = Target: FXN; (-) strand; PAM type: YTN; PAM sequence: TTG
  source 1..20: mol_type = other DNA
tttttcagttatggccagag

SEQ ID NO: 26006 - DNA, 20 bp, synthetic construct
  misc_feature 1..20: note = Description of Artificial Sequence: Synthetic oligonucleotide
  misc_feature 1..20: note = Target: FXN; (-) strand; PAM type: YTN; PAM sequence: CTT
  source 1..20: mol_type = other DNA
gtttttcagttatggccaga

SEQ ID NO: 26007 - DNA, 20 bp, synthetic construct
  misc_feature 1..20: note = Description of Artificial Sequence: Synthetic oligonucleotide
  misc_feature 1..20: note = Target: FXN; (-) strand; PAM type: YTN; PAM sequence: TTG
  source 1..20: mol_type = other DNA
gaagtgcttgtttttcagtt

SEQ ID NO: 26008 - DNA, 20 bp, synthetic construct
  misc_feature 1..20: note = Description of Artificial Sequence: Synthetic oligonucleotide
  misc_feature 1..20: note = Target: FXN; (-) strand; PAM type: YTN; PAM sequence: CTT
  source 1..20: mol_type = other DNA
ggaagtgcttgtttttcagt

SEQ ID NO: 26009 - DNA, 20 bp, synthetic construct
  misc_feature 1..20: note = Description of Artificial Sequence: Synthetic oligonucleotide
  misc_feature 1..20: note = Target: FXN; (-) strand; PAM type: YTN; PAM sequence: TTC
  source 1..20: mol_type = other DNA
ttggaagtgcttgtttttca

SEQ ID NO: 26010 - DNA, 20 bp, synthetic construct
  misc_feature 1..20: note = Description of Artificial Sequence: Synthetic oligonucleotide
  misc_feature 1..20: note = Target: FXN; (-) strand; PAM type: YTN; PAM sequence: CTT
  source 1..20: mol_type = other DNA
cttggaagtgcttgtttttc

SEQ ID NO: 26011 - DNA, 20 bp, synthetic construct
  misc_feature 1..20: note = Description of Artificial Sequence: Synthetic oligonucleotide
  misc_feature 1..20: note = Target: FXN; (-) strand; PAM type: YTN; PAM sequence: TTG
  source 1..20: mol_type = other DNA
ccccttcttggaagtgcttg

SEQ ID NO: 26012 - DNA, 20 bp, synthetic construct
  misc_feature 1..20: note = Description of Artificial Sequence: Synthetic oligonucleotide
  misc_feature 1..20: note = Target: FXN; (-) strand; PAM type: YTN; PAM sequence: TTT
  source 1..20: mol_type = other DNA
gccccttcttggaagtgctt

SEQ ID NO: 26013 - DNA, 20 bp, synthetic construct
  misc_feature 1..20: note = Description of Artificial Sequence: Synthetic oligonucleotide
  misc_feature 1..20: note = Target: FXN; (-) strand; PAM type: YTN; PAM sequence: CTT
  source 1..20: mol_type = other DNA
tgccccttcttggaagtgct

SEQ ID NO: 26014 - DNA, 20 bp, synthetic construct
  misc_feature 1..20: note = Description of Artificial Sequence: Synthetic oligonucleotide
  misc_feature 1..20: note = Target: FXN; (-) strand; PAM type: YTN; PAM sequence: TTC
  source 1..20: mol_type = other DNA
cctttgccccttcttggaag

SEQ ID NO: 26015 - DNA, 20 bp, synthetic construct
  misc_feature 1..20: note = Description of Artificial Sequence: Synthetic oligonucleotide
  misc_feature 1..20: note = Target: FXN; (-) strand; PAM type: YTN; PAM sequence: TTC
  source 1..20: mol_type = other DNA
atgttccctttgccccttct

SEQ ID NO: 26016 - DNA, 20 bp, synthetic construct
  misc_feature 1..20: note = Description of Artificial Sequence: Synthetic oligonucleotide
  misc_feature 1..20: note = Target: FXN; (-) strand; PAM type: YTN; PAM sequence: CTC
  source 1..20: mol_type = other DNA
agcataaattcatgttccct

SEQ ID NO: 26017 - DNA, 20 bp, synthetic construct
  misc_feature 1..20: note = Description of Artificial Sequence: Synthetic oligonucleotide
  misc_feature 1..20: note = Target: FXN; (-) strand; PAM type: YTN; PAM sequence: CTC
  source 1..20: mol_type = other DNA
tcagcataaattcatgttcc

SEQ ID NO: 26018 - DNA, 20 bp, synthetic construct
  misc_feature 1..20: note = Description of Artificial Sequence: Synthetic oligonucleotide
  misc_feature 1..20: note = Target: FXN; (-) strand; PAM type: YTN; PAM sequence: CTA
  source 1..20: mol_type = other DNA
cgcctctcagcataaattca

SEQ ID NO: 26019 - DNA, 20 bp, synthetic construct
  misc_feature 1..20: note = Description of Artificial Sequence: Synthetic oligonucleotide
  misc_feature 1..20: note = Target: FXN; (-) strand; PAM type: YTN; PAM sequence: TTA
  source 1..20: mol_type = other DNA
gctacgcctctcagcataaa

SEQ ID NO: 26020 - DNA, 20 bp, synthetic construct
  misc_feature 1..20: note = Description of Artificial Sequence: Synthetic oligonucleotide
  misc_feature 1..20: note = Target: FXN; (-) strand; PAM type: YTN; PAM sequence: CTT
  source 1..20: mol_type = other DNA
agctacgcctctcagcataa

SEQ ID NO: 26021 - DNA, 20 bp, synthetic construct
  misc_feature 1..20: note = Description of Artificial Sequence: Synthetic oligonucleotide
  misc_feature 1..20: note = Target: FXN; (-) strand; PAM type: YTN; PAM sequence: TTG
  source 1..20: mol_type = other DNA
aatatgtatgcttagctacg

SEQ ID NO: 26022 - DNA, 20 bp, synthetic construct
  misc_feature 1..20: note = Description of Artificial Sequence: Synthetic oligonucleotide
  misc_feature 1..20: note = Target: FXN; (-) strand; PAM type: YTN; PAM sequence: CTG
  source 1..20: mol_type = other DNA
ttgaatatgtatgcttagct

SEQ ID NO: 26023 - DNA, 20 bp, synthetic construct
  misc_feature 1..20: note = Description of Artificial Sequence: Synthetic oligonucleotide
  misc_feature 1..20: note = Target: FXN; (-) strand; PAM type: YTN; PAM sequence: CTC
  source 1..20: mol_type = other DNA
ccataatctgttgaatatgt

SEQ ID NO: 26024 - DNA, 20 bp, synthetic construct
  misc_feature 1..20: note = Description of Artificial Sequence: Synthetic oligonucleotide
  misc_feature 1..20: note = Target: FXN; (-) strand; PAM type: YTN; PAM sequence: TTC
  source 1..20: mol_type = other DNA
atagatcctcccataatctg

SEQ ID NO: 26025 - DNA, 20 bp, synthetic construct
  misc_feature 1..20: note = Description of Artificial Sequence: Synthetic oligonucleotide
  misc_feature 1..20: note = Target: FXN; (-) strand; PAM type: YTN; PAM sequence: TTG
  source 1..20: mol_type = other DNA
tgaatattcatagatcctcc

SEQ ID NO: 26026 - DNA, 20 bp, synthetic construct
  misc_feature 1..20: note = Description of Artificial Sequence: Synthetic oligonucleotide
  misc_feature 1..20: note = Target: FXN; (-) strand; PAM type: YTN; PAM sequence: TTT
  source 1..20: mol_type = other DNA
gtgaatattcatagatcctc

SEQ ID NO: 26027 - DNA, 20 bp, synthetic construct
  misc_feature 1..20: note = Description of Artificial Sequence: Synthetic oligonucleotide
  misc_feature 1..20: note = Target: FXN; (-) strand; PAM type: YTN; PAM sequence: CTT
  source 1..20: mol_type = other DNA
tgtgaatattcatagatcct

SEQ ID NO: 26028 - DNA, 20 bp, synthetic construct
  misc_feature 1..20: note = Description of Artificial Sequence: Synthetic oligonucleotide
  misc_feature 1..20: note = Target: FXN; (-) strand; PAM type: YTN; PAM sequence: CTC
  source 1..20: mol_type = other DNA
cctttgtgaatattcataga

SEQ ID NO: 26029 - DNA, 20 bp, synthetic construct
  misc_feature 1..20: note = Description of Artificial Sequence: Synthetic oligonucleotide
  misc_feature 1..20: note = Target: FXN; (-) strand; PAM type: YTN; PAM sequence: TTC
  source 1..20: mol_type = other DNA
atagatcctccctttgtgaa

SEQ ID NO: 26030 - DNA, 20 bp, synthetic construct
  misc_feature 1..20: note = Description of Artificial Sequence: Synthetic oligonucleotide
  misc_feature 1..20: note = Target: FXN; (-) strand; PAM type: YTN; PAM sequence: CTC
  source 1..20: mol_type = other DNA
cacatgtgtgcatattcata

SEQ ID NO: 26031 - DNA, 20 bp, synthetic construct
  misc_feature 1..20: note = Description of Artificial Sequence: Synthetic oligonucleotide
  misc_feature 1..20: note = Target: FXN; (-) strand; PAM type: YTN; PAM sequence: TTA
  source 1..20: mol_type = other DNA
ctccacatgtgtgcatattc

SEQ ID NO: 26032 - DNA, 20 bp, synthetic construct
  misc_feature 1..20: note = Description of Artificial Sequence: Synthetic oligonucleotide
  misc_feature 1..20: note = Target: FXN; (-) strand; PAM type: YTN; PAM sequence: CTT
  source 1..20: mol_type = other DNA
actccacatgtgtgcatatt

SEQ ID NO: 26033 - DNA, 20 bp, synthetic construct
  misc_feature 1..20: note = Description of Artificial Sequence: Synthetic oligonucleotide
  misc_feature 1..20: note = Target: FXN; (-) strand; PAM type: YTN; PAM sequence: TTA
  source 1..20: mol_type = other DNA
gcttactccacatgtgtgca

SEQ ID NO: 26034 - DNA, 20 bp, synthetic construct
  misc_feature 1..20: note = Description of Artificial Sequence: Synthetic oligonucleotide
  misc_feature 1..20: note = Target: FXN; (-) strand; PAM type: YTN; PAM sequence: CTG
  source 1..20: mol_type = other DNA
cacacgttagcttactccac

SEQ ID NO: 26035 - DNA, 20 bp, synthetic construct
  misc_feature 1..20: note = Description of Artificial Sequence: Synthetic oligonucleotide
  misc_feature 1..20: note = Target: FXN; (-) strand; PAM type: YTN; PAM sequence: CTA
  source 1..20: mol_type = other DNA
aggtgaacatgggagacatg

SEQ ID NO: 26036 - DNA, 20 bp, synthetic construct
  misc_feature 1..20: note = Description of Artificial Sequence: Synthetic oligonucleotide
  misc_feature 1..20: note = Target: FXN; (-) strand; PAM type: YTN; PAM sequence: CTG
  source 1..20: mol_type = other DNA
cctaaggtgaacatgggaga

SEQ ID NO: 26037 - DNA, 20 bp, synthetic construct
  misc_feature 1..20: note = Description of Artificial Sequence: Synthetic oligonucleotide
  misc_feature 1..20: note = Target: FXN; (-) strand; PAM type: YTN; PAM sequence: TTC
  source 1..20: mol_type = other DNA
tgcctaaggtgaacatggga

SEQ ID NO: 26038 - DNA, 20 bp, synthetic construct
  misc_feature 1..20: note = Description of Artificial Sequence: Synthetic oligonucleotide
  misc_feature 1..20: note = Target: FXN; (-) strand; PAM type: YTN; PAM sequence: TTT
  source 1..20: mol_type = other DNA
ctgcctaaggtgaacatggg

SEQ ID NO: 26039 - DNA, 20 bp, synthetic construct
  misc_feature 1..20: note = Description of Artificial Sequence: Synthetic oligonucleotide
  misc_feature 1..20: note = Target: FXN; (-) strand; PAM type: YTN; PAM sequence: TTA
  source 1..20: mol_type = other DNA
agtttctgcctaaggtgaac

SEQ ID NO: 26040 - DNA, 20 bp, synthetic construct
  misc_feature 1..20: note = Description of Artificial Sequence: Synthetic oligonucleotide
  misc_feature 1..20: note = Target: FXN; (-) strand; PAM type: YTN; PAM sequence: TTA
  source 1..20: mol_type = other DNA
gtgttaagtttctgcctaag

SEQ ID NO: 26041 - DNA, 20 bp, synthetic construct
  misc_feature 1..20: note = Description of Artificial Sequence: Synthetic oligonucleotide
  misc_feature 1..20: note = Target: FXN; (-) strand; PAM type: YTN; PAM sequence: CTG
  source 1..20: mol_type = other DNA
taatacatgttagtgttaag

SEQ ID NO: 26042 - DNA, 20 bp, synthetic construct
  misc_feature 1..20: note = Description of Artificial Sequence: Synthetic oligonucleotide
  misc_feature 1..20: note = Target: FXN; (-) strand; PAM type: YTN; PAM sequence: TTG
  source 1..20: mol_type = other DNA
ccctgtaatacatgttagtg

SEQ ID NO: 26043 - DNA, 20 bp, synthetic construct
  misc_feature 1..20: note = Description of Artificial Sequence: Synthetic oligonucleotide
  misc_feature 1..20: note = Target: FXN; (-) strand; PAM type: YTN; PAM sequence: TTG
  source 1..20: mol_type = other DNA
ttgccctgtaatacatgtta

SEQ ID NO: 26044 - DNA, 20 bp, synthetic construct
  misc_feature 1..20: note = Description of Artificial Sequence: Synthetic oligonucleotide
  misc_feature 1..20: note = Target: FXN; (-) strand; PAM type: YTN; PAM sequence: TTT
  source 1..20: mol_type = other DNA
gttgccctgtaatacatgtt

SEQ ID NO: 26045 - DNA, 20 bp, synthetic construct
  misc_feature 1..20: note = Description of Artificial Sequence: Synthetic oligonucleotide
  misc_feature 1..20: note = Target: FXN; (-) strand; PAM type: YTN; PAM sequence: TTT
  source 1..20: mol_type = other DNA
tgttgccctgtaatacatgt

SEQ ID NO: 26046 - DNA, 20 bp, synthetic construct
  misc_feature 1..20: note = Description of Artificial Sequence: Synthetic oligonucleotide
  misc_feature 1..20: note = Target: FXN; (-) strand; PAM type: YTN; PAM sequence: CTC
  source 1..20: mol_type = other DNA
attttgttgccctgtaatac

SEQ ID NO: 26047 - DNA, 20 bp, synthetic construct
  misc_feature 1..20: note = Description of Artificial Sequence: Synthetic oligonucleotide
  misc_feature 1..20: note = Target: FXN; (-) strand; PAM type: YTN; PAM sequence: TTA
  source 1..20: mol_type = other DNA
tgtagatatgcagtctcatt

SEQ ID NO: 26048 - DNA, 20 bp, synthetic construct
  misc_feature 1..20: note = Description of Artificial Sequence: Synthetic oligonucleotide
  misc_feature 1..20: note = Target: FXN; (-) strand; PAM type: YTN; PAM sequence: CTA
  source 1..20: mol_type = other DNA
ggttatgtagatatgcagtc

SEQ ID NO: 26049 - DNA, 20 bp, synthetic construct
  misc_feature 1..20: note = Description of Artificial Sequence: Synthetic oligonucleotide
  misc_feature 1..20: note = Target: FXN; (-) strand; PAM type: YTN; PAM sequence: CTA
  source 1..20: mol_type = other DNA
ccaaatagctaggttatgta

SEQ ID NO: 26050 - DNA, 20 bp, synthetic construct
  misc_feature 1..20: note = Description of Artificial Sequence: Synthetic oligonucleotide
  misc_feature 1..20: note = Target: FXN; (-) strand; PAM type: YTN; PAM sequence: TTC
  source 1..20: mol_type = other DNA
agcctaccaaatagctaggt

SEQ ID NO: 26051 - DNA, 20 bp, synthetic construct
  misc_feature 1..20: note = Description of Artificial Sequence: Synthetic oligonucleotide
  misc_feature 1..20: note = Target: FXN; (-) strand; PAM type: YTN; PAM sequence: CTT
  source 1..20: mol_type = other DNA
cagcctaccaaatagctagg

SEQ ID NO: 26052 - DNA, 20 bp, synthetic construct
  misc_feature 1..20: note = Description of Artificial Sequence: Synthetic oligonucleotide
  misc_feature 1..20: note = Target: FXN; (-) strand; PAM type: YTN; PAM sequence: CTG
  source 1..20: mol_type = other DNA
cttcagcctaccaaatagct

SEQ ID NO: 26053 - DNA, 20 bp, synthetic construct
  misc_feature 1..20: note = Description of Artificial Sequence: Synthetic oligonucleotide
  misc_feature 1..20: note = Target: FXN; (-) strand; PAM type: YTN; PAM sequence: CTC
  source 1..20: mol_type = other DNA
ctgcttcagcctaccaaata

SEQ ID NO: 26054 - DNA, 20 bp, synthetic construct
  misc_feature 1..20: note = Description of Artificial Sequence: Synthetic oligonucleotide
  misc_feature 1..20: note = Target: FXN; (-) strand; PAM type: YTN; PAM sequence: TTA
  source 1..20: mol_type = other DNA
agtgatgctcctgcttcagc

SEQ ID NO: 26055 - DNA, 20 bp, synthetic construct
  misc_feature 1..20: note = Description of Artificial Sequence: Synthetic oligonucleotide
  misc_feature 1..20: note = Target: FXN; (-) strand; PAM type: YTN; PAM sequence: CTT
  source 1..20: mol_type = other DNA
aagtgatgctcctgcttcag

SEQ ID NO: 26056 - DNA, 20 bp, synthetic construct
  misc_feature 1..20: note = Description of Artificial Sequence: Synthetic oligonucleotide
  misc_feature 1..20: note = Target: FXN; (-) strand; PAM type: YTN; PAM sequence: CTC
  source 1..20: mol_type = other DNA
ccagtcttaagtgatgctcc

SEQ ID NO: 26057 - DNA, 20 bp, synthetic construct
  misc_feature 1..20: note = Description of Artificial Sequence: Synthetic oligonucleotide
  misc_feature 1..20: note = Target: FXN; (-) strand; PAM type: YTN; PAM sequence: CTC
  source 1..20: mol_type = other DNA
gaactcccagtcttaagtga

SEQ ID NO: 26058 - DNA, 20 bp, synthetic construct
  misc_feature 1..20: note = Description of Artificial Sequence: Synthetic oligonucleotide
  misc_feature 1..20: note = Target: FXN; (-) strand; PAM type: YTN; PAM sequence: CTG
  source 1..20: mol_type = other DNA
cctcgaactcccagtcttaa

SEQ ID NO: 26059 - DNA, 20 bp, synthetic construct
  misc_feature 1..20: note = Description of Artificial Sequence: Synthetic oligonucleotide
  misc_feature 1..20: note = Target: FXN; (-) strand; PAM type: YTN; PAM sequence: CTC
  source 1..20: mol_type = other DNA
acagctgcctcgaactccca

SEQ ID NO: 26060 - DNA, 20 bp, synthetic construct
  misc_feature 1..20: note = Description of Artificial Sequence: Synthetic oligonucleotide
  misc_feature 1..20: note = Target: FXN; (-) strand; PAM type: YTN; PAM sequence: CTG
  source 1..20: mol_type = other DNA
gagaacagtggtgcgatcat

SEQ ID NO: 26061 - DNA, 20 bp, synthetic construct
  misc_feature 1..20: note = Description of Artificial Sequence: Synthetic oligonucleotide
  misc_feature 1..20: note = Target: FXN; (-) strand; PAM type: YTN; PAM sequence: CTG
  source 1..20: mol_type = other DNA
gctggagaacagtggtgcga

SEQ ID NO: 26062 - DNA, 20 bp, synthetic construct
  misc_feature 1..20: note = Description of Artificial Sequence: Synthetic oligonucleotide
  misc_feature 1..20: note = Target: FXN; (-) strand; PAM type: YTN; PAM sequence: CTG
  source 1..20: mol_type = other DNA
tcatcctggctggagaacag

SEQ ID NO: 26063 - DNA, 20 bp, synthetic construct
  misc_feature 1..20: note = Description of Artificial Sequence: Synthetic oligonucleotide
  misc_feature 1..20: note = Target: FXN; (-) strand; PAM type: YTN; PAM sequence: TTG
  source 1..20: mol_type = other DNA
ccctgtcatcctggctggag

SEQ ID NO: 26064 - DNA, 20 bp, synthetic construct
  misc_feature 1..20: note = Description of Artificial Sequence: Synthetic oligonucleotide
  misc_feature 1..20: note = Target: FXN; (-) strand; PAM type: YTN; PAM sequence: CTT
  source 1..20: mol_type = other DNA
gccctgtcatcctggctgga

SEQ ID NO: 26065 - DNA, 20 bp, synthetic construct
  misc_feature 1..20: note = Description of Artificial Sequence: Synthetic oligonucleotide
  misc_feature 1..20: note = Target: FXN; (-) strand; PAM type: YTN; PAM sequence: CTA
  source 1..20: mol_type = other DNA
agacagggtcttgccctgtc

SEQ ID NO: 26066 - DNA, 20 bp, synthetic construct
  misc_feature 1..20: note = Description of Artificial Sequence: Synthetic oligonucleotide
  misc_feature 1..20: note = Target: FXN; (-) strand; PAM type: YTN; PAM sequence: CTG
  source 1..20: mol_type = other DNA
accacagagtggtctaagac

SEQ ID NO: 26067 - DNA, 20 bp, synthetic construct
  misc_feature 1..20: note = Description of Artificial Sequence: Synthetic oligonucleotide
  misc_feature 1..20: note = Target: FXN; (-) strand; PAM type: YTN; PAM sequence: CTG
  source 1..20: mol_type = other DNA
ataaccactgaccacagagt

SEQ ID NO: 26068 - DNA, 20 bp, synthetic construct
  misc_feature 1..20: note = Description of Artificial Sequence: Synthetic oligonucleotide
  misc_feature 1..20: note = Target: FXN; (-) strand; PAM type: YTN; PAM sequence: TTC
  source 1..20: mol_type = other DNA
ctgataaccactgaccacag

SEQ ID NO: 26069 - DNA, 20 bp, synthetic construct
  misc_feature 1..20: note = Description of Artificial Sequence: Synthetic oligonucleotide
  misc_feature 1..20: note = Target: FXN; (-) strand; PAM type: YTN; PAM sequence: CTT
  source 1..20: mol_type = other DNA
cctgataaccactgaccaca

SEQ ID NO: 26070 - DNA, 20 bp, synthetic construct
  misc_feature 1..20: note = Description of Artificial Sequence: Synthetic oligonucleotide
  misc_feature 1..20: note = Target: FXN; (-) strand; PAM type: YTN; PAM sequence: TTC
  source 1..20: mol_type = other DNA
cttcctgataaccactgacc

SEQ ID NO: 26071 - DNA, 20 bp, synthetic construct
  misc_feature 1..20: note = Description of Artificial Sequence: Synthetic oligonucleotide
  misc_feature 1..20: note = Target: FXN; (-) strand; PAM type: YTN; PAM sequence: CTA
  source 1..20: mol_type = other DNA
gcattccttcctgataacca

SEQ ID NO: 26072 - DNA, 20 bp, synthetic construct
  misc_feature 1..20: note = Description of Artificial Sequence: Synthetic oligonucleotide
  misc_feature 1..20: note = Target: FXN; (-) strand; PAM type: YTN; PAM sequence: CTG
  source 1..20: mol_type = other DNA
actagcattccttcctgata

SEQ ID NO: 26073 - DNA, 20 bp, synthetic construct
  misc_feature 1..20: note = Description of Artificial Sequence: Synthetic oligonucleotide
  misc_feature 1..20: note = Target: FXN; (-) strand; PAM type: YTN; PAM sequence: TTC
  source 1..20: mol_type = other DNA
agcacaactgactagcattc

SEQ ID NO: 26074 - DNA, 20 bp, synthetic construct
  misc_feature 1..20: note = Description of Artificial Sequence: Synthetic oligonucleotide
  misc_feature 1..20: note = Target: FXN; (-) strand; PAM type: YTN; PAM sequence: TTT
  source 1..20: mol_type = other DNA
cagcacaactgactagcatt

SEQ ID NO: 26075 - DNA, 20 bp, synthetic construct
  misc_feature 1..20: note = Description of Artificial Sequence: Synthetic oligonucleotide
  misc_feature 1..20: note = Target: FXN; (-) strand; PAM type: YTN; PAM sequence: TTA
  source 1..20: mol_type = other DNA
gtggtttcagcacaactgac

SEQ ID NO: 26076 - DNA, 20 bp, synthetic construct
  misc_feature 1..20: note = Description of Artificial Sequence: Synthetic oligonucleotide
  misc_feature 1..20: note = Target: FXN; (-) strand; PAM type: YTN; PAM sequence: TTT
  source 1..20: mol_type = other DNA
agtggtttcagcacaactga

SEQ ID NO: 26077 - DNA, 20 bp, synthetic construct
  misc_feature 1..20: note = Description of Artificial Sequence: Synthetic oligonucleotide
  misc_feature 1..20: note = Target: FXN; (-) strand; PAM type: YTN; PAM sequence: TTT
  source 1..20: mol_type = other DNA
tagtggtttcagcacaactg

SEQ ID NO: 26078 - DNA, 20 bp, synthetic construct
  misc_feature 1..20: note = Description of Artificial Sequence: Synthetic oligonucleotide
  misc_feature 1..20: note = Target: FXN; (-) strand; PAM type: YTN; PAM sequence: TTT
  source 1..20: mol_type = other DNA
ttagtggtttcagcacaact

SEQ ID NO: 26079 - DNA, 20 bp, synthetic construct
  misc_feature 1..20: note = Description of Artificial Sequence: Synthetic oligonucleotide
  misc_feature 1..20: note = Target: FXN; (-) strand; PAM type: YTN; PAM sequence: CTT
  source 1..20: mol_type = other DNA
tttagtggtttcagcacaac

SEQ ID NO: 26080 - DNA, 20 bp, synthetic construct
  misc_feature 1..20: note = Description of Artificial Sequence: Synthetic oligonucleotide
  misc_feature 1..20: note = Target: FXN; (-) strand; PAM type: YTN; PAM sequence: TTC
  source 1..20: mol_type = other DNA
ctttttagtggtttcagcac

SEQ ID NO: 26081 - DNA, 20 bp, synthetic construct
  misc_feature 1..20: note = Description of Artificial Sequence: Synthetic oligonucleotide
  misc_feature 1..20: note = Target: FXN; (-) strand; PAM type: YTN; PAM sequence: CTT
  source 1..20: mol_type = other DNA
cctttttagtggtttcagca

SEQ ID NO: 26082 - DNA, 20 bp, synthetic construct
  misc_feature 1..20: note = Description of Artificial Sequence: Synthetic oligonucleotide
  misc_feature 1..20: note = Target: FXN; (-) strand; PAM type: YTN; PAM sequence: CTG
  source 1..20: mol_type = other DNA
cccttcctttttagtggttt

SEQ ID NO: 26083 - DNA, 20 bp, synthetic construct
  misc_feature 1..20: note = Description of Artificial Sequence: Synthetic oligonucleotide
  misc_feature 1..20: note = Target: FXN; (-) strand; PAM type: YTN; PAM sequence: TTC
  source 1..20: mol_type = other DNA
tgcccttcctttttagtggt

SEQ ID NO: 26084 - DNA, 20 bp, synthetic construct
  misc_feature 1..20: note = Description of Artificial Sequence: Synthetic oligonucleotide
  misc_feature 1..20: note = Target: FXN; (-) strand; PAM type: YTN; PAM sequence: CTA
  source 1..20: mol_type = other DNA
attctgcccttcctttttag

SEQ ID NO: 26085 - DNA, 20 bp, synthetic construct
  misc_feature 1..20: note = Description of Artificial Sequence: Synthetic oligonucleotide
  misc_feature 1..20: note = Target: FXN; (-) strand; PAM type: YTN; PAM sequence: CTC
  source 1..20: mol_type = other DNA
atcacctaattctgcccttc

SEQ ID NO: 26086 - DNA, 20 bp, synthetic construct
  misc_feature 1..20: note = Description of Artificial Sequence: Synthetic oligonucleotide
  misc_feature 1..20: note = Target: FXN; (-) strand; PAM type: YTN; PAM sequence: CTG
  source 1..20: mol_type = other DNA
gtatcaactcatcacctaat

SEQ ID NO: 26087 - DNA, 20 bp, synthetic construct
  misc_feature 1..20: note = Description of Artificial Sequence: Synthetic oligonucleotide
  misc_feature 1..20: note = Target: FXN; (-) strand; PAM type: YTN; PAM sequence: TTC
  source 1..20: mol_type = other DNA
accactggtatcaactcatc

SEQ ID NO: 26088 - DNA, 20 bp, synthetic construct
  misc_feature 1..20: note = Description of Artificial Sequence: Synthetic oligonucleotide
  misc_feature 1..20: note = Target: FXN; (-) strand; PAM type: YTN; PAM sequence: CTT
  source 1..20: mol_type = other DNA
caccactggtatcaactcat

SEQ ID NO: 26089 - DNA, 20 bp, synthetic construct
  misc_feature 1..20: note = Description of Artificial Sequence: Synthetic oligonucleotide
  misc_feature 1..20: note = Target: FXN; (-) strand; PAM type: YTN; PAM sequence: CTC
  source 1..20: mol_type = other DNA
acttcaccactggtatcaac

SEQ ID NO: 26090 - DNA, 20 bp, synthetic construct
  misc_feature 1..20: note = Description of Artificial Sequence: Synthetic oligonucleotide
  misc_feature 1..20: note = Target: FXN; (-) strand; PAM type: YTN; PAM sequence: CTC
  source 1..20: mol_type = other DNA
aaaaagaaaaaaaaaaaaaa

SEQ ID NO: 26091 - DNA, 20 bp, synthetic construct
  misc_feature 1..20: note = Description of Artificial Sequence: Synthetic oligonucleotide
  misc_feature 1..20: note = Target: FXN; (-) strand; PAM type: YTN; PAM sequence: CTC
  source 1..20: mol_type = other DNA
catctcaaaaagaaaaaaaa

SEQ ID NO: 26092 - DNA, 20 bp, synthetic construct
  misc_feature 1..20: note = Description of Artificial Sequence: Synthetic oligonucleotide
  misc_feature 1..20: note = Target: FXN; (-) strand; PAM type: YTN; PAM sequence: CTG
  source 1..20: mol_type = other DNA
ggcaacagagcaagactcca

SEQ ID NO: 26093 - DNA, 20 bp, synthetic construct
  misc_feature 1..20: note = Description of Artificial Sequence: Synthetic oligonucleotide
  misc_feature 1..20: note = Target: FXN; (-) strand; PAM type: YTN; PAM sequence: CTC
  source 1..20: mol_type = other DNA
cagcctgggcaacagagcaa

SEQ ID NO: 26094 - DNA, 20 bp, synthetic construct
  misc_feature 1..20: note = Description of Artificial Sequence: Synthetic oligonucleotide
  misc_feature 1..20: note = Target: FXN; (-) strand; PAM type: YTN; PAM sequence: CTA
  source 1..20: mol_type = other DNA
cactccagcctgggcaacag

SEQ ID NO: 26095 - DNA, 20 bp, synthetic construct
  misc_feature 1..20: note = Description of Artificial Sequence: Synthetic oligonucleotide
  misc_feature 1..20: note = Target: FXN; (-) strand; PAM type: YTN; PAM sequence: CTG
  source 1..20: mol_type = other DNA
agatcacaccactacactcc

SEQ ID NO: 26096 - DNA, 20 bp, synthetic construct
  misc_feature 1..20: note = Description of Artificial Sequence: Synthetic oligonucleotide
  misc_feature 1..20: note = Target: FXN; (-) strand; PAM type: YTN; PAM sequence: TTG
  source 1..20: mol_type = other DNA
cgatgagctgagatcacacc

SEQ ID NO: 26097 - DNA, 20 bp, synthetic construct
  misc_feature 1..20: note = Description of Artificial Sequence: Synthetic oligonucleotide
  misc_feature 1..20: note = Target: FXN; (-) strand; PAM type: YTN; PAM sequence: TTG
  source 1..20: mol_type = other DNA
aacccaggaggtggaggttg

SEQ ID NO: 26098 - DNA, 20 bp, synthetic construct
  misc_feature 1..20: note = Description of Artificial Sequence: Synthetic oligonucleotide
  misc_feature 1..20: note = Target: FXN; (-) strand; PAM type: YTN; PAM sequence: CTT
  source 1..20: mol_type = other DNA
gaacccaggaggtggaggtt

SEQ ID NO: 26099 - DNA, 20 bp, synthetic construct
  misc_feature 1..20: note = Description of Artificial Sequence: Synthetic oligonucleotide
  misc_feature 1..20: note = Target: FXN; (-) strand; PAM type: YTN; PAM sequence: CTG
  source 1..20: mol_type = other DNA
aggcaagagaatcacttgaa

SEQ ID NO: 26100 - DNA, 20 bp, synthetic construct
  misc_feature 1..20: note = Description of Artificial Sequence: Synthetic oligonucleotide
  misc_feature 1..20: note = Target: FXN; (-) strand; PAM type: YTN; PAM sequence: CTC
  source 1..20: mol_type = other DNA
gggaggctgaggcaagagaa

SEQ ID NO: 26101 - DNA, 20 bp, synthetic construct
  misc_feature 1..20: note = Description of Artificial Sequence: Synthetic oligonucleotide
  misc_feature 1..20: note = Target: FXN; (-) strand; PAM type: YTN; PAM sequence: CTA
  source 1..20: mol_type = other DNA
ctcgggaggctgaggcaaga

SEQ ID NO: 26102 - DNA, 20 bp, synthetic construct
  misc_feature 1..20: note = Description of Artificial Sequence: Synthetic oligonucleotide
  misc_feature 1..20: note = Target: FXN; (-) strand; PAM type: YTN; PAM sequence: CTG
  source 1..20: mol_type = other DNA
taatcccagctactcgggag

SEQ ID NO: 26103 - DNA, 20 bp, synthetic construct
  misc_feature 1..20: note = Description of Artificial Sequence: Synthetic oligonucleotide
  misc_feature 1..20: note = Target: FXN; (-) strand; PAM type: YTN; PAM sequence: TTA
  source 1..20: mol_type = other DNA
gccaggcgtggtggcaggcg

SEQ ID NO: 26104 - DNA, 20 bp, synthetic construct
  misc_feature 1..20: note = Description of Artificial Sequence: Synthetic oligonucleotide
  misc_feature 1..20: note = Target: FXN; (-) strand; PAM type: YTN; PAM sequence: CTA
  source 1..20: mol_type = other DNA
aaaatataaaaaaattagcc

SEQ ID NO: 26105 - DNA, 20 bp, synthetic construct
  misc_feature 1..20: note = Description of Artificial Sequence: Synthetic oligonucleotide
  misc_feature 1..20: note = Target: FXN; (-) strand; PAM type: YTN; PAM sequence: CTA
  source 1..20: mol_type = other DNA
ctaaaaatataaaaaaatta

SEQ ID NO: 26106 - DNA, 20 bp, synthetic construct
  misc_feature 1..20: note = Description of Artificial Sequence: Synthetic oligonucleotide
  misc_feature 1..20: note = Target: FXN; (-) strand; PAM type: YTN; PAM sequence: CTC
  source 1..20: mol_type = other DNA
tactaaaaatataaaaaaat

SEQ ID NO: 26107 - DNA, 20 bp, synthetic construct
  misc_feature 1..20: note = Description of Artificial Sequence: Synthetic oligonucleotide
  misc_feature 1..20: note = Target: FXN; (-) strand; PAM type: YTN; PAM sequence: CTG
  source 1..20: mol_type = other DNA
acaacatggcaaaacccagt

SEQ ID NO: 26108 - DNA, 20 bp, synthetic construct
  misc_feature 1..20: note = Description of Artificial Sequence: Synthetic oligonucleotide
  misc_feature 1..20: note = Target: FXN; (-) strand; PAM type: YTN; PAM sequence: CTA
  source 1..20: mol_type = other DNA
gcctgacaacatggcaaaac

SEQ ID NO: 26109 - DNA, 20 bp, synthetic construct
  misc_feature 1..20: note = Description of Artificial Sequence: Synthetic oligonucleotide
  misc_feature 1..20: note = Target: FXN; (-) strand; PAM type: YTN; PAM sequence: TTC
  source 1..20: mol_type = other DNA
aagactagcctgacaacatg

SEQ ID NO: 26110 - DNA, 20 bp, synthetic construct
  misc_feature 1..20: note = Description of Artificial Sequence: Synthetic oligonucleotide
  misc_feature 1..20: note = Target: FXN; (-) strand; PAM type: YTN; PAM sequence: CTG
  source 1..20: mol_type = other DNA
aggtcaggagttcaagacta

SEQ ID NO: 26111 - DNA, 20 bp, synthetic construct
  misc_feature 1..20: note = Description of Artificial Sequence: Synthetic oligonucleotide
  misc_feature 1..20: note = Target: FXN; (-) strand; PAM type: YTN; PAM sequence: TTA
  source 1..20: mol_type = other DNA
cctgaggtcaggagttcaag

SEQ ID NO: 26112 - DNA, 20 bp, synthetic construct
  misc_feature 1..20: note = Description of Artificial Sequence: Synthetic oligonucleotide
  misc_feature 1..20: note = Target: FXN; (-) strand; PAM type: YTN; PAM sequence: TTG
  source 1..20: mol_type = other DNA
gattacctgaggtcaggagt

SEQ ID NO: 26113 - DNA, 20 bp, synthetic construct
  misc_feature 1..20: note = Description of Artificial Sequence: Synthetic oligonucleotide
  misc_feature 1..20: note = Target: FXN; (-) strand; PAM type: YTN; PAM sequence: TTG
  source 1..20: mol_type = other DNA
ggaggccaaagcagttggat

SEQ ID NO: 26114 - DNA, 20 bp, synthetic construct
  misc_feature 1..20: note = Description of Artificial Sequence: Synthetic oligonucleotide
  misc_feature 1..20: note = Target: FXN; (-) strand; PAM type: YTN; PAM sequence: TTT
  source 1..20: mol_type = other DNA
gggaggccaaagcagttgga

SEQ ID NO: 26115 - DNA, 20 bp, synthetic construct
  misc_feature 1..20: note = Description of Artificial Sequence: Synthetic oligonucleotide
  misc_feature 1..20: note = Target: FXN; (-) strand; PAM type: YTN; PAM sequence: CTT
  source 1..20: mol_type = other DNA
tgggaggccaaagcagttgg

SEQ ID NO: 26116 - DNA, 20 bp, synthetic construct
  misc_feature 1..20: note = Description of Artificial Sequence: Synthetic oligonucleotide
  misc_feature 1..20: note = Target: FXN; (-) strand; PAM type: YTN; PAM sequence: CTG
  source 1..20: mol_type = other DNA
taatcccagcactttgggag

SEQ ID NO: 26117 - DNA, 20 bp, synthetic construct
  misc_feature 1..20: note = Description of Artificial Sequence: Synthetic oligonucleotide
  misc_feature 1..20: note = Target: FXN; (-) strand; PAM type: YTN; PAM sequence: CTG
  source 1..20: mol_type = other DNA
cctgtaatcccagcactttg

SEQ ID NO: 26118 - DNA, 20 bp, synthetic construct
  misc_feature 1..20: note = Description of Artificial Sequence: Synthetic oligonucleotide
  misc_feature 1..20: note = Target: FXN; (-) strand; PAM type: YTN; PAM sequence: TTG
  source 1..20: mol_type = other DNA
gagctgcctgtaatcccagc

SEQ ID NO: 26119 - DNA, 20 bp, synthetic construct
  misc_feature 1..20: note = Description of Artificial Sequence: Synthetic oligonucleotide
  misc_feature 1..20: note = Target: FXN; (-) strand; PAM type: YTN; PAM sequence: TTT
  source 1..20: mol_type = other DNA
ggagctgcctgtaatcccag

SEQ ID NO: 26120 - DNA, 20 bp, synthetic construct
  misc_feature 1..20: note = Description of Artificial Sequence: Synthetic oligonucleotide
  misc_feature 1..20: note = Target: FXN; (-) strand; PAM type: YTN; PAM sequence: CTT
  source 1..20: mol_type = other DNA
tggagctgcctgtaatccca

SEQ ID NO: 26121 - DNA, 20 bp, synthetic construct
  misc_feature 1..20: note = Description of Artificial Sequence: Synthetic oligonucleotide
  misc_feature 1..20: note = Target: FXN; (-) strand; PAM type: YTN; PAM sequence: CTG
  source 1..20: mol_type = other DNA
taatcccagcactttggagc

SEQ ID NO: 26122 - DNA, 20 bp, synthetic construct
  misc_feature 1..20: note = Description of Artificial Sequence: Synthetic oligonucleotide
  misc_feature 1..20: note = Target: FXN; (-) strand; PAM type: YTN; PAM sequence: CTC
  source 1..20: mol_type = other DNA
atgcctgtaatcccagcact

SEQ ID NO: 26123 - DNA, 20 bp, synthetic construct
  misc_feature 1..20: note = Description of Artificial Sequence: Synthetic oligonucleotide
  misc_feature 1..20: note = Target: FXN; (-) strand; PAM type: YTN; PAM sequence: TTC
  source 1..20: mol_type = other DNA
aggccatgcatggtggctca

SEQ ID NO: 26124 - DNA, 20 bp, synthetic construct
  misc_feature 1..20: note = Description of Artificial Sequence: Synthetic oligonucleotide
  misc_feature 1..20: note = Target: FXN; (-) strand; PAM type: YTN; PAM sequence: TTT
  source 1..20: mol_type = other DNA
caggccatgcatggtggctc

SEQ ID NO: 26125 - DNA, 20 bp, synthetic construct
  misc_feature 1..20: note = Description of Artificial Sequence: Synthetic oligonucleotide
  misc_feature 1..20: note = Target: FXN; (-) strand; PAM type: YTN; PAM sequence: TTA
  source 1..20: mol_type = other DNA
tttcaggccatgcatggtgg

SEQ ID NO: 26126 - DNA, 20 bp, synthetic construct
  misc_feature 1..20: note = Description of Artificial Sequence: Synthetic oligonucleotide
  misc_feature 1..20: note = Target: FXN; (-) strand; PAM type: YTN; PAM sequence: TTC
  source 1..20: mol_type = other DNA
aaaaaaattatttcaggcca

SEQ ID NO: 26127 - DNA, 20 bp, synthetic construct
  misc_feature 1..20: note = Description of Artificial Sequence: Synthetic oligonucleotide
  misc_feature 1..20: note = Target: FXN; (-) strand; PAM type: YTN; PAM sequence: TTT
  source 1..20: mol_type = other DNA
caaaaaaattatttcaggcc

SEQ ID NO: 26128 - DNA, 20 bp, synthetic construct
  misc_feature 1..20: note = Description of Artificial Sequence: Synthetic oligonucleotide
  misc_feature 1..20: note = Target: FXN; (-) strand; PAM type: YTN; PAM sequence: CTT
  source 1..20: mol_type = other DNA
tcaaaaaaattatttcaggc

SEQ ID NO: 26129 - DNA, 20 bp, synthetic construct
  misc_feature 1..20: note = Description of Artificial Sequence: Synthetic oligonucleotide
  misc_feature 1..20: note = Target: FXN; (-) strand; PAM type: YTN; PAM sequence: CTA
  source 1..20: mol_type = other DNA
gccctttcaaaaaaattatt

SEQ ID NO: 26130 - DNA, 20 bp, synthetic construct
  misc_feature 1..20: note = Description of Artificial Sequence: Synthetic oligonucleotide
  misc_feature 1..20: note = Target: FXN; (-) strand; PAM type: YTN; PAM sequence: CTA
  source 1..20: mol_type = other DNA
aatagaaactagccctttca

SEQ ID NO: 26131 - DNA, 20 bp, synthetic construct
  misc_feature 1..20: note = Description of Artificial Sequence: Synthetic oligonucleotide
  misc_feature 1..20: note = Target: FXN; (-) strand; PAM type: YTN; PAM sequence: CTA
  source 1..20: mol_type = other DNA
agggctaaatagaaactagc

SEQ ID NO: 26132 - DNA, 20 bp, synthetic construct
  misc_feature 1..20: note = Description of Artificial Sequence: Synthetic oligonucleotide
  misc_feature 1..20: note = Target: FXN; (-) strand; PAM type: YTN; PAM sequence: TTC
  source 1..20: mol_type = other DNA
ccctaagggctaaatagaaa

SEQ ID NO: 26133 - DNA, 20 bp, synthetic construct
  misc_feature 1..20: note = Description of Artificial Sequence: Synthetic oligonucleotide
  misc_feature 1..20: note = Target: FXN; (-) strand; PAM type: YTN; PAM sequence: TTT
  source 1..20: mol_type = other DNA
cccctaagggctaaatagaa

SEQ ID NO: 26134 - DNA, 20 bp, synthetic construct
  misc_feature 1..20: note = Description of Artificial Sequence: Synthetic oligonucleotide
  misc_feature 1..20: note = Target: FXN; (-) strand; PAM type: YTN; PAM sequence: TTT
  source 1..20: mol_type = other DNA
tcccctaagggctaaataga

SEQ ID NO: 26135 - DNA, 20 bp, synthetic construct
  misc_feature 1..20: note = Description of Artificial Sequence: Synthetic oligonucleotide
  misc_feature 1..20: note = Target: FXN; (-) strand; PAM type: YTN; PAM sequence: TTT
  source 1..20: mol_type = other DNA
ttcccctaagggctaaatag

SEQ ID NO: 26136 - DNA, 20 bp, synthetic construct
  misc_feature 1..20: note = Description of Artificial Sequence: Synthetic oligonucleotide
  misc_feature 1..20: note = Target: FXN; (-) strand; PAM type: YTN; PAM sequence: TTT
  source 1..20: mol_type = other DNA
tttcccctaagggctaaata

SEQ ID NO: 26137 - DNA, 20 bp, synthetic construct
  misc_feature 1..20: note = Description of Artificial Sequence: Synthetic oligonucleotide
  misc_feature 1..20: note = Target: FXN; (-) strand; PAM type: YTN; PAM sequence: TTT
  source 1..20: mol_type = other DNA
ttttcccctaagggctaaat

SEQ ID NO: 26138 - DNA, 20 bp, synthetic construct
  misc_feature 1..20: note = Description of Artificial Sequence: Synthetic oligonucleotide
  misc_feature 1..20: note = Target: FXN; (-) strand; PAM type: YTN; PAM sequence: TTT
  source 1..20: mol_type = other DNA
tttttcccctaagggctaaa

SEQ ID NO: 26139 - DNA, 20 bp, synthetic construct
  misc_feature 1..20: note = Description of Artificial Sequence: Synthetic oligonucleotide
  misc_feature 1..20: note = Target: FXN; (-) strand; PAM type: YTN; PAM sequence: TTA
  source 1..20: mol_type = other DNA
gttttttttcccctaagggc

SEQ ID NO: 26140 - DNA, 20 bp, synthetic construct
  misc_feature 1..20: note = Description of Artificial Sequence: Synthetic oligonucleotide
  misc_feature 1..20: note = Target: FXN; (-) strand; PAM type: YTN; PAM sequence: CTG
  source 1..20: mol_type = other DNA
ccattagttttttttcccct

SEQ ID NO: 26141 - DNA, 20 bp, synthetic construct
  misc_feature 1..20: note = Description of Artificial Sequence: Synthetic oligonucleotide
  misc_feature 1..20: note = Target: FXN; (-) strand; PAM type: YTN; PAM sequence: CTA
  source 1..20: mol_type = other DNA
actgccattagttttttttc

SEQ ID NO: 26142 - DNA, 20 bp, synthetic construct
  misc_feature 1..20: note = Description of Artificial Sequence: Synthetic oligonucleotide
  misc_feature 1..20: note = Target: FXN; (-) strand; PAM type: YTN; PAM sequence: CTC
  source 1..20: mol_type = other DNA
cctaactgccattagttttt

SEQ ID NO: 26143 - DNA, 20 bp, synthetic construct
  misc_feature 1..20: note = Description of Artificial Sequence: Synthetic oligonucleotide
  misc_feature 1..20: note = Target: FXN; (-) strand; PAM type: YTN; PAM sequence: TTC
  source 1..20: mol_type = other DNA
cctccctaactgccattagt

SEQ ID NO: 26144 - DNA, 20 bp, synthetic construct
  misc_feature 1..20: note = Description of Artificial Sequence: Synthetic oligonucleotide
  misc_feature 1..20: note = Target: FXN; (-) strand; PAM type: YTN; PAM sequence: CTA
  source 1..20: mol_type = other DNA
ttccctccctaactgccatt

SEQ ID NO: 26145 - DNA, 20 bp, synthetic construct
  misc_feature 1..20: note = Description of Artificial Sequence: Synthetic oligonucleotide
  misc_feature 1..20: note = Target: FXN; (-) strand; PAM type: YTN; PAM sequence: TTC
  source 1..20: mol_type = other DNA
tattccctccctaactgcca

SEQ ID NO: 26146 - DNA, 20 bp, synthetic construct
  misc_feature 1..20: note = Description of Artificial Sequence: Synthetic oligonucleotide
  misc_feature 1..20: note = Target: FXN; (-) strand; PAM type: YTN; PAM sequence: CTC
  source 1..20: mol_type = other DNA
gttctattccctccctaact

SEQ ID NO: 26147 - DNA, 20 bp, synthetic construct
  misc_feature 1..20: note = Description of Artificial Sequence: Synthetic oligonucleotide
  misc_feature 1..20: note = Target: FXN; (-) strand; PAM type: YTN; PAM sequence: TTC
  source 1..20: mol_type = other DNA
aaacaggactcgttctattc

SEQ ID NO: 26148 - DNA, 20 bp, synthetic construct
  misc_feature 1..20: note = Description of Artificial Sequence: Synthetic oligonucleotide
  misc_feature 1..20: note = Target: FXN; (-) strand; PAM type: YTN; PAM sequence: TTG
  source 1..20: mol_type = other DNA
gccatgatgggaaaggagtt

SEQ ID NO: 26149 - DNA, 20 bp, synthetic construct
  misc_feature 1..20: note = Description of Artificial Sequence: Synthetic oligonucleotide
  misc_feature 1..20: note = Target: FXN; (-) strand; PAM type: YTN; PAM sequence: TTT
  source 1..20: mol_type = other DNA
ggccatgatgggaaaggagt

SEQ ID NO: 26150 - DNA, 20 bp, synthetic construct
  misc_feature 1..20: note = Description of Artificial Sequence: Synthetic oligonucleotide
  misc_feature 1..20: note = Target: FXN; (-) strand; PAM type: YTN; PAM sequence: TTT
  source 1..20: mol_type = other DNA
tggccatgatgggaaaggag

SEQ ID NO: 26151 - DNA, 20 bp, synthetic construct
  misc_feature 1..20: note = Description of Artificial Sequence: Synthetic oligonucleotide
  misc_feature 1..20: note = Target: FXN; (-) strand; PAM type: YTN; PAM sequence: TTA
  source 1..20: mol_type = other DNA
agttttggccatgatgggaa

SEQ ID NO: 26152 - DNA, 20 bp, synthetic construct
  misc_feature 1..20: note = Description of Artificial Sequence: Synthetic oligonucleotide
  misc_feature 1..20: note = Target: FXN; (-) strand; PAM type: YTN; PAM sequence: TTT
  source 1..20: mol_type = other DNA
aagttttggccatgatggga

SEQ ID NO: 26153 - DNA, 20 bp, synthetic construct
  misc_feature 1..20: note = Description of Artificial Sequence: Synthetic oligonucleotide
  misc_feature 1..20: note = Target: FXN; (-) strand; PAM type: YTN; PAM sequence: TTT
  source 1..20: mol_type = other DNA
taagttttggccatgatggg

SEQ ID NO: 26154 - DNA, 20 bp, synthetic construct
  misc_feature 1..20: note = Description of Artificial Sequence: Synthetic oligonucleotide
  misc_feature 1..20: note = Target: FXN; (-) strand; PAM type: YTN; PAM sequence: CTA
  source 1..20: mol_type = other DNA
aaaaaaattttaagttttgg

SEQ ID NO: 26155 - DNA, 20 bp, synthetic construct
  misc_feature 1..20: note = Description of Artificial Sequence: Synthetic oligonucleotide
  misc_feature 1..20: note = Target: FXN; (-) strand; PAM type: YTN; PAM sequence: TTG
  source 1..20: mol_type = other DNA
gccaaggggagcccagagat

SEQ ID NO: 26156 - DNA, 20 bp, synthetic construct
  misc_feature 1..20: note = Description of Artificial Sequence: Synthetic oligonucleotide
  misc_feature 1..20: note = Target: FXN; (-) strand; PAM type: YTN; PAM sequence: TTT
  source 1..20: mol_type = other DNA
ggccaaggggagcccagaga

SEQ ID NO: 26157 - DNA, 20 bp, synthetic construct
  misc_feature 1..20: note = Description of Artificial Sequence: Synthetic oligonucleotide
  misc_feature 1..20: note = Target: FXN; (-) strand; PAM type: YTN; PAM sequence: TTT
  source 1..20: mol_type = other DNA
tggccaaggggagcccagag

SEQ ID NO: 26158 - DNA, 20 bp, synthetic construct
  misc_feature 1..20: note = Description of Artificial Sequence: Synthetic oligonucleotide
  misc_feature 1..20: note = Target: FXN; (-) strand; PAM type: YTN; PAM sequence: CTT
  source 1..20: mol_type = other DNA
ttggccaaggggagcccaga

SEQ ID NO: 26159 - DNA, 20 bp, synthetic construct
  misc_feature 1..20: note = Description of Artificial Sequence: Synthetic oligonucleotide
  misc_feature 1..20: note = Target: FXN; (-) strand; PAM type: YTN; PAM sequence: CTA
  source 1..20: mol_type = other DNA
tcttttggccaaggggagcc

SEQ ID NO: 26160 - DNA, 20 bp, synthetic construct
  misc_feature 1..20: note = Description of Artificial Sequence: Synthetic oligonucleotide
  misc_feature 1..20: note = Target: FXN; (-) strand; PAM type: YTN; PAM sequence: CTC
  source 1..20: mol_type = other DNA
aacaaactatcttttggcca

SEQ ID NO: 26161 - DNA, 20 bp, synthetic construct
  misc_feature 1..20: note = Description of Artificial Sequence: Synthetic oligonucleotide
  misc_feature 1..20: note = Target: FXN; (-) strand; PAM type: YTN; PAM sequence: CTG
  source 1..20: mol_type = other DNA
actcaacaaactatcttttg

SEQ ID NO: 26162 - DNA, 20 bp, synthetic construct
  misc_feature 1..20: note = Description of Artificial Sequence: Synthetic oligonucleotide
  misc_feature 1..20: note = Target: FXN; (-) strand; PAM type: YTN; PAM sequence: CTC
  source 1..20: mol_type = other DNA
ccaactgactcaacaaacta

SEQ ID NO: 26163 - DNA, 20 bp, synthetic construct
  misc_feature 1..20: note = Description of Artificial Sequence: Synthetic oligonucleotide
  misc_feature 1..20: note = Target: FXN; (-) strand; PAM type: YTN; PAM sequence: CTA
  source 1..20: mol_type = other DNA
agctcccaactgactcaaca

SEQ ID NO: 26164 - DNA, 20 bp, synthetic construct
  misc_feature 1..20: note = Description of Artificial Sequence: Synthetic oligonucleotide
  misc_feature 1..20: note = Target: FXN; (-) strand; PAM type: YTN; PAM sequence: TTC
  source 1..20: mol_type = other DNA
taagctcccaactgactcaa

SEQ ID NO: 26165 - DNA, 20 bp, synthetic construct
  misc_feature 1..20: note = Description of Artificial Sequence: Synthetic oligonucleotide
  misc_feature 1..20: note = Target: FXN; (-) strand; PAM type: YTN; PAM sequence: TTC
  source 1..20: mol_type = other DNA
aatgatgtgagaaataaaaa

SEQ ID NO: 26166 - DNA, 20 bp, synthetic construct
  misc_feature 1..20: note = Description of Artificial Sequence: Synthetic oligonucleotide
  misc_feature 1..20: note = Target: FXN; (-) strand; PAM type: YTN; PAM sequence: TTG
  source 1..20: mol_type = other DNA
attcaatgatgtgagaaata

SEQ ID NO: 26167 - DNA, 20 bp, synthetic construct
  misc_feature 1..20: note = Description of Artificial Sequence: Synthetic oligonucleotide
  misc_feature 1..20: note = Target: FXN; (-) strand; PAM type: YTN; PAM sequence: TTC
  source 1..20: mol_type = other DNA
aaattgattcaatgatgtga

SEQ ID NO: 26168 - DNA, 20 bp, synthetic construct
  misc_feature 1..20: note = Description of Artificial Sequence: Synthetic oligonucleotide
  misc_feature 1..20: note = Target: FXN; (-) strand; PAM type: YTN; PAM sequence: CTG
  source 1..20: mol_type = other DNA
gttcaaattgattcaatgat

SEQ ID NO: 26169 - DNA, 20 bp, synthetic construct
  misc_feature 1..20: note = Description of Artificial Sequence: Synthetic oligonucleotide
  misc_feature 1..20: note = Target: FXN; (-) strand; PAM type: YTN; PAM sequence: TTG
  source 1..20: mol_type = other DNA
tcgcctggttcaaattgatt

SEQ ID NO: 26170 - DNA, 20 bp, synthetic construct
  misc_feature 1..20: note = Description of Artificial Sequence: Synthetic oligonucleotide
  misc_feature 1..20: note = Target: FXN; (-) strand; PAM type: YTN; PAM sequence: TTT
  source 1..20: mol_type = other DNA
gtcgcctggttcaaattgat

SEQ ID NO: 26171 - DNA, 20 bp, synthetic construct
  misc_feature 1..20: note = Description of Artificial Sequence: Synthetic oligonucleotide
  misc_feature 1..20: note = Target: FXN; (-) strand; PAM type: YTN; PAM sequence: TTT
  source 1..20: mol_type = other DNA
tgtcgcctggttcaaattga

SEQ ID NO: 26172 - DNA, 20 bp, synthetic construct
  misc_feature 1..20: note = Description of Artificial Sequence: Synthetic oligonucleotide
  misc_feature 1..20: note = Target: FXN; (-) strand; PAM type: YTN; PAM sequence: CTG
  source 1..20: mol_type = other DNA
ggagcagaaggttttgtcgc

SEQ ID NO: 26173 - DNA, 20 bp, synthetic construct
  misc_feature 1..20: note = Description of Artificial Sequence: Synthetic oligonucleotide
  misc_feature 1..20: note = Target: FXN; (-) strand; PAM type: YTN; PAM sequence: CTA
  source 1..20: mol_type = other DNA
ctgggagcagaaggttttgt

SEQ ID NO: 26174 - DNA, 20 bp, synthetic construct
  misc_feature 1..20: note = Description of Artificial Sequence: Synthetic oligonucleotide
  misc_feature 1..20: note = Target: FXN; (-) strand; PAM type: YTN; PAM sequence: CTG
  source 1..20: mol_type = other DNA
acccactactgggagcagaa

SEQ ID NO: 26175 - DNA, 20 bp, synthetic construct
  misc_feature 1..20: note = Description of Artificial Sequence: Synthetic oligonucleotide
  misc_feature 1..20: note = Target: FXN; (-) strand; PAM type: YTN; PAM sequence: CTC
  source 1..20: mol_type = other DNA
tgacccactactgggagcag

SEQ ID NO: 26176 - DNA, 20 bp, synthetic construct
  misc_feature 1..20: note = Description of Artificial Sequence: Synthetic oligonucleotide
  misc_feature 1..20: note = Target: FXN; (-) strand; PAM type: YTN; PAM sequence: TTC
  source 1..20: mol_type = other DNA
tctgacccactactgggagc

SEQ ID NO: 26177 - DNA, 20 bp, synthetic construct
  misc_feature 1..20: note = Description of Artificial Sequence: Synthetic oligonucleotide
  misc_feature 1..20: note = Target: FXN; (-) strand; PAM type: YTN; PAM sequence: CTC
  source 1..20: mol_type = other DNA
agggcaggaatcaggaaggt

SEQ ID NO: 26178 - DNA, 20 bp, synthetic construct
  misc_feature 1..20: note = Description of Artificial Sequence: Synthetic oligonucleotide
  misc_feature 1..20: note = Target: FXN; (-) strand; PAM type: YTN; PAM sequence: TTC
  source 1..20: mol_type = other DNA
agagagacaatctcagggca

SEQ ID NO: 26179 - DNA, 20 bp, synthetic construct
  misc_feature 1..20: note = Description of Artificial Sequence: Synthetic oligonucleotide
  misc_feature 1..20: note = Target: FXN; (-) strand; PAM type: YTN; PAM sequence: CTT
  source 1..20: mol_type = other DNA
cagagagacaatctcagggc

SEQ ID NO: 26180 - DNA, 20 bp, synthetic construct
  misc_feature 1..20: note = Description of Artificial Sequence: Synthetic oligonucleotide
  misc_feature 1..20: note = Target: FXN; (-) strand; PAM type: YTN; PAM sequence: TTG
  source 1..20: mol_type = other DNA
tcttcagagagacaatctca

SEQ ID NO: 26181 - DNA, 20 bp, synthetic construct
  misc_feature 1..20: note = Description of Artificial Sequence: Synthetic oligonucleotide
  misc_feature 1..20: note = Target: FXN; (-) strand; PAM type: YTN; PAM sequence: CTA
  source 1..20: mol_type = other DNA
atgttgtcttcagagagaca

SEQ ID NO: 26182 - DNA, 20 bp, synthetic construct
  misc_feature 1..20: note = Description of Artificial Sequence: Synthetic oligonucleotide
  misc_feature 1..20: note = Target: FXN; (-) strand; PAM type: YTN; PAM sequence: CTA
  source 1..20: mol_type = other DNA
gcctaatgttgtcttcagag

SEQ ID NO: 26183 - DNA, 20 bp, synthetic construct
  misc_feature 1..20: note = Description of Artificial Sequence: Synthetic oligonucleotide
  misc_feature 1..20: note = Target: FXN; (-) strand; PAM type: YTN; PAM sequence: CTA
  source 1..20: mol_type = other DNA
ctagcctaatgttgtcttca

SEQ ID NO: 26184 - DNA, 20 bp, synthetic construct
  misc_feature 1..20: note = Description of Artificial Sequence: Synthetic oligonucleotide
  misc_feature 1..20: note = Target: FXN; (-) strand; PAM type: YTN; PAM sequence: CTG
  source 1..20: mol_type = other DNA
gaaagcctactagcctaatg

SEQ ID NO: 26185 - DNA, 20 bp, synthetic construct
  misc_feature 1..20: note = Description of Artificial Sequence: Synthetic oligonucleotide
  misc_feature 1..20: note = Target: FXN; (-) strand; PAM type: YTN; PAM sequence: TTA
  source 1..20: mol_type = other DNA
cagaatctggaaagcctact

SEQ ID NO: 26186 - DNA, 20 bp, synthetic construct
  misc_feature 1..20: note = Description of Artificial Sequence: Synthetic oligonucleotide
  misc_feature 1..20: note = Target: FXN; (-) strand; PAM type: YTN; PAM sequence: TTG
  source 1..20: mol_type = other DNA
aaagaatgggttacagaatc

SEQ ID NO: 26187 - DNA, 20 bp, synthetic construct
  misc_feature 1..20: note = Description of Artificial Sequence: Synthetic oligonucleotide
  misc_feature 1..20: note = Target: FXN; (-) strand; PAM type: YTN; PAM sequence: TTT
  source 1..20: mol_type = other DNA
gaaagaatgggttacagaat

SEQ ID NO: 26188 - DNA, 20 bp, synthetic construct
  misc_feature 1..20: note = Description of Artificial Sequence: Synthetic oligonucleotide
  misc_feature 1..20: note = Target: FXN; (-) strand; PAM type: YTN; PAM sequence: CTT
  source 1..20: mol_type = other DNA
tgaaagaatgggttacagaa

SEQ ID NO: 26189 - DNA, 20 bp, synthetic construct
  misc_feature 1..20: note = Description of Artificial Sequence: Synthetic oligonucleotide
  misc_feature 1..20: note = Target: FXN; (-) strand; PAM type: YTN; PAM sequence: TTC
  source 1..20: mol_type = other DNA
ctttgaaagaatgggttaca

SEQ ID NO: 26190 - DNA, 20 bp, synthetic construct
  misc_feature 1..20: note = Description of Artificial Sequence: Synthetic oligonucleotide
  misc_feature 1..20: note = Target: FXN; (-) strand; PAM type: YTN; PAM sequence: CTT
  source 1..20: mol_type = other DNA
cctttgaaagaatgggttac

SEQ ID NO: 26191 - DNA, 20 bp, synthetic construct
  misc_feature 1..20: note = Description of Artificial Sequence: Synthetic oligonucleotide
  misc_feature 1..20: note = Target: FXN; (-) strand; PAM type: YTN; PAM sequence: CTC
  source 1..20: mol_type = other DNA
ttcctttgaaagaatgggtt

SEQ ID NO: 26192 - DNA, 20 bp, synthetic construct
  misc_feature 1..20: note = Description of Artificial Sequence: Synthetic oligonucleotide
  misc_feature 1..20: note = Target: FXN; (-) strand; PAM type: YTN; PAM sequence: CTA
  source 1..20: mol_type = other DNA
gaaaaatataggcatctctt

SEQ ID NO: 26193 - DNA, 20 bp, synthetic construct
  misc_feature 1..20: note = Description of Artificial Sequence: Synthetic oligonucleotide
  misc_feature 1..20: note = Target: FXN; (-) strand; PAM type: YTN; PAM sequence: TTG
  source 1..20: mol_type = other DNA
gctagaaaaatataggcatc

SEQ ID NO: 26194 - DNA, 20 bp, synthetic construct
  misc_feature 1..20: note = Description of Artificial Sequence: Synthetic oligonucleotide
  misc_feature 1..20: note = Target: FXN; (-) strand; PAM type: YTN; PAM sequence: CTC
  source 1..20: mol_type = other DNA
aaggtatatgaattggctag

SEQ ID NO: 26195 - DNA, 20 bp, synthetic construct
  misc_feature 1..20: note = Description of Artificial Sequence: Synthetic oligonucleotide
  misc_feature 1..20: note = Target: FXN; (-) strand; PAM type: YTN; PAM sequence: TTG
  source 1..20: mol_type = other DNA
agtgatactcaaggtatatg

SEQ ID NO: 26196 - DNA, 20 bp, synthetic construct
  misc_feature 1..20: note = Description of Artificial Sequence: Synthetic oligonucleotide
  misc_feature 1..20: note = Target: FXN; (-) strand; PAM type: YTN; PAM sequence: CTT
  source 1..20: mol_type = other DNA
gagtgatactcaaggtatat

SEQ ID NO: 26197 - DNA, 20 bp, synthetic construct
  misc_feature 1..20: note = Description of Artificial Sequence: Synthetic oligonucleotide
  misc_feature 1..20: note = Target: FXN; (-) strand; PAM type: YTN; PAM sequence: TTG
  source 1..20: mol_type = other DNA
cccttgagtgatactcaagg

SEQ ID NO: 26198 - DNA, 20 bp, synthetic construct
  misc_feature 1..20: note = Description of Artificial Sequence: Synthetic oligonucleotide
  misc_feature 1..20: note = Target: FXN; (-) strand; PAM type: YTN; PAM sequence: TTT
  source 1..20: mol_type = other DNA
gcccttgagtgatactcaag

SEQ ID NO: 26199 - DNA, 20 bp, synthetic construct
  misc_feature 1..20: note = Description of Artificial Sequence: Synthetic oligonucleotide
  misc_feature 1..20: note = Target: FXN; (-) strand; PAM type: YTN; PAM sequence: TTT
  source 1..20: mol_type = other DNA
tgcccttgagtgatactcaa

SEQ ID NO: 26200 - DNA, 20 bp, synthetic construct
  misc_feature 1..20: note = Description of Artificial Sequence: Synthetic oligonucleotide
  misc_feature 1..20: note = Target: FXN; (-) strand; PAM type: YTN; PAM sequence: TTA
  source 1..20: mol_type = other DNA
gaaataattttgcccttgag

SEQ ID NO: 26201 - DNA, 20 bp, synthetic construct
  misc_feature 1..20: note = Description of Artificial Sequence: Synthetic oligonucleotide
  misc_feature 1..20: note = Target: FXN; (-) strand; PAM type: YTN; PAM sequence: TTG
  source 1..20: mol_type = other DNA
ttagaaataattttgccctt

SEQ ID NO: 26202 - DNA, 20 bp, synthetic construct
  misc_feature 1..20: note = Description of Artificial Sequence: Synthetic oligonucleotide
  misc_feature 1..20: note = Target: FXN; (-) strand; PAM type: YTN; PAM sequence: TTT
  source 1..20: mol_type = other DNA
gttagaaataattttgccct

SEQ ID NO: 26203 - DNA, 20 bp, synthetic construct
  misc_feature 1..20: note = Description of Artificial Sequence: Synthetic oligonucleotide
  misc_feature 1..20: note = Target: FXN; (-) strand; PAM type: YTN; PAM sequence: TTA
  source 1..20: mol_type = other DNA
gtaaatgatttgttagaaat

SEQ ID NO: 26204 - DNA, 20 bp, synthetic construct
  misc_feature 1..20: note = Description of Artificial Sequence: Synthetic oligonucleotide
  misc_feature 1..20: note = Target: FXN; (-) strand; PAM type: YTN; PAM sequence: CTA
  source 1..20: mol_type = other DNA
attagtaaatgatttgttag

SEQ ID NO: 26205 - DNA, 20 bp, synthetic construct
  misc_feature 1..20: note = Description of Artificial Sequence: Synthetic oligonucleotide
  misc_feature 1..20: note = Target: FXN; (-) strand; PAM type: YTN; PAM sequence: TTG
  source 1..20: mol_type = other DNA
ctaattagtaaatgatttgt

SEQ ID NO: 26206 - DNA, 20 bp, synthetic construct
  misc_feature 1..20: note = Description of Artificial Sequence: Synthetic oligonucleotide
  misc_feature 1..20: note = Target: FXN; (-) strand; PAM type: YTN; PAM sequence: TTT
  source 1..20: mol_type = other DNA
gctaattagtaaatgatttg

SEQ ID NO: 26207 - DNA, 20 bp, synthetic construct
  misc_feature 1..20: note = Description of Artificial Sequence: Synthetic oligonucleotide
  misc_feature 1..20: note = Target: FXN; (-) strand; PAM type: YTN; PAM sequence: TTA
  source 1..20: mol_type = other DNA
agcatttgctaattagtaaa

SEQ ID NO: 26208 - DNA, 20 bp, synthetic construct
  misc_feature 1..20: note = Description of Artificial Sequence: Synthetic oligonucleotide
  misc_feature 1..20: note = Target: FXN; (-) strand; PAM type: YTN; PAM sequence: CTT
  source 1..20: mol_type = other DNA
aagcatttgctaattagtaa

SEQ ID NO: 26209 - DNA, 20 bp, synthetic construct
  misc_feature 1..20: note = Description of Artificial Sequence: Synthetic oligonucleotide
  misc_feature 1..20: note = Target: FXN; (-) strand; PAM type: YTN; PAM sequence: CTA
  source 1..20: mol_type = other DNA
cacttaagcatttgctaatt

SEQ ID NO: 26210 - DNA, 20 bp, synthetic construct
  misc_feature 1..20: note = Description of Artificial Sequence: Synthetic oligonucleotide
  misc_feature 1..20: note = Target: FXN; (-) strand; PAM type: YTN; PAM sequence: CTA
  source 1..20: mol_type = other DNA
aatctacacttaagcatttg

SEQ ID NO: 26211 - DNA, 20 bp, synthetic construct
  misc_feature 1..20: note = Description of Artificial Sequence: Synthetic oligonucleotide
  misc_feature 1..20: note = Target: FXN; (-) strand; PAM type: YTN; PAM sequence: TTC
  source 1..20: mol_type = other DNA
taaatctacacttaagcatt

SEQ ID NO: 26212 - DNA, 20 bp, synthetic construct
  misc_feature 1..20: note = Description of Artificial Sequence: Synthetic oligonucleotide
  misc_feature 1..20: note = Target: FXN; (-) strand; PAM type: YTN; PAM sequence: TTT
  source 1..20: mol_type = other DNA
ctaaatctacacttaagcat

SEQ ID NO: 26213 - DNA, 20 bp, synthetic construct
  misc_feature 1..20: note = Description of Artificial Sequence: Synthetic oligonucleotide
  misc_feature 1..20: note = Target: FXN; (-) strand; PAM type: YTN; PAM sequence: CTT
  source 1..20: mol_type = other DNA
tctaaatctacacttaagca

SEQ ID NO: 26214 - DNA, 20 bp, synthetic construct
  misc_feature 1..20: note = Description of Artificial Sequence: Synthetic oligonucleotide
  misc_feature 1..20: note = Target: FXN; (-) strand; PAM type: YTN; PAM sequence: TTA
  source 1..20: mol_type = other DNA
gctttctaaatctacactta

SEQ ID NO: 26215 - DNA, 20 bp, synthetic construct
  misc_feature 1..20: note = Description of Artificial Sequence: Synthetic oligonucleotide
  misc_feature 1..20: note = Target: FXN; (-) strand; PAM type: YTN; PAM sequence: TTT
  source 1..20: mol_type = other DNA
agctttctaaatctacactt

SEQ ID NO: 26216 - DNA, 20 bp, synthetic construct
  misc_feature 1..20: note = Description of Artificial Sequence: Synthetic oligonucleotide
  misc_feature 1..20: note = Target: FXN; (-) strand; PAM type: YTN; PAM sequence: CTT
  source 1..20: mol_type = other DNA
tagctttctaaatctacact

SEQ ID NO: 26217 - DNA, 20 bp, synthetic construct
  misc_feature 1..20: note = Description of Artificial Sequence: Synthetic oligonucleotide
  misc_feature 1..20: note = Target: FXN; (-) strand; PAM type: YTN; PAM sequence: CTG
  source 1..20: mol_type = other DNA
tatagctttagctttctaaa

SEQ ID NO: 26218 - DNA, 20 bp, synthetic construct
  misc_feature 1..20: note = Description of Artificial Sequence: Synthetic oligonucleotide
  misc_feature 1..20: note = Target: FXN; (-) strand; PAM type: YTN; PAM sequence: CTA
  source 1..20: mol_type = other DNA
tagatggcagccactgtata

SEQ ID NO: 26219 - DNA, 20 bp, synthetic construct
  misc_feature 1..20: note = Description of Artificial Sequence: Synthetic oligonucleotide
  misc_feature 1..20: note = Target: FXN; (-) strand; PAM type: YTN; PAM sequence: TTA
  source 1..20: mol_type = other DNA
atcacaagtccaaactatag

SEQ ID NO: 26220 - DNA, 20 bp, synthetic construct
  misc_feature 1..20: note = Description of Artificial Sequence: Synthetic oligonucleotide
  misc_feature 1..20: note = Target: FXN; (-) strand; PAM type: YTN; PAM sequence: TTC
  source 1..20: mol_type = other DNA
aatgtagttaatcacaagtc

SEQ ID NO: 26221 - DNA, 20 bp, synthetic construct
  misc_feature 1..20: note = Description of Artificial Sequence: Synthetic oligonucleotide
  misc_feature 1..20: note = Target: FXN; (-) strand; PAM type: YTN; PAM sequence: TTT
  source 1..20: mol_type = other DNA
caatgtagttaatcacaagt

SEQ ID NO: 26222 - DNA, 20 bp, synthetic construct
  misc_feature 1..20: note = Description of Artificial Sequence: Synthetic oligonucleotide
  misc_feature 1..20: note = Target: FXN; (-) strand; PAM type: YTN; PAM sequence: TTA
  source 1..20: mol_type = other DNA
gcatttcaatgtagttaatc

SEQ ID NO: 26223 - DNA, 20 bp, synthetic construct
  misc_feature 1..20: note = Description of Artificial Sequence: Synthetic oligonucleotide
  misc_feature 1..20: note = Target: FXN; (-) strand; PAM type: YTN; PAM sequence: CTA
  source 1..20: mol_type = other DNA
gggtacagagttagcatttc

SEQ ID NO: 26224 - DNA, 20 bp, synthetic construct
  misc_feature 1..20: note = Description of Artificial Sequence: Synthetic oligonucleotide
  misc_feature 1..20: note = Target: FXN; (-) strand; PAM type: YTN; PAM sequence: CTC
  source 1..20: mol_type = other DNA
tagggtacagagttagcatt

SEQ ID NO: 26225 - DNA, 20 bp, synthetic construct
  misc_feature 1..20: note = Description of Artificial Sequence: Synthetic oligonucleotide
  misc_feature 1..20: note = Target: FXN; (-) strand; PAM type: YTN; PAM sequence: TTC
  source 1..20: mol_type = other DNA
atactctagggtacagagtt

SEQ ID NO: 26226 - DNA, 20 bp, synthetic construct
  misc_feature 1..20: note = Description of Artificial Sequence: Synthetic oligonucleotide
  misc_feature 1..20: note = Target: FXN; (-) strand; PAM type: YTN; PAM sequence: CTA
  source 1..20: mol_type = other DNA
atcaggaattcatactctag

SEQ ID NO: 26227 - DNA, 20 bp, synthetic construct
  misc_feature 1..20: note = Description of Artificial Sequence: Synthetic oligonucleotide
  misc_feature 1..20: note = Target: FXN; (-) strand; PAM type: YTN; PAM sequence: CTC
  source 1..20: mol_type = other DNA
taatcaggaattcatactct

SEQ ID NO: 26228 - DNA, 20 bp, synthetic construct
  misc_feature 1..20: note = Description of Artificial Sequence: Synthetic oligonucleotide
  misc_feature 1..20: note = Target: FXN; (-) strand; PAM type: YTN; PAM sequence: CTG
  source 1..20: mol_type = other DNA
aaggactctaatcaggaatt

SEQ ID NO: 26229 - DNA, 20 bp, synthetic construct
  misc_feature 1..20: note = Description of Artificial Sequence: Synthetic oligonucleotide
  misc_feature 1..20: note = Target: FXN; (-) strand; PAM type: YTN; PAM sequence: TTA
  source 1..20: mol_type = other DNA
gcacctgaaggactctaatc

SEQ ID NO: 26230 - DNA, 20 bp, synthetic construct
  misc_feature 1..20: note = Description of Artificial Sequence: Synthetic oligonucleotide
  misc_feature 1..20: note = Target: FXN; (-) strand; PAM type: YTN; PAM sequence: TTA
  source 1..20: mol_type = other DNA
gttagcacctgaaggactct

SEQ ID NO: 26231 - DNA, 20 bp, synthetic construct
  misc_feature 1..20: note = Description of Artificial Sequence: Synthetic oligonucleotide
  misc_feature 1..20: note = Target: FXN; (-) strand; PAM type: YTN; PAM sequence: TTA
  source 1..20: mol_type = other DNA
tcaaacatgaaatacataaa

SEQ ID NO: 26232 - DNA, 20 bp, synthetic construct
  misc_feature 1..20: note = Description of Artificial Sequence: Synthetic oligonucleotide
  misc_feature 1..20: note = Target: FXN; (-) strand; PAM type: YTN; PAM sequence: CTC
  source 1..20: mol_type = other DNA
aagtaataatattatcaaac

SEQ ID NO: 26233 - DNA, 20 bp, synthetic construct
  misc_feature 1..20: note = Description of Artificial Sequence: Synthetic oligonucleotide
  misc_feature 1..20: note = Target: FXN; (-) strand; PAM type: YTN; PAM sequence: CTC
  source 1..20: mol_type = other DNA
ccacaaagctcaagtaataa

SEQ ID NO: 26234 - DNA, 20 bp, synthetic construct
  misc_feature 1..20: note = Description of Artificial Sequence: Synthetic oligonucleotide
  misc_feature 1..20: note = Target: FXN; (-) strand; PAM type: YTN; PAM sequence: CTC
  source 1..20: mol_type = other DNA
tcccacaaagctcaagtaat

SEQ ID NO: 26235 - DNA, 20 bp, synthetic construct
  misc_feature 1..20: note = Description of Artificial Sequence: Synthetic oligonucleotide
  misc_feature 1..20: note = Target: FXN; (-) strand; PAM type: YTN; PAM sequence: CTG
  source 1..20: mol_type = other DNA
ctctcccacaaagctcaagt

SEQ ID NO: 26236 - DNA, 20 bp, synthetic construct
  misc_feature 1..20: note = Description of Artificial Sequence: Synthetic oligonucleotide
  misc_feature 1..20: note = Target: FXN; (-) strand; PAM type: YTN; PAM sequence: CTC
  source 1..20: mol_type = other DNA
aggggaggaaaagactgctc

SEQ ID NO: 26237 - DNA, 20 bp, synthetic construct
  misc_feature 1..20: note = Description of Artificial Sequence: Synthetic oligonucleotide
  misc_feature 1..20: note = Target: FXN; (-) strand; PAM type: YTN; PAM sequence: CTA
  source 1..20: mol_type = other DNA
tatctcaggggaggaaaaga

SEQ ID NO: 26238 - DNA, 20 bp, synthetic construct
  misc_feature 1..20: note = Description of Artificial Sequence: Synthetic oligonucleotide
  misc_feature 1..20: note = Target: FXN; (-) strand; PAM type: YTN; PAM sequence: CTA
  source 1..20: mol_type = other DNA
gctatatctcaggggaggaa

SEQ ID NO: 26239 - DNA, 20 bp, synthetic construct
  misc_feature 1..20: note = Description of Artificial Sequence: Synthetic oligonucleotide
  misc_feature 1..20: note = Target: FXN; (-) strand; PAM type: YTN; PAM sequence: TTC
  source 1..20: mol_type = other DNA
tagctatatctcaggggagg

SEQ ID NO: 26240 - DNA, 20 bp, synthetic construct
  misc_feature 1..20: note = Description of Artificial Sequence: Synthetic oligonucleotide
  misc_feature 1..20: note = Target: FXN; (-) strand; PAM type: YTN; PAM sequence: CTT
  source 1..20: mol_type = other DNA
ctagctatatctcaggggag

SEQ ID NO: 26241 - DNA, 20 bp, synthetic construct
  misc_feature 1..20: note = Description of Artificial Sequence: Synthetic oligonucleotide
  misc_feature 1..20: note = Target: FXN; (-) strand; PAM type: YTN; PAM sequence: TTC
  source 1..20: mol_type = other DNA
acaaaggaggtaacttctag

SEQ ID NO: 26242 - DNA, 20 bp, synthetic construct
  misc_feature 1..20: note = Description of Artificial Sequence: Synthetic oligonucleotide
  misc_feature 1..20: note = Target: FXN; (-) strand; PAM type: YTN; PAM sequence: CTT
  source 1..20: mol_type = other DNA
cacaaaggaggtaacttcta

SEQ ID NO: 26243 - DNA, 20 bp, synthetic construct
  misc_feature 1..20: note = Description of Artificial Sequence: Synthetic oligonucleotide
  misc_feature 1..20: note = Target: FXN; (-) strand; PAM type: YTN; PAM sequence: CTA
  source 1..20: mol_type = other DNA
ggaaggcttcacaaaggagg

SEQ ID NO: 26244 - DNA, 20 bp, synthetic construct
  misc_feature 1..20: note = Description of Artificial Sequence: Synthetic oligonucleotide
  misc_feature 1..20: note = Target: FXN; (-) strand; PAM type: YTN; PAM sequence: TTG
  source 1..20: mol_type = other DNA
gagtatctaggaaggcttca

SEQ ID NO: 26245 - DNA, 20 bp, synthetic construct
  misc_feature 1..20: note = Description of Artificial Sequence: Synthetic oligonucleotide
  misc_feature 1..20: note = Target: FXN; (-) strand; PAM type: YTN; PAM sequence: CTT
  source 1..20: mol_type = other DNA
ggagtatctaggaaggcttc

SEQ ID NO: 26246 - DNA, 20 bp, synthetic construct
  misc_feature 1..20: note = Description of Artificial Sequence: Synthetic oligonucleotide
  misc_feature 1..20: note = Target: FXN; (-) strand; PAM type: YTN; PAM sequence: CTG
  source 1..20: mol_type = other DNA
cttggagtatctaggaaggc

SEQ ID NO: 26247 - DNA, 20 bp, synthetic construct
  misc_feature 1..20: note = Description of Artificial Sequence: Synthetic oligonucleotide
  misc_feature 1..20: note = Target: FXN; (-) strand; PAM type: YTN; PAM sequence: CTG
  source 1..20: mol_type = other DNA
ggcaagggagaaaggaagga

SEQ ID NO: 26248 - DNA, 20 bp, synthetic construct
  misc_feature 1..20: note = Description of Artificial Sequence: Synthetic oligonucleotide
  misc_feature 1..20: note = Target: FXN; (-) strand; PAM type: YTN; PAM sequence: CTC
  source 1..20: mol_type = other DNA
agagtgctgggcaagggaga

SEQ ID NO: 26249 - DNA, 20 bp, synthetic construct
  misc_feature 1..20: note = Description of Artificial Sequence: Synthetic oligonucleotide
  misc_feature 1..20: note = Target: FXN; (-) strand; PAM type: YTN; PAM sequence: CTC
  source 1..20: mol_type = other DNA
cacagagtcaacctcagagt

SEQ ID NO: 26250 - DNA, 20 bp, synthetic construct
  misc_feature 1..20: note = Description of Artificial Sequence: Synthetic oligonucleotide
  misc_feature 1..20: note = Target: FXN; (-) strand; PAM type: YTN; PAM sequence: TTA
  source 1..20: mol_type = other DNA
taacacagagggatcagtgc

SEQ ID NO: 26251 - DNA, 20 bp, synthetic construct
  misc_feature 1..20: note = Description of Artificial Sequence: Synthetic oligonucleotide
  misc_feature 1..20: note = Target: FXN; (-) strand; PAM type: YTN; PAM sequence: CTG
  source 1..20: mol_type = other DNA
acgtgtaaatagacaattat

SEQ ID NO: 26252 - DNA, 20 bp, synthetic construct
  misc_feature 1..20: note = Description of Artificial Sequence: Synthetic oligonucleotide
  misc_feature 1..20: note = Target: FXN; (-) strand; PAM type: YTN; PAM sequence: TTA
  source 1..20: mol_type = other DNA
taggtggtagctgacgtgta

SEQ ID NO: 26253 - DNA, 20 bp, synthetic construct
  misc_feature 1..20: note = Description of Artificial Sequence: Synthetic oligonucleotide
  misc_feature 1..20: note = Target: FXN; (-) strand; PAM type: YTN; PAM sequence: CTC
  source 1..20: mol_type = other DNA
agtgtgttataggtggtagc

SEQ ID NO: 26254 - DNA, 20 bp, synthetic construct
  misc_feature 1..20: note = Description of Artificial Sequence: Synthetic oligonucleotide
  misc_feature 1..20: note = Target: FXN; (-) strand; PAM type: YTN; PAM sequence: TTG
  source 1..20: mol_type = other DNA
aggaactcagtgtgttatag

SEQ ID NO: 26255 - DNA, 20 bp, synthetic construct
  misc_feature 1..20: note = Description of Artificial Sequence: Synthetic oligonucleotide
  misc_feature 1..20: note = Target: FXN; (-) strand; PAM type: YTN; PAM sequence: CTG
  source 1..20: mol_type = other DNA
ttgaggaactcagtgtgtta

SEQ ID NO: 26256 - DNA, 20 bp, synthetic construct
  misc_feature 1..20: note = Description of Artificial Sequence: Synthetic oligonucleotide
  misc_feature 1..20: note = Target: FXN; (-) strand; PAM type: YTN; PAM sequence: CTG
  source 1..20: mol_type = other DNA
ctgttgaggaactcagtgtg

SEQ ID NO: 26257 - DNA, 20 bp, synthetic construct
  misc_feature 1..20: note = Description of Artificial Sequence: Synthetic oligonucleotide
  misc_feature 1..20: note = Target: FXN; (-) strand; PAM type: YTN; PAM sequence: CTG
  source 1..20: mol_type = other DNA
ggatcaaagaatggacagtg

SEQ ID NO: 26258 - DNA, 20 bp, synthetic construct
  misc_feature 1..20: note = Description of Artificial Sequence: Synthetic oligonucleotide
  misc_feature 1..20: note = Target: FXN; (-) strand; PAM type: YTN; PAM sequence: TTC
  source 1..20: mol_type = other DNA
cagacactgggatcaaagaa

SEQ ID NO: 26259 - DNA, 20 bp, synthetic construct
  misc_feature 1..20: note = Description of Artificial Sequence: Synthetic oligonucleotide
  misc_feature 1..20: note = Target: FXN; (-) strand; PAM type: YTN; PAM sequence: CTG
  source 1..20: mol_type = other DNA
ttccagacactgggatcaaa

SEQ ID NO: 26260 - DNA, 20 bp, synthetic construct
  misc_feature 1..20: note = Description of Artificial Sequence: Synthetic oligonucleotide
  misc_feature 1..20: note = Target: FXN; (-) strand; PAM type: YTN; PAM sequence: TTG
  source 1..20: mol_type = other DNA
gcactgttccagacactggg

SEQ ID NO: 26261 - DNA, 20 bp, synthetic construct
  misc_feature 1..20: note = Description of Artificial Sequence: Synthetic oligonucleotide
  misc_feature 1..20: note = Target: FXN; (-) strand; PAM type: YTN; PAM sequence: CTT
  source 1..20: mol_type = other DNA
ggcactgttccagacactgg

SEQ ID NO: 26262 - DNA, 20 bp, synthetic construct
  misc_feature 1..20: note = Description of Artificial Sequence: Synthetic oligonucleotide
  misc_feature 1..20: note = Target: FXN; (-) strand; PAM type: YTN; PAM sequence: CTA
  source 1..20: mol_type = other DNA
tgtacttggcactgttccag

SEQ ID NO: 26263 - DNA, 20 bp, synthetic construct
  misc_feature 1..20: note = Description of Artificial Sequence: Synthetic oligonucleotide
  misc_feature 1..20: note = Target: FXN; (-) strand; PAM type: YTN; PAM sequence: CTA
  source 1..20: mol_type = other DNA
ctatgtacttggcactgttc

SEQ ID NO: 26264 - DNA, 20 bp, synthetic construct
  misc_feature 1..20: note = Description of Artificial Sequence: Synthetic oligonucleotide
  misc_feature 1..20: note = Target: FXN; (-) strand; PAM type: YTN; PAM sequence: TTA
  source 1..20: mol_type = other DNA
agtccctactatgtacttgg

SEQ ID NO: 26265 - DNA, 20 bp, synthetic construct
  misc_feature 1..20: note = Description of Artificial Sequence: Synthetic oligonucleotide
  misc_feature 1..20: note = Target: FXN; (-) strand; PAM type: YTN; PAM sequence: TTA
  source 1..20: mol_type = other DNA
ttaagtccctactatgtact

SEQ ID NO: 26266 - DNA, 20 bp, synthetic construct
  misc_feature 1..20: note = Description of Artificial Sequence: Synthetic oligonucleotide
  misc_feature 1..20: note = Target: FXN; (-) strand; PAM type: YTN; PAM sequence: TTT
  source 1..20: mol_type = other DNA
attaagtccctactatgtac

SEQ ID NO: 26267 - DNA, 20 bp, synthetic construct
  misc_feature 1..20: note = Description of Artificial Sequence: Synthetic oligonucleotide
  misc_feature 1..20: note = Target: FXN; (-) strand; PAM type: YTN; PAM sequence: TTA
  source 1..20: mol_type = other DNA
catatgaatcaatatttatt

SEQ ID NO: 26268 - DNA, 20 bp, synthetic construct
  misc_feature 1..20: note = Description of Artificial Sequence: Synthetic oligonucleotide
  misc_feature 1..20: note = Target: FXN; (-) strand; PAM type: YTN; PAM sequence: TTT
  source 1..20: mol_type = other DNA
acatatgaatcaatatttat

SEQ ID NO: 26269 - DNA, 20 bp, synthetic construct
  misc_feature 1..20: note = Description of Artificial Sequence: Synthetic oligonucleotide
  misc_feature 1..20: note = Target: FXN; (-) strand; PAM type: YTN; PAM sequence: CTC
  source 1..20: mol_type = other DNA
atttacatatgaatcaatat

SEQ ID NO: 26270 - DNA, 20 bp, synthetic construct
  misc_feature 1..20: note = Description of Artificial Sequence: Synthetic oligonucleotide
  misc_feature 1..20: note = Target: FXN; (-) strand; PAM type: YTN; PAM sequence: TTG
  source 1..20: mol_type = other DNA
gaaaagtctcatttacatat

SEQ ID NO: 26271 - DNA, 20 bp, synthetic construct
  misc_feature 1..20: note = Description of Artificial Sequence: Synthetic oligonucleotide
  misc_feature 1..20: note = Target: FXN; (-) strand; PAM type: YTN; PAM sequence: TTT
  source 1..20: mol_type = other DNA
ggaaaagtctcatttacata

SEQ ID NO: 26272 - DNA, 20 bp, synthetic construct
  misc_feature 1..20: note = Description of Artificial Sequence: Synthetic oligonucleotide
  misc_feature 1..20: note = Target: FXN; (-) strand; PAM type: YTN; PAM sequence: TTT
  source 1..20: mol_type = other DNA
tggaaaagtctcatttacat

SEQ ID NO: 26273 - DNA, 20 bp, synthetic construct
  misc_feature 1..20: note = Description of Artificial Sequence: Synthetic oligonucleotide
  misc_feature 1..20: note = Target: FXN; (-) strand; PAM type: YTN; PAM sequence: CTG
  source 1..20: mol_type = other DNA
agaggcatcaacgaaagcat

SEQ ID NO: 26274 - DNA, 20 bp, synthetic construct
  misc_feature 1..20: note = Description of Artificial Sequence: Synthetic oligonucleotide
  misc_feature 1..20: note = Target: FXN; (-) strand; PAM type: YTN; PAM sequence: TTG
  source 1..20: mol_type = other DNA
gtaaaaggtgtataaatgct

SEQ ID NO: 26275 - DNA, 20 bp, synthetic construct
  misc_feature 1..20: note = Description of Artificial Sequence: Synthetic oligonucleotide
  misc_feature 1..20: note = Target: FXN; (-) strand; PAM type: YTN; PAM sequence: CTA
  source 1..20: mol_type = other DNA
tgtggccagtagcgagttgg

SEQ ID NO: 26276 - DNA, 20 bp, synthetic construct
  misc_feature 1..20: note = Description of Artificial Sequence: Synthetic oligonucleotide
  misc_feature 1..20: note = Target: FXN; (-) strand; PAM type: YTN; PAM sequence: TTG
  source 1..20: mol_type = other DNA
tctatgtggccagtagcgag

SEQ ID NO: 26277 - DNA, 20 bp, synthetic construct
  misc_feature 1..20: note = Description of Artificial Sequence: Synthetic oligonucleotide
  misc_feature 1..20: note = Target: FXN; (-) strand; PAM type: YTN; PAM sequence: TTT
  source 1..20: mol_type = other DNA
gtctatgtggccagtagcga

SEQ ID NO: 26278 - DNA, 20 bp, synthetic construct
  misc_feature 1..20: note = Description of Artificial Sequence: Synthetic oligonucleotide
  misc_feature 1..20: note = Target: FXN; (-) strand; PAM type: YTN; PAM sequence: TTC
  source 1..20: mol_type = other DNA
atttgtctatgtggccagta

SEQ ID NO: 26279 - DNA, 20 bp, synthetic construct
  misc_feature 1..20: note = Description of Artificial Sequence: Synthetic oligonucleotide
  misc_feature 1..20: note = Target: FXN; (-) strand; PAM type: YTN; PAM sequence: TTT
  source 1..20: mol_type = other DNA
catttgtctatgtggccagt

SEQ ID NO: 26280 - DNA, 20 bp, synthetic construct
  misc_feature 1..20: note = Description of Artificial Sequence: Synthetic oligonucleotide
  misc_feature 1..20: note = Target: FXN; (-) strand; PAM type: YTN; PAM sequence: CTT
  source 1..20: mol_type = other DNA
tcatttgtctatgtggccag

SEQ ID NO: 26281 - DNA, 20 bp, synthetic construct
  misc_feature 1..20: note = Description of Artificial Sequence: Synthetic oligonucleotide
  misc_feature 1..20: note = Target: FXN; (-) strand; PAM type: YTN; PAM sequence: CTG
  source 1..20: mol_type = other DNA
ctttcatttgtctatgtggc

SEQ ID NO: 26282 - DNA, 20 bp, synthetic construct
  misc_feature 1..20: note = Description of Artificial Sequence: Synthetic oligonucleotide
  misc_feature 1..20: note = Target: FXN; (-) strand; PAM type: YTN; PAM sequence: TTA
  source 1..20: mol_type = other DNA
ctgctttcatttgtctatgt

SEQ ID NO: 26283 - DNA, 20 bp, synthetic construct
  misc_feature 1..20: note = Description of Artificial Sequence: Synthetic oligonucleotide
  misc_feature 1..20: note = Target: FXN; (-) strand; PAM type: YTN; PAM sequence: CTG
  source 1..20: mol_type = other DNA
gattactgctttcatttgtc

SEQ ID NO: 26284 - DNA, 20 bp, synthetic construct
  misc_feature 1..20: note = Description of Artificial Sequence: Synthetic oligonucleotide
  misc_feature 1..20: note = Target: FXN; (-) strand; PAM type: YTN; PAM sequence: TTG
  source 1..20: mol_type = other DNA
ggtgtatctggattactgct

SEQ ID NO: 26285 - DNA, 20 bp, synthetic construct
  misc_feature 1..20: note = Description of Artificial Sequence: Synthetic oligonucleotide
  misc_feature 1..20: note = Target: FXN; (-) strand; PAM type: YTN; PAM sequence: CTT
  source 1..20: mol_type = other DNA
gggtgtatctggattactgc

SEQ ID NO: 26286 - DNA, 20 bp, synthetic construct
  misc_feature 1..20: note = Description of Artificial Sequence: Synthetic oligonucleotide
  misc_feature 1..20: note = Target: FXN; (-) strand; PAM type: YTN; PAM sequence: CTC
  source 1..20: mol_type = other DNA
ttgggtgtatctggattact

SEQ ID NO: 26287 - DNA, 20 bp, synthetic construct
  misc_feature 1..20: note = Description of Artificial Sequence: Synthetic oligonucleotide
  misc_feature 1..20: note = Target: FXN; (-) strand; PAM type: YTN; PAM sequence: CTC
  source 1..20: mol_type = other DNA
cacagagagaaaaaagaaca

SEQ ID NO: 26288 - DNA, 20 bp, synthetic construct
  misc_feature 1..20: note = Description of Artificial Sequence: Synthetic oligonucleotide
  misc_feature 1..20: note = Target: FXN; (-) strand; PAM type: YTN; PAM sequence: CTC
  source 1..20: mol_type = other DNA
ccactccacagagagaaaaa

SEQ ID NO: 26289 - DNA, 20 bp, synthetic construct
  misc_feature 1..20: note = Description of Artificial Sequence: Synthetic oligonucleotide
  misc_feature 1..20: note = Target: FXN; (-) strand; PAM type: YTN; PAM sequence: TTA
  source 1..20: mol_type = other DNA
agtctcccactccacagaga

SEQ ID NO: 26290 - DNA, 20 bp, synthetic construct
  misc_feature 1..20: note = Description of Artificial Sequence: Synthetic oligonucleotide
  misc_feature 1..20: note = Target: FXN; (-) strand; PAM type: YTN; PAM sequence: CTT
  source 1..20: mol_type = other DNA
aagtctcccactccacagag

SEQ ID NO: 26291 - DNA, 20 bp, synthetic construct
  misc_feature 1..20: note = Description of Artificial Sequence: Synthetic oligonucleotide
  misc_feature 1..20: note = Target: FXN; (-) strand; PAM type: YTN; PAM sequence: TTA
  source 1..20: mol_type = other DNA
agaagccacttaagtctccc

SEQ ID NO: 26292 - DNA, 20 bp, synthetic construct
  misc_feature 1..20: note = Description of Artificial Sequence: Synthetic oligonucleotide
  misc_feature 1..20: note = Target: FXN; (-) strand; PAM type: YTN; PAM sequence: TTG
  source 1..20: mol_type = other DNA
atcagacgacacaccagtta

SEQ ID NO: 26293 - DNA, 20 bp, synthetic construct
  misc_feature 1..20: note = Description of Artificial Sequence: Synthetic oligonucleotide
  misc_feature 1..20: note = Target: FXN; (-) strand; PAM type: YTN; PAM sequence: CTT
  source 1..20: mol_type = other DNA
gatcagacgacacaccagtt

SEQ ID NO: 26294 - DNA, 20 bp, synthetic construct
  misc_feature 1..20: note = Description of Artificial Sequence: Synthetic oligonucleotide
  misc_feature 1..20: note = Target: FXN; (-) strand; PAM type: YTN; PAM sequence: CTG
  source 1..20: mol_type = other DNA
gaccacttgatcagacgaca

SEQ ID NO: 26295 - DNA, 20 bp, synthetic construct
  misc_feature 1..20: note = Description of Artificial Sequence: Synthetic oligonucleotide
  misc_feature 1..20: note = Target: FXN; (-) strand; PAM type: YTN; PAM sequence: TTA
  source 1..20: mol_type = other DNA
cctggaccacttgatcagac

SEQ ID NO: 26296 - DNA, 20 bp, synthetic construct
  misc_feature 1..20: note = Description of Artificial Sequence: Synthetic oligonucleotide
  misc_feature 1..20: note = Target: FXN; (-) strand; PAM type: YTN; PAM sequence: CTG
  source 1..20: mol_type = other DNA
ttacctggaccacttgatca

SEQ ID NO: 26297 - DNA, 20 bp, synthetic construct
  misc_feature 1..20: note = Description of Artificial Sequence: Synthetic oligonucleotide
  misc_feature 1..20: note = Target: FXN; (-) strand; PAM type: YTN; PAM sequence: TTG
  source 1..20: mol_type = other DNA
gcatccacctgttacctgga

SEQ ID NO: 26298 - DNA, 20 bp, synthetic construct
  misc_feature 1..20: note = Description of Artificial Sequence: Synthetic oligonucleotide
  misc_feature 1..20: note = Target: FXN; (-) strand; PAM type: YTN; PAM sequence: CTG
  source 1..20: mol_type = other DNA
ggccagacattggcatccac

SEQ ID NO: 26299 - DNA, 20 bp, synthetic construct
  misc_feature 1..20: note = Description of Artificial Sequence: Synthetic oligonucleotide
  misc_feature 1..20: note = Target: FXN; (-) strand; PAM type: YTN; PAM sequence: CTG
  source 1..20: mol_type = other DNA
taatgaccagtgccagtaag

SEQ ID NO: 26300 - DNA, 20 bp, synthetic construct
  misc_feature 1..20: note = Description of Artificial Sequence: Synthetic oligonucleotide
  misc_feature 1..20: note = Target: FXN; (-) strand; PAM type: YTN; PAM sequence: TTC
  source 1..20: mol_type = other DNA
tgtaatgaccagtgccagta

SEQ ID NO: 26301 - DNA, 20 bp, synthetic construct
  misc_feature 1..20: note = Description of Artificial Sequence: Synthetic oligonucleotide
  misc_feature 1..20: note = Target: FXN; (-) strand; PAM type: YTN; PAM sequence: CTT
  source 1..20: mol_type = other DNA
ctgtaatgaccagtgccagt

SEQ ID NO: 26302 - DNA, 20 bp, synthetic construct
  misc_feature 1..20: note = Description of Artificial Sequence: Synthetic oligonucleotide
  misc_feature 1..20: note = Target: FXN; (-) strand; PAM type: YTN; PAM sequence: CTG
  source 1..20: mol_type = other DNA
gtagagtgtcttctgtaatg

SEQ ID NO: 26303 - DNA, 20 bp, synthetic construct
  misc_feature 1..20: note = Description of Artificial Sequence: Synthetic oligonucleotide
  misc_feature 1..20: note = Target: FXN; (-) strand; PAM type: YTN; PAM sequence: CTC
  source 1..20: mol_type = other DNA
tggtagagtgtcttctgtaa

SEQ ID NO: 26304 - DNA, 20 bp, synthetic construct
  misc_feature 1..20: note = Description of Artificial Sequence: Synthetic oligonucleotide
  misc_feature 1..20: note = Target: FXN; (-) strand; PAM type: YTN; PAM sequence: TTC
  source 1..20: mol_type = other DNA
agctctggtagagtgtcttc

SEQ ID NO: 26305 - DNA, 20 bp, synthetic construct
  misc_feature 1..20: note = Description of Artificial Sequence: Synthetic oligonucleotide
  misc_feature 1..20: note = Target: FXN; (-) strand; PAM type: YTN; PAM sequence: TTT
  source 1..20: mol_type = other DNA
cagctctggtagagtgtctt

SEQ ID NO: 26306 - DNA, 20 bp, synthetic construct
  misc_feature 1..20: note = Description of Artificial Sequence: Synthetic oligonucleotide
  misc_feature 1..20: note = Target: FXN; (-) strand; PAM type: YTN; PAM sequence: CTT
  source 1..20: mol_type = other DNA
tcagctctggtagagtgtct

SEQ ID NO: 26307 - DNA, 20 bp, synthetic construct
  misc_feature 1..20: note = Description of Artificial Sequence: Synthetic oligonucleotide
  misc_feature 1..20: note = Target: FXN; (-) strand; PAM type: YTN; PAM sequence: CTA
  source 1..20: mol_type = other DNA
gtgacaagaggtcctttcag

SEQ ID NO: 26308 - DNA, 20 bp, synthetic construct
  misc_feature 1..20: note = Description of Artificial Sequence: Synthetic oligonucleotide
  misc_feature 1..20: note = Target: FXN; (-) strand; PAM type: YTN; PAM sequence: CTG
  source 1..20: mol_type = other DNA
cctagtgacaagaggtcctt

SEQ ID NO: 26309 - DNA, 20 bp, synthetic construct
  misc_feature 1..20: note = Description of Artificial Sequence: Synthetic oligonucleotide
  misc_feature 1..20: note = Target: FXN; (-) strand; PAM type: YTN; PAM sequence: CTC
  source 1..20: mol_type = other DNA
cacagctgcctagtgacaag

SEQ ID NO: 26310 - DNA, 20 bp, synthetic construct
  misc_feature 1..20: note = Description of Artificial Sequence: Synthetic oligonucleotide
  misc_feature 1..20: note = Target: FXN; (-) strand; PAM type: YTN; PAM sequence: CTA
  source 1..20: mol_type = other DNA
ggtcaagtagagcggactcc

SEQ ID NO: 26311 - DNA, 20 bp, synthetic construct
  misc_feature 1..20: note = Description of Artificial Sequence: Synthetic oligonucleotide
  misc_feature 1..20: note = Target: FXN; (-) strand; PAM type: YTN; PAM sequence: TTA
  source 1..20: mol_type = other DNA
ctaggtcaagtagagcggac

SEQ ID NO: 26312 - DNA, 20 bp, synthetic construct
  misc_feature 1..20: note = Description of Artificial Sequence: Synthetic oligonucleotide
  misc_feature 1..20: note = Target: FXN; (-) strand; PAM type: YTN; PAM sequence: TTT
  source 1..20: mol_type = other DNA
actaggtcaagtagagcgga

SEQ ID NO: 26313 - DNA, 20 bp, synthetic construct
  misc_feature 1..20: note = Description of Artificial Sequence: Synthetic oligonucleotide
  misc_feature 1..20: note = Target: FXN; (-) strand; PAM type: YTN; PAM sequence: TTT
  source 1..20: mol_type = other DNA
tactaggtcaagtagagcgg

SEQ ID NO: 26314 - DNA, 20 bp, synthetic construct
  misc_feature 1..20: note = Description of Artificial Sequence: Synthetic oligonucleotide
  misc_feature 1..20: note = Target: FXN; (-) strand; PAM type: YTN; PAM sequence: CTC
  source 1..20: mol_type = other DNA
caggcagattttactaggtc

SEQ ID NO: 26315 - DNA, 20 bp, synthetic construct
  misc_feature 1..20: note = Description of Artificial Sequence: Synthetic oligonucleotide
  misc_feature 1..20: note = Target: FXN; (-) strand; PAM type: YTN; PAM sequence: CTA
  source 1..20: mol_type = other DNA
acagtctccaggcagatttt

SEQ ID NO: 26316 - DNA, 20 bp, synthetic construct
  misc_feature 1..20: note = Description of Artificial Sequence: Synthetic oligonucleotide
  misc_feature 1..20: note = Target: FXN; (-) strand; PAM type: YTN; PAM sequence: CTC
  source 1..20: mol_type = other DNA
taacagtctccaggcagatt

SEQ ID NO: 26317 - DNA, 20 bp, synthetic construct
  misc_feature 1..20: note = Description of Artificial Sequence: Synthetic oligonucleotide
  misc_feature 1..20: note = Target: FXN; (-) strand; PAM type: YTN; PAM sequence: TTC
  source 1..20: mol_type = other DNA
aggtagtggggtgactctaa

SEQ ID NO: 26318 - DNA, 20 bp, synthetic construct
  misc_feature 1..20: note = Description of Artificial Sequence: Synthetic oligonucleotide
  misc_feature 1..20: note = Target: FXN; (-) strand; PAM type: YTN; PAM sequence: CTT
  source 1..20: mol_type = other DNA
caggtagtggggtgactcta

SEQ ID NO: 26319 - DNA, 20 bp, synthetic construct
  misc_feature 1..20: note = Description of Artificial Sequence: Synthetic oligonucleotide
  misc_feature 1..20: note = Target: FXN; (-) strand; PAM type: YTN; PAM sequence: CTG
  source 1..20: mol_type = other DNA
gaggtaacttcaggtagtgg

SEQ ID NO: 26320 - DNA, 20 bp, synthetic construct
  misc_feature 1..20: note = Description of Artificial Sequence: Synthetic oligonucleotide
  misc_feature 1..20: note = Target: FXN; (-) strand; PAM type: YTN; PAM sequence: CTG
  source 1..20: mol_type = other DNA
ggaaaaaaaagaggtcagcc

SEQ ID NO: 26321 - DNA, 20 bp, synthetic construct
  misc_feature 1..20: note = Description of Artificial Sequence: Synthetic oligonucleotide
  misc_feature 1..20: note = Target: FXN; (-) strand; PAM type: YTN; PAM sequence: CTC
  source 1..20: mol_type = other DNA
cacctgggaaaaaaaagagg

SEQ ID NO: 26322 - DNA, 20 bp, synthetic construct
  misc_feature 1..20: note = Description of Artificial Sequence: Synthetic oligonucleotide
  misc_feature 1..20: note = Target: FXN; (-) strand; PAM type: YTN; PAM sequence: CTA
  source 1..20: mol_type = other DNA
agatgccaggactccacctg

SEQ ID NO: 26323 - DNA, 20 bp, synthetic construct
  misc_feature 1..20: note = Description of Artificial Sequence: Synthetic oligonucleotide
  misc_feature 1..20: note = Target: FXN; (-) strand; PAM type: YTN; PAM sequence: TTA
  source 1..20: mol_type = other DNA
aaatatctaagatgccagga

SEQ ID NO: 26324 - DNA, 20 bp, synthetic construct
  misc_feature 1..20: note = Description of Artificial Sequence: Synthetic oligonucleotide
  misc_feature 1..20: note = Target: FXN; (-) strand; PAM type: YTN; PAM sequence: TTA
  source 1..20: mol_type = other DNA
ttaaaatatctaagatgcca

SEQ ID NO: 26325 - DNA, 20 bp, synthetic construct
  misc_feature 1..20: note = Description of Artificial Sequence: Synthetic oligonucleotide
  misc_feature 1..20: note = Target: FXN; (-) strand; PAM type: YTN; PAM sequence: CTT
  source 1..20: mol_type = other DNA
attaaaatatctaagatgcc

SEQ ID NO: 26326 - DNA, 20 bp, synthetic construct
  misc_feature 1..20: note = Description of Artificial Sequence: Synthetic oligonucleotide
  misc_feature 1..20: note = Target: FXN; (-) strand; PAM type: YTN; PAM sequence: TTA
  source 1..20: mol_type = other DNA
gtgaataaagaacatgtcaa

SEQ ID NO: 26327 - DNA, 20 bp, synthetic construct
  misc_feature 1..20: note = Description of Artificial Sequence: Synthetic oligonucleotide
  misc_feature 1..20: note = Target: FXN; (-) strand; PAM type: YTN; PAM sequence: CTT
  source 1..20: mol_type = other DNA
agtgaataaagaacatgtca

SEQ ID NO: 26328 - DNA, 20 bp, synthetic construct
  misc_feature 1..20: note = Description of Artificial Sequence: Synthetic oligonucleotide
  misc_feature 1..20: note = Target: FXN; (-) strand; PAM type: YTN; PAM sequence: CTG
  source 1..20: mol_type = other DNA
acaccttagtgaataaagaa

SEQ ID NO: 26329 - DNA, 20 bp, synthetic construct
  misc_feature 1..20: note = Description of Artificial Sequence: Synthetic oligonucleotide
  misc_feature 1..20: note = Target: FXN; (-) strand; PAM type: YTN; PAM sequence: CTA
  source 1..20: mol_type = other DNA
agacagtaatatgctgacac

SEQ ID NO: 26330 - DNA, 20 bp, synthetic construct
  misc_feature 1..20: note = Description of Artificial Sequence: Synthetic oligonucleotide
  misc_feature 1..20: note = Target: FXN; (-) strand; PAM type: YTN; PAM sequence: TTC
  source 1..20: mol_type = other DNA
taagacagtaatatgctgac

SEQ ID NO: 26331 - DNA, 20 bp, synthetic construct
  misc_feature 1..20: note = Description of Artificial Sequence: Synthetic oligonucleotide
  misc_feature 1..20: note = Target: FXN; (-) strand; PAM type: YTN; PAM sequence: CTC
  source 1..20: mol_type = other DNA
agttctaagacagtaatatg

SEQ ID NO: 26332 - DNA, 20 bp, synthetic construct
  misc_feature 1..20: note = Description of Artificial Sequence: Synthetic oligonucleotide
  misc_feature 1..20: note = Target: FXN; (-) strand; PAM type: YTN; PAM sequence: CTG
  source 1..20: mol_type = other DNA
atccaaaaaagatgaagaac

SEQ ID NO: 26333 - DNA, 20 bp, synthetic construct
  misc_feature 1..20: note = Description of Artificial Sequence: Synthetic oligonucleotide
  misc_feature 1..20: note = Target: FXN; (-) strand; PAM type: YTN; PAM sequence: TTA
  source 1..20: mol_type = other DNA
gagggaggtcctgatccaaa

SEQ ID NO: 26334 - DNA, 20 bp, synthetic construct
  misc_feature 1..20: note = Description of Artificial Sequence: Synthetic oligonucleotide
  misc_feature 1..20: note = Target: FXN; (-) strand; PAM type: YTN; PAM sequence: CTT
  source 1..20: mol_type = other DNA
agagggaggtcctgatccaa

SEQ ID NO: 26335 - DNA, 20 bp, synthetic construct
  misc_feature 1..20: note = Description of Artificial Sequence: Synthetic oligonucleotide
  misc_feature 1..20: note = Target: FXN; (-) strand; PAM type: YTN; PAM sequence: TTC
  source 1..20: mol_type = other DNA
ttagagggaggtcctgatcc

SEQ ID NO: 26336 - DNA, 20 bp, synthetic construct
  misc_feature 1..20: note = Description of Artificial Sequence: Synthetic oligonucleotide
  misc_feature 1..20: note = Target: FXN; (-) strand; PAM type: YTN; PAM sequence: TTG
  source 1..20: mol_type = other DNA
ggagagggaccagagcagtc

SEQ ID NO: 26337 - DNA, 20 bp, synthetic construct
  misc_feature 1..20: note = Description of Artificial Sequence: Synthetic oligonucleotide
  misc_feature 1..20: note = Target: FXN; (-) strand; PAM type: YTN; PAM sequence: TTA
  source 1..20: mol_type = other DNA
ttgggagagggaccagagca

SEQ ID NO: 26338 - DNA, 20 bp, synthetic construct
  misc_feature 1..20: note = Description of Artificial Sequence: Synthetic oligonucleotide
  misc_feature 1..20: note = Target: FXN; (-) strand; PAM type: YTN; PAM sequence: TTT
  source 1..20: mol_type = other DNA
attgggagagggaccagagc

SEQ ID NO: 26339 - DNA, 20 bp, synthetic construct
  misc_feature 1..20: note = Description of Artificial Sequence: Synthetic oligonucleotide
  misc_feature 1..20: note = Target: FXN; (-) strand; PAM type: YTN; PAM sequence: TTT
  source 1..20: mol_type = other DNA
tattgggagagggaccagag

SEQ ID NO: 26340 - DNA, 20 bp, synthetic construct
  misc_feature 1..20: note = Description of Artificial Sequence: Synthetic oligonucleotide
  misc_feature 1..20: note = Target: FXN; (-) strand; PAM type: YTN; PAM sequence: TTT
  source 1..20: mol_type = other DNA
ttattgggagagggaccaga

SEQ ID NO: 26341 - DNA, 20 bp, synthetic construct
  misc_feature 1..20: note = Description of Artificial Sequence: Synthetic oligonucleotide
  misc_feature 1..20: note = Target: FXN; (-) strand; PAM type: YTN; PAM sequence: TTA
  source 1..20: mol_type = other DNA
acaggtgagtatggaagttt

SEQ ID NO: 26342 - DNA, 20 bp, synthetic construct
  misc_feature 1..20: note = Description of Artificial Sequence: Synthetic oligonucleotide
  misc_feature 1..20: note = Target: FXN; (-) strand; PAM type: YTN; PAM sequence: TTT
  source 1..20: mol_type = other DNA
aacaggtgagtatggaagtt

SEQ ID NO: 26343 - DNA, 20 bp, synthetic construct
  misc_feature 1..20: note = Description of Artificial Sequence: Synthetic oligonucleotide
  misc_feature 1..20: note = Target: FXN; (-) strand; PAM type: YTN; PAM sequence: TTT
  source 1..20: mol_type = other DNA
taacaggtgagtatggaagt

SEQ ID NO: 26344 - DNA, 20 bp, synthetic construct
  misc_feature 1..20: note = Description of Artificial Sequence: Synthetic oligonucleotide
  misc_feature 1..20: note = Target: FXN; (-) strand; PAM type: YTN; PAM sequence: TTT
  source 1..20: mol_type = other DNA
ttaacaggtgagtatggaag

SEQ ID NO: 26345 - DNA, 20 bp, synthetic construct
  misc_feature 1..20: note = Description of Artificial Sequence: Synthetic oligonucleotide
  misc_feature 1..20: note = Target: FXN; (-) strand; PAM type: YTN; PAM sequence: TTT
  source 1..20: mol_type = other DNA
tttaacaggtgagtatggaa

SEQ ID NO: 26346 - DNA, 20 bp, synthetic construct
  misc_feature 1..20: note = Description of Artificial Sequence: Synthetic oligonucleotide
  misc_feature 1..20: note = Target: FXN; (-) strand; PAM type: YTN; PAM sequence: TTT
  source 1..20: mol_type = other DNA
ttttaacaggtgagtatgga

SEQ ID NO: 26347 - DNA, 20 bp, synthetic construct
  misc_feature 1..20: note = Description of Artificial Sequence: Synthetic oligonucleotide
  misc_feature 1..20: note = Target: FXN; (-) strand; PAM type: YTN; PAM sequence: TTT
  source 1..20: mol_type = other DNA
tttttaacaggtgagtatgg

SEQ ID NO: 26348 - DNA, 20 bp, synthetic construct
  misc_feature 1..20: note = Description of Artificial Sequence: Synthetic oligonucleotide
  misc_feature 1..20: note = Target: FXN; (-) strand; PAM type: YTN; PAM sequence: TTT
  source 1..20: mol_type = other DNA
ttttttaacaggtgagtatg

SEQ ID NO: 26349 - DNA, 20 bp, synthetic construct
  misc_feature 1..20: note = Description of Artificial Sequence: Synthetic oligonucleotide
  misc_feature 1..20: note = Target: FXN; (-) strand; PAM type: YTN; PAM sequence: TTT
  source 1..20: mol_type = other DNA
tttttttaacaggtgagtat

SEQ ID NO: 26350 - DNA, 20 bp, synthetic construct
  misc_feature 1..20: note = Description of Artificial Sequence: Synthetic oligonucleotide
  misc_feature 1..20: note = Target: FXN; (-) strand; PAM type: YTN; PAM sequence: TTT
  source 1..20: mol_type = other DNA
ttttttttaacaggtgagta

SEQ ID NO: 26351 - DNA, 20 bp, synthetic construct
  misc_feature 1..20: note = Description of Artificial Sequence: Synthetic oligonucleotide
  misc_feature 1..20: note = Target: FXN; (-) strand; PAM type: YTN; PAM sequence: TTT
  source 1..20: mol_type = other DNA
tttttttttaacaggtgagt

SEQ ID NO: 26352 - DNA, 20 bp, synthetic construct
  misc_feature 1..20: note = Description of Artificial Sequence: Synthetic oligonucleotide
  misc_feature 1..20: note = Target: FXN; (-) strand; PAM type: YTN; PAM sequence: TTT
  source 1..20: mol_type = other DNA
ttttttttttaacaggtgag

SEQ ID NO: 26353 - DNA, 20 bp, synthetic construct
  misc_feature 1..20: note = Description of Artificial Sequence: Synthetic oligonucleotide
  misc_feature 1..20: note = Target: FXN; (-) strand; PAM type: YTN; PAM sequence: TTT
  source 1..20: mol_type = other DNA
tttttttttttaacaggtga

SEQ ID NO: 26354 - DNA, 20 bp, synthetic construct
  misc_feature 1..20: note = Description of Artificial Sequence: Synthetic oligonucleotide
  misc_feature 1..20: note = Target: FXN; (-) strand; PAM type: YTN; PAM sequence: TTA
  source 1..20: mol_type = other DNA
aagttttttttttttttaac

SEQ ID NO: 26355 - DNA, 20 bp, synthetic construct
  misc_feature 1..20: note = Description of Artificial Sequence: Synthetic oligonucleotide
  misc_feature 1..20: note = Target: FXN; (-) strand; PAM type: YTN; PAM sequence: TTT
  source 1..20: mol_type = other DNA
aaagttttttttttttttaa

SEQ ID NO: 26356 - DNA, 20 bp, synthetic construct
  misc_feature 1..20: note = Description of Artificial Sequence: Synthetic oligonucleotide
  misc_feature 1..20: note = Target: FXN; (-) strand; PAM type: YTN; PAM sequence: TTG
  source 1..20: mol_type = other DNA
tttaaagttttttttttttt

SEQ ID NO: 26357 - DNA, 20 bp, synthetic construct
  misc_feature 1..20: note = Description of Artificial Sequence: Synthetic oligonucleotide
  misc_feature 1..20: note = Target: FXN; (-) strand; PAM type: YTN; PAM sequence: TTT
  source 1..20: mol_type = other DNA
gtttaaagtttttttttttt

SEQ ID NO: 26358 - DNA, 20 bp, synthetic construct
  misc_feature 1..20: note = Description of Artificial Sequence: Synthetic oligonucleotide
  misc_feature 1..20: note = Target: FXN; (-) strand; PAM type: YTN; PAM sequence: TTA
  source 1..20: mol_type = other DNA
atttgtttaaagtttttttt

SEQ ID NO: 26359 - DNA, 20 bp, synthetic construct
  misc_feature 1..20: note = Description of Artificial Sequence: Synthetic oligonucleotide
  misc_feature 1..20: note = Target: FXN; (-) strand; PAM type: YTN; PAM sequence: CTG
  source 1..20: mol_type = other DNA
ttaatttgtttaaagttttt

SEQ ID NO: 26360 - DNA, 20 bp, synthetic construct
  misc_feature 1..20: note = Description of Artificial Sequence: Synthetic oligonucleotide
  misc_feature 1..20: note = Target: FXN; (-) strand; PAM type: YTN; PAM sequence: CTC
  source 1..20: mol_type = other DNA
tgttaatttgtttaaagttt

SEQ ID NO: 26361 - DNA, 20 bp, synthetic construct
  misc_feature 1..20: note = Description of Artificial Sequence: Synthetic oligonucleotide
  misc_feature 1..20: note = Target: FXN; (-) strand; PAM type: YTN; PAM sequence: CTG
  source 1..20: mol_type = other DNA
aataaaactctgttaatttg

SEQ ID NO: 26362 - DNA, 20 bp, synthetic construct
  misc_feature 1..20: note = Description of Artificial Sequence: Synthetic oligonucleotide
  misc_feature 1..20: note = Target: FXN; (-) strand; PAM type: YTN; PAM sequence: TTG
  source 1..20: mol_type = other DNA
ctgaataaaactctgttaat

SEQ ID NO: 26363 - DNA, 20 bp, synthetic construct
  misc_feature 1..20: note = Description of Artificial Sequence: Synthetic oligonucleotide
  misc_feature 1..20: note = Target: FXN; (-) strand; PAM type: YTN; PAM sequence: TTT
  source 1..20: mol_type = other DNA
gctgaataaaactctgttaa

SEQ ID NO: 26364 - DNA, 20 bp, synthetic construct
  misc_feature 1..20: note = Description of Artificial Sequence: Synthetic oligonucleotide
  misc_feature 1..20: note = Target: FXN; (-) strand; PAM type: YTN; PAM sequence: CTT
  source 1..20: mol_type = other DNA
tgctgaataaaactctgtta

SEQ ID NO: 26365 - DNA, 20 bp, synthetic construct
  misc_feature 1..20: note = Description of Artificial Sequence: Synthetic oligonucleotide
  misc_feature 1..20: note = Target: FXN; (-) strand; PAM type: YTN; PAM sequence: TTC
  source 1..20: mol_type = other DNA
tttgctgaataaaactctgt

SEQ ID NO: 26366 - DNA, 20 bp, synthetic construct
  misc_feature 1..20: note = Description of Artificial Sequence: Synthetic oligonucleotide
  misc_feature 1..20: note = Target: FXN; (-) strand; PAM type: YTN; PAM sequence: TTA
  source 1..20: mol_type = other DNA
tgaatcattctttgctgaat

SEQ ID NO: 26367 - DNA, 20 bp, synthetic construct
  misc_feature 1..20: note = Description of Artificial Sequence: Synthetic oligonucleotide
  misc_feature 1..20: note = Target: FXN; (-) strand; PAM type: YTN; PAM sequence: TTT
  source 1..20: mol_type = other DNA
atgaatcattctttgctgaa

SEQ ID NO: 26368 - DNA, 20 bp, synthetic construct
  misc_feature 1..20: note = Description of Artificial Sequence: Synthetic oligonucleotide
  misc_feature 1..20: note = Target: FXN; (-) strand; PAM type: YTN; PAM sequence: TTC
  source 1..20: mol_type = other DNA
ccgatttatgaatcattctt

SEQ ID NO: 26369 - DNA, 20 bp, synthetic construct
  misc_feature 1..20: note = Description of Artificial Sequence: Synthetic oligonucleotide
  misc_feature 1..20: note = Target: FXN; (-) strand; PAM type: YTN; PAM sequence: CTT
  source 1..20: mol_type = other DNA
cccgatttatgaatcattct

SEQ ID NO: 26370 - DNA, 20 bp, synthetic construct
  misc_feature 1..20: note = Description of Artificial Sequence: Synthetic oligonucleotide
  misc_feature 1..20: note = Target: FXN; (-) strand; PAM type: YTN; PAM sequence: TTG
  source 1..20: mol_type = other DNA
cagccttcccgatttatgaa

SEQ ID NO: 26371 - DNA, 20 bp, synthetic construct
  misc_feature 1..20: note = Description of Artificial Sequence: Synthetic oligonucleotide
  misc_feature 1..20: note = Target: FXN; (-) strand; PAM type: YTN; PAM sequence: CTG
  source 1..20: mol_type = other DNA
gttgcagccttcccgattta

SEQ ID NO: 26372 - DNA, 20 bp, synthetic construct
  misc_feature 1..20: note = Description of Artificial Sequence: Synthetic oligonucleotide
  misc_feature 1..20: note = Target: FXN; (-) strand; PAM type: YTN; PAM sequence: TTC
  source 1..20: mol_type = other DNA
tggttgcagccttcccgatt

SEQ ID NO: 26373 - DNA, 20 bp, synthetic construct
  misc_feature 1..20: note = Description of Artificial Sequence: Synthetic oligonucleotide
  misc_feature 1..20: note = Target: FXN; (-) strand; PAM type: YTN; PAM sequence: CTA
  source 1..20: mol_type = other DNA
ttctggttgcagccttcccg

SEQ ID NO: 26374 - DNA, 20 bp, synthetic construct
  misc_feature 1..20: note = Description of Artificial Sequence: Synthetic oligonucleotide
  misc_feature 1..20: note = Target: FXN; (-) strand; PAM type: YTN; PAM sequence: CTG
  source 1..20: mol_type = other DNA
aacctattctggttgcagcc

SEQ ID NO: 26375 - DNA, 20 bp, synthetic construct
  misc_feature 1..20: note = Description of Artificial Sequence: Synthetic oligonucleotide
  misc_feature 1..20: note = Target: FXN; (-) strand; PAM type: YTN; PAM sequence: CTC
  source 1..20: mol_type = other DNA
tgaacctattctggttgcag

SEQ ID NO: 26376 - DNA, 20 bp, synthetic construct
  misc_feature 1..20: note = Description of Artificial Sequence: Synthetic oligonucleotide
  misc_feature 1..20: note = Target: FXN; (-) strand; PAM type: YTN; PAM sequence: CTC
  source 1..20: mol_type = other DNA
tctgaacctattctggttgc

SEQ ID NO: 26377 - DNA, 20 bp, synthetic construct
  misc_feature 1..20: note = Description of Artificial Sequence: Synthetic oligonucleotide
  misc_feature 1..20: note = Target: FXN; (-) strand; PAM type: YTN; PAM sequence: CTC
  source 1..20: mol_type = other DNA
caaccacgtggcacaccgtg

SEQ ID NO: 26378 - DNA, 20 bp, synthetic construct
  misc_feature 1..20: note = Description of Artificial Sequence: Synthetic oligonucleotide
  misc_feature 1..20: note = Target: FXN; (-) strand; PAM type: YTN; PAM sequence: CTC
  source 1..20: mol_type = other DNA
tccaaccacgtggcacaccg

SEQ ID NO: 26379 - DNA, 20 bp, synthetic construct
  misc_feature 1..20: note = Description of Artificial Sequence: Synthetic oligonucleotide
  misc_feature 1..20: note = Target: FXN; (-) strand; PAM type: YTN; PAM sequence: CTA
  source 1..20: mol_type = other DNA
aatcctctccaaccacgtgg

SEQ ID NO: 26380 - DNA, 20 bp, synthetic construct
  misc_feature 1..20: note = Description of Artificial Sequence: Synthetic oligonucleotide
  misc_feature 1..20: note = Target: FXN; (-) strand; PAM type: YTN; PAM sequence: CTG
  source 1..20: mol_type = other DNA
tgcataaatcctaaatcctc

SEQ ID NO: 26381 - DNA, 20 bp, synthetic construct
  misc_feature 1..20: note = Description of Artificial Sequence: Synthetic oligonucleotide
  misc_feature 1..20: note = Target: FXN; (-) strand; PAM type: YTN; PAM sequence: TTC
  source 1..20: mol_type = other DNA
tgtgcataaatcctaaatcc

SEQ ID NO: 26382 - DNA, 20 bp, synthetic construct
  misc_feature 1..20: note = Description of Artificial Sequence: Synthetic oligonucleotide
  misc_feature 1..20: note = Target: FXN; (-) strand; PAM type: YTN; PAM sequence: TTT
  source 1..20: mol_type = other DNA
ctgtgcataaatcctaaatc

SEQ ID NO: 26383 - DNA, 20 bp, synthetic construct
  misc_feature 1..20: note = Description of Artificial Sequence: Synthetic oligonucleotide
  misc_feature 1..20: note = Target: FXN; (-) strand; PAM type: YTN; PAM sequence: TTT
  source 1..20: mol_type = other DNA
tctgtgcataaatcctaaat

SEQ ID NO: 26384 - DNA, 20 bp, synthetic construct
  misc_feature 1..20: note = Description of Artificial Sequence: Synthetic oligonucleotide
  misc_feature 1..20: note = Target: FXN; (-) strand; PAM type: YTN; PAM sequence: TTT
  source 1..20: mol_type = other DNA
ttctgtgcataaatcctaaa

SEQ ID NO: 26385 - DNA, 20 bp, synthetic construct
  misc_feature 1..20: note = Description of Artificial Sequence: Synthetic oligonucleotide
  misc_feature 1..20: note = Target: FXN; (-) strand; PAM type: YTN; PAM sequence: CTT
  source 1..20: mol_type = other DNA
tttctgtgcataaatcctaa

SEQ ID NO: 26386 - DNA, 20 bp, synthetic construct
  misc_feature 1..20: note = Description of Artificial Sequence: Synthetic oligonucleotide
  misc_feature 1..20: note = Target: FXN; (-) strand; PAM type: YTN; PAM sequence: TTC
  source 1..20: mol_type = other DNA
ctttttctgtgcataaatcc

SEQ ID NO: 26387 - DNA, 20 bp, synthetic construct
  misc_feature 1..20: note = Description of Artificial Sequence: Synthetic oligonucleotide
  misc_feature 1..20: note = Target: FXN; (-) strand; PAM type: YTN; PAM sequence: TTT
  source 1..20: mol_type = other DNA
cctttttctgtgcataaatc

SEQ ID NO: 26388 - DNA, 20 bp, synthetic construct
  misc_feature 1..20: note = Description of Artificial Sequence: Synthetic oligonucleotide
  misc_feature 1..20: note = Target: FXN; (-) strand; PAM type: YTN; PAM sequence: CTT
  source 1..20: mol_type = other DNA
tcctttttctgtgcataaat

SEQ ID NO: 26389 - DNA, 20 bp, synthetic construct
  misc_feature 1..20: note = Description of Artificial Sequence: Synthetic oligonucleotide
  misc_feature 1..20: note = Target: FXN; (-) strand; PAM type: YTN; PAM sequence: CTG
  source 1..20: mol_type = other DNA
catgtcactttcctttttct

SEQ ID NO: 26390 - DNA, 20 bp, synthetic construct
  misc_feature 1..20: note = Description of Artificial Sequence: Synthetic oligonucleotide
  misc_feature 1..20: note = Target: FXN; (-) strand; PAM type: YTN; PAM sequence: TTC
  source 1..20: mol_type = other DNA
tgcatgtcactttccttttt

SEQ ID NO: 26391 - DNA, 20 bp, synthetic construct
  misc_feature 1..20: note = Description of Artificial Sequence: Synthetic oligonucleotide
  misc_feature 1..20: note = Target: FXN; (-) strand; PAM type: YTN; PAM sequence: TTT
  source 1..20: mol_type = other DNA
ctgcatgtcactttcctttt

SEQ ID NO: 26392 - DNA, 20 bp, synthetic construct
  misc_feature 1..20: note = Description of Artificial Sequence: Synthetic oligonucleotide
  misc_feature 1..20: note = Target: FXN; (-) strand; PAM type: YTN; PAM sequence: TTT
  source 1..20: mol_type = other DNA
tctgcatgtcactttccttt

SEQ ID NO: 26393 - DNA, 20 bp, synthetic construct
  misc_feature 1..20: note = Description of Artificial Sequence: Synthetic oligonucleotide
  misc_feature 1..20: note = Target: FXN; (-) strand; PAM type: YTN; PAM sequence: TTC
  source 1..20: mol_type = other DNA
attttctgcatgtcactttc

SEQ ID NO: 26394 - DNA, 20 bp, synthetic construct
  misc_feature 1..20: note = Description of Artificial Sequence: Synthetic oligonucleotide
  misc_feature 1..20: note = Target: FXN; (-) strand; PAM type: YTN; PAM sequence: TTT
  source 1..20: mol_type = other DNA
cattttctgcatgtcacttt

SEQ ID NO: 26395 - DNA, 20 bp, synthetic construct
  misc_feature 1..20: note = Description of Artificial Sequence: Synthetic oligonucleotide
  misc_feature 1..20: note = Target: FXN; (-) strand; PAM type: YTN; PAM sequence: CTT
  source 1..20: mol_type = other DNA
tcattttctgcatgtcactt

SEQ ID NO: 26396 - DNA, 20 bp, synthetic construct
  misc_feature 1..20: note = Description of Artificial Sequence: Synthetic oligonucleotide
  misc_feature 1..20: note = Target: FXN; (-) strand; PAM type: YTN; PAM sequence: CTC
  source 1..20: mol_type = other DNA
actttcattttctgcatgtc

SEQ ID NO: 26397 - DNA, 20 bp, synthetic construct
  misc_feature 1..20: note = Description of Artificial Sequence: Synthetic oligonucleotide
  misc_feature 1..20: note = Target: FXN; (-) strand; PAM type: YTN; PAM sequence: TTA
  source 1..20: mol_type = other DNA
caggcgtgaggcaccgcacc

SEQ ID NO: 26398 - DNA, 20 bp, synthetic construct
  misc_feature 1..20: note = Description of Artificial Sequence: Synthetic oligonucleotide
  misc_feature 1..20: note = Target: FXN; (-) strand; PAM type: YTN; PAM sequence: CTG
  source 1..20: mol_type = other DNA
ggattacaggcgtgaggcac

SEQ ID NO: 26399 - DNA, 20 bp, synthetic construct
  misc_feature 1..20: note = Description of Artificial Sequence: Synthetic oligonucleotide
  misc_feature 1..20: note = Target: FXN; (-) strand; PAM type: YTN; PAM sequence: CTC
  source 1..20: mol_type = other DNA
ccaaagtgctgggattacag

SEQ ID NO: 26400 - DNA, 20 bp, synthetic construct
  misc_feature 1..20: note = Description of Artificial Sequence: Synthetic oligonucleotide
  misc_feature 1..20: note = Target: FXN; (-) strand; PAM type: YTN; PAM sequence: CTC
  source 1..20: mol_type = other DNA
ggcctcccaaagtgctggga

SEQ ID NO: 26401 - DNA, 20 bp, synthetic construct
  misc_feature 1..20: note = Description of Artificial Sequence: Synthetic oligonucleotide
  misc_feature 1..20: note = Target: FXN; (-) strand; PAM type: YTN; PAM sequence: CTG
  source 1..20: mol_type = other DNA
cccgcctcggcctcccaaag

SEQ ID NO: 26402 - DNA, 20 bp, synthetic construct
  misc_feature 1..20: note = Description of Artificial Sequence: Synthetic oligonucleotide
  misc_feature 1..20: note = Target: FXN; (-) strand; PAM type: YTN; PAM sequence: CTC
  source 1..20: mol_type = other DNA
atgatctgcccgcctcggcc

SEQ ID NO: 26403 - DNA, 20 bp, synthetic construct
  misc_feature 1..20: note = Description of Artificial Sequence: Synthetic oligonucleotide
  misc_feature 1..20: note = Target: FXN; (-) strand; PAM type: YTN; PAM sequence: CTG
  source 1..20: mol_type = other DNA
acctcatgatctgcccgcct

SEQ ID NO: 26404 - DNA, 20 bp, synthetic construct
  misc_feature 1..20: note = Description of Artificial Sequence: Synthetic oligonucleotide
  misc_feature 1..20: note = Target: FXN; (-) strand; PAM type: YTN; PAM sequence: CTC
  source 1..20: mol_type = other DNA
ctgacctcatgatctgcccg

SEQ ID NO: 26405 - DNA, 20 bp, synthetic construct
  misc_feature 1..20: note = Description of Artificial Sequence: Synthetic oligonucleotide
  misc_feature 1..20: note = Target: FXN; (-) strand; PAM type: YTN; PAM sequence: CTC
  source 1..20: mol_type = other DNA
gatctcctgacctcatgatc

SEQ ID NO: 26406 - DNA, 20 bp, synthetic construct
  misc_feature 1..20: note = Description of Artificial Sequence: Synthetic oligonucleotide
  misc_feature 1..20: note = Target: FXN; (-) strand; PAM type: YTN; PAM sequence: TTA
  source 1..20: mol_type = other DNA
gccaggatggtctcgatctc

SEQ ID NO: 26407 - DNA, 20 bp, synthetic construct
  misc_feature 1..20: note = Description of Artificial Sequence: Synthetic oligonucleotide
  misc_feature 1..20: note = Target: FXN; (-) strand; PAM type: YTN; PAM sequence: TTC
  source 1..20: mol_type = other DNA
accgtgttagccaggatggt

SEQ ID NO: 26408 - DNA, 20 bp, synthetic construct
  misc_feature 1..20: note = Description of Artificial Sequence: Synthetic oligonucleotide
  misc_feature 1..20: note = Target: FXN; (-) strand; PAM type: YTN; PAM sequence: TTT
  source 1..20: mol_type = other DNA
caccgtgttagccaggatgg

SEQ ID NO: 26409 - DNA, 20 bp, synthetic construct
  misc_feature 1..20: note = Description of Artificial Sequence: Synthetic oligonucleotide
  misc_feature 1..20: note = Target: FXN; (-) strand; PAM type: YTN; PAM sequence: TTA
  source 1..20: mol_type = other DNA
gtagagacagggtttcaccg

SEQ ID NO: 26410 - DNA, 20 bp, synthetic construct
  misc_feature 1..20: note = Description of Artificial Sequence: Synthetic oligonucleotide
  misc_feature 1..20: note = Target: FXN; (-) strand; PAM type: YTN; PAM sequence: TTT
  source 1..20: mol_type = other DNA
agtagagacagggtttcacc

SEQ ID NO: 26411 - DNA, 20 bp, synthetic construct
  misc_feature 1..20: note = Description of Artificial Sequence: Synthetic oligonucleotide
  misc_feature 1..20: note = Target: FXN; (-) strand; PAM type: YTN; PAM sequence: TTT
  source 1..20: mol_type = other DNA
tagtagagacagggtttcac

SEQ ID NO: 26412 - DNA, 20 bp, synthetic construct
  misc_feature 1..20: note = Description of Artificial Sequence: Synthetic oligonucleotide
  misc_feature 1..20: note = Target: FXN; (-) strand; PAM type: YTN; PAM sequence: TTT
  source 1..20: mol_type = other DNA
ttagtagagacagggtttca

SEQ ID NO: 26413 - DNA, 20 bp, synthetic construct
  misc_feature 1..20: note = Description of Artificial Sequence: Synthetic oligonucleotide
  misc_feature 1..20: note = Target: FXN; (-) strand; PAM type: YTN; PAM sequence: TTG
  source 1..20: mol_type = other DNA
catttttagtagagacaggg

SEQ ID NO: 26414 - DNA, 20 bp, synthetic construct
  misc_feature 1..20: note = Description of Artificial Sequence: Synthetic oligonucleotide
  misc_feature 1..20: note = Target: FXN; (-) strand; PAM type: YTN; PAM sequence: TTT
  source 1..20: mol_type = other DNA
gcatttttagtagagacagg

SEQ ID NO: 26415 - DNA, 20 bp, synthetic construct
  misc_feature 1..20: note = Description of Artificial Sequence: Synthetic oligonucleotide
  misc_feature 1..20: note = Target: FXN; (-) strand; PAM type: YTN; PAM sequence: TTT
  source 1..20: mol_type = other DNA
tgcatttttagtagagacag

SEQ ID NO: 26416 - DNA, 20 bp, synthetic construct
  misc_feature 1..20: note = Description of Artificial Sequence: Synthetic oligonucleotide
  misc_feature 1..20: note = Target: FXN; (-) strand; PAM type: YTN; PAM sequence: TTT
  source 1..20: mol_type = other DNA
ttgcatttttagtagagaca

SEQ ID NO: 26417 - DNA, 20 bp, synthetic construct
  misc_feature 1..20: note = Description of Artificial Sequence: Synthetic oligonucleotide
  misc_feature 1..20: note = Target: FXN; (-) strand; PAM type: YTN; PAM sequence: CTA
  source 1..20: mol_type = other DNA
agtttttgcatttttagtag

SEQ ID NO: 26418 - DNA, 20 bp, synthetic construct
  misc_feature 1..20: note = Description of Artificial Sequence: Synthetic oligonucleotide
  misc_feature 1..20: note = Target: FXN; (-) strand; PAM type: YTN; PAM sequence: CTG
  source 1..20: mol_type = other DNA
ccaccacgcccggctaagtt

SEQ ID NO: 26419 - DNA, 20 bp, synthetic construct
  misc_feature 1..20: note = Description of Artificial Sequence: Synthetic oligonucleotide
  misc_feature 1..20: note = Target: FXN; (-) strand; PAM type: YTN; PAM sequence: CTA
  source 1..20: mol_type = other DNA
caggtgcctgccaccacgcc

SEQ ID NO: 26420 - DNA, 20 bp, synthetic construct
  misc_feature 1..20: note = Description of Artificial Sequence: Synthetic oligonucleotide
  misc_feature 1..20: note = Target: FXN; (-) strand; PAM type: YTN; PAM sequence: CTG
  source 1..20: mol_type = other DNA
ggactacaggtgcctgccac

SEQ ID NO: 26421 - DNA, 20 bp, synthetic construct
  misc_feature 1..20: note = Description of Artificial Sequence: Synthetic oligonucleotide
  misc_feature 1..20: note = Target: FXN; (-) strand; PAM type: YTN; PAM sequence: CTC
  source 1..20: mol_type = other DNA
ccaagtagctgggactacag

SEQ ID NO: 26422 - DNA, 20 bp, synthetic construct
  misc_feature 1..20: note = Description of Artificial Sequence: Synthetic oligonucleotide
  misc_feature 1..20: note = Target: FXN; (-) strand; PAM type: YTN; PAM sequence: CTC
  source 1..20: mol_type = other DNA
agcctcccaagtagctggga

SEQ ID NO: 26423 - DNA, 20 bp, synthetic construct
  misc_feature 1..20: note = Description of Artificial Sequence: Synthetic oligonucleotide
  misc_feature 1..20: note = Target: FXN; (-) strand; PAM type: YTN; PAM sequence: CTG
  source 1..20: mol_type = other DNA
cctcagcctcccaagtagct

SEQ ID NO: 26424 - DNA, 20 bp, synthetic construct
  misc_feature 1..20: note = Description of Artificial Sequence: Synthetic oligonucleotide
  misc_feature 1..20: note = Target: FXN; (-) strand; PAM type: YTN; PAM sequence: CTC
  source 1..20: mol_type = other DNA
ctgcctcagcctcccaagta

SEQ ID NO: 26425 - DNA, 20 bp, synthetic construct
  misc_feature 1..20: note = Description of Artificial Sequence: Synthetic oligonucleotide
  misc_feature 1..20: note = Target: FXN; (-) strand; PAM type: YTN; PAM sequence: TTC
  source 1..20: mol_type = other DNA
tcctgcctcagcctcccaag

SEQ ID NO: 26426 - DNA, 20 bp, synthetic construct
  misc_feature 1..20: note = Description of Artificial Sequence: Synthetic oligonucleotide
  misc_feature 1..20: note = Target: FXN; (-) strand; PAM type: YTN; PAM sequence: TTC
  source 1..20: mol_type = other DNA
acaccattctcctgcctcag

SEQ ID NO: 26427 - DNA, 20 bp, synthetic construct
  misc_feature 1..20: note = Description of Artificial Sequence: Synthetic oligonucleotide
  misc_feature 1..20: note = Target: FXN; (-) strand; PAM type: YTN; PAM sequence: CTC
  source 1..20: mol_type = other DNA
ccaggttcacaccattctcc

SEQ ID NO: 26428 - DNA, 20 bp, synthetic construct
  misc_feature 1..20: note = Description of Artificial Sequence: Synthetic oligonucleotide
  misc_feature 1..20: note = Target: FXN; (-) strand; PAM type: YTN; PAM sequence: CTC
  source 1..20: mol_type = other DNA
cgcctcccaggttcacacca

SEQ ID NO: 26429 - DNA, 20 bp, synthetic construct
  misc_feature 1..20: note = Description of Artificial Sequence: Synthetic oligonucleotide
  misc_feature 1..20: note = Target: FXN; (-) strand; PAM type: YTN; PAM sequence: CTG
  source 1..20: mol_type = other DNA
caagctccgcctcccaggtt

SEQ ID NO: 26430 - DNA, 20 bp, synthetic construct
  misc_feature 1..20: note = Description of Artificial Sequence: Synthetic oligonucleotide
  misc_feature 1..20: note = Target: FXN; (-) strand; PAM type: YTN; PAM sequence: CTC
  source 1..20: mol_type = other DNA
actgcaagctccgcctccca

SEQ ID NO: 26431 - DNA, 20 bp, synthetic construct
  misc_feature 1..20: note = Description of Artificial Sequence: Synthetic oligonucleotide
  misc_feature 1..20: note = Target: FXN; (-) strand; PAM type: YTN; PAM sequence: CTG
  source 1..20: mol_type = other DNA
gctcactgcaagctccgcct

SEQ ID NO: 26432 - DNA, 20 bp, synthetic construct
  misc_feature 1..20: note = Description of Artificial Sequence: Synthetic oligonucleotide
  misc_feature 1..20: note = Target: FXN; (-) strand; PAM type: YTN; PAM sequence: CTG
  source 1..20: mol_type = other DNA
gagtgcagtggcgggatcct

SEQ ID NO: 26433 - DNA, 20 bp, synthetic construct
  misc_feature 1..20: note = Description of Artificial Sequence: Synthetic oligonucleotide
  misc_feature 1..20: note = Target: FXN; (-) strand; PAM type: YTN; PAM sequence: CTG
  source 1..20: mol_type = other DNA
tcgcccaggctggagtgcag

SEQ ID NO: 26434 - DNA, 20 bp, synthetic construct
  misc_feature 1..20: note = Description of Artificial Sequence: Synthetic oligonucleotide
  misc_feature 1..20: note = Target: FXN; (-) strand; PAM type: YTN; PAM sequence: CTC
  source 1..20: mol_type = other DNA
tgtcgcccaggctggagtgc

SEQ ID NO: 26435 - DNA, 20 bp, synthetic construct
  misc_feature 1..20: note = Description of Artificial Sequence: Synthetic oligonucleotide
  misc_feature 1..20: note = Target: FXN; (-) strand; PAM type: YTN; PAM sequence: CTC
  source 1..20: mol_type = other DNA
gctctgtcgcccaggctgga

SEQ ID NO: 26436 - DNA, 20 bp, synthetic construct
  misc_feature 1..20: note = Description of Artificial Sequence: Synthetic oligonucleotide
  misc_feature 1..20: note = Target: FXN; (-) strand; PAM type: YTN; PAM sequence: TTA
  source 1..20: mol_type = other DNA
agatgaagtctcgctctgtc

SEQ ID NO: 26437 - DNA, 20 bp, synthetic construct
  misc_feature 1..20: note = Description of Artificial Sequence: Synthetic oligonucleotide
  misc_feature 1..20: note = Target: FXN; (-) strand; PAM type: YTN; PAM sequence: TTT
  source 1..20: mol_type = other DNA
aagatgaagtctcgctctgt

SEQ ID NO: 26438 - DNA, 20 bp, synthetic construct
  misc_feature 1..20: note = Description of Artificial Sequence: Synthetic oligonucleotide
  misc_feature 1..20: note = Target: FXN; (-) strand; PAM type: YTN; PAM sequence: TTT
  source 1..20: mol_type = other DNA
taagatgaagtctcgctctg

SEQ ID NO: 26439 - DNA, 20 bp, synthetic construct
  misc_feature 1..20: note = Description of Artificial Sequence: Synthetic oligonucleotide
  misc_feature 1..20: note = Target: FXN; (-) strand; PAM type: YTN; PAM sequence: TTT
  source 1..20: mol_type = other DNA
ttaagatgaagtctcgctct

SEQ ID NO: 26440 - DNA, 20 bp, synthetic construct
  misc_feature 1..20: note = Description of Artificial Sequence: Synthetic oligonucleotide
  misc_feature 1..20: note = Target: FXN; (-) strand; PAM type: YTN; PAM sequence: TTT
  source 1..20: mol_type = other DNA
tttaagatgaagtctcgctc

SEQ ID NO: 26441 - DNA, 20 bp, synthetic construct
  misc_feature 1..20: note = Description of Artificial Sequence: Synthetic oligonucleotide
  misc_feature 1..20: note = Target: FXN; (-) strand; PAM type: YTN; PAM sequence: TTT
  source 1..20: mol_type = other DNA
ttttaagatgaagtctcgct

SEQ ID NO: 26442 - DNA, 20 bp, synthetic construct
  misc_feature 1..20: note = Description of Artificial Sequence: Synthetic oligonucleotide
  misc_feature 1..20: note = Target: FXN; (-) strand; PAM type: YTN; PAM sequence: TTT
  source 1..20: mol_type = other DNA
tttttaagatgaagtctcgc

SEQ ID NO: 26443 - DNA, 20 bp, synthetic construct
  misc_feature 1..20: note = Description of Artificial Sequence: Synthetic oligonucleotide
  misc_feature 1..20: note = Target: FXN; (-) strand; PAM type: YTN; PAM sequence: TTT
  source 1..20: mol_type = other DNA
ttttttaagatgaagtctcg

SEQ ID NO: 26444 - DNA, 20 bp, synthetic construct
  misc_feature 1..20: note = Description of Artificial Sequence: Synthetic oligonucleotide
  misc_feature 1..20: note = Target: FXN; (-) strand; PAM type: YTN; PAM sequence: CTT
  source 1..20: mol_type = other DNA
tttttttaagatgaagtctc

SEQ ID NO: 26445 - DNA, 20 bp, synthetic construct
  misc_feature 1..20: note = Description of Artificial Sequence: Synthetic oligonucleotide
  misc_feature 1..20: note = Target: FXN; (-) strand; PAM type: YTN; PAM sequence: TTC
  source 1..20: mol_type = other DNA
tttttttttaagatgaagtc

SEQ ID NO: 26446 - DNA, 20 bp, synthetic construct
  misc_feature 1..20: note = Description of Artificial Sequence: Synthetic oligonucleotide
  misc_feature 1..20: note = Target: FXN; (-) strand; PAM type: YTN; PAM sequence: TTT
  source 1..20: mol_type = other DNA
ctttttttttaagatgaagt

SEQ ID NO: 26447 - DNA, 20 bp, synthetic construct
  misc_feature 1..20: note = Description of Artificial Sequence: Synthetic oligonucleotide
  misc_feature 1..20: note = Target: FXN; (-) strand; PAM type: YTN; PAM sequence: TTT
  source 1..20: mol_type = other DNA
tctttttttttaagatgaag

SEQ ID NO: 26448 - DNA, 20 bp, synthetic construct
  misc_feature 1..20: note = Description of Artificial Sequence: Synthetic oligonucleotide
  misc_feature 1..20: note = Target: FXN; (-) strand; PAM type: YTN; PAM sequence: CTT
  source 1..20: mol_type = other DNA
ttctttttttttaagatgaa

SEQ ID NO: 26449 - DNA, 20 bp, synthetic construct
  misc_feature 1..20: note = Description of Artificial Sequence: Synthetic oligonucleotide
  misc_feature 1..20: note = Target: FXN; (-) strand; PAM type: YTN; PAM sequence: TTC
  source 1..20: mol_type = other DNA
ttttctttttttttaagatg

SEQ ID NO: 26450 - DNA, 20 bp, synthetic construct
  misc_feature 1..20: note = Description of Artificial Sequence: Synthetic oligonucleotide
  misc_feature 1..20: note = Target: FXN; (-) strand; PAM type: YTN; PAM sequence: TTT
  source 1..20: mol_type = other DNA
cttttctttttttttaagat

SEQ ID NO: 26451 - DNA, 20 bp, synthetic construct
  misc_feature 1..20: note = Description of Artificial Sequence: Synthetic oligonucleotide
  misc_feature 1..20: note = Target: FXN; (-) strand; PAM type: YTN; PAM sequence: TTT
  source 1..20: mol_type = other DNA
tcttttctttttttttaaga

SEQ ID NO: 26452 - DNA, 20 bp, synthetic construct
  misc_feature 1..20: note = Description of Artificial Sequence: Synthetic oligonucleotide
  misc_feature 1..20: note = Target: FXN; (-) strand; PAM type: YTN; PAM sequence: TTT
  source 1..20: mol_type = other DNA
ttcttttctttttttttaag

SEQ ID NO: 26453 - DNA, 20 bp, synthetic construct
  misc_feature 1..20: note = Description of Artificial Sequence: Synthetic oligonucleotide
  misc_feature 1..20: note = Target: FXN; (-) strand; PAM type: YTN; PAM sequence: CTT
  source 1..20: mol_type = other DNA
tttcttttctttttttttaa

SEQ ID NO: 26454 - DNA, 20 bp, synthetic construct
  misc_feature 1..20: note = Description of Artificial Sequence: Synthetic oligonucleotide
  misc_feature 1..20: note = Target: FXN; (-) strand; PAM type: YTN; PAM sequence: TTC
  source 1..20: mol_type = other DNA
ctttttcttttctttttttt

SEQ ID NO: 26455 - DNA, 20 bp, synthetic construct
  misc_feature 1..20: note = Description of Artificial Sequence: Synthetic oligonucleotide
  misc_feature 1..20: note = Target: FXN; (-) strand; PAM type: YTN; PAM sequence: TTT
  source 1..20: mol_type = other DNA
cctttttcttttcttttttt

SEQ ID NO: 26456 - DNA, 20 bp, synthetic construct
  misc_feature 1..20: note = Description of Artificial Sequence: Synthetic oligonucleotide
  misc_feature 1..20: note = Target: FXN; (-) strand; PAM type: YTN; PAM sequence: TTT
  source 1..20: mol_type = other DNA
tcctttttcttttctttttt

SEQ ID NO: 26457 - DNA, 20 bp, synthetic construct
  misc_feature 1..20: note = Description of Artificial Sequence: Synthetic oligonucleotide
  misc_feature 1..20: note = Target: FXN; (-) strand; PAM type: YTN; PAM sequence: TTC
  source 1..20: mol_type = other DNA
attttcctttttcttttctt

SEQ ID NO: 26458 - DNA, 20 bp, synthetic construct
  misc_feature 1..20: note = Description of Artificial Sequence: Synthetic oligonucleotide
  misc_feature 1..20: note = Target: FXN; (-) strand; PAM type: YTN; PAM sequence: TTT
  source 1..20: mol_type = other DNA
cattttcctttttcttttct

SEQ ID NO: 26459 - DNA, 20 bp, synthetic construct
  misc_feature 1..20: note = Description of Artificial Sequence: Synthetic oligonucleotide
  misc_feature 1..20: note = Target: FXN; (-) strand; PAM type: YTN; PAM sequence: CTT
  source 1..20: mol_type = other DNA
tcattttcctttttcttttc

SEQ ID NO: 26460 - DNA, 20 bp, synthetic construct
  misc_feature 1..20: note = Description of Artificial Sequence: Synthetic oligonucleotide
  misc_feature 1..20: note = Target: FXN; (-) strand; PAM type: YTN; PAM sequence: CTC
  source 1..20: mol_type = other DNA
actttcattttcctttttct

SEQ ID NO: 26461 - DNA, 20 bp, synthetic construct
  misc_feature 1..20: note = Description of Artificial Sequence: Synthetic oligonucleotide
  misc_feature 1..20: note = Target: FXN; (-) strand; PAM type: YTN; PAM sequence: CTG
  source 1..20: mol_type = other DNA
tacctcactttcattttcct

SEQ ID NO: 26462 - DNA, 20 bp, synthetic construct
  misc_feature 1..20: note = Description of Artificial Sequence: Synthetic oligonucleotide
  misc_feature 1..20: note = Target: FXN; (-) strand; PAM type: YTN; PAM sequence: TTC
  source 1..20: mol_type = other DNA
tgtacctcactttcattttc

SEQ ID NO: 26463 - DNA, 20 bp, synthetic construct
  misc_feature 1..20: note = Description of Artificial Sequence: Synthetic oligonucleotide
  misc_feature 1..20: note = Target: FXN; (-) strand; PAM type: YTN; PAM sequence: TTT
  source 1..20: mol_type = other DNA
ctgtacctcactttcatttt

SEQ ID NO: 26464 - DNA, 20 bp, synthetic construct
  misc_feature 1..20: note = Description of Artificial Sequence: Synthetic oligonucleotide
  misc_feature 1..20: note = Target: FXN; (-) strand; PAM type: YTN; PAM sequence: CTG
  source 1..20: mol_type = other DNA
tttctgtacctcactttcat

SEQ ID NO: 26465 - DNA, 20 bp, synthetic construct
  misc_feature 1..20: note = Description of Artificial Sequence: Synthetic oligonucleotide
  misc_feature 1..20: note = Target: FXN; (-) strand; PAM type: YTN; PAM sequence: CTG
  source 1..20: mol_type = other DNA
gctgtttctgtacctcactt

SEQ ID NO: 26466 - DNA, 20 bp, synthetic construct
  misc_feature 1..20: note = Description of Artificial Sequence: Synthetic oligonucleotide
  misc_feature 1..20: note = Target: FXN; (-) strand; PAM type: YTN; PAM sequence: CTG
  source 1..20: mol_type = other DNA
taaccaacctggctgtttct

SEQ ID NO: 26467 - DNA, 20 bp, synthetic construct
  misc_feature 1..20: note = Description of Artificial Sequence: Synthetic oligonucleotide
  misc_feature 1..20: note = Target: FXN; (-) strand; PAM type: YTN; PAM sequence: TTA
  source 1..20: mol_type = other DNA
aggcaaacaccaagctgtaa

SEQ ID NO: 26468 - DNA, 20 bp, synthetic construct
  misc_feature 1..20: note = Description of Artificial Sequence: Synthetic oligonucleotide
  misc_feature 1..20: note = Target: FXN; (-) strand; PAM type: YTN; PAM sequence: TTT
  source 1..20: mol_type = other DNA
aaggcaaacaccaagctgta

SEQ ID NO: 26469 - DNA, 20 bp, synthetic construct
  misc_feature 1..20: note = Description of Artificial Sequence: Synthetic oligonucleotide
  misc_feature 1..20: note = Target: FXN; (-) strand; PAM type: YTN; PAM sequence: TTC
  source 1..20: mol_type = other DNA
aaaccaagtttaaggcaaac

SEQ ID NO: 26470 - DNA, 20 bp, synthetic construct
  misc_feature 1..20: note = Description of Artificial Sequence: Synthetic oligonucleotide
  misc_feature 1..20: note = Target: FXN; (-) strand; PAM type: YTN; PAM sequence: CTG
  source 1..20: mol_type = other DNA
ttcaaaccaagtttaaggca

SEQ ID NO: 26471 - DNA, 20 bp, synthetic construct
  misc_feature 1..20: note = Description of Artificial Sequence: Synthetic oligonucleotide
  misc_feature 1..20: note = Target: FXN; (-) strand; PAM type: YTN; PAM sequence: CTA
  source 1..20: mol_type = other DNA
atcaaaggcggccaactgtt

SEQ ID NO: 26472 - DNA, 20 bp, synthetic construct
  misc_feature 1..20: note = Description of Artificial Sequence: Synthetic oligonucleotide
  misc_feature 1..20: note = Target: FXN; (-) strand; PAM type: YTN; PAM sequence: TTG
  source 1..20: mol_type = other DNA
gctaatcaaaggcggccaac

SEQ ID NO: 26473 - DNA, 20 bp, synthetic construct
  misc_feature 1..20: note = Description of Artificial Sequence: Synthetic oligonucleotide
  misc_feature 1..20: note = Target: FXN; (-) strand; PAM type: YTN; PAM sequence: TTT
  source 1..20: mol_type = other DNA
ggctaatcaaaggcggccaa

SEQ ID NO: 26474 - DNA, 20 bp, synthetic construct
  misc_feature 1..20: note = Description of Artificial Sequence: Synthetic oligonucleotide
  misc_feature 1..20: note = Target: FXN; (-) strand; PAM type: YTN; PAM sequence: TTT
  source 1..20: mol_type = other DNA
tggctaatcaaaggcggcca

SEQ ID NO: 26475 - DNA, 20 bp, synthetic construct
  misc_feature 1..20: note = Description of Artificial Sequence: Synthetic oligonucleotide
  misc_feature 1..20: note = Target: FXN; (-) strand; PAM type: YTN; PAM sequence: TTG
  source 1..20: mol_type = other DNA
taccaatcaccgagttttgg

SEQ ID NO: 26476 - DNA, 20 bp, synthetic construct
  misc_feature 1..20: note = Description of Artificial Sequence: Synthetic oligonucleotide
  misc_feature 1..20: note = Target: FXN; (-) strand; PAM type: YTN; PAM sequence: CTT
  source 1..20: mol_type = other DNA
gtaccaatcaccgagttttg

SEQ ID NO: 26477 - DNA, 20 bp, synthetic construct
  misc_feature 1..20: note = Description of Artificial Sequence: Synthetic oligonucleotide
  misc_feature 1..20: note = Target: FXN; (-) strand; PAM type: YTN; PAM sequence: CTC
  source 1..20: mol_type = other DNA
ttgtaccaatcaccgagttt

SEQ ID NO: 26478 - DNA, 20 bp, synthetic construct
  misc_feature 1..20: note = Description of Artificial Sequence: Synthetic oligonucleotide
  misc_feature 1..20: note = Target: FXN; (-) strand; PAM type: YTN; PAM sequence: CTA
  source 1..20: mol_type = other DNA
ctcttgtaccaatcaccgag

SEQ ID NO: 26479 - DNA, 20 bp, synthetic construct
  misc_feature 1..20: note = Description of Artificial Sequence: Synthetic oligonucleotide
  misc_feature 1..20: note = Target: FXN; (-) strand; PAM type: YTN; PAM sequence: CTG
  source 1..20: mol_type = other DNA
caatctactcttgtaccaat

SEQ ID NO: 26480 - DNA, 20 bp, synthetic construct
  misc_feature 1..20: note = Description of Artificial Sequence: Synthetic oligonucleotide
  misc_feature 1..20: note = Target: FXN; (-) strand; PAM type: YTN; PAM sequence: CTG
  source 1..20: mol_type = other DNA
tacatagtgaactgcaatct

SEQ ID NO: 26481 - DNA, 20 bp, synthetic construct
  misc_feature 1..20: note = Description of Artificial Sequence: Synthetic oligonucleotide
  misc_feature 1..20: note = Target: FXN; (-) strand; PAM type: YTN; PAM sequence: CTC
  source 1..20: mol_type = other DNA
tgtacatagtgaactgcaat

SEQ ID NO: 26482 - DNA, 20 bp, synthetic construct
  misc_feature 1..20: note = Description of Artificial Sequence: Synthetic oligonucleotide
  misc_feature 1..20: note = Target: FXN; (-) strand; PAM type: YTN; PAM sequence: TTC
  source 1..20: mol_type = other DNA
tctgtacatagtgaactgca

SEQ ID NO: 26483 - DNA, 20 bp, synthetic construct
  misc_feature 1..20: note = Description of Artificial Sequence: Synthetic oligonucleotide
  misc_feature 1..20: note = Target: FXN; (-) strand; PAM type: YTN; PAM sequence: CTT
  source 1..20: mol_type = other DNA
ctctgtacatagtgaactgc

SEQ ID NO: 26484 - DNA, 20 bp, synthetic construct
  misc_feature 1..20: note = Description of Artificial Sequence: Synthetic oligonucleotide
  misc_feature 1..20: note = Target: FXN; (-) strand; PAM type: YTN; PAM sequence: CTA
  source 1..20: mol_type = other DNA
agggcttctctgtacatagt

SEQ ID NO: 26485 - DNA, 20 bp, synthetic construct
  misc_feature 1..20: note = Description of Artificial Sequence: Synthetic oligonucleotide
  misc_feature 1..20: note = Target: FXN; (-) strand; PAM type: YTN; PAM sequence: TTC
  source 1..20: mol_type = other DNA
ggatctaagggcttctctgt

SEQ ID NO: 26486 - DNA, 20 bp, synthetic construct
  misc_feature 1..20: note = Description of Artificial Sequence: Synthetic oligonucleotide
  misc_feature 1..20: note = Target: FXN; (-) strand; PAM type: YTN; PAM sequence: TTG
  source 1..20: mol_type = other DNA
agttcggatctaagggcttc

SEQ ID NO: 26487 - DNA, 20 bp, synthetic construct
  misc_feature 1..20: note = Description of Artificial Sequence: Synthetic oligonucleotide
  misc_feature 1..20: note = Target: FXN; (-) strand; PAM type: YTN; PAM sequence: TTT
  source 1..20: mol_type = other DNA
gagttcggatctaagggctt

SEQ ID NO: 26488 - DNA, 20 bp, synthetic construct
  misc_feature 1..20: note = Description of Artificial Sequence: Synthetic oligonucleotide
  misc_feature 1..20: note = Target: FXN; (-) strand; PAM type: YTN; PAM sequence: TTT
  source 1..20: mol_type = other DNA
tgagttcggatctaagggct

SEQ ID NO: 26489 - DNA, 20 bp, synthetic construct
  misc_feature 1..20: note = Description of Artificial Sequence: Synthetic oligonucleotide
  misc_feature 1..20: note = Target: FXN; (-) strand; PAM type: YTN; PAM sequence: CTA
  source 1..20: mol_type = other DNA
ttttgagttcggatctaagg

SEQ ID NO: 26490 - DNA, 20 bp, synthetic construct
  misc_feature 1..20: note = Description of Artificial Sequence: Synthetic oligonucleotide
  misc_feature 1..20: note = Target: FXN; (-) strand; PAM type: YTN; PAM sequence: TTA
  source 1..20: mol_type = other DNA
cctattttgagttcggatct

SEQ ID NO: 26491 - DNA, 20 bp, synthetic construct
  misc_feature 1..20: note = Description of Artificial Sequence: Synthetic oligonucleotide
  misc_feature 1..20: note = Target: FXN; (-) strand; PAM type: YTN; PAM sequence: CTT
  source 1..20: mol_type = other DNA
acctattttgagttcggatc

SEQ ID NO: 26492 - DNA, 20 bp, synthetic construct
  misc_feature 1..20: note = Description of Artificial Sequence: Synthetic oligonucleotide
  misc_feature 1..20: note = Target: FXN; (-) strand; PAM type: YTN; PAM sequence: CTC
  source 1..20: mol_type = other DNA
cttacctattttgagttcgg

SEQ ID NO: 26493 - DNA, 20 bp, synthetic construct
  misc_feature 1..20: note = Description of Artificial Sequence: Synthetic oligonucleotide
  misc_feature 1..20: note = Target: FXN; (-) strand; PAM type: YTN; PAM sequence: CTG
  source 1..20: mol_type = other DNA
cctccttacctattttgagt

SEQ ID NO: 26494 - DNA, 20 bp, synthetic construct
  misc_feature 1..20: note = Description of Artificial Sequence: Synthetic oligonucleotide
  misc_feature 1..20: note = Target: FXN; (-) strand; PAM type: YTN; PAM sequence: CTA
  source 1..20: mol_type = other DNA
aaactgcctccttacctatt

SEQ ID NO: 26495 - DNA, 20 bp, synthetic construct
  misc_feature 1..20: note = Description of Artificial Sequence: Synthetic oligonucleotide
  misc_feature 1..20: note = Target: FXN; (-) strand; PAM type: YTN; PAM sequence: TTA
  source 1..20: mol_type = other DNA
agtgtagctaaaactgcctc

SEQ ID NO: 26496 - DNA, 20 bp, synthetic construct
  misc_feature 1..20: note = Description of Artificial Sequence: Synthetic oligonucleotide
  misc_feature 1..20: note = Target: FXN; (-) strand; PAM type: YTN; PAM sequence: CTT
  source 1..20: mol_type = other DNA
aagtgtagctaaaactgcct

SEQ ID NO: 26497 - DNA, 20 bp, synthetic construct
  misc_feature 1..20: note = Description of Artificial Sequence: Synthetic oligonucleotide
  misc_feature 1..20: note = Target: FXN; (-) strand; PAM type: YTN; PAM sequence: TTA
  source 1..20: mol_type = other DNA
acttaagtgtagctaaaact

SEQ ID NO: 26498 - DNA, 20 bp, synthetic construct
  misc_feature 1..20: note = Description of Artificial Sequence: Synthetic oligonucleotide
  misc_feature 1..20: note = Target: FXN; (-) strand; PAM type: YTN; PAM sequence: CTG
  source 1..20: mol_type = other DNA
agtatgttaacttaagtgta

SEQ ID NO: 26499 - DNA, 20 bp, synthetic construct
  misc_feature 1..20: note = Description of Artificial Sequence: Synthetic oligonucleotide
  misc_feature 1..20: note = Target: FXN; (-) strand; PAM type: YTN; PAM sequence: CTC
  source 1..20: mol_type = other DNA
ctgagtatgttaacttaagt

SEQ ID NO: 26500 - DNA, 20 bp, synthetic construct
  misc_feature 1..20: note = Description of Artificial Sequence: Synthetic oligonucleotide
  misc_feature 1..20: note = Target: FXN; (-) strand; PAM type: YTN; PAM sequence: CTG
  source 1..20: mol_type = other DNA
gaatggtactcctgagtatg

SEQ ID NO: 26501 - DNA, 20 bp, synthetic construct
  misc_feature 1..20: note = Description of Artificial Sequence: Synthetic oligonucleotide
  misc_feature 1..20: note = Target: FXN; (-) strand; PAM type: YTN; PAM sequence: TTG
  source 1..20: mol_type = other DNA
aagctggaatggtactcctg

SEQ ID NO: 26502 - DNA, 20 bp, synthetic construct
  misc_feature 1..20: note = Description of Artificial Sequence: Synthetic oligonucleotide
  misc_feature 1..20: note = Target: FXN; (-) strand; PAM type: YTN; PAM sequence: CTT
  source 1..20: mol_type = other DNA
gaagctggaatggtactcct

SEQ ID NO: 26503 - DNA, 20 bp, synthetic construct
  misc_feature 1..20: note = Description of Artificial Sequence: Synthetic oligonucleotide
  misc_feature 1..20: note = Target: FXN; (-) strand; PAM type: YTN; PAM sequence: TTC
  source 1..20: mol_type = other DNA
cagcttgaagctggaatggt

SEQ ID NO: 26504 - DNA, 20 bp, synthetic construct
  misc_feature 1..20: note = Description of Artificial Sequence: Synthetic oligonucleotide
  misc_feature 1..20: note = Target: FXN; (-) strand; PAM type: YTN; PAM sequence: CTT
  source 1..20: mol_type = other DNA
ccagcttgaagctggaatgg

SEQ ID NO: 26505 - DNA, 20 bp, synthetic construct
  misc_feature 1..20: note = Description of Artificial Sequence: Synthetic oligonucleotide
  misc_feature 1..20: note = Target: FXN; (-) strand; PAM type: YTN; PAM sequence: CTG
  source 1..20: mol_type = other DNA
cagacacttccagcttgaag

SEQ ID NO: 26506 - DNA, 20 bp, synthetic construct
  misc_feature 1..20: note = Description of Artificial Sequence: Synthetic oligonucleotide
  misc_feature 1..20: note = Target: FXN; (-) strand; PAM type: YTN; PAM sequence: CTC
  source 1..20: mol_type = other DNA
agggggctgcagacacttcc

SEQ ID NO: 26507 - DNA, 20 bp, synthetic construct
  misc_feature 1..20: note = Description of Artificial Sequence: Synthetic oligonucleotide
  misc_feature 1..20: note = Target: FXN; (-) strand; PAM type: YTN; PAM sequence: TTA
  source 1..20: mol_type = other DNA
agtggtctcagggggctgca

SEQ ID NO: 26508 - DNA, 20 bp, synthetic construct
  misc_feature 1..20: note = Description of Artificial Sequence: Synthetic oligonucleotide
  misc_feature 1..20: note = Target: FXN; (-) strand; PAM type: YTN; PAM sequence: TTG
  source 1..20: mol_type = other DNA
ggattaagtggtctcagggg

SEQ ID NO: 26509 - DNA, 20 bp, synthetic construct
  misc_feature 1..20: note = Description of Artificial Sequence: Synthetic oligonucleotide
  misc_feature 1..20: note = Target: FXN; (-) strand; PAM type: YTN; PAM sequence: CTT
  source 1..20: mol_type = other DNA
gggattaagtggtctcaggg

SEQ ID NO: 26510 - DNA, 20 bp, synthetic construct
  misc_feature 1..20: note = Description of Artificial Sequence: Synthetic oligonucleotide
  misc_feature 1..20: note = Target: FXN; (-) strand; PAM type: YTN; PAM sequence: TTA
  source 1..20: mol_type = other DNA
acttgggattaagtggtctc

SEQ ID NO: 26511 - DNA, 20 bp, synthetic construct
  misc_feature 1..20: note = Description of Artificial Sequence: Synthetic oligonucleotide
  misc_feature 1..20: note = Target: FXN; (-) strand; PAM type: YTN; PAM sequence: TTT
  source 1..20: mol_type = other DNA
aacttgggattaagtggtct

SEQ ID NO: 26512 - DNA, 20 bp, synthetic construct
  misc_feature 1..20: note = Description of Artificial Sequence: Synthetic oligonucleotide
  misc_feature 1..20: note = Target: FXN; (-) strand; PAM type: YTN; PAM sequence: TTT
  source 1..20: mol_type = other DNA
taacttgggattaagtggtc

SEQ ID NO: 26513 - DNA, 20 bp, synthetic construct
  misc_feature 1..20: note = Description of Artificial Sequence: Synthetic oligonucleotide
  misc_feature 1..20: note = Target: FXN; (-) strand; PAM type: YTN; PAM sequence: TTT
  source 1..20: mol_type = other DNA
ttaacttgggattaagtggt

SEQ ID NO: 26514 - DNA, 20 bp, synthetic construct
  misc_feature 1..20: note = Description of Artificial Sequence: Synthetic oligonucleotide
  misc_feature 1..20: note = Target: FXN; (-) strand; PAM type: YTN; PAM sequence: CTG
  source 1..20: mol_type = other DNA
agcaggggtttttaacttgg

SEQ ID NO: 26515 - DNA, 20 bp, synthetic construct
  misc_feature 1..20: note = Description of Artificial Sequence: Synthetic oligonucleotide
  misc_feature 1..20: note = Target: FXN; (-) strand; PAM type: YTN; PAM sequence: CTC
  source 1..20: mol_type = other DNA
tgagcaggggtttttaactt

SEQ ID NO: 26516 - DNA, 20 bp, synthetic construct
  misc_feature 1..20: note = Description of Artificial Sequence: Synthetic oligonucleotide
  misc_feature 1..20: note = Target: FXN; (-) strand; PAM type: YTN; PAM sequence: CTG
  source 1..20: mol_type = other DNA
cctctgagcaggggttttta

SEQ ID NO: 26517 - DNA, 20 bp, synthetic construct
  misc_feature 1..20: note = Description of Artificial Sequence: Synthetic oligonucleotide
  misc_feature 1..20: note = Target: FXN; (-) strand; PAM type: YTN; PAM sequence: CTC
  source 1..20: mol_type = other DNA
aaaaaaaaaaaaaaaaaaaa

SEQ ID NO: 26518 - DNA, 20 bp, synthetic construct
  misc_feature 1..20: note = Description of Artificial Sequence: Synthetic oligonucleotide
  misc_feature 1..20: note = Target: FXN; (-) strand; PAM type: YTN; PAM sequence: CTC
  source 1..20: mol_type = other DNA
tcaaaaaaaaaaaaaaaaaa

SEQ ID NO: 26519 - DNA, 20 bp, synthetic construct
  misc_feature 1..20: note = Description of Artificial Sequence: Synthetic oligonucleotide
  misc_feature 1..20: note = Target: FXN; (-) strand; PAM type: YTN; PAM sequence: CTC
  source 1..20: mol_type = other DNA
tctcaaaaaaaaaaaaaaaa

SEQ ID NO: 26520 - DNA, 20 bp, synthetic construct
  misc_feature 1..20: note = Description of Artificial Sequence: Synthetic oligonucleotide
  misc_feature 1..20: note = Target: FXN; (-) strand; PAM type: YTN; PAM sequence: CTG
  source 1..20: mol_type = other DNA
ggtgacagagtgagatctct

SEQ ID NO: 26521 - DNA, 20 bp, synthetic construct
  misc_feature 1..20: note = Description of Artificial Sequence: Synthetic oligonucleotide
  misc_feature 1..20: note = Target: FXN; (-) strand; PAM type: YTN; PAM sequence: CTC
  source 1..20: mol_type = other DNA
cagcctgggtgacagagtga

SEQ ID NO: 26522 - DNA, 20 bp, synthetic construct
  misc_feature 1..20: note = Description of Artificial Sequence: Synthetic oligonucleotide
  misc_feature 1..20: note = Target: FXN; (-) strand; PAM type: YTN; PAM sequence: CTG
  source 1..20: mol_type = other DNA
cactccagcctgggtgacag

SEQ ID NO: 26523 - DNA, 20 bp, synthetic construct
  misc_feature 1..20: note = Description of Artificial Sequence: Synthetic oligonucleotide
  misc_feature 1..20: note = Target: FXN; (-) strand; PAM type: YTN; PAM sequence: CTG
  source 1..20: mol_type = other DNA
agatcgtgccactgcactcc

SEQ ID NO: 26524 - DNA, 20 bp, synthetic construct
  misc_feature 1..20: note = Description of Artificial Sequence: Synthetic oligonucleotide
  misc_feature 1..20: note = Target: FXN; (-) strand; PAM type: YTN; PAM sequence: TTG
  source 1..20: mol_type = other DNA
cagtgagctgagatcgtgcc

SEQ ID NO: 26525 - DNA, 20 bp, synthetic construct
  misc_feature 1..20: note = Description of Artificial Sequence: Synthetic oligonucleotide
  misc_feature 1..20: note = Target: FXN; (-) strand; PAM type: YTN; PAM sequence: TTG
  source 1..20: mol_type = other DNA
agcccaggaggtggtggttg

SEQ ID NO: 26526 - DNA, 20 bp, synthetic construct
  misc_feature 1..20: note = Description of Artificial Sequence: Synthetic oligonucleotide
  misc_feature 1..20: note = Target: FXN; (-) strand; PAM type: YTN; PAM sequence: CTT
  source 1..20: mol_type = other DNA
gagcccaggaggtggtggtt

SEQ ID NO: 26527 - DNA, 20 bp, synthetic construct
  misc_feature 1..20: note = Description of Artificial Sequence: Synthetic oligonucleotide
  misc_feature 1..20: note = Target: FXN; (-) strand; PAM type: YTN; PAM sequence: CTG
  source 1..20: mol_type = other DNA
aggcaagagaatcccttgag

SEQ ID NO: 26528 - DNA, 20 bp, synthetic construct
  misc_feature 1..20: note = Description of Artificial Sequence: Synthetic oligonucleotide
  misc_feature 1..20: note = Target: FXN; (-) strand; PAM type: YTN; PAM sequence: CTC
  source 1..20: mol_type = other DNA
gggagactgaggcaagagaa

SEQ ID NO: 26529 - DNA, 20 bp, synthetic construct
  misc_feature 1..20: note = Description of Artificial Sequence: Synthetic oligonucleotide
  misc_feature 1..20: note = Target: FXN; (-) strand; PAM type: YTN; PAM sequence: TTA
  source 1..20: mol_type = other DNA
ctcgggagactgaggcaaga

SEQ ID NO: 26530 - DNA, 20 bp, synthetic construct
  misc_feature 1..20: note = Description of Artificial Sequence: Synthetic oligonucleotide
  misc_feature 1..20: note = Target: FXN; (-) strand; PAM type: YTN; PAM sequence: CTG
  source 1..20: mol_type = other DNA
taatcccagttactcgggag

SEQ ID NO: 26531 - DNA, 20 bp, synthetic construct
  misc_feature 1..20: note = Description of Artificial Sequence: Synthetic oligonucleotide
  misc_feature 1..20: note = Target: FXN; (-) strand; PAM type: YTN; PAM sequence: CTG
  source 1..20: mol_type = other DNA
gacatagtggcacgcgcctg

SEQ ID NO: 26532 - DNA, 20 bp, synthetic construct
  misc_feature 1..20: note = Description of Artificial Sequence: Synthetic oligonucleotide
  misc_feature 1..20: note = Target: FXN; (-) strand; PAM type: YTN; PAM sequence: TTA
  source 1..20: mol_type = other DNA
gctggacatagtggcacgcg

SEQ ID NO: 26533 - DNA, 20 bp, synthetic construct
  misc_feature 1..20: note = Description of Artificial Sequence: Synthetic oligonucleotide
  misc_feature 1..20: note = Target: FXN; (-) strand; PAM type: YTN; PAM sequence: CTA
  source 1..20: mol_type = other DNA
aaaatacaaaaaaaaaaatt

SEQ ID NO: 26534 - DNA, 20 bp, synthetic construct
  misc_feature 1..20: note = Description of Artificial Sequence: Synthetic oligonucleotide
  misc_feature 1..20: note = Target: FXN; (-) strand; PAM type: YTN; PAM sequence: CTA
  source 1..20: mol_type = other DNA
ctaaaaatacaaaaaaaaaa

SEQ ID NO: 26535 - DNA, 20 bp, synthetic construct
  misc_feature 1..20: note = Description of Artificial Sequence: Synthetic oligonucleotide
  misc_feature 1..20: note = Target: FXN; (-) strand; PAM type: YTN; PAM sequence: CTC
  source 1..20: mol_type = other DNA
tactaaaaatacaaaaaaaa

SEQ ID NO: 26536 - DNA, 20 bp, synthetic construct
  misc_feature 1..20: note = Description of Artificial Sequence: Synthetic oligonucleotide
  misc_feature 1..20: note = Target: FXN; (-) strand; PAM type: YTN; PAM sequence: TTC
  source 1..20: mol_type = other DNA
aagaccagccaggccaacat

SEQ ID NO: 26537 - DNA, 20 bp, synthetic construct
  misc_feature 1..20: note = Description of Artificial Sequence: Synthetic oligonucleotide
  misc_feature 1..20: note = Target: FXN; (-) strand; PAM type: YTN; PAM sequence: TTG
  source 1..20: mol_type = other DNA
aggtcaagagttcaagacca

SEQ ID NO: 26538 - DNA, 20 bp, synthetic construct
  misc_feature 1..20: note = Description of Artificial Sequence: Synthetic oligonucleotide
  misc_feature 1..20: note = Target: FXN; (-) strand; PAM type: YTN; PAM sequence: CTT
  source 1..20: mol_type = other DNA
gaggtcaagagttcaagacc

SEQ ID NO: 26539 - DNA, 20 bp, synthetic construct
  misc_feature 1..20: note = Description of Artificial Sequence: Synthetic oligonucleotide
  misc_feature 1..20: note = Target: FXN; (-) strand; PAM type: YTN; PAM sequence: CTG
  source 1..20: mol_type = other DNA
aggccagtggatcacttgag

SEQ ID NO: 26540 - DNA, 20 bp, synthetic construct
  misc_feature 1..20: note = Description of Artificial Sequence: Synthetic oligonucleotide
  misc_feature 1..20: note = Target: FXN; (-) strand; PAM type: YTN; PAM sequence: TTG
  source 1..20: mol_type = other DNA
ggaggctgaggccagtggat

SEQ ID NO: 26541 - DNA, 20 bp, synthetic construct
  misc_feature 1..20: note = Description of Artificial Sequence: Synthetic oligonucleotide
  misc_feature 1..20: note = Target: FXN; (-) strand; PAM type: YTN; PAM sequence: TTT
  source 1..20: mol_type = other DNA
gggaggctgaggccagtgga

SEQ ID NO: 26542 - DNA, 20 bp, synthetic construct
  misc_feature 1..20: note = Description of Artificial Sequence: Synthetic oligonucleotide
  misc_feature 1..20: note = Target: FXN; (-) strand; PAM type: YTN; PAM sequence: CTT
  source 1..20: mol_type = other DNA
tgggaggctgaggccagtgg

SEQ ID NO: 26543 - DNA, 20 bp, synthetic construct
  misc_feature 1..20: note = Description of Artificial Sequence: Synthetic oligonucleotide
  misc_feature 1..20: note = Target: FXN; (-) strand; PAM type: YTN; PAM sequence: CTA
  source 1..20: mol_type = other DNA
atgccagcactttgggaggc

SEQ ID NO: 26544 - DNA, 20 bp, synthetic construct
  misc_feature 1..20: note = Description of Artificial Sequence: Synthetic oligonucleotide
  misc_feature 1..20: note = Target: FXN; (-) strand; PAM type: YTN; PAM sequence: CTC
  source 1..20: mol_type = other DNA
taatgccagcactttgggag

SEQ ID NO: 26545 - DNA, 20 bp, synthetic construct
  misc_feature 1..20: note = Description of Artificial Sequence: Synthetic oligonucleotide
  misc_feature 1..20: note = Target: FXN; (-) strand; PAM type: YTN; PAM sequence: CTC
  source 1..20: mol_type = other DNA
acacctctaatgccagcact

SEQ ID NO: 26546 - DNA, 20 bp, synthetic construct
  misc_feature 1..20: note = Description of Artificial Sequence: Synthetic oligonucleotide
  misc_feature 1..20: note = Target: FXN; (-) strand; PAM type: YTN; PAM sequence: CTG
  source 1..20: mol_type = other DNA
ggccaggaacagtgactcac

SEQ ID NO: 26547 - DNA, 20 bp, synthetic construct
  misc_feature 1..20: note = Description of Artificial Sequence: Synthetic oligonucleotide
  misc_feature 1..20: note = Target: FXN; (-) strand; PAM type: YTN; PAM sequence: CTC
  source 1..20: mol_type = other DNA
actgggccaggaacagtgac

SEQ ID NO: 26548 - DNA, 20 bp, synthetic construct
  misc_feature 1..20: note = Description of Artificial Sequence: Synthetic oligonucleotide
  misc_feature 1..20: note = Target: FXN; (-) strand; PAM type: YTN; PAM sequence: CTC
  source 1..20: mol_type = other DNA
catatccaatgagatggtgc

SEQ ID NO: 26549 - DNA, 20 bp, synthetic construct
  misc_feature 1..20: note = Description of Artificial Sequence: Synthetic oligonucleotide
  misc_feature 1..20: note = Target: FXN; (-) strand; PAM type: YTN; PAM sequence: TTG
  source 1..20: mol_type = other DNA
tctccatatccaatgagatg

SEQ ID NO: 26550 - DNA, 20 bp, synthetic construct
  misc_feature 1..20: note = Description of Artificial Sequence: Synthetic oligonucleotide
  misc_feature 1..20: note = Target: FXN; (-) strand; PAM type: YTN; PAM sequence: TTT
  source 1..20: mol_type = other DNA
gtctccatatccaatgagat

SEQ ID NO: 26551 - DNA, 20 bp, synthetic construct
  misc_feature 1..20: note = Description of Artificial Sequence: Synthetic oligonucleotide
  misc_feature 1..20: note = Target: FXN; (-) strand; PAM type: YTN; PAM sequence: CTT
  source 1..20: mol_type = other DNA
tgtctccatatccaatgaga

SEQ ID NO: 26552 - DNA, 20 bp, synthetic construct
  misc_feature 1..20: note = Description of Artificial Sequence: Synthetic oligonucleotide
  misc_feature 1..20: note = Target: FXN; (-) strand; PAM type: YTN; PAM sequence: CTA
  source 1..20: mol_type = other DNA
agccagatcctttgtctcca

SEQ ID NO: 26553 - DNA, 20 bp, synthetic construct
  misc_feature 1..20: note = Description of Artificial Sequence: Synthetic oligonucleotide
  misc_feature 1..20: note = Target: FXN; (-) strand; PAM type: YTN; PAM sequence: TTG
  source 1..20: mol_type = other DNA
gaaagaaaatacaaatccag

SEQ ID NO: 26554 - DNA, 20 bp, synthetic construct
  misc_feature 1..20: note = Description of Artificial Sequence: Synthetic oligonucleotide
  misc_feature 1..20: note = Target: FXN; (-) strand; PAM type: YTN; PAM sequence: CTT
  source 1..20: mol_type = other DNA
ggaaagaaaatacaaatcca

SEQ ID NO: 26555 - DNA, 20 bp, synthetic construct
  misc_feature 1..20: note = Description of Artificial Sequence: Synthetic oligonucleotide
  misc_feature 1..20: note = Target: FXN; (-) strand; PAM type: YTN; PAM sequence: CTC
  source 1..20: mol_type = other DNA
ttggaaagaaaatacaaatc

SEQ ID NO: 26556 - DNA, 20 bp, synthetic construct
  misc_feature 1..20: note = Description of Artificial Sequence: Synthetic oligonucleotide
  misc_feature 1..20: note = Target: FXN; (-) strand; PAM type: YTN; PAM sequence: TTA
  source 1..20: mol_type = other DNA
aggactcttggaaagaaaat

SEQ ID NO: 26557 - DNA, 20 bp, synthetic construct
  misc_feature 1..20: note = Description of Artificial Sequence: Synthetic oligonucleotide
  misc_feature 1..20: note = Target: FXN; (-) strand; PAM type: YTN; PAM sequence: CTT
  source 1..20: mol_type = other DNA
aaggactcttggaaagaaaa

SEQ ID NO: 26558 - DNA, 20 bp, synthetic construct
  misc_feature 1..20: note = Description of Artificial Sequence: Synthetic oligonucleotide
  misc_feature 1..20: note = Target: FXN; (-) strand; PAM type: YTN; PAM sequence: TTA
  source 1..20: mol_type = other DNA
gatatcacttaaggactctt

SEQ ID NO: 26559 - DNA, 20 bp, synthetic construct
  misc_feature 1..20: note = Description of Artificial Sequence: Synthetic oligonucleotide
  misc_feature 1..20: note = Target: FXN; (-) strand; PAM type: YTN; PAM sequence: CTC
  source 1..20: mol_type = other DNA
gcaaaagttagatatcactt

SEQ ID NO: 26560 - DNA, 20 bp, synthetic construct
  misc_feature 1..20: note = Description of Artificial Sequence: Synthetic oligonucleotide
  misc_feature 1..20: note = Target: FXN; (-) strand; PAM type: YTN; PAM sequence: CTG
  source 1..20: mol_type = other DNA
cagctcgcaaaagttagata

SEQ ID NO: 26561 - DNA, 20 bp, synthetic construct
  misc_feature 1..20: note = Description of Artificial Sequence: Synthetic oligonucleotide
  misc_feature 1..20: note = Target: FXN; (-) strand; PAM type: YTN; PAM sequence: CTG
  source 1..20: mol_type = other DNA
aggaaactgcagctcgcaaa

SEQ ID NO: 26562 - DNA, 20 bp, synthetic construct
  misc_feature 1..20: note = Description of Artificial Sequence: Synthetic oligonucleotide
  misc_feature 1..20: note = Target: FXN; (-) strand; PAM type: YTN; PAM sequence: CTC
  source 1..20: mol_type = other DNA
atagctgaggaaactgcagc

SEQ ID NO: 26563 - DNA, 20 bp, synthetic construct
  misc_feature 1..20: note = Description of Artificial Sequence: Synthetic oligonucleotide
  misc_feature 1..20: note = Target: FXN; (-) strand; PAM type: YTN; PAM sequence: CTC
  source 1..20: mol_type = other DNA
atctcatagctgaggaaact

SEQ ID NO: 26564 - DNA, 20 bp, synthetic construct
  misc_feature 1..20: note = Description of Artificial Sequence: Synthetic oligonucleotide
  misc_feature 1..20: note = Target: FXN; (-) strand; PAM type: YTN; PAM sequence: TTA
  source 1..20: mol_type = other DNA
atgtcactcatctcatagct

SEQ ID NO: 26565 - DNA, 20 bp, synthetic construct
  misc_feature 1..20: note = Description of Artificial Sequence: Synthetic oligonucleotide
  misc_feature 1..20: note = Target: FXN; (-) strand; PAM type: YTN; PAM sequence: CTG
  source 1..20: mol_type = other DNA
aagagaggaggttaatgtca

SEQ ID NO: 26566 - DNA, 20 bp, synthetic construct
  misc_feature 1..20: note = Description of Artificial Sequence: Synthetic oligonucleotide
  misc_feature 1..20: note = Target: FXN; (-) strand; PAM type: YTN; PAM sequence: TTA
  source 1..20: mol_type = other DNA
taaatctgaagagaggaggt

SEQ ID NO: 26567 - DNA, 20 bp, synthetic construct
  misc_feature 1..20: note = Description of Artificial Sequence: Synthetic oligonucleotide
  misc_feature 1..20: note = Target: FXN; (-) strand; PAM type: YTN; PAM sequence: CTT
  source 1..20: mol_type = other DNA
ataaatctgaagagaggagg

SEQ ID NO: 26568 - DNA, 20 bp, synthetic construct
  misc_feature 1..20: note = Description of Artificial Sequence: Synthetic oligonucleotide
  misc_feature 1..20: note = Target: FXN; (-) strand; PAM type: YTN; PAM sequence: CTC
  source 1..20: mol_type = other DNA
ttataaatctgaagagagga

SEQ ID NO: 26569 - DNA, 20 bp, synthetic construct
  misc_feature 1..20: note = Description of Artificial Sequence: Synthetic oligonucleotide
  misc_feature 1..20: note = Target: FXN; (-) strand; PAM type: YTN; PAM sequence: TTG
  source 1..20: mol_type = other DNA
atcctcttataaatctgaag

SEQ ID NO: 26570 - DNA, 20 bp, synthetic construct
  misc_feature 1..20: note = Description of Artificial Sequence: Synthetic oligonucleotide
  misc_feature 1..20: note = Target: FXN; (-) strand; PAM type: YTN; PAM sequence: TTA
  source 1..20: mol_type = other DNA
attgatcctcttataaatct

SEQ ID NO: 26571 - DNA, 20 bp, synthetic construct
  misc_feature 1..20: note = Description of Artificial Sequence: Synthetic oligonucleotide
  misc_feature 1..20: note = Target: FXN; (-) strand; PAM type: YTN; PAM sequence: TTT
  source 1..20: mol_type = other DNA
aattgatcctcttataaatc

SEQ ID NO: 26572 - DNA, 20 bp, synthetic construct
  misc_feature 1..20: note = Description of Artificial Sequence: Synthetic oligonucleotide
  misc_feature 1..20: note = Target: FXN; (-) strand; PAM type: YTN; PAM sequence: TTT
  source 1..20: mol_type = other DNA
taattgatcctcttataaat

SEQ ID NO: 26573 - DNA, 20 bp, synthetic construct
  misc_feature 1..20: note = Description of Artificial Sequence: Synthetic oligonucleotide
  misc_feature 1..20: note = Target: FXN; (-) strand; PAM type: YTN; PAM sequence: CTA
  source 1..20: mol_type = other DNA
tgccattttaattgatcctc

SEQ ID NO: 26574 - DNA, 20 bp, synthetic construct
  misc_feature 1..20: note = Description of Artificial Sequence: Synthetic oligonucleotide
  misc_feature 1..20: note = Target: FXN; (-) strand; PAM type: YTN; PAM sequence: TTA
  source 1..20: mol_type = other DNA
cctatgccattttaattgat

SEQ ID NO: 26575 - DNA, 20 bp, synthetic construct
  misc_feature 1..20: note = Description of Artificial Sequence: Synthetic oligonucleotide
  misc_feature 1..20: note = Target: FXN; (-) strand; PAM type: YTN; PAM sequence: TTT
  source 1..20: mol_type = other DNA
acctatgccattttaattga

SEQ ID NO: 26576 - DNA, 20 bp, synthetic construct
  misc_feature 1..20: note = Description of Artificial Sequence: Synthetic oligonucleotide
  misc_feature 1..20: note = Target: FXN; (-) strand; PAM type: YTN; PAM sequence: TTT
  source 1..20: mol_type = other DNA
tacctatgccattttaattg

SEQ ID NO: 26577 - DNA, 20 bp, synthetic construct
  misc_feature 1..20: note = Description of Artificial Sequence: Synthetic oligonucleotide
  misc_feature 1..20: note = Target: FXN; (-) strand; PAM type: YTN; PAM sequence: CTT
  source 1..20: mol_type = other DNA
ttacctatgccattttaatt

SEQ ID NO: 26578 - DNA, 20 bp, synthetic construct
  misc_feature 1..20: note = Description of Artificial Sequence: Synthetic oligonucleotide
  misc_feature 1..20: note = Target: FXN; (-) strand; PAM type: YTN; PAM sequence: CTA
  source 1..20: mol_type = other DNA
ggatgcacttttacctatgc

SEQ ID NO: 26579 - DNA, 20 bp, synthetic construct
  misc_feature 1..20: note = Description of Artificial Sequence: Synthetic oligonucleotide
  misc_feature 1..20: note = Target: FXN; (-) strand; PAM type: YTN; PAM sequence: TTG
  source 1..20: mol_type = other DNA
ctaggatgcacttttaccta

SEQ ID NO: 26580 - DNA, 20 bp, synthetic construct
  misc_feature 1..20: note = Description of Artificial Sequence: Synthetic oligonucleotide
  misc_feature 1..20: note = Target: FXN; (-) strand; PAM type: YTN; PAM sequence: CTT
  source 1..20: mol_type = other DNA
gctaggatgcacttttacct

SEQ ID NO: 26581 - DNA, 20 bp, synthetic construct
  misc_feature 1..20: note = Description of Artificial Sequence: Synthetic oligonucleotide
  misc_feature 1..20: note = Target: FXN; (-) strand; PAM type: YTN; PAM sequence: CTA
  source 1..20: mol_type = other DNA
aagtagataccaacttgcta

SEQ ID NO: 26582 - DNA, 20 bp, synthetic construct
  misc_feature 1..20: note = Description of Artificial Sequence: Synthetic oligonucleotide
  misc_feature 1..20: note = Target: FXN; (-) strand; PAM type: YTN; PAM sequence: TTC
  source 1..20: mol_type = other DNA
taaagtagataccaacttgc

SEQ ID NO: 26583 - DNA, 20 bp, synthetic construct
  misc_feature 1..20: note = Description of Artificial Sequence: Synthetic oligonucleotide
  misc_feature 1..20: note = Target: FXN; (-) strand; PAM type: YTN; PAM sequence: TTT
  source 1..20: mol_type = other DNA
ctaaagtagataccaacttg

SEQ ID NO: 26584 - DNA, 20 bp, synthetic construct
  misc_feature 1..20: note = Description of Artificial Sequence: Synthetic oligonucleotide
  misc_feature 1..20: note = Target: FXN; (-) strand; PAM type: YTN; PAM sequence: TTC
  source 1..20: mol_type = other DNA
atttctaaagtagataccaa

SEQ ID NO: 26585 - DNA, 20 bp, synthetic construct
  misc_feature 1..20: note = Description of Artificial Sequence: Synthetic oligonucleotide
  misc_feature 1..20: note = Target: FXN; (-) strand; PAM type: YTN; PAM sequence: CTT
  source 1..20: mol_type = other DNA
catttctaaagtagatacca

SEQ ID NO: 26586 - DNA, 20 bp, synthetic construct
  misc_feature 1..20: note = Description of Artificial Sequence: Synthetic oligonucleotide
  misc_feature 1..20: note = Target: FXN; (-) strand; PAM type: YTN; PAM sequence: CTC
  source 1..20: mol_type = other DNA
cttcatttctaaagtagata

SEQ ID NO: 26587 - DNA, 20 bp, synthetic construct
  misc_feature 1..20: note = Description of Artificial Sequence: Synthetic oligonucleotide
  misc_feature 1..20: note = Target: FXN; (-) strand; PAM type: YTN; PAM sequence: TTC
  source 1..20: mol_type = other DNA
acatacatatgacctccttc

SEQ ID NO: 26588 - DNA, 20 bp, synthetic construct
  misc_feature 1..20: note = Description of Artificial Sequence: Synthetic oligonucleotide
  misc_feature 1..20: note = Target: FXN; (-) strand; PAM type: YTN; PAM sequence: CTT
  source 1..20: mol_type = other DNA
cacatacatatgacctcctt

SEQ ID NO: 26589 - DNA, 20 bp, synthetic construct
  misc_feature 1..20: note = Description of Artificial Sequence: Synthetic oligonucleotide
  misc_feature 1..20: note = Target: FXN; (-) strand; PAM type: YTN; PAM sequence: CTG
  source 1..20: mol_type = other DNA
gagacttcacatacatatga

SEQ ID NO: 26590 - DNA, 20 bp, synthetic construct
  misc_feature 1..20: note = Description of Artificial Sequence: Synthetic oligonucleotide
  misc_feature 1..20: note = Target: FXN; (-) strand; PAM type: YTN; PAM sequence: TTG
  source 1..20: mol_type = other DNA
ggtctggagacttcacatac

SEQ ID NO: 26591 - DNA, 20 bp, synthetic construct
  misc_feature 1..20: note = Description of Artificial Sequence: Synthetic oligonucleotide
  misc_feature 1..20: note = Target: FXN; (-) strand; PAM type: YTN; PAM sequence: TTG
  source 1..20: mol_type = other DNA
tagaaatagacacatataag

SEQ ID NO: 26592 - DNA, 20 bp, synthetic construct
  misc_feature 1..20: note = Description of Artificial Sequence: Synthetic oligonucleotide
  misc_feature 1..20: note = Target: FXN; (-) strand; PAM type: YTN; PAM sequence: CTT
  source 1..20: mol_type = other DNA
gtagaaatagacacatataa

SEQ ID NO: 26593 - DNA, 20 bp, synthetic construct
  misc_feature 1..20: note = Description of Artificial Sequence: Synthetic oligonucleotide
  misc_feature 1..20: note = Target: FXN; (-) strand; PAM type: YTN; PAM sequence: CTC
  source 1..20: mol_type = other DNA
acttgtagaaatagacacat

SEQ ID NO: 26594 - DNA, 20 bp, synthetic construct
  misc_feature 1..20: note = Description of Artificial Sequence: Synthetic oligonucleotide
  misc_feature 1..20: note = Target: FXN; (-) strand; PAM type: YTN; PAM sequence: CTA
  source 1..20: mol_type = other DNA
gctcacttgtagaaatagac

SEQ ID NO: 26595 - DNA, 20 bp, synthetic construct
  misc_feature 1..20: note = Description of Artificial Sequence: Synthetic oligonucleotide
  misc_feature 1..20: note = Target: FXN; (-) strand; PAM type: YTN; PAM sequence: TTG
  source 1..20: mol_type = other DNA
tcactagctcacttgtagaa

SEQ ID NO: 26596 - DNA, 20 bp, synthetic construct
  misc_feature 1..20: note = Description of Artificial Sequence: Synthetic oligonucleotide
  misc_feature 1..20: note = Target: FXN; (-) strand; PAM type: YTN; PAM sequence: CTG
  source 1..20: mol_type = other DNA
ttgtcactagctcacttgta

SEQ ID NO: 26597 - DNA, 20 bp, synthetic construct
  misc_feature 1..20: note = Description of Artificial Sequence: Synthetic oligonucleotide
  misc_feature 1..20: note = Target: FXN; (-) strand; PAM type: YTN; PAM sequence: TTA
  source 1..20: mol_type = other DNA
ctgttgtcactagctcactt

SEQ ID NO: 26598 - DNA, 20 bp, synthetic construct
  misc_feature 1..20: note = Description of Artificial Sequence: Synthetic oligonucleotide
  misc_feature 1..20: note = Target: FXN; (-) strand; PAM type: YTN; PAM sequence: CTA
  source 1..20: mol_type = other DNA
cccatgtaggagcaaaaata

SEQ ID NO: 26599 - DNA, 20 bp, synthetic construct
  misc_feature 1..20: note = Description of Artificial Sequence: Synthetic oligonucleotide
  misc_feature 1..20: note = Target: FXN; (-) strand; PAM type: YTN; PAM sequence: CTA
  source 1..20: mol_type = other DNA
gtcaagatcagccctaccca

SEQ ID NO: 26600 - DNA, 20 bp, synthetic construct
  misc_feature 1..20: note = Description of Artificial Sequence: Synthetic oligonucleotide
  misc_feature 1..20: note = Target: FXN; (-) strand; PAM type: YTN; PAM sequence: CTC
  source 1..20: mol_type = other DNA
ctagtcaagatcagccctac

SEQ ID NO: 26601 - DNA, 20 bp, synthetic construct
  misc_feature 1..20: note = Description of Artificial Sequence: Synthetic oligonucleotide
  misc_feature 1..20: note = Target: FXN; (-) strand; PAM type: YTN; PAM sequence: CTC
  source 1..20: mol_type = other DNA
ctcctagtcaagatcagccc

SEQ ID NO: 26602 - DNA, 20 bp, synthetic construct
  misc_feature 1..20: note = Description of Artificial Sequence: Synthetic oligonucleotide
  misc_feature 1..20: note = Target: FXN; (-) strand; PAM type: YTN; PAM sequence: TTG
  source 1..20: mol_type = other DNA
actcctcctagtcaagatca

SEQ ID NO: 26603 - DNA, 20 bp, synthetic construct
  misc_feature 1..20: note = Description of Artificial Sequence: Synthetic oligonucleotide
  misc_feature 1..20: note = Target: FXN; (-) strand; PAM type: YTN; PAM sequence: TTA
  source 1..20: mol_type = other DNA
ttgactcctcctagtcaaga

SEQ ID NO: 26604 - DNA, 20 bp, synthetic construct
  misc_feature 1..20: note = Description of Artificial Sequence: Synthetic oligonucleotide
  misc_feature 1..20: note = Target: FXN; (-) strand; PAM type: YTN; PAM sequence: CTT
  source 1..20: mol_type = other DNA
attgactcctcctagtcaag

SEQ ID NO: 26605 - DNA, 20 bp, synthetic construct
  misc_feature 1..20: note = Description of Artificial Sequence: Synthetic oligonucleotide
  misc_feature 1..20: note = Target: FXN; (-) strand; PAM type: YTN; PAM sequence: CTG
  source 1..20: mol_type = other DNA
gtgagtcttattgactcctc

SEQ ID NO: 26606 - DNA, 20 bp, synthetic construct
  misc_feature 1..20: note = Description of Artificial Sequence: Synthetic oligonucleotide
  misc_feature 1..20: note = Target: FXN; (-) strand; PAM type: YTN; PAM sequence: TTA
  source 1..20: mol_type = other DNA
caggcgtgagccaccacgcc

SEQ ID NO: 26607 - DNA, 20 bp, synthetic construct
  misc_feature 1..20: note = Description of Artificial Sequence: Synthetic oligonucleotide
  misc_feature 1..20: note = Target: FXN; (-) strand; PAM type: YTN; PAM sequence: CTG
  source 1..20: mol_type = other DNA
ggattacaggcgtgagccac

SEQ ID NO: 26608 - DNA, 20 bp, synthetic construct
  misc_feature 1..20: note = Description of Artificial Sequence: Synthetic oligonucleotide
  misc_feature 1..20: note = Target: FXN; (-) strand; PAM type: YTN; PAM sequence: CTC
  source 1..20: mol_type = other DNA
ccaaagtgctgggattacag

SEQ ID NO: 26609 - DNA, 20 bp, synthetic construct
  misc_feature 1..20: note = Description of Artificial Sequence: Synthetic oligonucleotide
  misc_feature 1..20: note = Target: FXN; (-) strand; PAM type: YTN; PAM sequence: TTG
  source 1..20: mol_type = other DNA
gcctcccaaagtgctgggat

SEQ ID NO: 26610 - DNA, 20 bp, synthetic construct
  misc_feature 1..20: note = Description of Artificial Sequence: Synthetic oligonucleotide
  misc_feature 1..20: note = Target: FXN; (-) strand; PAM type: YTN; PAM sequence: CTT
  source 1..20: mol_type = other DNA
ggcctcccaaagtgctggga

SEQ ID NO: 26611 - DNA, 20 bp, synthetic construct
  misc_feature 1..20: note = Description of Artificial Sequence: Synthetic oligonucleotide
  misc_feature 1..20: note = Target: FXN; (-) strand; PAM type: YTN; PAM sequence: CTC
  source 1..20: mol_type = other DNA
gtgatccgcccgccttggcc

SEQ ID NO: 26612 - DNA, 20 bp, synthetic construct
  misc_feature 1..20: note = Description of Artificial Sequence: Synthetic oligonucleotide
  misc_feature 1..20: note = Target: FXN; (-) strand; PAM type: YTN; PAM sequence: CTG
  source 1..20: mol_type = other DNA
acctcgtgatccgcccgcct

SEQ ID NO: 26613 - DNA, 20 bp, synthetic construct
  misc_feature 1..20: note = Description of Artificial Sequence: Synthetic oligonucleotide
  misc_feature 1..20: note = Target: FXN; (-) strand; PAM type: YTN; PAM sequence: CTC
  source 1..20: mol_type = other DNA
ctgacctcgtgatccgcccg

SEQ ID NO: 26614 - DNA, 20 bp, synthetic construct
  misc_feature 1..20: note = Description of Artificial Sequence: Synthetic oligonucleotide
  misc_feature 1..20: note = Target: FXN; (-) strand; PAM type: YTN; PAM sequence: CTC
  source 1..20: mol_type = other DNA
gatctcctgacctcgtgatc

SEQ ID NO: 26615 - DNA, 20 bp, synthetic construct
  misc_feature 1..20: note = Description of Artificial Sequence: Synthetic oligonucleotide
  misc_feature 1..20: note = Target: FXN; (-) strand; PAM type: YTN; PAM sequence: TTA
  source 1..20: mol_type = other DNA
gccagaatggtctcgatctc

SEQ ID NO: 26616 - DNA, 20 bp, synthetic construct
  misc_feature 1..20: note = Description of Artificial Sequence: Synthetic oligonucleotide
  misc_feature 1..20: note = Target: FXN; (-) strand; PAM type: YTN; PAM sequence: TTC
  source 1..20: mol_type = other DNA
accgtgttagccagaatggt

SEQ ID NO: 26617 - DNA, 20 bp, synthetic construct
  misc_feature 1..20: note = Description of Artificial Sequence: Synthetic oligonucleotide
  misc_feature 1..20: note = Target: FXN; (-) strand; PAM type: YTN; PAM sequence: TTT
  source 1..20: mol_type = other DNA
caccgtgttagccagaatgg

SEQ ID NO: 26618 - DNA, 20 bp, synthetic construct
  misc_feature 1..20: note = Description of Artificial Sequence: Synthetic oligonucleotide
  misc_feature 1..20: note = Target: FXN; (-) strand; PAM type: YTN; PAM sequence: TTA
  source 1..20: mol_type = other DNA
gtagagacggggtttcaccg

SEQ ID NO: 26619 - DNA, 20 bp, synthetic construct
  misc_feature 1..20: note = Description of Artificial Sequence: Synthetic oligonucleotide
  misc_feature 1..20: note = Target: FXN; (-) strand; PAM type: YTN; PAM sequence: TTT
  source 1..20: mol_type = other DNA
agtagagacggggtttcacc

SEQ ID NO: 26620 - DNA, 20 bp, synthetic construct
  misc_feature 1..20: note = Description of Artificial Sequence: Synthetic oligonucleotide
  misc_feature 1..20: note = Target: FXN; (-) strand; PAM type: YTN; PAM sequence: TTT
  source 1..20: mol_type = other DNA
tagtagagacggggtttcac

SEQ ID NO: 26621 - DNA, 20 bp, synthetic construct
  misc_feature 1..20: note = Description of Artificial Sequence: Synthetic oligonucleotide
  misc_feature 1..20: note = Target: FXN; (-) strand; PAM type: YTN; PAM sequence: TTT
  source 1..20: mol_type = other DNA
ttagtagagacggggtttca

SEQ ID NO: 26622 - DNA, 20 bp, synthetic construct
  misc_feature 1..20: note = Description of Artificial Sequence: Synthetic oligonucleotide
  misc_feature 1..20: note = Target: FXN; (-) strand; PAM type: YTN; PAM sequence: TTT
  source 1..20: mol_type = other DNA
tttagtagagacggggtttc

SEQ ID NO: 26623 - DNA, 20 bp, synthetic construct
  misc_feature 1..20: note = Description of Artificial Sequence: Synthetic oligonucleotide
  misc_feature 1..20: note = Target: FXN; (-) strand; PAM type: YTN; PAM sequence: TTT
  source 1..20: mol_type = other DNA
ttttagtagagacggggttt

SEQ ID NO: 26624 - DNA, 20 bp, synthetic construct
  misc_feature 1..20: note = Description of Artificial Sequence: Synthetic oligonucleotide
  misc_feature 1..20: note = Target: FXN; (-) strand; PAM type: YTN; PAM sequence: TTG
  source 1..20: mol_type = other DNA
tatttttttagtagagacgg

SEQ ID NO: 26625 - DNA, 20 bp, synthetic construct
  misc_feature 1..20: note = Description of Artificial Sequence: Synthetic oligonucleotide
  misc_feature 1..20: note = Target: FXN; (-) strand; PAM type: YTN; PAM sequence: TTT
  source 1..20: mol_type = other DNA
gtatttttttagtagagacg

SEQ ID NO: 26626 - DNA, 20 bp, synthetic construct
  misc_feature 1..20: note = Description of Artificial Sequence: Synthetic oligonucleotide
  misc_feature 1..20: note = Target: FXN; (-) strand; PAM type: YTN; PAM sequence: TTT
  source 1..20: mol_type = other DNA
tgtatttttttagtagagac

SEQ ID NO: 26627 - DNA, 20 bp, synthetic construct
  misc_feature 1..20: note = Description of Artificial Sequence: Synthetic oligonucleotide
  misc_feature 1..20: note = Target: FXN; (-) strand; PAM type: YTN; PAM sequence: TTT
  source 1..20: mol_type = other DNA
ttgtatttttttagtagaga

SEQ ID NO: 26628 - DNA, 20 bp, synthetic construct
  misc_feature 1..20: note = Description of Artificial Sequence: Synthetic oligonucleotide
  misc_feature 1..20: note = Target: FXN; (-) strand; PAM type: YTN; PAM sequence: TTT
  source 1..20: mol_type = other DNA
tttgtatttttttagtagag

SEQ ID NO: 26629 - DNA, 20 bp, synthetic construct
  misc_feature 1..20: note = Description of Artificial Sequence: Synthetic oligonucleotide
  misc_feature 1..20: note = Target: FXN; (-) strand; PAM type: YTN; PAM sequence: TTT
  source 1..20: mol_type = other DNA
ttttgtatttttttagtaga

SEQ ID NO: 26630 - DNA, 20 bp, synthetic construct
  misc_feature 1..20: note = Description of Artificial Sequence: Synthetic oligonucleotide
  misc_feature 1..20: note = Target: FXN; (-) strand; PAM type: YTN; PAM sequence: CTA
  source 1..20: mol_type = other DNA
atttttttgtatttttttag

SEQ ID NO: 26631 - DNA, 20 bp, synthetic construct
  misc_feature 1..20: note = Description of Artificial Sequence: Synthetic oligonucleotide
  misc_feature 1..20: note = Target: FXN; (-) strand; PAM type: YTN; PAM sequence: CTA
  source 1..20: mol_type = other DNA
caggcgcccaccaccacgcc

SEQ ID NO: 26632 - DNA, 20 bp, synthetic construct
  misc_feature 1..20: note = Description of Artificial Sequence: Synthetic oligonucleotide
  misc_feature 1..20: note = Target: FXN; (-) strand; PAM type: YTN; PAM sequence: CTG
  source 1..20: mol_type = other DNA
ggactacaggcgcccaccac

SEQ ID NO: 26633 - DNA, 20 bp, synthetic construct
  misc_feature 1..20: note = Description of Artificial Sequence: Synthetic oligonucleotide
  misc_feature 1..20: note = Target: FXN; (-) strand; PAM type: YTN; PAM sequence: TTC
  source 1..20: mol_type = other DNA
ccgagtagctgggactacag

SEQ ID NO: 26634 - DNA, 20 bp, synthetic construct
  misc_feature 1..20: note = Description of Artificial Sequence: Synthetic oligonucleotide
  misc_feature 1..20: note = Target: FXN; (-) strand; PAM type: YTN; PAM sequence: CTT
  source 1..20: mol_type = other DNA
cccgagtagctgggactaca

SEQ ID NO: 26635 - DNA, 20 bp, synthetic construct
  misc_feature 1..20: note = Description of Artificial Sequence: Synthetic oligonucleotide
  misc_feature 1..20: note = Target: FXN; (-) strand; PAM type: YTN; PAM sequence: CTC
  source 1..20: mol_type = other DNA
agcttcccgagtagctggga

SEQ ID NO: 26636 - DNA, 20 bp, synthetic construct
  misc_feature 1..20: note = Description of Artificial Sequence: Synthetic oligonucleotide
  misc_feature 1..20: note = Target: FXN; (-) strand; PAM type: YTN; PAM sequence: CTG
  source 1..20: mol_type = other DNA
cctcagcttcccgagtagct

SEQ ID NO: 26637 - DNA, 20 bp, synthetic construct
  misc_feature 1..20: note = Description of Artificial Sequence: Synthetic oligonucleotide
  misc_feature 1..20: note = Target: FXN; (-) strand; PAM type: YTN; PAM sequence: CTC
  source 1..20: mol_type = other DNA
ctgcctcagcttcccgagta

SEQ ID NO: 26638 - DNA, 20 bp, synthetic construct
  misc_feature 1..20: note = Description of Artificial Sequence: Synthetic oligonucleotide
  misc_feature 1..20: note = Target: FXN; (-) strand; PAM type: YTN; PAM sequence: TTC
  source 1..20: mol_type = other DNA
tcctgcctcagcttcccgag

SEQ ID NO: 26639 - DNA, 20 bp, synthetic construct
  misc_feature 1..20: note = Description of Artificial Sequence: Synthetic oligonucleotide
  misc_feature 1..20: note = Target: FXN; (-) strand; PAM type: YTN; PAM sequence: TTC
  source 1..20: mol_type = other DNA
acgccattctcctgcctcag

SEQ ID NO: 26640 - DNA, 20 bp, synthetic construct
  misc_feature 1..20: note = Description of Artificial Sequence: Synthetic oligonucleotide
  misc_feature 1..20: note = Target: FXN; (-) strand; PAM type: YTN; PAM sequence: CTC
  source 1..20: mol_type = other DNA
ccgggttcacgccattctcc

SEQ ID NO: 26641 - DNA, 20 bp, synthetic construct
  misc_feature 1..20: note = Description of Artificial Sequence: Synthetic oligonucleotide
  misc_feature 1..20: note = Target: FXN; (-) strand; PAM type: YTN; PAM sequence: CTG
  source 1..20: mol_type = other DNA
cctcccgggttcacgccatt

SEQ ID NO: 26642 - DNA, 20 bp, synthetic construct
  misc_feature 1..20: note = Description of Artificial Sequence: Synthetic oligonucleotide
  misc_feature 1..20: note = Target: FXN; (-) strand; PAM type: YTN; PAM sequence: CTC
  source 1..20: mol_type = other DNA
tgcctcccgggttcacgcca

SEQ ID NO: 26643 - DNA, 20 bp, synthetic construct
  misc_feature 1..20: note = Description of Artificial Sequence: Synthetic oligonucleotide
  misc_feature 1..20: note = Target: FXN; (-) strand; PAM type: YTN; PAM sequence: CTG
  source 1..20: mol_type = other DNA
caagctctgcctcccgggtt

SEQ ID NO: 26644 - DNA, 20 bp, synthetic construct
  misc_feature 1..20: note = Description of Artificial Sequence: Synthetic oligonucleotide
  misc_feature 1..20: note = Target: FXN; (-) strand; PAM type: YTN; PAM sequence: TTC
  source 1..20: mol_type = other DNA
actgcaagctctgcctcccg

SEQ ID NO: 26645 - DNA, 20 bp, synthetic construct
  misc_feature 1..20: note = Description of Artificial Sequence: Synthetic oligonucleotide
  misc_feature 1..20: note = Target: FXN; (-) strand; PAM type: YTN; PAM sequence: TTG
  source 1..20: mol_type = other DNA
gttcactgcaagctctgcct

SEQ ID NO: 26646 - DNA, 20 bp, synthetic construct
  misc_feature 1..20: note = Description of Artificial Sequence: Synthetic oligonucleotide
  misc_feature 1..20: note = Target: FXN; (-) strand; PAM type: YTN; PAM sequence: CTT
  source 1..20: mol_type = other DNA
ggttcactgcaagctctgcc

SEQ ID NO: 26647 - DNA, 20 bp, synthetic construct
  misc_feature 1..20: note = Description of Artificial Sequence: Synthetic oligonucleotide
  misc_feature 1..20: note = Target: FXN; (-) strand; PAM type: YTN; PAM sequence: CTC
  source 1..20: mol_type = other DNA
gatcttggttcactgcaagc

SEQ ID NO: 26648 - DNA, 20 bp, synthetic construct
  misc_feature 1..20: note = Description of Artificial Sequence: Synthetic oligonucleotide
  misc_feature 1..20: note = Target: FXN; (-) strand; PAM type: YTN; PAM sequence: CTA
  source 1..20: mol_type = other DNA
gagtgcagtggctcgatctt

SEQ ID NO: 26649 - DNA, 20 bp, synthetic construct
  misc_feature 1..20: note = Description of Artificial Sequence: Synthetic oligonucleotide
  misc_feature 1..20: note = Target: FXN; (-) strand; PAM type: YTN; PAM sequence: CTG
  source 1..20: mol_type = other DNA
tcacccaggctagagtgcag

SEQ ID NO: 26650 - DNA, 20 bp, synthetic construct
  misc_feature 1..20: note = Description of Artificial Sequence: Synthetic oligonucleotide
  misc_feature 1..20: note = Target: FXN; (-) strand; PAM type: YTN; PAM sequence: CTC
  source 1..20: mol_type = other DNA
tgtcacccaggctagagtgc

SEQ ID NO: 26651 - DNA, 20 bp, synthetic construct
  misc_feature 1..20: note = Description of Artificial Sequence: Synthetic oligonucleotide
  misc_feature 1..20: note = Target: FXN; (-) strand; PAM type: YTN; PAM sequence: CTC
  source 1..20: mol_type = other DNA
gctctgtcacccaggctaga

SEQ ID NO: 26652 - DNA, 20 bp, synthetic construct
  misc_feature 1..20: note = Description of Artificial Sequence: Synthetic oligonucleotide
  misc_feature 1..20: note = Target: FXN; (-) strand; PAM type: YTN; PAM sequence: TTG
  source 1..20: mol_type = other DNA
agatggagtctcgctctgtc

SEQ ID NO: 26653 - DNA, 20 bp, synthetic construct
  misc_feature 1..20: note = Description of Artificial Sequence: Synthetic oligonucleotide
  misc_feature 1..20: note = Target: FXN; (-) strand; PAM type: YTN; PAM sequence: TTT
  source 1..20: mol_type = other DNA
gagatggagtctcgctctgt

SEQ ID NO: 26654 - DNA, 20 bp, synthetic construct
  misc_feature 1..20: note = Description of Artificial Sequence: Synthetic oligonucleotide
  misc_feature 1..20: note = Target: FXN; (-) strand; PAM type: YTN; PAM sequence: TTT
  source 1..20: mol_type = other DNA
tgagatggagtctcgctctg

SEQ ID NO: 26655 - DNA, 20 bp, synthetic construct
  misc_feature 1..20: note = Description of Artificial Sequence: Synthetic oligonucleotide
  misc_feature 1..20: note = Target: FXN; (-) strand; PAM type: YTN; PAM sequence: TTT
  source 1..20: mol_type = other DNA
ttgagatggagtctcgctct

SEQ ID NO: 26656 - DNA, 20 bp, synthetic construct
  misc_feature 1..20: note = Description of Artificial Sequence: Synthetic oligonucleotide
  misc_feature 1..20: note = Target: FXN; (-) strand; PAM type: YTN; PAM sequence: TTT
  source 1..20: mol_type = other DNA
tttgagatggagtctcgctc

SEQ ID NO: 26657 - DNA, 20 bp, synthetic construct
  misc_feature 1..20: note = Description of Artificial Sequence: Synthetic oligonucleotide
  misc_feature 1..20: note = Target: FXN; (-) strand; PAM type: YTN; PAM sequence: TTT
  source 1..20: mol_type = other DNA
ttttgagatggagtctcgct

SEQ ID NO: 26658 - DNA, 20 bp, synthetic construct
  misc_feature 1..20: note = Description of Artificial Sequence: Synthetic oligonucleotide
  misc_feature 1..20: note = Target: FXN; (-) strand; PAM type: YTN; PAM sequence: TTT
  source 1..20: mol_type = other DNA
tttttgagatggagtctcgc

SEQ ID NO: 26659 - DNA, 20 bp, synthetic construct
  misc_feature 1..20: note = Description of Artificial Sequence: Synthetic oligonucleotide
  misc_feature 1..20: note = Target: FXN; (-) strand; PAM type: YTN; PAM sequence: TTT
  source 1..20: mol_type = other DNA
ttttttgagatggagtctcg

SEQ ID NO: 26660 - DNA, 20 bp, synthetic construct
  misc_feature 1..20: note = Description of Artificial Sequence: Synthetic oligonucleotide
  misc_feature 1..20: note = Target: FXN; (-) strand; PAM type: YTN; PAM sequence: TTT
  source 1..20: mol_type = other DNA
tttttttgagatggagtctc

SEQ ID NO: 26661 - DNA, 20 bp, synthetic construct
  misc_feature 1..20: note = Description of Artificial Sequence: Synthetic oligonucleotide
  misc_feature 1..20: note = Target: FXN; (-) strand; PAM type: YTN; PAM sequence: TTT
  source 1..20: mol_type = other DNA
ttttttttgagatggagtct

SEQ ID NO: 26662 - DNA, 20 bp, synthetic construct
  misc_feature 1..20: note = Description of Artificial Sequence: Synthetic oligonucleotide
  misc_feature 1..20: note = Target: FXN; (-) strand; PAM type: YTN; PAM sequence: TTT
  source 1..20: mol_type = other DNA
tttttttttgagatggagtc

SEQ ID NO: 26663 - DNA, 20 bp, synthetic construct
  misc_feature 1..20: note = Description of Artificial Sequence: Synthetic oligonucleotide
  misc_feature 1..20: note = Target: FXN; (-) strand; PAM type: YTN; PAM sequence: TTT
  source 1..20: mol_type = other DNA
ttttttttttgagatggagt

SEQ ID NO: 26664 - DNA, 20 bp, synthetic construct
  misc_feature 1..20: note = Description of Artificial Sequence: Synthetic oligonucleotide
  misc_feature 1..20: note = Target: FXN; (-) strand; PAM type: YTN; PAM sequence: TTT
  source 1..20: mol_type = other DNA
tttttttttttgagatggag

SEQ ID NO: 26665 - DNA, 20 bp, synthetic construct
  misc_feature 1..20: note = Description of Artificial Sequence: Synthetic oligonucleotide
  misc_feature 1..20: note = Target: FXN; (-) strand; PAM type: YTN; PAM sequence: CTT
  source 1..20: mol_type = other DNA
ttttttttttttgagatgga

SEQ ID NO: 26666 - DNA, 20 bp, synthetic construct
  misc_feature 1..20: note = Description of Artificial Sequence: Synthetic oligonucleotide
  misc_feature 1..20: note = Target: FXN; (-) strand; PAM type: YTN; PAM sequence: CTG
  source 1..20: mol_type = other DNA
gtgagtcttttttttttttt

SEQ ID NO: 26667 - DNA, 20 bp, synthetic construct
  misc_feature 1..20: note = Description of Artificial Sequence: Synthetic oligonucleotide
  misc_feature 1..20: note = Target: FXN; (-) strand; PAM type: YTN; PAM sequence: TTA
  source 1..20: mol_type = other DNA
gcacagacagtggccacagc

SEQ ID NO: 26668 - DNA, 20 bp, synthetic construct
  misc_feature 1..20: note = Description of Artificial Sequence: Synthetic oligonucleotide
  misc_feature 1..20: note = Target: FXN; (-) strand; PAM type: YTN; PAM sequence: CTA
  source 1..20: mol_type = other DNA
gccaattagcacagacagtg

SEQ ID NO: 26669 - DNA, 20 bp, synthetic construct
  misc_feature 1..20: note = Description of Artificial Sequence: Synthetic oligonucleotide
  misc_feature 1..20: note = Target: FXN; (-) strand; PAM type: YTN; PAM sequence: CTG
  source 1..20: mol_type = other DNA
agatgcaggcactagccaat

SEQ ID NO: 26670 - DNA, 20 bp, synthetic construct
  misc_feature 1..20: note = Description of Artificial Sequence: Synthetic oligonucleotide
  misc_feature 1..20: note = Target: FXN; (-) strand; PAM type: YTN; PAM sequence: TTC
  source 1..20: mol_type = other DNA
tgagatgcaggcactagcca

SEQ ID NO: 26671 - DNA, 20 bp, synthetic construct
  misc_feature 1..20: note = Description of Artificial Sequence: Synthetic oligonucleotide
  misc_feature 1..20: note = Target: FXN; (-) strand; PAM type: YTN; PAM sequence: TTT
  source 1..20: mol_type = other DNA
ctgagatgcaggcactagcc

SEQ ID NO: 26672 - DNA, 20 bp, synthetic construct
  misc_feature 1..20: note = Description of Artificial Sequence: Synthetic oligonucleotide
  misc_feature 1..20: note = Target: FXN; (-) strand; PAM type: YTN; PAM sequence: TTA
  source 1..20: mol_type = other DNA
agtgcagggggaatagtcaa

SEQ ID NO: 26673 - DNA, 20 bp, synthetic construct
  misc_feature 1..20: note = Description of Artificial Sequence: Synthetic oligonucleotide
  misc_feature 1..20: note = Target: FXN; (-) strand; PAM type: YTN; PAM sequence: CTT
  source 1..20: mol_type = other DNA
aagtgcagggggaatagtca

SEQ ID NO: 26674 - DNA, 20 bp, synthetic construct
  misc_feature 1..20: note = Description of Artificial Sequence: Synthetic oligonucleotide
  misc_feature 1..20: note = Target: FXN; (-) strand; PAM type: YTN; PAM sequence: TTG
  source 1..20: mol_type = other DNA
ggagtgtgcatgcccttaag

SEQ ID NO: 26675 - DNA, 20 bp, synthetic construct
  misc_feature 1..20: note = Description of Artificial Sequence: Synthetic oligonucleotide
  misc_feature 1..20: note = Target: FXN; (-) strand; PAM type: YTN; PAM sequence: TTT
  source 1..20: mol_type = other DNA
gggagtgtgcatgcccttaa

SEQ ID NO: 26676 - DNA, 20 bp, synthetic construct
  misc_feature 1..20: note = Description of Artificial Sequence: Synthetic oligonucleotide
  misc_feature 1..20: note = Target: FXN; (-) strand; PAM type: YTN; PAM sequence: TTT
  source 1..20: mol_type = other DNA
tgggagtgtgcatgccctta

SEQ ID NO: 26677 - DNA, 20 bp, synthetic construct
  misc_feature 1..20: note = Description of Artificial Sequence: Synthetic oligonucleotide
  misc_feature 1..20: note = Target: FXN; (-) strand; PAM type: YTN; PAM sequence: CTA
  source 1..20: mol_type = other DNA
ttttgggagtgtgcatgccc

SEQ ID NO: 26678 - DNA, 20 bp, synthetic construct
  misc_feature 1..20: note = Description of Artificial Sequence: Synthetic oligonucleotide
  misc_feature 1..20: note = Target: FXN; (-) strand; PAM type: YTN; PAM sequence: CTG
  source 1..20: mol_type = other DNA
agtctattttgggagtgtgc

SEQ ID NO: 26679 - DNA, 20 bp, synthetic construct
  misc_feature 1..20: note = Description of Artificial Sequence: Synthetic oligonucleotide
  misc_feature 1..20: note = Target: FXN; (-) strand; PAM type: YTN; PAM sequence: TTA
  source 1..20: mol_type = other DNA
gacaatctgagtctattttg

SEQ ID NO: 26680 - DNA, 20 bp, synthetic construct
  misc_feature 1..20: note = Description of Artificial Sequence: Synthetic oligonucleotide
  misc_feature 1..20: note = Target: FXN; (-) strand; PAM type: YTN; PAM sequence: CTT
  source 1..20: mol_type = other DNA
agacaatctgagtctatttt

SEQ ID NO: 26681 - DNA, 20 bp, synthetic construct
  misc_feature 1..20: note = Description of Artificial Sequence: Synthetic oligonucleotide
  misc_feature 1..20: note = Target: FXN; (-) strand; PAM type: YTN; PAM sequence: TTC
  source 1..20: mol_type = other DNA
cttagacaatctgagtctat

SEQ ID NO: 26682 - DNA, 20 bp, synthetic construct
  misc_feature 1..20: note = Description of Artificial Sequence: Synthetic oligonucleotide
  misc_feature 1..20: note = Target: FXN; (-) strand; PAM type: YTN; PAM sequence: TTA
  source 1..20: mol_type = other DNA
ttccttagacaatctgagtc

SEQ ID NO: 26683 - DNA, 20 bp, synthetic construct
  misc_feature 1..20: note = Description of Artificial Sequence: Synthetic oligonucleotide
  misc_feature 1..20: note = Target: FXN; (-) strand; PAM type: YTN; PAM sequence: TTC
  source 1..20: mol_type = other DNA
atcatcatcattattcctta

SEQ ID NO: 26684 - DNA, 20 bp, synthetic construct
  misc_feature 1..20: note = Description of Artificial Sequence: Synthetic oligonucleotide
  misc_feature 1..20: note = Target: FXN; (-) strand; PAM type: YTN; PAM sequence: CTT
  source 1..20: mol_type = other DNA
catcatcatcattattcctt

SEQ ID NO: 26685 - DNA, 20 bp, synthetic construct
  misc_feature 1..20: note = Description of Artificial Sequence: Synthetic oligonucleotide
  misc_feature 1..20: note = Target: FXN; (-) strand; PAM type: YTN; PAM sequence: CTC
  source 1..20: mol_type = other DNA
ttcatcatcatcattattcc

SEQ ID NO: 26686 - DNA, 20 bp, synthetic construct
  misc_feature 1..20: note = Description of Artificial Sequence: Synthetic oligonucleotide
  misc_feature 1..20: note = Target: FXN; (-) strand; PAM type: YTN; PAM sequence: TTC
  source 1..20: mol_type = other DNA
tcttcatcatcatcattatt

SEQ ID NO: 26687 - DNA, 20 bp, synthetic construct
  misc_feature 1..20: note = Description of Artificial Sequence: Synthetic oligonucleotide
  misc_feature 1..20: note = Target: FXN; (-) strand; PAM type: YTN; PAM sequence: TTT
  source 1..20: mol_type = other DNA
ctcttcatcatcatcattat

SEQ ID NO: 26688 - DNA, 20 bp, synthetic construct
  misc_feature 1..20: note = Description of Artificial Sequence: Synthetic oligonucleotide
  misc_feature 1..20: note = Target: FXN; (-) strand; PAM type: YTN; PAM sequence: CTT
  source 1..20: mol_type = other DNA
tctcttcatcatcatcatta

SEQ ID NO: 26689 - DNA, 20 bp, synthetic construct
  misc_feature 1..20: note = Description of Artificial Sequence: Synthetic oligonucleotide
  misc_feature 1..20: note = Target: FXN; (-) strand; PAM type: YTN; PAM sequence: CTA
  source 1..20: mol_type = other DNA
caaatagaccagataaagag

SEQ ID NO: 26690 - DNA, 20 bp, synthetic construct
  misc_feature 1..20: note = Description of Artificial Sequence: Synthetic oligonucleotide
  misc_feature 1..20: note = Target: FXN; (-) strand; PAM type: YTN; PAM sequence: CTG
  source 1..20: mol_type = other DNA
actacaaatagaccagataa

SEQ ID NO: 26691 - DNA, 20 bp, synthetic construct
  misc_feature 1..20: note = Description of Artificial Sequence: Synthetic oligonucleotide
  misc_feature 1..20: note = Target: FXN; (-) strand; PAM type: YTN; PAM sequence: TTG
  source 1..20: mol_type = other DNA
gaactgactacaaatagacc

SEQ ID NO: 26692 - DNA, 20 bp, synthetic construct
  misc_feature 1..20: note = Description of Artificial Sequence: Synthetic oligonucleotide
  misc_feature 1..20: note = Target: FXN; (-) strand; PAM type: YTN; PAM sequence: TTT
  source 1..20: mol_type = other DNA
ggaactgactacaaatagac

SEQ ID NO: 26693 - DNA, 20 bp, synthetic construct
  misc_feature 1..20: note = Description of Artificial Sequence: Synthetic oligonucleotide
  misc_feature 1..20: note = Target: FXN; (-) strand; PAM type: YTN; PAM sequence: TTT
  source 1..20: mol_type = other DNA
tggaactgactacaaataga

SEQ ID NO: 26694 - DNA, 20 bp, synthetic construct
  misc_feature 1..20: note = Description of Artificial Sequence: Synthetic oligonucleotide
  misc_feature 1..20: note = Target: FXN; (-) strand; PAM type: YTN; PAM sequence: CTT
  source 1..20: mol_type = other DNA
ttggaactgactacaaatag

SEQ ID NO: 26695 - DNA, 20 bp, synthetic construct
  misc_feature 1..20: note = Description of Artificial Sequence: Synthetic oligonucleotide
  misc_feature 1..20: note = Target: FXN; (-) strand; PAM type: YTN; PAM sequence: TTA
  source 1..20: mol_type = other DNA
atgcttttggaactgactac

SEQ ID NO: 26696 - DNA, 20 bp, synthetic construct
  misc_feature 1..20: note = Description of Artificial Sequence: Synthetic oligonucleotide
  misc_feature 1..20: note = Target: FXN; (-) strand; PAM type: YTN; PAM sequence: CTT
  source 1..20: mol_type = other DNA
aatgcttttggaactgacta

SEQ ID NO: 26697 - DNA, 20 bp, synthetic construct
  misc_feature 1..20: note = Description of Artificial Sequence: Synthetic oligonucleotide
  misc_feature 1..20: note = Target: FXN; (-) strand; PAM type: YTN; PAM sequence: TTC
  source 1..20: mol_type = other DNA
ttaatgcttttggaactgac

SEQ ID NO: 26698 - DNA, 20 bp, synthetic construct
  misc_feature 1..20: note = Description of Artificial Sequence: Synthetic oligonucleotide
  misc_feature 1..20: note = Target: FXN; (-) strand; PAM type: YTN; PAM sequence: TTC
  source 1..20: mol_type = other DNA
agcagaaattcttaatgctt

SEQ ID NO: 26699 - DNA, 20 bp, synthetic construct
  misc_feature 1..20: note = Description of Artificial Sequence: Synthetic oligonucleotide
  misc_feature 1..20: note = Target: FXN; (-) strand; PAM type: YTN; PAM sequence: TTA
  source 1..20: mol_type = other DNA
gttcagcagaaattcttaat

SEQ ID NO: 26700 - DNA, 20 bp, synthetic construct
  misc_feature 1..20: note = Description of Artificial Sequence: Synthetic oligonucleotide
  misc_feature 1..20: note = Target: FXN; (-) strand; PAM type: YTN; PAM sequence: CTG
  source 1..20: mol_type = other DNA
cattagttcagcagaaattc

SEQ ID NO: 26701 - DNA, 20 bp, synthetic construct
  misc_feature 1..20: note = Description of Artificial Sequence: Synthetic oligonucleotide
  misc_feature 1..20: note = Target: FXN; (-) strand; PAM type: YTN; PAM sequence: CTA
  source 1..20: mol_type = other DNA
gctgcattagttcagcagaa

SEQ ID NO: 26702 - DNA, 20 bp, synthetic construct
  misc_feature 1..20: note = Description of Artificial Sequence: Synthetic oligonucleotide
  misc_feature 1..20: note = Target: FXN; (-) strand; PAM type: YTN; PAM sequence: TTG
  source 1..20: mol_type = other DNA
gaaggaaagtggtgacagga

SEQ ID NO: 26703 - DNA, 20 bp, synthetic construct
  misc_feature 1..20: note = Description of Artificial Sequence: Synthetic oligonucleotide
  misc_feature 1..20: note = Target: FXN; (-) strand; PAM type: YTN; PAM sequence: TTT
  source 1..20: mol_type = other DNA
ggaaggaaagtggtgacagg

SEQ ID NO: 26704 - DNA, 20 bp, synthetic construct
  misc_feature 1..20: note = Description of Artificial Sequence: Synthetic oligonucleotide
  misc_feature 1..20: note = Target: FXN; (-) strand; PAM type: YTN; PAM sequence: TTT
  source 1..20: mol_type = other DNA
tggaaggaaagtggtgacag

SEQ ID NO: 26705 - DNA, 20 bp, synthetic construct
  misc_feature 1..20: note = Description of Artificial Sequence: Synthetic oligonucleotide
  misc_feature 1..20: note = Target: FXN; (-) strand; PAM type: YTN; PAM sequence: CTA
  source 1..20: mol_type = other DNA
ttttggaaggaaagtggtga

SEQ ID NO: 26706 - DNA, 20 bp, synthetic construct
  misc_feature 1..20: note = Description of Artificial Sequence: Synthetic oligonucleotide
  misc_feature 1..20: note = Target: FXN; (-) strand; PAM type: YTN; PAM sequence: TTG
  source 1..20: mol_type = other DNA
aaactattttggaaggaaag

SEQ ID NO: 26707 - DNA, 20 bp, synthetic construct
  misc_feature 1..20: note = Description of Artificial Sequence: Synthetic oligonucleotide
  misc_feature 1..20: note = Target: FXN; (-) strand; PAM type: YTN; PAM sequence: CTT
  source 1..20: mol_type = other DNA
gaaactattttggaaggaaa

SEQ ID NO: 26708 - DNA, 20 bp, synthetic construct
  misc_feature 1..20: note = Description of Artificial Sequence: Synthetic oligonucleotide
  misc_feature 1..20: note = Target: FXN; (-) strand; PAM type: YTN; PAM sequence: TTC
  source 1..20: mol_type = other DNA
ccccacagatcttgaaacta

SEQ ID NO: 26709 - DNA, 20 bp, synthetic construct
  misc_feature 1..20: note = Description of Artificial Sequence: Synthetic oligonucleotide
  misc_feature 1..20: note = Target: FXN; (-) strand; PAM type: YTN; PAM sequence: TTT
  source 1..20: mol_type = other DNA
cccccacagatcttgaaact

SEQ ID NO: 26710 - DNA, 20 bp, synthetic construct
  misc_feature 1..20: note = Description of Artificial Sequence: Synthetic oligonucleotide
  misc_feature 1..20: note = Target: FXN; (-) strand; PAM type: YTN; PAM sequence: TTT
  source 1..20: mol_type = other DNA
tcccccacagatcttgaaac

SEQ ID NO: 26711 - DNA, 20 bp, synthetic construct
  misc_feature 1..20: note = Description of Artificial Sequence: Synthetic oligonucleotide
  misc_feature 1..20: note = Target: FXN; (-) strand; PAM type: YTN; PAM sequence: TTT
  source 1..20: mol_type = other DNA
ttcccccacagatcttgaaa

SEQ ID NO: 26712 - DNA, 20 bp, synthetic construct
  misc_feature 1..20: note = Description of Artificial Sequence: Synthetic oligonucleotide
  misc_feature 1..20: note = Target: FXN; (-) strand; PAM type: YTN; PAM sequence: TTT
  source 1..20: mol_type = other DNA
tttcccccacagatcttgaa

SEQ ID NO: 26713 - DNA, 20 bp, synthetic construct
  misc_feature 1..20: note = Description of Artificial Sequence: Synthetic oligonucleotide
  misc_feature 1..20: note = Target: FXN; (-) strand; PAM type: YTN; PAM sequence: CTG
  source 1..20: mol_type = other DNA
taaatagattttttccccca

SEQ ID NO: 26714 - DNA, 20 bp, synthetic construct
  misc_feature 1..20: note = Description of Artificial Sequence: Synthetic oligonucleotide
  misc_feature 1..20: note = Target: FXN; (-) strand; PAM type: YTN; PAM sequence: TTC
  source 1..20: mol_type = other DNA
actgtaaatagattttttcc

SEQ ID NO: 26715 - DNA, 20 bp, synthetic construct
  misc_feature 1..20: note = Description of Artificial Sequence: Synthetic oligonucleotide
  misc_feature 1..20: note = Target: FXN; (-) strand; PAM type: YTN; PAM sequence: CTG
  source 1..20: mol_type = other DNA
ttcactgtaaatagattttt

SEQ ID NO: 26716 - DNA, 20 bp, synthetic construct
  misc_feature 1..20: note = Description of Artificial Sequence: Synthetic oligonucleotide
  misc_feature 1..20: note = Target: FXN; (-) strand; PAM type: YTN; PAM sequence: CTC
  source 1..20: mol_type = other DNA
ccaccagtctgttcactgta

SEQ ID NO: 26717 - DNA, 20 bp, synthetic construct
  misc_feature 1..20: note = Description of Artificial Sequence: Synthetic oligonucleotide
  misc_feature 1..20: note = Target: FXN; (-) strand; PAM type: YTN; PAM sequence: TTC
  source 1..20: mol_type = other DNA
ctcccaccagtctgttcact

SEQ ID NO: 26718 - DNA, 20 bp, synthetic construct
  misc_feature 1..20: note = Description of Artificial Sequence: Synthetic oligonucleotide
  misc_feature 1..20: note = Target: FXN; (-) strand; PAM type: YTN; PAM sequence: CTT
  source 1..20: mol_type = other DNA
cctcccaccagtctgttcac

SEQ ID NO: 26719 - DNA, 20 bp, synthetic construct
  misc_feature 1..20: note = Description of Artificial Sequence: Synthetic oligonucleotide
  misc_feature 1..20: note = Target: FXN; (-) strand; PAM type: YTN; PAM sequence: CTC
  source 1..20: mol_type = other DNA
aacttcctcccaccagtctg

SEQ ID NO: 26720 - DNA, 20 bp, synthetic construct
  misc_feature 1..20: note = Description of Artificial Sequence: Synthetic oligonucleotide
  misc_feature 1..20: note = Target: FXN; (-) strand; PAM type: YTN; PAM sequence: TTA
  source 1..20: mol_type = other DNA
cacagggcagaaaaccccaa

SEQ ID NO: 26721 - DNA, 20 bp, synthetic construct
  misc_feature 1..20: note = Description of Artificial Sequence: Synthetic oligonucleotide
  misc_feature 1..20: note = Target: FXN; (-) strand; PAM type: YTN; PAM sequence: TTA
  source 1..20: mol_type = other DNA
gggcaaggttacacagggca

SEQ ID NO: 26722 - DNA, 20 bp, synthetic construct
  misc_feature 1..20: note = Description of Artificial Sequence: Synthetic oligonucleotide
  misc_feature 1..20: note = Target: FXN; (-) strand; PAM type: YTN; PAM sequence: CTT
  source 1..20: mol_type = other DNA
agggcaaggttacacagggc

SEQ ID NO: 26723 - DNA, 20 bp, synthetic construct
  misc_feature 1..20: note = Description of Artificial Sequence: Synthetic oligonucleotide
  misc_feature 1..20: note = Target: FXN; (-) strand; PAM type: YTN; PAM sequence: CTG
  source 1..20: mol_type = other DNA
cccaacttagggcaaggtta

SEQ ID NO: 26724 - DNA, 20 bp, synthetic construct
  misc_feature 1..20: note = Description of Artificial Sequence: Synthetic oligonucleotide
  misc_feature 1..20: note = Target: FXN; (-) strand; PAM type: YTN; PAM sequence: CTG
  source 1..20: mol_type = other DNA
gtcaaatagtgaatgagcag

SEQ ID NO: 26725 - DNA, 20 bp, synthetic construct
  misc_feature 1..20: note = Description of Artificial Sequence: Synthetic oligonucleotide
  misc_feature 1..20: note = Target: FXN; (-) strand; PAM type: YTN; PAM sequence: TTG
  source 1..20: mol_type = other DNA
tgaatgaatgaccaactggt

SEQ ID NO: 26726 - DNA, 20 bp, synthetic construct
  misc_feature 1..20: note = Description of Artificial Sequence: Synthetic oligonucleotide
  misc_feature 1..20: note = Target: FXN; (-) strand; PAM type: YTN; PAM sequence: TTT
  source 1..20: mol_type = other DNA
gtgaatgaatgaccaactgg

SEQ ID NO: 26727 - DNA, 20 bp, synthetic construct
  misc_feature 1..20: note = Description of Artificial Sequence: Synthetic oligonucleotide
  misc_feature 1..20: note = Target: FXN; (-) strand; PAM type: YTN; PAM sequence: CTG
  source 1..20: mol_type = other DNA
caaaaaggacatttgtgaat

SEQ ID NO: 26728 - DNA, 20 bp, synthetic construct
  misc_feature 1..20: note = Description of Artificial Sequence: Synthetic oligonucleotide
  misc_feature 1..20: note = Target: FXN; (-) strand; PAM type: YTN; PAM sequence: CTC
  source 1..20: mol_type = other DNA
ctgcaaaaaggacatttgtg

SEQ ID NO: 26729 - DNA, 20 bp, synthetic construct
  misc_feature 1..20: note = Description of Artificial Sequence: Synthetic oligonucleotide
  misc_feature 1..20: note = Target: FXN; (-) strand; PAM type: YTN; PAM sequence: CTC
  source 1..20: mol_type = other DNA
catccctcctgcaaaaagga

SEQ ID NO: 26730 - DNA, 20 bp, synthetic construct
  misc_feature 1..20: note = Description of Artificial Sequence: Synthetic oligonucleotide
  misc_feature 1..20: note = Target: FXN; (-) strand; PAM type: YTN; PAM sequence: CTA
  source 1..20: mol_type = other DNA
gcacctccatccctcctgca

SEQ ID NO: 26731 - DNA, 20 bp, synthetic construct
  misc_feature 1..20: note = Description of Artificial Sequence: Synthetic oligonucleotide
  misc_feature 1..20: note = Target: FXN; (-) strand; PAM type: YTN; PAM sequence: CTG
  source 1..20: mol_type = other DNA
caggtctagcacctccatcc

SEQ ID NO: 26732 - DNA, 20 bp, synthetic construct
  misc_feature 1..20: note = Description of Artificial Sequence: Synthetic oligonucleotide
  misc_feature 1..20: note = Target: FXN; (-) strand; PAM type: YTN; PAM sequence: CTA
  source 1..20: mol_type = other DNA
gcatctgcaggtctagcacc

SEQ ID NO: 26733 - DNA, 20 bp, synthetic construct
  misc_feature 1..20: note = Description of Artificial Sequence: Synthetic oligonucleotide
  misc_feature 1..20: note = Target: FXN; (-) strand; PAM type: YTN; PAM sequence: TTC
  source 1..20: mol_type = other DNA
atgctagcatctgcaggtct

SEQ ID NO: 26734 - DNA, 20 bp, synthetic construct
  misc_feature 1..20: note = Description of Artificial Sequence: Synthetic oligonucleotide
  misc_feature 1..20: note = Target: FXN; (-) strand; PAM type: YTN; PAM sequence: TTT
  source 1..20: mol_type = other DNA
catgctagcatctgcaggtc

SEQ ID NO: 26735 - DNA, 20 bp, synthetic construct
  misc_feature 1..20: note = Description of Artificial Sequence: Synthetic oligonucleotide
  misc_feature 1..20: note = Target: FXN; (-) strand; PAM type: YTN; PAM sequence: TTT
  source 1..20: mol_type = other DNA
tcatgctagcatctgcaggt

SEQ ID NO: 26736 - DNA, 20 bp, synthetic construct
  misc_feature 1..20: note = Description of Artificial Sequence: Synthetic oligonucleotide
  misc_feature 1..20: note = Target: FXN; (-) strand; PAM type: YTN; PAM sequence: CTT
  source 1..20: mol_type = other DNA
ttcatgctagcatctgcagg

SEQ ID NO: 26737 - DNA, 20 bp, synthetic construct
  misc_feature 1..20: note = Description of Artificial Sequence: Synthetic oligonucleotide
  misc_feature 1..20: note = Target: FXN; (-) strand; PAM type: YTN; PAM sequence: CTG
  source 1..20: mol_type = other DNA
tcttttcatgctagcatctg

SEQ ID NO: 26738 - DNA, 20 bp, synthetic construct
  misc_feature 1..20: note = Description of Artificial Sequence: Synthetic oligonucleotide
  misc_feature 1..20: note = Target: FXN; (-) strand; PAM type: YTN; PAM sequence: TTA
  source 1..20: mol_type = other DNA
gcagcaggagatctgtcttt

SEQ ID NO: 26739 - DNA, 20 bp, synthetic construct
  misc_feature 1..20: note = Description of Artificial Sequence: Synthetic oligonucleotide
  misc_feature 1..20: note = Target: FXN; (-) strand; PAM type: YTN; PAM sequence: CTT
  source 1..20: mol_type = other DNA
agcagcaggagatctgtctt

SEQ ID NO: 26740 - DNA, 20 bp, synthetic construct
  misc_feature 1..20: note = Description of Artificial Sequence: Synthetic oligonucleotide
  misc_feature 1..20: note = Target: FXN; (-) strand; PAM type: YTN; PAM sequence: TTA
  source 1..20: mol_type = other DNA
agcaccttagcagcaggaga

SEQ ID NO: 26741 - DNA, 20 bp, synthetic construct
  misc_feature 1..20: note = Description of Artificial Sequence: Synthetic oligonucleotide
  misc_feature 1..20: note = Target: FXN; (-) strand; PAM type: YTN; PAM sequence: TTT
  source 1..20: mol_type = other DNA
aagcaccttagcagcaggag

SEQ ID NO: 26742 - DNA, 20 bp, synthetic construct
  misc_feature 1..20: note = Description of Artificial Sequence: Synthetic oligonucleotide
  misc_feature 1..20: note = Target: FXN; (-) strand; PAM type: YTN; PAM sequence: CTT
  source 1..20: mol_type = other DNA
taagcaccttagcagcagga

SEQ ID NO: 26743 - DNA, 20 bp, synthetic construct
  misc_feature 1..20: note = Description of Artificial Sequence: Synthetic oligonucleotide
  misc_feature 1..20: note = Target: FXN; (-) strand; PAM type: YTN; PAM sequence: CTA
  source 1..20: mol_type = other DNA
ctttaagcaccttagcagca

SEQ ID NO: 26744 - DNA, 20 bp, synthetic construct
  misc_feature 1..20: note = Description of Artificial Sequence: Synthetic oligonucleotide
  misc_feature 1..20: note = Target: FXN; (-) strand; PAM type: YTN; PAM sequence: CTC
  source 1..20: mol_type = other DNA
cactactttaagcaccttag

SEQ ID NO: 26745 - DNA, 20 bp, synthetic construct
  misc_feature 1..20: note = Description of Artificial Sequence: Synthetic oligonucleotide
  misc_feature 1..20: note = Target: FXN; (-) strand; PAM type: YTN; PAM sequence: CTG
  source 1..20: mol_type = other DNA
acctccactactttaagcac

SEQ ID NO: 26746 - DNA, 20 bp, synthetic construct
  misc_feature 1..20: note = Description of Artificial Sequence: Synthetic oligonucleotide
  misc_feature 1..20: note = Target: FXN; (-) strand; PAM type: YTN; PAM sequence: TTG
  source 1..20: mol_type = other DNA
tcccctgacctccactactt

SEQ ID NO: 26747 - DNA, 20 bp, synthetic construct
  misc_feature 1..20: note = Description of Artificial Sequence: Synthetic oligonucleotide
  misc_feature 1..20: note = Target: FXN; (-) strand; PAM type: YTN; PAM sequence: CTT
  source 1..20: mol_type = other DNA
gtcccctgacctccactact

SEQ ID NO: 26748 - DNA, 20 bp, synthetic construct
  misc_feature 1..20: note = Description of Artificial Sequence: Synthetic oligonucleotide
  misc_feature 1..20: note = Target: FXN; (-) strand; PAM type: YTN; PAM sequence: TTG
  source 1..20: mol_type = other DNA
cttgtcccctgacctccact

SEQ ID NO: 26749 - DNA, 20 bp, synthetic construct
  misc_feature 1..20: note = Description of Artificial Sequence: Synthetic oligonucleotide
  misc_feature 1..20: note = Target: FXN; (-) strand; PAM type: YTN; PAM sequence: CTT
  source 1..20: mol_type = other DNA
gcttgtcccctgacctccac

SEQ ID NO: 26750 - DNA, 20 bp, synthetic construct
  misc_feature 1..20: note = Description of Artificial Sequence: Synthetic oligonucleotide
  misc_feature 1..20: note = Target: FXN; (-) strand; PAM type: YTN; PAM sequence: CTG
  source 1..20: mol_type = other DNA
cttgcttgtcccctgacctc

SEQ ID NO: 26751 - DNA, 20 bp, synthetic construct
  misc_feature 1..20: note = Description of Artificial Sequence: Synthetic oligonucleotide
  misc_feature 1..20: note = Target: FXN; (-) strand; PAM type: YTN; PAM sequence: CTG
  source 1..20: mol_type = other DNA
actgcttgcttgtcccctga

SEQ ID NO: 26752 - DNA, 20 bp, synthetic construct
  misc_feature 1..20: note = Description of Artificial Sequence: Synthetic oligonucleotide
  misc_feature 1..20: note = Target: FXN; (-) strand; PAM type: YTN; PAM sequence: CTG
  source 1..20: mol_type = other DNA
cctgactgcttgcttgtccc

SEQ ID NO: 26753 - DNA, 20 bp, synthetic construct
  misc_feature 1..20: note = Description of Artificial Sequence: Synthetic oligonucleotide
  misc_feature 1..20: note = Target: FXN; (-) strand; PAM type: YTN; PAM sequence: TTC
  source 1..20: mol_type = other DNA
agagctgcctgactgcttgc

SEQ ID NO: 26754 - DNA, 20 bp, synthetic construct
  misc_feature 1..20: note = Description of Artificial Sequence: Synthetic oligonucleotide
  misc_feature 1..20: note = Target: FXN; (-) strand; PAM type: YTN; PAM sequence: CTG
  source 1..20: mol_type = other DNA
cattcagagctgcctgactg

SEQ ID NO: 26755 - DNA, 20 bp, synthetic construct
  misc_feature 1..20: note = Description of Artificial Sequence: Synthetic oligonucleotide
  misc_feature 1..20: note = Target: FXN; (-) strand; PAM type: YTN; PAM sequence: CTC
  source 1..20: mol_type = other DNA
tgcattcagagctgcctgac

SEQ ID NO: 26756 - DNA, 20 bp, synthetic construct
  misc_feature 1..20: note = Description of Artificial Sequence: Synthetic oligonucleotide
  misc_feature 1..20: note = Target: FXN; (-) strand; PAM type: YTN; PAM sequence: CTG
  source 1..20: mol_type = other DNA
cctctgcattcagagctgcc

SEQ ID NO: 26757 - DNA, 20 bp, synthetic construct
  misc_feature 1..20: note = Description of Artificial Sequence: Synthetic oligonucleotide
  misc_feature 1..20: note = Target: FXN; (-) strand; PAM type: YTN; PAM sequence: TTC
  source 1..20: mol_type = other DNA
ctgcctctgcattcagagct

SEQ ID NO: 26758 - DNA, 20 bp, synthetic construct
  misc_feature 1..20: note = Description of Artificial Sequence: Synthetic oligonucleotide
  misc_feature 1..20: note = Target: FXN; (-) strand; PAM type: YTN; PAM sequence: CTT
  source 1..20: mol_type = other DNA
cctgcctctgcattcagagc

SEQ ID NO: 26759 - DNA, 20 bp, synthetic construct
  misc_feature 1..20: note = Description of Artificial Sequence: Synthetic oligonucleotide
  misc_feature 1..20: note = Target: FXN; (-) strand; PAM type: YTN; PAM sequence: CTC
  source 1..20: mol_type = other DNA
gtggtgcttcctgcctctgc

SEQ ID NO: 26760 - DNA, 20 bp, synthetic construct
  misc_feature 1..20: note = Description of Artificial Sequence: Synthetic oligonucleotide
  misc_feature 1..20: note = Target: FXN; (-) strand; PAM type: YTN; PAM sequence: TTG
  source 1..20: mol_type = other DNA
cctcgtggtgcttcctgcct

SEQ ID NO: 26761 - DNA, 20 bp, synthetic construct
  misc_feature 1..20: note = Description of Artificial Sequence: Synthetic oligonucleotide
  misc_feature 1..20: note = Target: FXN; (-) strand; PAM type: YTN; PAM sequence: CTG
  source 1..20: mol_type = other DNA
tgggtcccattgcctcgtgg

SEQ ID NO: 26762 - DNA, 20 bp, synthetic construct
  misc_feature 1..20: note = Description of Artificial Sequence: Synthetic oligonucleotide
  misc_feature 1..20: note = Target: FXN; (-) strand; PAM type: YTN; PAM sequence: CTC
  source 1..20: mol_type = other DNA
tgtgggtcccattgcctcgt

SEQ ID NO: 26763 - DNA, 20 bp, synthetic construct
  misc_feature 1..20: note = Description of Artificial Sequence: Synthetic oligonucleotide
  misc_feature 1..20: note = Target: FXN; (-) strand; PAM type: YTN; PAM sequence: CTA
  source 1..20: mol_type = other DNA
cccctctgtgggtcccattg

SEQ ID NO: 26764 - DNA, 20 bp, synthetic construct
  misc_feature 1..20: note = Description of Artificial Sequence: Synthetic oligonucleotide
  misc_feature 1..20: note = Target: FXN; (-) strand; PAM type: YTN; PAM sequence: CTG
  source 1..20: mol_type = other DNA
ctacccctctgtgggtccca

SEQ ID NO: 26765 - DNA, 20 bp, synthetic construct
  misc_feature 1..20: note = Description of Artificial Sequence: Synthetic oligonucleotide
  misc_feature 1..20: note = Target: FXN; (-) strand; PAM type: YTN; PAM sequence: CTA
  source 1..20: mol_type = other DNA
ccctgctacccctctgtggg

SEQ ID NO: 26766 - DNA, 20 bp, synthetic construct
  misc_feature 1..20: note = Description of Artificial Sequence: Synthetic oligonucleotide
  misc_feature 1..20: note = Target: FXN; (-) strand; PAM type: YTN; PAM sequence: CTC
  source 1..20: mol_type = other DNA
taccctgctacccctctgtg

SEQ ID NO: 26767 - DNA, 20 bp, synthetic construct
  misc_feature 1..20: note = Description of Artificial Sequence: Synthetic oligonucleotide
  misc_feature 1..20: note = Target: FXN; (-) strand; PAM type: YTN; PAM sequence: CTC
  source 1..20: mol_type = other DNA
acctctaccctgctacccct

SEQ ID NO: 26768 - DNA, 20 bp, synthetic construct
  misc_feature 1..20: note = Description of Artificial Sequence: Synthetic oligonucleotide
  misc_feature 1..20: note = Target: FXN; (-) strand; PAM type: YTN; PAM sequence: CTC
  source 1..20: mol_type = other DNA
cccacatgagacccactcac

SEQ ID NO: 26769 - DNA, 20 bp, synthetic construct
  misc_feature 1..20: note = Description of Artificial Sequence: Synthetic oligonucleotide
  misc_feature 1..20: note = Target: FXN; (-) strand; PAM type: YTN; PAM sequence: CTC
  source 1..20: mol_type = other DNA
cctccccacatgagacccac

SEQ ID NO: 26770 - DNA, 20 bp, synthetic construct
  misc_feature 1..20: note = Description of Artificial Sequence: Synthetic oligonucleotide
  misc_feature 1..20: note = Target: FXN; (-) strand; PAM type: YTN; PAM sequence: TTC
  source 1..20: mol_type = other DNA
ctccctccccacatgagacc

SEQ ID NO: 26771 - DNA, 20 bp, synthetic construct
  misc_feature 1..20: note = Description of Artificial Sequence: Synthetic oligonucleotide
  misc_feature 1..20: note = Target: FXN; (-) strand; PAM type: YTN; PAM sequence: CTT
  source 1..20: mol_type = other DNA
cctccctccccacatgagac

SEQ ID NO: 26772 - DNA, 20 bp, synthetic construct
  misc_feature 1..20: note = Description of Artificial Sequence: Synthetic oligonucleotide
  misc_feature 1..20: note = Target: FXN; (-) strand; PAM type: YTN; PAM sequence: CTG
  source 1..20: mol_type = other DNA
cagtcaacttcctccctccc

SEQ ID NO: 26773 - DNA, 20 bp, synthetic construct
  misc_feature 1..20: note = Description of Artificial Sequence: Synthetic oligonucleotide
  misc_feature 1..20: note = Target: FXN; (-) strand; PAM type: YTN; PAM sequence: CTC
  source 1..20: mol_type = other DNA
tgcagtcaacttcctccctc

SEQ ID NO: 26774 - DNA, 20 bp, synthetic construct
  misc_feature 1..20: note = Description of Artificial Sequence: Synthetic oligonucleotide
  misc_feature 1..20: note = Target: FXN; (-) strand; PAM type: YTN; PAM sequence: TTC
  source 1..20: mol_type = other DNA
tctgcagtcaacttcctccc

SEQ ID NO: 26775 - DNA, 20 bp, synthetic construct
  misc_feature 1..20: note = Description of Artificial Sequence: Synthetic oligonucleotide
  misc_feature 1..20: note = Target: FXN; (-) strand; PAM type: YTN; PAM sequence: CTT
  source 1..20: mol_type = other DNA
ctctgcagtcaacttcctcc

SEQ ID NO: 26776 - DNA, 20 bp, synthetic construct
  misc_feature 1..20: note = Description of Artificial Sequence: Synthetic oligonucleotide
  misc_feature 1..20: note = Target: FXN; (-) strand; PAM type: YTN; PAM sequence: CTG
  source 1..20: mol_type = other DNA
gcaccttctctgcagtcaac

SEQ ID NO: 26777 - DNA, 20 bp, synthetic construct
  misc_feature 1..20: note = Description of Artificial Sequence: Synthetic oligonucleotide
  misc_feature 1..20: note = Target: FXN; (-) strand; PAM type: YTN; PAM sequence: TTC
  source 1..20: mol_type = other DNA
accccctggcaccttctctg

SEQ ID NO: 26778 - DNA, 20 bp, synthetic construct
  misc_feature 1..20: note = Description of Artificial Sequence: Synthetic oligonucleotide
  misc_feature 1..20: note = Target: FXN; (-) strand; PAM type: YTN; PAM sequence: TTT
  source 1..20: mol_type = other DNA
caccccctggcaccttctct

SEQ ID NO: 26779 - DNA, 20 bp, synthetic construct
  misc_feature 1..20: note = Description of Artificial Sequence: Synthetic oligonucleotide
  misc_feature 1..20: note = Target: FXN; (-) strand; PAM type: YTN; PAM sequence: TTT
  source 1..20: mol_type = other DNA
tcaccccctggcaccttctc

SEQ ID NO: 26780 - DNA, 20 bp, synthetic construct
  misc_feature 1..20: note = Description of Artificial Sequence: Synthetic oligonucleotide
  misc_feature 1..20: note = Target: FXN; (-) strand; PAM type: YTN; PAM sequence: CTA
  source 1..20: mol_type = other DNA
ttttcaccccctggcacctt

SEQ ID NO: 26781 - DNA, 20 bp, synthetic construct
  misc_feature 1..20: note = Description of Artificial Sequence: Synthetic oligonucleotide
  misc_feature 1..20: note = Target: FXN; (-) strand; PAM type: YTN; PAM sequence: CTC
  source 1..20: mol_type = other DNA
aagctattttcaccccctgg

SEQ ID NO: 26782 - DNA, 20 bp, synthetic construct
  misc_feature 1..20: note = Description of Artificial Sequence: Synthetic oligonucleotide
  misc_feature 1..20: note = Target: FXN; (-) strand; PAM type: YTN; PAM sequence: CTC
  source 1..20: mol_type = other DNA
tcaagctattttcaccccct

SEQ ID NO: 26783 - DNA, 20 bp, synthetic construct
  misc_feature 1..20: note = Description of Artificial Sequence: Synthetic oligonucleotide
  misc_feature 1..20: note = Target: FXN; (-) strand; PAM type: YTN; PAM sequence: CTC
  source 1..20: mol_type = other DNA
cacagctctcaagctatttt

SEQ ID NO: 26784 - DNA, 20 bp, synthetic construct
  misc_feature 1..20: note = Description of Artificial Sequence: Synthetic oligonucleotide
  misc_feature 1..20: note = Target: FXN; (-) strand; PAM type: YTN; PAM sequence: CTA
  source 1..20: mol_type = other DNA
gctccacagctctcaagcta

SEQ ID NO: 26785 - DNA, 20 bp, synthetic construct
  misc_feature 1..20: note = Description of Artificial Sequence: Synthetic oligonucleotide
  misc_feature 1..20: note = Target: FXN; (-) strand; PAM type: YTN; PAM sequence: TTC
  source 1..20: mol_type = other DNA
tagctccacagctctcaagc

SEQ ID NO: 26786 - DNA, 20 bp, synthetic construct
  misc_feature 1..20: note = Description of Artificial Sequence: Synthetic oligonucleotide
  misc_feature 1..20: note = Target: FXN; (-) strand; PAM type: YTN; PAM sequence: CTT
  source 1..20: mol_type = other DNA
ctagctccacagctctcaag

SEQ ID NO: 26787 - DNA, 20 bp, synthetic construct
  misc_feature 1..20: note = Description of Artificial Sequence: Synthetic oligonucleotide
  misc_feature 1..20: note = Target: FXN; (-) strand; PAM type: YTN; PAM sequence: TTA
  source 1..20: mol_type = other DNA
ataagcaaatgtgagagccc

SEQ ID NO: 26788 - DNA, 20 bp, synthetic construct
  misc_feature 1..20: note = Description of Artificial Sequence: Synthetic oligonucleotide
  misc_feature 1..20: note = Target: FXN; (-) strand; PAM type: YTN; PAM sequence: TTC
  source 1..20: mol_type = other DNA
aaagggcatattaataagca

SEQ ID NO: 26789 - DNA, 20 bp, synthetic construct
  misc_feature 1..20: note = Description of Artificial Sequence: Synthetic oligonucleotide
  misc_feature 1..20: note = Target: FXN; (-) strand; PAM type: YTN; PAM sequence: TTT
  source 1..20: mol_type = other DNA
caaagggcatattaataagc

SEQ ID NO: 26790 - DNA, 20 bp, synthetic construct
  misc_feature 1..20: note = Description of Artificial Sequence: Synthetic oligonucleotide
  misc_feature 1..20: note = Target: FXN; (-) strand; PAM type: YTN; PAM sequence: TTT
  source 1..20: mol_type = other DNA
tcaaagggcatattaataag

SEQ ID NO: 26791 - DNA, 20 bp, synthetic construct
  misc_feature 1..20: note = Description of Artificial Sequence: Synthetic oligonucleotide
  misc_feature 1..20: note = Target: FXN; (-) strand; PAM type: YTN; PAM sequence: TTT
  source 1..20: mol_type = other DNA
ttcaaagggcatattaataa

SEQ ID NO: 26792 - DNA, 20 bp, synthetic construct
  misc_feature 1..20: note = Description of Artificial Sequence: Synthetic oligonucleotide
  misc_feature 1..20: note = Target: FXN; (-) strand; PAM type: YTN; PAM sequence: CTT
  source 1..20: mol_type = other DNA
tttcaaagggcatattaata

SEQ ID NO: 26793 - DNA, 20 bp, synthetic construct
  misc_feature 1..20: note = Description of Artificial Sequence: Synthetic oligonucleotide
  misc_feature 1..20: note = Target: FXN; (-) strand; PAM type: YTN; PAM sequence: CTC
  source 1..20: mol_type = other DNA
tttttcaaagggcatattaa

SEQ ID NO: 26794 - DNA, 20 bp, synthetic construct
  misc_feature 1..20: note = Description of Artificial Sequence: Synthetic oligonucleotide
  misc_feature 1..20: note = Target: FXN; (-) strand; PAM type: YTN; PAM sequence: CTC
  source 1..20: mol_type = other DNA
caggtatcaggccactcttt

SEQ ID NO: 26795 - DNA, 20 bp, synthetic construct
  misc_feature 1..20: note = Description of Artificial Sequence: Synthetic oligonucleotide
  misc_feature 1..20: note = Target: FXN; (-) strand; PAM type: YTN; PAM sequence: TTG
  source 1..20: mol_type = other DNA
agtgactccaggtatcaggc

SEQ ID NO: 26796 - DNA, 20 bp, synthetic construct
  misc_feature 1..20: note = Description of Artificial Sequence: Synthetic oligonucleotide
  misc_feature 1..20: note = Target: FXN; (-) strand; PAM type: YTN; PAM sequence: TTT
  source 1..20: mol_type = other DNA
gagtgactccaggtatcagg

SEQ ID NO: 26797 - DNA, 20 bp, synthetic construct
  misc_feature 1..20: note = Description of Artificial Sequence: Synthetic oligonucleotide
  misc_feature 1..20: note = Target: FXN; (-) strand; PAM type: YTN; PAM sequence: TTT
  source 1..20: mol_type = other DNA
tgagtgactccaggtatcag

SEQ ID NO: 26798 - DNA, 20 bp, synthetic construct
  misc_feature 1..20: note = Description of Artificial Sequence: Synthetic oligonucleotide
  misc_feature 1..20: note = Target: FXN; (-) strand; PAM type: YTN; PAM sequence: CTT
  source 1..20: mol_type = other DNA
ttgagtgactccaggtatca

SEQ ID NO: 26799 - DNA, 20 bp, synthetic construct
  misc_feature 1..20: note = Description of Artificial Sequence: Synthetic oligonucleotide
  misc_feature 1..20: note = Target: FXN; (-) strand; PAM type: YTN; PAM sequence: TTG
  source 1..20: mol_type = other DNA
gaaatcttttgagtgactcc

SEQ ID NO: 26800 - DNA, 20 bp, synthetic construct
  misc_feature 1..20: note = Description of Artificial Sequence: Synthetic oligonucleotide
  misc_feature 1..20: note = Target: FXN; (-) strand; PAM type: YTN; PAM sequence: CTA
  source 1..20: mol_type = other DNA
tcggaattggaaatcttttg

SEQ ID NO: 26801 - DNA, 20 bp, synthetic construct
  misc_feature 1..20: note = Description of Artificial Sequence: Synthetic oligonucleotide
  misc_feature 1..20: note = Target: FXN; (-) strand; PAM type: YTN; PAM sequence: TTC
  source 1..20: mol_type = other DNA
ctatcggaattggaaatctt

SEQ ID NO: 26802 - DNA, 20 bp, synthetic construct
  misc_feature 1..20: note = Description of Artificial Sequence: Synthetic oligonucleotide
  misc_feature 1..20: note = Target: FXN; (-) strand; PAM type: YTN; PAM sequence: TTT
  source 1..20: mol_type = other DNA
cctatcggaattggaaatct

SEQ ID NO: 26803 - DNA, 20 bp, synthetic construct
  misc_feature 1..20: note = Description of Artificial Sequence: Synthetic oligonucleotide
  misc_feature 1..20: note = Target: FXN; (-) strand; PAM type: YTN; PAM sequence: TTT
  source 1..20: mol_type = other DNA
tcctatcggaattggaaatc

SEQ ID NO: 26804 - DNA, 20 bp, synthetic construct
  misc_feature 1..20: note = Description of Artificial Sequence: Synthetic oligonucleotide
  misc_feature 1..20: note = Target: FXN; (-) strand; PAM type: YTN; PAM sequence: TTT
  source 1..20: mol_type = other DNA
ttcctatcggaattggaaat

SEQ ID NO: 26805 - DNA, 20 bp, synthetic construct
  misc_feature 1..20: note = Description of Artificial Sequence: Synthetic oligonucleotide
  misc_feature 1..20: note = Target: FXN; (-) strand; PAM type: YTN; PAM sequence: CTT
  source 1..20: mol_type = other DNA
tttcctatcggaattggaaa

SEQ ID NO: 26806 - DNA, 20 bp, synthetic construct
  misc_feature 1..20: note = Description of Artificial Sequence: Synthetic oligonucleotide
  misc_feature 1..20: note = Target: FXN; (-) strand; PAM type: YTN; PAM sequence: TTG
  source 1..20: mol_type = other DNA
actttttcctatcggaattg

SEQ ID NO: 26807 - DNA, 20 bp, synthetic construct
  misc_feature 1..20: note = Description of Artificial Sequence: Synthetic oligonucleotide
  misc_feature 1..20: note = Target: FXN; (-) strand; PAM type: YTN; PAM sequence: CTG
  source 1..20: mol_type = other DNA
aagccaaaattgactttttc

SEQ ID NO: 26808 - DNA, 20 bp, synthetic construct
  misc_feature 1..20: note = Description of Artificial Sequence: Synthetic oligonucleotide
  misc_feature 1..20: note = Target: FXN; (-) strand; PAM type: YTN; PAM sequence: CTC
  source 1..20: mol_type = other DNA
agcatacagcaaatcagggg

SEQ ID NO: 26809 - DNA, 20 bp, synthetic construct
  misc_feature 1..20: note = Description of Artificial Sequence: Synthetic oligonucleotide
  misc_feature 1..20: note = Target: FXN; (-) strand; PAM type: YTN; PAM sequence: TTG
  source 1..20: mol_type = other DNA
cgtccatcaccacaatgcct

SEQ ID NO: 26810 - DNA, 20 bp, synthetic construct
  misc_feature 1..20: note = Description of Artificial Sequence: Synthetic oligonucleotide
  misc_feature 1..20: note = Target: FXN; (-) strand; PAM type: YTN; PAM sequence: CTT
  source 1..20: mol_type = other DNA
gcgtccatcaccacaatgcc

SEQ ID NO: 26811 - DNA, 20 bp, synthetic construct
  misc_feature 1..20: note = Description of Artificial Sequence: Synthetic oligonucleotide
  misc_feature 1..20: note = Target: FXN; (-) strand; PAM type: YTN; PAM sequence: CTC
  source 1..20: mol_type = other DNA
cgcacttgcgtccatcacca

SEQ ID NO: 26812 - DNA, 20 bp, synthetic construct
  misc_feature 1..20: note = Description of Artificial Sequence: Synthetic oligonucleotide
  misc_feature 1..20: note = Target: FXN; (-) strand; PAM type: YTN; PAM sequence: CTC
  source 1..20: mol_type = other DNA
aaggtctccgcacttgcgtc

SEQ ID NO: 26813 - DNA, 20 bp, synthetic construct
  misc_feature 1..20: note = Description of Artificial Sequence: Synthetic oligonucleotide
  misc_feature 1..20: note = Target: FXN; (-) strand; PAM type: YTN; PAM sequence: CTA
  source 1..20: mol_type = other DNA
ggggcagatgcgtgctcaag

SEQ ID NO: 26814 - DNA, 20 bp, synthetic construct
  misc_feature 1..20: note = Description of Artificial Sequence: Synthetic oligonucleotide
  misc_feature 1..20: note = Target: FXN; (-) strand; PAM type: YTN; PAM sequence: CTC
  source 1..20: mol_type = other DNA
agggcaagaactaggggcag

SEQ ID NO: 26815 - DNA, 20 bp, synthetic construct
  misc_feature 1..20: note = Description of Artificial Sequence: Synthetic oligonucleotide
  misc_feature 1..20: note = Target: FXN; (-) strand; PAM type: YTN; PAM sequence: TTC
  source 1..20: mol_type = other DNA
gaggactcagggcaagaact

SEQ ID NO: 26816 - DNA, 20 bp, synthetic construct
  misc_feature 1..20: note = Description of Artificial Sequence: Synthetic oligonucleotide
  misc_feature 1..20: note = Target: FXN; (-) strand; PAM type: YTN; PAM sequence: CTT
  source 1..20: mol_type = other DNA
cgaggactcagggcaagaac

SEQ ID NO: 26817 - DNA, 20 bp, synthetic construct
  misc_feature 1..20: note = Description of Artificial Sequence: Synthetic oligonucleotide
  misc_feature 1..20: note = Target: FXN; (-) strand; PAM type: YTN; PAM sequence: CTC
  source 1..20: mol_type = other DNA
cttcgaggactcagggcaag

SEQ ID NO: 26818 - DNA, 20 bp, synthetic construct
  misc_feature 1..20: note = Description of Artificial Sequence: Synthetic oligonucleotide
  misc_feature 1..20: note = Target: FXN; (-) strand; PAM type: YTN; PAM sequence: CTG
  source 1..20: mol_type = other DNA
cctccttcgaggactcaggg

SEQ ID NO: 26819 - DNA, 20 bp, synthetic construct
  misc_feature 1..20: note = Description of Artificial Sequence: Synthetic oligonucleotide
  misc_feature 1..20: note = Target: FXN; (-) strand; PAM type: YTN; PAM sequence: CTC
  source 1..20: mol_type = other DNA
ctgcctccttcgaggactca

SEQ ID NO: 26820 - DNA, 20 bp, synthetic construct
  misc_feature 1..20: note = Description of Artificial Sequence: Synthetic oligonucleotide
  misc_feature 1..20: note = Target: FXN; (-) strand; PAM type: YTN; PAM sequence: CTC
  source 1..20: mol_type = other DNA
tcctgcctccttcgaggact

SEQ ID NO: 26821 - DNA, 20 bp, synthetic construct
  misc_feature 1..20: note = Description of Artificial Sequence: Synthetic oligonucleotide
  misc_feature 1..20: note = Target: FXN; (-) strand; PAM type: YTN; PAM sequence: TTG
  source 1..20: mol_type = other DNA
atgtctctcctgcctccttc

SEQ ID NO: 26822 - DNA, 20 bp, synthetic construct
  misc_feature 1..20: note = Description of Artificial Sequence: Synthetic oligonucleotide
  misc_feature 1..20: note = Target: FXN; (-) strand; PAM type: YTN; PAM sequence: CTT
  source 1..20: mol_type = other DNA
gatgtctctcctgcctcctt

SEQ ID NO: 26823 - DNA, 20 bp, synthetic construct
  misc_feature 1..20: note = Description of Artificial Sequence: Synthetic oligonucleotide
  misc_feature 1..20: note = Target: FXN; (-) strand; PAM type: YTN; PAM sequence: CTG
  source 1..20: mol_type = other DNA
ccttgatgtctctcctgcct

SEQ ID NO: 26824 - DNA, 20 bp, synthetic construct
  misc_feature 1..20: note = Description of Artificial Sequence: Synthetic oligonucleotide
  misc_feature 1..20: note = Target: FXN; (-) strand; PAM type: YTN; PAM sequence: CTG
  source 1..20: mol_type = other DNA
tctgccttgatgtctctcct

SEQ ID NO: 26825 - DNA, 20 bp, synthetic construct
  misc_feature 1..20: note = Description of Artificial Sequence: Synthetic oligonucleotide
  misc_feature 1..20: note = Target: FXN; (-) strand; PAM type: YTN; PAM sequence: CTG
  source 1..20: mol_type = other DNA
atgagcggcgcctgtctgcc

SEQ ID NO: 26826 - DNA, 20 bp, synthetic construct
  misc_feature 1..20: note = Description of Artificial Sequence: Synthetic oligonucleotide
  misc_feature 1..20: note = Target: FXN; (-) strand; PAM type: YTN; PAM sequence: CTC
  source 1..20: mol_type = other DNA
atcactgatgagcggcgcct

SEQ ID NO: 26827 - DNA, 20 bp, synthetic construct
  misc_feature 1..20: note = Description of Artificial Sequence: Synthetic oligonucleotide
  misc_feature 1..20: note = Target: FXN; (-) strand; PAM type: YTN; PAM sequence: CTG
  source 1..20: mol_type = other DNA
gtctcatcactgatgagcgg

SEQ ID NO: 26828 - DNA, 20 bp, synthetic construct
  misc_feature 1..20: note = Description of Artificial Sequence: Synthetic oligonucleotide
  misc_feature 1..20: note = Target: FXN; (-) strand; PAM type: YTN; PAM sequence: TTC
  source 1..20: mol_type = other DNA
caggtctggtctcatcactg

SEQ ID NO: 26829 - DNA, 20 bp, synthetic construct
  misc_feature 1..20: note = Description of Artificial Sequence: Synthetic oligonucleotide
  misc_feature 1..20: note = Target: FXN; (-) strand; PAM type: YTN; PAM sequence: CTG
  source 1..20: mol_type = other DNA
agtataagacgcgagttcca

SEQ ID NO: 26830 - DNA, 20 bp, synthetic construct
  misc_feature 1..20: note = Description of Artificial Sequence: Synthetic oligonucleotide
  misc_feature 1..20: note = Target: FXN; (-) strand; PAM type: YTN; PAM sequence: CTG
  source 1..20: mol_type = other DNA
gggggccacaatccagcaga

SEQ ID NO: 26831 - DNA, 20 bp, synthetic construct
  misc_feature 1..20: note = Description of Artificial Sequence: Synthetic oligonucleotide
  misc_feature 1..20: note = Target: FXN; (-) strand; PAM type: YTN; PAM sequence: CTA
  source 1..20: mol_type = other DNA
tactggggggccacaatcca

SEQ ID NO: 26832 - DNA, 20 bp, synthetic construct
  misc_feature 1..20: note = Description of Artificial Sequence: Synthetic oligonucleotide
  misc_feature 1..20: note = Target: FXN; (-) strand; PAM type: YTN; PAM sequence: TTG
  source 1..20: mol_type = other DNA
caccctatactggggggcca

SEQ ID NO: 26833 - DNA, 20 bp, synthetic construct
  misc_feature 1..20: note = Description of Artificial Sequence: Synthetic oligonucleotide
  misc_feature 1..20: note = Target: FXN; (-) strand; PAM type: YTN; PAM sequence: TTG
  source 1..20: mol_type = other DNA
tgtgttgcaccctatactgg

SEQ ID NO: 26834 - DNA, 20 bp, synthetic construct
  misc_feature 1..20: note = Description of Artificial Sequence: Synthetic oligonucleotide
  misc_feature 1..20: note = Target: FXN; (-) strand; PAM type: YTN; PAM sequence: CTC
  source 1..20: mol_type = other DNA
cagttgtgtgttgcacccta

SEQ ID NO: 26835 - DNA, 20 bp, synthetic construct
  misc_feature 1..20: note = Description of Artificial Sequence: Synthetic oligonucleotide
  misc_feature 1..20: note = Target: FXN; (-) strand; PAM type: YTN; PAM sequence: TTA
  source 1..20: mol_type = other DNA
aatgctccagttgtgtgttg

SEQ ID NO: 26836 - DNA, 20 bp, synthetic construct
  misc_feature 1..20: note = Description of Artificial Sequence: Synthetic oligonucleotide
  misc_feature 1..20: note = Target: FXN; (-) strand; PAM type: YTN; PAM sequence: CTT
  source 1..20: mol_type = other DNA
aaatgctccagttgtgtgtt

SEQ ID NO: 26837 - DNA, 20 bp, synthetic construct
  misc_feature 1..20: note = Description of Artificial Sequence: Synthetic oligonucleotide
  misc_feature 1..20: note = Target: FXN; (-) strand; PAM type: YTN; PAM sequence: TTG
  source 1..20: mol_type = other DNA
tggcccttaaatgctccagt

SEQ ID NO: 26838 - DNA, 20 bp, synthetic construct
  misc_feature 1..20: note = Description of Artificial Sequence: Synthetic oligonucleotide
  misc_feature 1..20: note = Target: FXN; (-) strand; PAM type: YTN; PAM sequence: TTT
  source 1..20: mol_type = other DNA
gtggcccttaaatgctccag

SEQ ID NO: 26839 - DNA, 20 bp, synthetic construct
  misc_feature 1..20: note = Description of Artificial Sequence: Synthetic oligonucleotide
  misc_feature 1..20: note = Target: FXN; (-) strand; PAM type: YTN; PAM sequence: CTT
  source 1..20: mol_type = other DNA
tgtggcccttaaatgctcca

SEQ ID NO: 26840 - DNA, 20 bp, synthetic construct
  misc_feature 1..20: note = Description of Artificial Sequence: Synthetic oligonucleotide
  misc_feature 1..20: note = Target: FXN; (-) strand; PAM type: YTN; PAM sequence: CTC
  source 1..20: mol_type = other DNA
tttgtggcccttaaatgctc

SEQ ID NO: 26841 - DNA, 20 bp, synthetic construct
  misc_feature 1..20: note = Description of Artificial Sequence: Synthetic oligonucleotide
  misc_feature 1..20: note = Target: FXN; (-) strand; PAM type: YTN; PAM sequence: TTC
  source 1..20: mol_type = other DNA
tctttgtggcccttaaatgc

SEQ ID NO: 26842 - DNA, 20 bp, synthetic construct
  misc_feature 1..20: note = Description of Artificial Sequence: Synthetic oligonucleotide
  misc_feature 1..20: note = Target: FXN; (-) strand; PAM type: YTN; PAM sequence: TTG
  source 1..20: mol_type = other DNA
ttctctttgtggcccttaaa

SEQ ID NO: 26843 - DNA, 20 bp, synthetic construct
  misc_feature 1..20: note = Description of Artificial Sequence: Synthetic oligonucleotide
  misc_feature 1..20: note = Target: FXN; (-) strand; PAM type: YTN; PAM sequence: TTT
  source 1..20: mol_type = other DNA
gttctctttgtggcccttaa

SEQ ID NO: 26844 - DNA, 20 bp, synthetic construct
  misc_feature 1..20: note = Description of Artificial Sequence: Synthetic oligonucleotide
  misc_feature 1..20: note = Target: FXN; (-) strand; PAM type: YTN; PAM sequence: TTG
  source 1..20: mol_type = other DNA
gtaatttgttctctttgtgg

SEQ ID NO: 26845 - DNA, 20 bp, synthetic construct
  misc_feature 1..20: note = Description of Artificial Sequence: Synthetic oligonucleotide
  misc_feature 1..20: note = Target: FXN; (-) strand; PAM type: YTN; PAM sequence: CTC
  source 1..20: mol_type = other DNA
aaagaatcaacacacaatca

SEQ ID NO: 26846 - DNA, 20 bp, synthetic construct
  misc_feature 1..20: note = Description of Artificial Sequence: Synthetic oligonucleotide
  misc_feature 1..20: note = Target: FXN; (-) strand; PAM type: YTN; PAM sequence: TTA
  source 1..20: mol_type = other DNA
aagtataataataaaaaaaa

SEQ ID NO: 26847 - DNA, 20 bp, synthetic construct
  misc_feature 1..20: note = Description of Artificial Sequence: Synthetic oligonucleotide
  misc_feature 1..20: note = Target: FXN; (-) strand; PAM type: YTN; PAM sequence: CTT
  source 1..20: mol_type = other DNA
aaagtataataataaaaaaa

SEQ ID NO: 26848 - DNA, 20 bp, synthetic construct
  misc_feature 1..20: note = Description of Artificial Sequence: Synthetic oligonucleotide
  misc_feature 1..20: note = Target: FXN; (-) strand; PAM type: YTN; PAM sequence: CTA
  source 1..20: mol_type = other DNA
acacttaaagtataataata

SEQ ID NO: 26849 - DNA, 20 bp, synthetic construct
  misc_feature 1..20: note = Description of Artificial Sequence: Synthetic oligonucleotide
  misc_feature 1..20: note = Target: FXN; (-) strand; PAM type: YTN; PAM sequence: TTG
  source 1..20: mol_type = other DNA
tgcacatgtaccctaacact

SEQ ID NO: 26850 - DNA, 20 bp, synthetic construct
  misc_feature 1..20: note = Description of Artificial Sequence: Synthetic oligonucleotide
  misc_feature 1..20: note = Target: FXN; (-) strand; PAM type: YTN; PAM sequence: CTG
  source 1..20: mol_type = other DNA
cacattgtgcacatgtaccc

SEQ ID NO: 26851 - DNA, 20 bp, synthetic construct
  misc_feature 1..20: note = Description of Artificial Sequence: Synthetic oligonucleotide
  misc_feature 1..20: note = Target: FXN; (-) strand; PAM type: YTN; PAM sequence: CTA
  source 1..20: mol_type = other DNA
acctgcacattgtgcacatg

SEQ ID NO: 26852 - DNA, 20 bp, synthetic construct
  misc_feature 1..20: note = Description of Artificial Sequence: Synthetic oligonucleotide
  misc_feature 1..20: note = Target: FXN; (-) strand; PAM type: YTN; PAM sequence: TTA
  source 1..20: mol_type = other DNA
atgggtgcagcacaccagca

SEQ ID NO: 26853 - DNA, 20 bp, synthetic construct
  misc_feature 1..20: note = Description of Artificial Sequence: Synthetic oligonucleotide
  misc_feature 1..20: note = Target: FXN; (-) strand; PAM type: YTN; PAM sequence: CTA
  source 1..20: mol_type = other DNA
aatgacgagttaatgggtgc

SEQ ID NO: 26854 - DNA, 20 bp, synthetic construct
  misc_feature 1..20: note = Description of Artificial Sequence: Synthetic oligonucleotide
  misc_feature 1..20: note = Target: FXN; (-) strand; PAM type: YTN; PAM sequence: CTA
  source 1..20: mol_type = other DNA
atgctaaatgacgagttaat

SEQ ID NO: 26855 - DNA, 20 bp, synthetic construct
  misc_feature 1..20: note = Description of Artificial Sequence: Synthetic oligonucleotide
  misc_feature 1..20: note = Target: FXN; (-) strand; PAM type: YTN; PAM sequence: CTA
  source 1..20: mol_type = other DNA
tacctaatgctaaatgacga

SEQ ID NO: 26856 - DNA, 20 bp, synthetic construct
  misc_feature 1..20: note = Description of Artificial Sequence: Synthetic oligonucleotide
  misc_feature 1..20: note = Target: FXN; (-) strand; PAM type: YTN; PAM sequence: TTA
  source 1..20: mol_type = other DNA
ggagctatacctaatgctaa

SEQ ID NO: 26857 - DNA, 20 bp, synthetic construct
  misc_feature 1..20: note = Description of Artificial Sequence: Synthetic oligonucleotide
  misc_feature 1..20: note = Target: FXN; (-) strand; PAM type: YTN; PAM sequence: TTT
  source 1..20: mol_type = other DNA
aggagctatacctaatgcta

SEQ ID NO: 26858 - DNA, 20 bp, synthetic construct
  misc_feature 1..20: note = Description of Artificial Sequence: Synthetic oligonucleotide
  misc_feature 1..20: note = Target: FXN; (-) strand; PAM type: YTN; PAM sequence: CTT
  source 1..20: mol_type = other DNA
taggagctatacctaatgct

SEQ ID NO: 26859 - DNA, 20 bp, synthetic construct
  misc_feature 1..20: note = Description of Artificial Sequence: Synthetic oligonucleotide
  misc_feature 1..20: note = Target: FXN; (-) strand; PAM type: YTN; PAM sequence: TTG
  source 1..20: mol_type = other DNA
tggggtggagggagggggaa

SEQ ID NO: 26860 - DNA, 20 bp, synthetic construct
  misc_feature 1..20: note = Description of Artificial Sequence: Synthetic oligonucleotide
  misc_feature 1..20: note = Target: FXN; (-) strand; PAM type: YTN; PAM sequence: CTG
  source 1..20: mol_type = other DNA
ttgtggggtggagggagggg

SEQ ID NO: 26861 - DNA, 20 bp, synthetic construct
  misc_feature 1..20: note = Description of Artificial Sequence: Synthetic oligonucleotide
  misc_feature 1..20: note = Target: FXN; (-) strand; PAM type: YTN; PAM sequence: CTG
  source 1..20: mol_type = other DNA
gggactgttgtggggtggag

SEQ ID NO: 26862 - DNA, 20 bp, synthetic construct
  misc_feature 1..20: note = Description of Artificial Sequence: Synthetic oligonucleotide
  misc_feature 1..20: note = Target: FXN; (-) strand; PAM type: YTN; PAM sequence: CTC
  source 1..20: mol_type = other DNA
tggggactgttgtggggtgg

SEQ ID NO: 26863 - DNA, 20 bp, synthetic construct
  misc_feature 1..20: note = Description of Artificial Sequence: Synthetic oligonucleotide
  misc_feature 1..20: note = Target: FXN; (-) strand; PAM type: YTN; PAM sequence: CTG
  source 1..20: mol_type = other DNA
aacaatgagaacacatggtc

SEQ ID NO: 26864 - DNA, 20 bp, synthetic construct
  misc_feature 1..20: note = Description of Artificial Sequence: Synthetic oligonucleotide
  misc_feature 1..20: note = Target: FXN; (-) strand; PAM type: YTN; PAM sequence: CTC
  source 1..20: mol_type = other DNA
ataggtgggaactgaacaat

SEQ ID NO: 26865 - DNA, 20 bp, synthetic construct
  misc_feature 1..20: note = Description of Artificial Sequence: Synthetic oligonucleotide
  misc_feature 1..20: note = Target: FXN; (-) strand; PAM type: YTN; PAM sequence: CTC
  source 1..20: mol_type = other DNA
actcataggtgggaactgaa

SEQ ID NO: 26866 - DNA, 20 bp, synthetic construct
  misc_feature 1..20: note = Description of Artificial Sequence: Synthetic oligonucleotide
  misc_feature 1..20: note = Target: FXN; (-) strand; PAM type: YTN; PAM sequence: TTC
  source 1..20: mol_type = other DNA
tcactcataggtgggaactg

SEQ ID NO: 26867 - DNA, 20 bp, synthetic construct
  misc_feature 1..20: note = Description of Artificial Sequence: Synthetic oligonucleotide
  misc_feature 1..20: note = Target: FXN; (-) strand; PAM type: YTN; PAM sequence: CTG
  source 1..20: mol_type = other DNA
catattctcactcataggtg

SEQ ID NO: 26868 - DNA, 20 bp, synthetic construct
  misc_feature 1..20: note = Description of Artificial Sequence: Synthetic oligonucleotide
  misc_feature 1..20: note = Target: FXN; (-) strand; PAM type: YTN; PAM sequence: CTA
  source 1..20: mol_type = other DNA
tcgcaagaacaaaaaatcaa

SEQ ID NO: 26869 - DNA, 20 bp, synthetic construct
  misc_feature 1..20: note = Description of Artificial Sequence: Synthetic oligonucleotide
  misc_feature 1..20: note = Target: FXN; (-) strand; PAM type: YTN; PAM sequence: CTC
  source 1..20: mol_type = other DNA
agtaaactatcgcaagaaca

SEQ ID NO: 26870 - DNA, 20 bp, synthetic construct
  misc_feature 1..20: note = Description of Artificial Sequence: Synthetic oligonucleotide
  misc_feature 1..20: note = Target: FXN; (-) strand; PAM type: YTN; PAM sequence: TTC
  source 1..20: mol_type = other DNA
tcagtaaactatcgcaagaa

SEQ ID NO: 26871 - DNA, 20 bp, synthetic construct
  misc_feature 1..20: note = Description of Artificial Sequence: Synthetic oligonucleotide
  misc_feature 1..20: note = Target: FXN; (-) strand; PAM type: YTN; PAM sequence: CTG
  source 1..20: mol_type = other DNA
gaaatcatcattctcagtaa

SEQ ID NO: 26872 - DNA, 20 bp, synthetic construct
  misc_feature 1..20: note = Description of Artificial Sequence: Synthetic oligonucleotide
  misc_feature 1..20: note = Target: FXN; (-) strand; PAM type: YTN; PAM sequence: TTG
  source 1..20: mol_type = other DNA
tagggacatggatgaaactg

SEQ ID NO: 26873 - DNA, 20 bp, synthetic construct
  misc_feature 1..20: note = Description of Artificial Sequence: Synthetic oligonucleotide
  misc_feature 1..20: note = Target: FXN; (-) strand; PAM type: YTN; PAM sequence: TTT
  source 1..20: mol_type = other DNA
gtagggacatggatgaaact

SEQ ID NO: 26874 - DNA, 20 bp, synthetic construct
  misc_feature 1..20: note = Description of Artificial Sequence: Synthetic oligonucleotide
  misc_feature 1..20: note = Target: FXN; (-) strand; PAM type: YTN; PAM sequence: CTT
  source 1..20: mol_type = other DNA
tgtagggacatggatgaaac

SEQ ID NO: 26875 - DNA, 20 bp, synthetic construct
  misc_feature 1..20: note = Description of Artificial Sequence: Synthetic oligonucleotide
  misc_feature 1..20: note = Target: FXN; (-) strand; PAM type: YTN; PAM sequence: TTC
  source 1..20: mol_type = other DNA
atgtcctttgtagggacatg

SEQ ID NO: 26876 - DNA, 20 bp, synthetic construct
  misc_feature 1..20: note = Description of Artificial Sequence: Synthetic oligonucleotide
  misc_feature 1..20: note = Target: FXN; (-) strand; PAM type: YTN; PAM sequence: CTA
  source 1..20: mol_type = other DNA
tgcagcaataaaaaatgatg

SEQ ID NO: 26877 - DNA, 20 bp, synthetic construct
  misc_feature 1..20: note = Description of Artificial Sequence: Synthetic oligonucleotide
  misc_feature 1..20: note = Target: FXN; (-) strand; PAM type: YTN; PAM sequence: TTA
  source 1..20: mol_type = other DNA
agaaaatgtggcacatatac

SEQ ID NO: 26878 - DNA, 20 bp, synthetic construct
  misc_feature 1..20: note = Description of Artificial Sequence: Synthetic oligonucleotide
  misc_feature 1..20: note = Target: FXN; (-) strand; PAM type: YTN; PAM sequence: CTG
  source 1..20: mol_type = other DNA
gattaagaaaatgtggcaca

SEQ ID NO: 26879 - DNA, 20 bp, synthetic construct
  misc_feature 1..20: note = Description of Artificial Sequence: Synthetic oligonucleotide
  misc_feature 1..20: note = Target: FXN; (-) strand; PAM type: YTN; PAM sequence: CTC
  source 1..20: mol_type = other DNA
atccaacaatgatagactgg

SEQ ID NO: 26880 - DNA, 20 bp, synthetic construct
  misc_feature 1..20: note = Description of Artificial Sequence: Synthetic oligonucleotide
  misc_feature 1..20: note = Target: FXN; (-) strand; PAM type: YTN; PAM sequence: TTC
  source 1..20: mol_type = other DNA
catgagataaagagctcatc

SEQ ID NO: 26881 - DNA, 20 bp, synthetic construct
  misc_feature 1..20: note = Description of Artificial Sequence: Synthetic oligonucleotide
  misc_feature 1..20: note = Target: FXN; (-) strand; PAM type: YTN; PAM sequence: TTT
  source 1..20: mol_type = other DNA
ccatgagataaagagctcat

SEQ ID NO: 26882 - DNA, 20 bp, synthetic construct
  misc_feature 1..20: note = Description of Artificial Sequence: Synthetic oligonucleotide
  misc_feature 1..20: note = Target: FXN; (-) strand; PAM type: YTN; PAM sequence: TTT
  source 1..20: mol_type = other DNA
tccatgagataaagagctca

SEQ ID NO: 26883 - DNA, 20 bp, synthetic construct
  misc_feature 1..20: note = Description of Artificial Sequence: Synthetic oligonucleotide
  misc_feature 1..20: note = Target: FXN; (-) strand; PAM type: YTN; PAM sequence: TTT
  source 1..20: mol_type = other DNA
ttccatgagataaagagctc

SEQ ID NO: 26884 - DNA, 20 bp, synthetic construct
  misc_feature 1..20: note = Description of Artificial Sequence: Synthetic oligonucleotide
  misc_feature 1..20: note = Target: FXN; (-) strand; PAM type: YTN; PAM sequence: TTA
  source 1..20: mol_type = other DNA
tttttccatgagataaagag

SEQ ID NO: 26885 - DNA, 20 bp, synthetic construct
  misc_feature 1..20: note = Description of Artificial Sequence: Synthetic oligonucleotide
  misc_feature 1..20: note = Target: FXN; (-) strand; PAM type: YTN; PAM sequence: TTA
  source 1..20: mol_type = other DNA
taaattatttttccatgaga

SEQ ID NO: 26886 - DNA, 20 bp, synthetic construct
  misc_feature 1..20: note = Description of Artificial Sequence: Synthetic oligonucleotide
  misc_feature 1..20: note = Target: FXN; (-) strand; PAM type: YTN; PAM sequence: TTT
  source 1..20: mol_type = other DNA
ataaattatttttccatgag

SEQ ID NO: 26887 - DNA, 20 bp, synthetic construct
  misc_feature 1..20: note = Description of Artificial Sequence: Synthetic oligonucleotide
  misc_feature 1..20: note = Target: FXN; (-) strand; PAM type: YTN; PAM sequence: TTT
  source 1..20: mol_type = other DNA
tataaattatttttccatga

SEQ ID NO: 26888 - DNA, 20 bp, synthetic construct
  misc_feature 1..20: note = Description of Artificial Sequence: Synthetic oligonucleotide
  misc_feature 1..20: note = Target: FXN; (-) strand; PAM type: YTN; PAM sequence: CTC
  source 1..20: mol_type = other DNA
atacagagttttataaatta

SEQ ID NO: 26889 - DNA, 20 bp, synthetic construct
  misc_feature 1..20: note = Description of Artificial Sequence: Synthetic oligonucleotide
  misc_feature 1..20: note = Target: FXN; (-) strand; PAM type: YTN; PAM sequence: CTC
  source 1..20: mol_type = other DNA
tcatacagagttttataaat

SEQ ID NO: 26890 - DNA, 20 bp, synthetic construct
  misc_feature 1..20: note = Description of Artificial Sequence: Synthetic oligonucleotide
  misc_feature 1..20: note = Target: FXN; (-) strand; PAM type: YTN; PAM sequence: CTC
  source 1..20: mol_type = other DNA
ctctcatacagagttttata

SEQ ID NO: 26891 - DNA, 20 bp, synthetic construct
  misc_feature 1..20: note = Description of Artificial Sequence: Synthetic oligonucleotide
  misc_feature 1..20: note = Target: FXN; (-) strand; PAM type: YTN; PAM sequence: TTC
  source 1..20: mol_type = other DNA
ccactcctctcatacagagt

SEQ ID NO: 26892 - DNA, 20 bp, synthetic construct
  misc_feature 1..20: note = Description of Artificial Sequence: Synthetic oligonucleotide
  misc_feature 1..20: note = Target: FXN; (-) strand; PAM type: YTN; PAM sequence: TTT
  source 1..20: mol_type = other DNA
cccactcctctcatacagag

SEQ ID NO: 26893 - DNA, 20 bp, synthetic construct
  misc_feature 1..20: note = Description of Artificial Sequence: Synthetic oligonucleotide
  misc_feature 1..20: note = Target: FXN; (-) strand; PAM type: YTN; PAM sequence: CTA
  source 1..20: mol_type = other DNA
tttcccactcctctcataca

SEQ ID NO: 26894 - DNA, 20 bp, synthetic construct
  misc_feature 1..20: note = Description of Artificial Sequence: Synthetic oligonucleotide
  misc_feature 1..20: note = Target: FXN; (-) strand; PAM type: YTN; PAM sequence: TTA
  source 1..20: mol_type = other DNA
atactatttcccactcctct

SEQ ID NO: 26895 - DNA, 20 bp, synthetic construct
  misc_feature 1..20: note = Description of Artificial Sequence: Synthetic oligonucleotide
  misc_feature 1..20: note = Target: FXN; (-) strand; PAM type: YTN; PAM sequence: TTG
  source 1..20: mol_type = other DNA
tcccaaaaagaaaccccgca

SEQ ID NO: 26896 - DNA, 20 bp, synthetic construct
  misc_feature 1..20: note = Description of Artificial Sequence: Synthetic oligonucleotide
  misc_feature 1..20: note = Target: FXN; (-) strand; PAM type: YTN; PAM sequence: TTC
  source 1..20: mol_type = other DNA
cattgtcccaaaaagaaacc

SEQ ID NO: 26897 - DNA, 20 bp, synthetic construct
  misc_feature 1..20: note = Description of Artificial Sequence: Synthetic oligonucleotide
  misc_feature 1..20: note = Target: FXN; (-) strand; PAM type: YTN; PAM sequence: TTT
  source 1..20: mol_type = other DNA
ccattgtcccaaaaagaaac

SEQ ID NO: 26898 - DNA, 20 bp, synthetic construct
  misc_feature 1..20: note = Description of Artificial Sequence: Synthetic oligonucleotide
  misc_feature 1..20: note = Target: FXN; (-) strand; PAM type: YTN; PAM sequence: CTA
  source 1..20: mol_type = other DNA
tttccattgtcccaaaaaga

SEQ ID NO: 26899 - DNA, 20 bp, synthetic construct
  misc_feature 1..20: note = Description of Artificial Sequence: Synthetic oligonucleotide
  misc_feature 1..20: note = Target: FXN; (-) strand; PAM type: YTN; PAM sequence: TTC
  source 1..20: mol_type = other DNA
cagctatttccattgtccca

SEQ ID NO: 26900 - DNA, 20 bp, synthetic construct
  misc_feature 1..20: note = Description of Artificial Sequence: Synthetic oligonucleotide
  misc_feature 1..20: note = Target: FXN; (-) strand; PAM type: YTN; PAM sequence: CTA
  source 1..20: mol_type = other DNA
attccagctatttccattgt

SEQ ID NO: 26901 - DNA, 20 bp, synthetic construct
  misc_feature 1..20: note = Description of Artificial Sequence: Synthetic oligonucleotide
  misc_feature 1..20: note = Target: FXN; (-) strand; PAM type: YTN; PAM sequence: CTA
  source 1..20: mol_type = other DNA
tctaattccagctatttcca

SEQ ID NO: 26902 - DNA, 20 bp, synthetic construct
  misc_feature 1..20: note = Description of Artificial Sequence: Synthetic oligonucleotide
  misc_feature 1..20: note = Target: FXN; (-) strand; PAM type: YTN; PAM sequence: TTC
  source 1..20: mol_type = other DNA
acaaagtgtgcaaacatcac

SEQ ID NO: 26903 - DNA, 20 bp, synthetic construct
  misc_feature 1..20: note = Description of Artificial Sequence: Synthetic oligonucleotide
  misc_feature 1..20: note = Target: FXN; (-) strand; PAM type: YTN; PAM sequence: TTT
  source 1..20: mol_type = other DNA
cacaaagtgtgcaaacatca

SEQ ID NO: 26904 - DNA, 20 bp, synthetic construct
  misc_feature 1..20: note = Description of Artificial Sequence: Synthetic oligonucleotide
  misc_feature 1..20: note = Target: FXN; (-) strand; PAM type: YTN; PAM sequence: TTA
  source 1..20: mol_type = other DNA
gtatttcacaaagtgtgcaa

SEQ ID NO: 26905 - DNA, 20 bp, synthetic construct
  misc_feature 1..20: note = Description of Artificial Sequence: Synthetic oligonucleotide
  misc_feature 1..20: note = Target: FXN; (-) strand; PAM type: YTN; PAM sequence: TTT
  source 1..20: mol_type = other DNA
agtatttcacaaagtgtgca

SEQ ID NO: 26906 - DNA, 20 bp, synthetic construct
  misc_feature 1..20: note = Description of Artificial Sequence: Synthetic oligonucleotide
  misc_feature 1..20: note = Target: FXN; (-) strand; PAM type: YTN; PAM sequence: TTT
  source 1..20: mol_type = other DNA
tagtatttcacaaagtgtgc

SEQ ID NO: 26907 - DNA, 20 bp, synthetic construct
  misc_feature 1..20: note = Description of Artificial Sequence: Synthetic oligonucleotide
  misc_feature 1..20: note = Target: FXN; (-) strand; PAM type: YTN; PAM sequence: TTT
  source 1..20: mol_type = other DNA
ttagtatttcacaaagtgtg

SEQ ID NO: 26908 - DNA, 20 bp, synthetic construct
  misc_feature 1..20: note = Description of Artificial Sequence: Synthetic oligonucleotide
  misc_feature 1..20: note = Target: FXN; (-) strand; PAM type: YTN; PAM sequence: TTC
  source 1..20: mol_type = other DNA
aggagtttttagtatttcac

SEQ ID NO: 26909 - DNA, 20 bp, synthetic construct
  misc_feature 1..20: note = Description of Artificial Sequence: Synthetic oligonucleotide
  misc_feature 1..20: note = Target: FXN; (-) strand; PAM type: YTN; PAM sequence: CTG
  source 1..20: mol_type = other DNA
tataattcaggagtttttag

SEQ ID NO: 26910 - DNA, 20 bp, synthetic construct
  misc_feature 1..20: note = Description of Artificial Sequence: Synthetic oligonucleotide
  misc_feature 1..20: note = Target: FXN; (-) strand; PAM type: YTN; PAM sequence: TTA
  source 1..20: mol_type = other DNA
aaactgtataattcaggagt

SEQ ID NO: 26911 - DNA, 20 bp, synthetic construct
  misc_feature 1..20: note = Description of Artificial Sequence: Synthetic oligonucleotide
  misc_feature 1..20: note = Target: FXN; (-) strand; PAM type: YTN; PAM sequence: CTT
  source 1..20: mol_type = other DNA
aaaactgtataattcaggag

SEQ ID NO: 26912 - DNA, 20 bp, synthetic construct
  misc_feature 1..20: note = Description of Artificial Sequence: Synthetic oligonucleotide
  misc_feature 1..20: note = Target: FXN; (-) strand; PAM type: YTN; PAM sequence: TTC
  source 1..20: mol_type = other DNA
ttaaaactgtataattcagg

SEQ ID NO: 26913 - DNA, 20 bp, synthetic construct
  misc_feature 1..20: note = Description of Artificial Sequence: Synthetic oligonucleotide
  misc_feature 1..20: note = Target: FXN; (-) strand; PAM type: YTN; PAM sequence: TTT
  source 1..20: mol_type = other DNA
cttaaaactgtataattcag

SEQ ID NO: 26914 - DNA, 20 bp, synthetic construct
  misc_feature 1..20: note = Description of Artificial Sequence: Synthetic oligonucleotide
  misc_feature 1..20: note = Target: FXN; (-) strand; PAM type: YTN; PAM sequence: CTC
  source 1..20: mol_type = other DNA
aaaaacaaataaataaaagt

SEQ ID NO: 26915 - DNA, 20 bp, synthetic construct
  misc_feature 1..20: note = Description of Artificial Sequence: Synthetic oligonucleotide
  misc_feature 1..20: note = Target: FXN; (-) strand; PAM type: YTN; PAM sequence: CTC
  source 1..20: mol_type = other DNA
tcaaaaacaaataaataaaa

SEQ ID NO: 26916 - DNA, 20 bp, synthetic construct
  misc_feature 1..20: note = Description of Artificial Sequence: Synthetic oligonucleotide
  misc_feature 1..20: note = Target: FXN; (-) strand; PAM type: YTN; PAM sequence: TTC
  source 1..20: mol_type = other DNA
tctcaaaaacaaataaataa

SEQ ID NO: 26917 - DNA, 20 bp, synthetic construct
  misc_feature 1..20: note = Description of Artificial Sequence: Synthetic oligonucleotide
  misc_feature 1..20: note = Target: FXN; (-) strand; PAM type: YTN; PAM sequence: CTT
  source 1..20: mol_type = other DNA
ctctcaaaaacaaataaata

SEQ ID NO: 26918 - DNA, 20 bp, synthetic construct
  misc_feature 1..20: note = Description of Artificial Sequence: Synthetic oligonucleotide
  misc_feature 1..20: note = Target: FXN; (-) strand; PAM type: YTN; PAM sequence: CTG
  source 1..20: mol_type = other DNA
ggtgacacagagaacttctc

SEQ ID NO: 26919 - DNA, 20 bp, synthetic construct
  misc_feature 1..20: note = Description of Artificial Sequence: Synthetic oligonucleotide
  misc_feature 1..20: note = Target: FXN; (-) strand; PAM type: YTN; PAM sequence: TTC
  source 1..20: mol_type = other DNA
agcctgggtgacacagagaa

SEQ ID NO: 26920 - DNA, 20 bp, synthetic construct
  misc_feature 1..20: note = Description of Artificial Sequence: Synthetic oligonucleotide
  misc_feature 1..20: note = Target: FXN; (-) strand; PAM type: YTN; PAM sequence: CTT
  source 1..20: mol_type = other DNA
cagcctgggtgacacagaga

SEQ ID NO: 26921 - DNA, 20 bp, synthetic construct
  misc_feature 1..20: note = Description of Artificial Sequence: Synthetic oligonucleotide
  misc_feature 1..20: note = Target: FXN; (-) strand; PAM type: YTN; PAM sequence: CTG
  source 1..20: mol_type = other DNA
caataaccggtgatcacgcc

SEQ ID NO: 26922 - DNA, 20 bp, synthetic construct
  misc_feature 1..20: note = Description of Artificial Sequence: Synthetic oligonucleotide
  misc_feature 1..20: note = Target: FXN; (-) strand; PAM type: YTN; PAM sequence: TTG
  source 1..20: mol_type = other DNA
aggctgcaataaccggtgat

SEQ ID NO: 26923 - DNA, 20 bp, synthetic construct
  misc_feature 1..20: note = Description of Artificial Sequence: Synthetic oligonucleotide
  misc_feature 1..20: note = Target: FXN; (-) strand; PAM type: YTN; PAM sequence: CTC
  source 1..20: mol_type = other DNA
agagattgaggctgcaataa

SEQ ID NO: 26924 - DNA, 20 bp, synthetic construct
  misc_feature 1..20: note = Description of Artificial Sequence: Synthetic oligonucleotide
  misc_feature 1..20: note = Target: FXN; (-) strand; PAM type: YTN; PAM sequence: TTG
  source 1..20: mol_type = other DNA
agcctcagagattgaggctg

SEQ ID NO: 26925 - DNA, 20 bp, synthetic construct
  misc_feature 1..20: note = Description of Artificial Sequence: Synthetic oligonucleotide
  misc_feature 1..20: note = Target: FXN; (-) strand; PAM type: YTN; PAM sequence: CTT
  source 1..20: mol_type = other DNA
gagcctcagagattgaggct

SEQ ID NO: 26926 - DNA, 20 bp, synthetic construct
  misc_feature 1..20: note = Description of Artificial Sequence: Synthetic oligonucleotide
  misc_feature 1..20: note = Target: FXN; (-) strand; PAM type: YTN; PAM sequence: CTG
  source 1..20: mol_type = other DNA
aggtgggagaatcgcttgag

SEQ ID NO: 26927 - DNA, 20 bp, synthetic construct
  misc_feature 1..20: note = Description of Artificial Sequence: Synthetic oligonucleotide
  misc_feature 1..20: note = Target: FXN; (-) strand; PAM type: YTN; PAM sequence: TTG
  source 1..20: mol_type = other DNA
gtaggctgaggtgggagaat

SEQ ID NO: 26928 - DNA, 20 bp, synthetic construct
  misc_feature 1..20: note = Description of Artificial Sequence: Synthetic oligonucleotide
  misc_feature 1..20: note = Target: FXN; (-) strand; PAM type: YTN; PAM sequence: CTT
  source 1..20: mol_type = other DNA
ggtaggctgaggtgggagaa

SEQ ID NO: 26929 - DNA, 20 bp, synthetic construct
  misc_feature 1..20: note = Description of Artificial Sequence: Synthetic oligonucleotide
  misc_feature 1..20: note = Target: FXN; (-) strand; PAM type: YTN; PAM sequence: CTA
  source 1..20: mol_type = other DNA
cttggtaggctgaggtggga

SEQ ID NO: 26930 - DNA, 20 bp, synthetic construct
  misc_feature 1..20: note = Description of Artificial Sequence: Synthetic oligonucleotide
  misc_feature 1..20: note = Target: FXN; (-) strand; PAM type: YTN; PAM sequence: CTA
  source 1..20: mol_type = other DNA
tagtcacatctacttggtag

SEQ ID NO: 26931 - DNA, 20 bp, synthetic construct
  misc_feature 1..20: note = Description of Artificial Sequence: Synthetic oligonucleotide
  misc_feature 1..20: note = Target: FXN; (-) strand; PAM type: YTN; PAM sequence: CTG
  source 1..20: mol_type = other DNA
ggtgtggtggtgcgcaccta

SEQ ID NO: 26932 - DNA, 20 bp, synthetic construct
  misc_feature 1..20: note = Description of Artificial Sequence: Synthetic oligonucleotide
  misc_feature 1..20: note = Target: FXN; (-) strand; PAM type: YTN; PAM sequence: TTC
  source 1..20: mol_type = other DNA
actgggtgtggtggtgcgca

SEQ ID NO: 26933 - DNA, 20 bp, synthetic construct
  misc_feature 1..20: note = Description of Artificial Sequence: Synthetic oligonucleotide
  misc_feature 1..20: note = Target: FXN; (-) strand; PAM type: YTN; PAM sequence: TTA
  source 1..20: mol_type = other DNA
caaattcactgggtgtggtg

SEQ ID NO: 26934 - DNA, 20 bp, synthetic construct
  misc_feature 1..20: note = Description of Artificial Sequence: Synthetic oligonucleotide
  misc_feature 1..20: note = Target: FXN; (-) strand; PAM type: YTN; PAM sequence: TTA
  source 1..20: mol_type = other DNA
caaaaaattacaaattcact

SEQ ID NO: 26935 - DNA, 20 bp, synthetic construct
  misc_feature 1..20: note = Description of Artificial Sequence: Synthetic oligonucleotide
  misc_feature 1..20: note = Target: FXN; (-) strand; PAM type: YTN; PAM sequence: TTT
  source 1..20: mol_type = other DNA
acaaaaaattacaaattcac

SEQ ID NO: 26936 - DNA, 20 bp, synthetic construct
  misc_feature 1..20: note = Description of Artificial Sequence: Synthetic oligonucleotide
  misc_feature 1..20: note = Target: FXN; (-) strand; PAM type: YTN; PAM sequence: TTT
  source 1..20: mol_type = other DNA
tacaaaaaattacaaattca

SEQ ID NO: 26937 - DNA, 20 bp, synthetic construct
  misc_feature 1..20: note = Description of Artificial Sequence: Synthetic oligonucleotide
  misc_feature 1..20: note = Target: FXN; (-) strand; PAM type: YTN; PAM sequence: TTT
  source 1..20: mol_type = other DNA
ttacaaaaaattacaaattc

SEQ ID NO: 26938 - DNA, 20 bp, synthetic construct
  misc_feature 1..20: note = Description of Artificial Sequence: Synthetic oligonucleotide
  misc_feature 1..20: note = Target: FXN; (-) strand; PAM type: YTN; PAM sequence: TTG
  source 1..20: mol_type = other DNA
tttttacaaaaaattacaaa

SEQ ID NO: 26939 - DNA, 20 bp, synthetic construct
  misc_feature 1..20: note = Description of Artificial Sequence: Synthetic oligonucleotide
  misc_feature 1..20: note = Target: FXN; (-) strand; PAM type: YTN; PAM sequence: CTT
  source 1..20: mol_type = other DNA
gtttttacaaaaaattacaa

SEQ ID NO: 26940 - DNA, 20 bp, synthetic construct
  misc_feature 1..20: note = Description of Artificial Sequence: Synthetic oligonucleotide
  misc_feature 1..20: note = Target: FXN; (-) strand; PAM type: YTN; PAM sequence: CTG
  source 1..20: mol_type = other DNA
ggcaacatggtaaaaccttg

SEQ ID NO: 26941 - DNA, 20 bp, synthetic construct
  misc_feature 1..20: note = Description of Artificial Sequence: Synthetic oligonucleotide
  misc_feature 1..20: note = Target: FXN; (-) strand; PAM type: YTN; PAM sequence: TTC
  source 1..20: mol_type = other DNA
aagaccagactgggcaacat

SEQ ID NO: 26942 - DNA, 20 bp, synthetic construct
  misc_feature 1..20: note = Description of Artificial Sequence: Synthetic oligonucleotide
  misc_feature 1..20: note = Target: FXN; (-) strand; PAM type: YTN; PAM sequence: TTG
  source 1..20: mol_type = other DNA
ggcccaggagttcaagacca

SEQ ID NO: 26943 - DNA, 20 bp, synthetic construct
  misc_feature 1..20: note = Description of Artificial Sequence: Synthetic oligonucleotide
  misc_feature 1..20: note = Target: FXN; (-) strand; PAM type: YTN; PAM sequence: CTT
  source 1..20: mol_type = other DNA
gggcccaggagttcaagacc

SEQ ID NO: 26944 - DNA, 20 bp, synthetic construct
  misc_feature 1..20: note = Description of Artificial Sequence: Synthetic oligonucleotide
  misc_feature 1..20: note = Target: FXN; (-) strand; PAM type: YTN; PAM sequence: TTC
  source 1..20: mol_type = other DNA
gggagcccaaggagggagga

SEQ ID NO: 26945 - DNA, 20 bp, synthetic construct
  misc_feature 1..20: note = Description of Artificial Sequence: Synthetic oligonucleotide
  misc_feature 1..20: note = Target: FXN; (-) strand; PAM type: YTN; PAM sequence: CTT
  source 1..20: mol_type = other DNA
cgggagcccaaggagggagg

SEQ ID NO: 26946 - DNA, 20 bp, synthetic construct
  misc_feature 1..20: note = Description of Artificial Sequence: Synthetic oligonucleotide
  misc_feature 1..20: note = Target: FXN; (-) strand; PAM type: YTN; PAM sequence: CTG
  source 1..20: mol_type = other DNA
gcacttcgggagcccaagga

SEQ ID NO: 26947 - DNA, 20 bp, synthetic construct
  misc_feature 1..20: note = Description of Artificial Sequence: Synthetic oligonucleotide
  misc_feature 1..20: note = Target: FXN; (-) strand; PAM type: YTN; PAM sequence: TTG
  source 1..20: mol_type = other DNA
tatcctggcacttcgggagc

SEQ ID NO: 26948 - DNA, 20 bp, synthetic construct
  misc_feature 1..20: note = Description of Artificial Sequence: Synthetic oligonucleotide
  misc_feature 1..20: note = Target: FXN; (-) strand; PAM type: YTN; PAM sequence: CTT
  source 1..20: mol_type = other DNA
gtatcctggcacttcgggag

SEQ ID NO: 26949 - DNA, 20 bp, synthetic construct
  misc_feature 1..20: note = Description of Artificial Sequence: Synthetic oligonucleotide
  misc_feature 1..20: note = Target: FXN; (-) strand; PAM type: YTN; PAM sequence: CTC
  source 1..20: mol_type = other DNA
atgcttgtatcctggcactt

SEQ ID NO: 26950 - DNA, 20 bp, synthetic construct
  misc_feature 1..20: note = Description of Artificial Sequence: Synthetic oligonucleotide
  misc_feature 1..20: note = Target: FXN; (-) strand; PAM type: YTN; PAM sequence: CTG
  source 1..20: mol_type = other DNA
catgtggtgactcatgcttg

SEQ ID NO: 26951 - DNA, 20 bp, synthetic construct
  misc_feature 1..20: note = Description of Artificial Sequence: Synthetic oligonucleotide
  misc_feature 1..20: note = Target: FXN; (-) strand; PAM type: YTN; PAM sequence: CTG
  source 1..20: mol_type = other DNA
aggctgcatgtggtgactca

SEQ ID NO: 26952 - DNA, 20 bp, synthetic construct
  misc_feature 1..20: note = Description of Artificial Sequence: Synthetic oligonucleotide
  misc_feature 1..20: note = Target: FXN; (-) strand; PAM type: YTN; PAM sequence: TTA
  source 1..20: mol_type = other DNA
aaactgaggctgcatgtggt

SEQ ID NO: 26953 - DNA, 20 bp, synthetic construct
  misc_feature 1..20: note = Description of Artificial Sequence: Synthetic oligonucleotide
  misc_feature 1..20: note = Target: FXN; (-) strand; PAM type: YTN; PAM sequence: CTT
  source 1..20: mol_type = other DNA
aaaactgaggctgcatgtgg

SEQ ID NO: 26954 - DNA, 20 bp, synthetic construct
  misc_feature 1..20: note = Description of Artificial Sequence: Synthetic oligonucleotide
  misc_feature 1..20: note = Target: FXN; (-) strand; PAM type: YTN; PAM sequence: TTC
  source 1..20: mol_type = other DNA
ttaaaactgaggctgcatgt

SEQ ID NO: 26955 - DNA, 20 bp, synthetic construct
  misc_feature 1..20: note = Description of Artificial Sequence: Synthetic oligonucleotide
  misc_feature 1..20: note = Target: FXN; (-) strand; PAM type: YTN; PAM sequence: TTT
  source 1..20: mol_type = other DNA
cttaaaactgaggctgcatg

SEQ ID NO: 26956 - DNA, 20 bp, synthetic construct
  misc_feature 1..20: note = Description of Artificial Sequence: Synthetic oligonucleotide
  misc_feature 1..20: note = Target: FXN; (-) strand; PAM type: YTN; PAM sequence: TTA
  source 1..20: mol_type = other DNA
aaagtttcttaaaactgagg

SEQ ID NO: 26957 - DNA, 20 bp, synthetic construct
  misc_feature 1..20: note = Description of Artificial Sequence: Synthetic oligonucleotide
  misc_feature 1..20: note = Target: FXN; (-) strand; PAM type: YTN; PAM sequence: TTT
  source 1..20: mol_type = other DNA
aaaagtttcttaaaactgag

SEQ ID NO: 26958 - DNA, 20 bp, synthetic construct
  misc_feature 1..20: note = Description of Artificial Sequence: Synthetic oligonucleotide
  misc_feature 1..20: note = Target: FXN; (-) strand; PAM type: YTN; PAM sequence: TTA
  source 1..20: mol_type = other DNA
tttaaaagtttcttaaaact

SEQ ID NO: 26959 - DNA, 20 bp, synthetic construct
  misc_feature 1..20: note = Description of Artificial Sequence: Synthetic oligonucleotide
  misc_feature 1..20: note = Target: FXN; (-) strand; PAM type: YTN; PAM sequence: TTT
  source 1..20: mol_type = other DNA
atttaaaagtttcttaaaac

SEQ ID NO: 26960 - DNA, 20 bp, synthetic construct
  misc_feature 1..20: note = Description of Artificial Sequence: Synthetic oligonucleotide
  misc_feature 1..20: note = Target: FXN; (-) strand; PAM type: YTN; PAM sequence: TTC
  source 1..20: mol_type = other DNA
atttatttaaaagtttctta

SEQ ID NO: 26961 - DNA, 20 bp, synthetic construct
  misc_feature 1..20: note = Description of Artificial Sequence: Synthetic oligonucleotide
  misc_feature 1..20: note = Target: FXN; (-) strand; PAM type: YTN; PAM sequence: TTT
  source 1..20: mol_type = other DNA
catttatttaaaagtttctt

SEQ ID NO: 26962 - DNA, 20 bp, synthetic construct
  misc_feature 1..20: note = Description of Artificial Sequence: Synthetic oligonucleotide
  misc_feature 1..20: note = Target: FXN; (-) strand; PAM type: YTN; PAM sequence: CTA
  source 1..20: mol_type = other DNA
tatttcatttatttaaaagt

SEQ ID NO: 26963 - DNA, 20 bp, synthetic construct
  misc_feature 1..20: note = Description of Artificial Sequence: Synthetic oligonucleotide
  misc_feature 1..20: note = Target: FXN; (-) strand; PAM type: YTN; PAM sequence: TTG
  source 1..20: mol_type = other DNA
gtatgactatatttcattta

SEQ ID NO: 26964 - DNA, 20 bp, synthetic construct
  misc_feature 1..20: note = Description of Artificial Sequence: Synthetic oligonucleotide
  misc_feature 1..20: note = Target: FXN; (-) strand; PAM type: YTN; PAM sequence: TTT
  source 1..20: mol_type = other DNA
ggtatgactatatttcattt

SEQ ID NO: 26965 - DNA, 20 bp, synthetic construct
  misc_feature 1..20: note = Description of Artificial Sequence: Synthetic oligonucleotide
  misc_feature 1..20: note = Target: FXN; (-) strand; PAM type: YTN; PAM sequence: TTT
  source 1..20: mol_type = other DNA
tggtatgactatatttcatt

SEQ ID NO: 26966 - DNA, 20 bp, synthetic construct
  misc_feature 1..20: note = Description of Artificial Sequence: Synthetic oligonucleotide
  misc_feature 1..20: note = Target: FXN; (-) strand; PAM type: YTN; PAM sequence: CTG
  source 1..20: mol_type = other DNA
ttttggtatgactatatttc

SEQ ID NO: 26967 - DNA, 20 bp, synthetic construct
  misc_feature 1..20: note = Description of Artificial Sequence: Synthetic oligonucleotide
  misc_feature 1..20: note = Target: FXN; (-) strand; PAM type: YTN; PAM sequence: TTA
  source 1..20: mol_type = other DNA
ctgttttggtatgactatat

SEQ ID NO: 26968 - DNA, 20 bp, synthetic construct
  misc_feature 1..20: note = Description of Artificial Sequence: Synthetic oligonucleotide
  misc_feature 1..20: note = Target: FXN; (-) strand; PAM type: YTN; PAM sequence: TTT
  source 1..20: mol_type = other DNA
actgttttggtatgactata

SEQ ID NO: 26969 - DNA, 20 bp, synthetic construct
  misc_feature 1..20: note = Description of Artificial Sequence: Synthetic oligonucleotide
  misc_feature 1..20: note = Target: FXN; (-) strand; PAM type: YTN; PAM sequence: TTT
  source 1..20: mol_type = other DNA
tactgttttggtatgactat

SEQ ID NO: 26970 - DNA, 20 bp, synthetic construct
  misc_feature 1..20: note = Description of Artificial Sequence: Synthetic oligonucleotide
  misc_feature 1..20: note = Target: FXN; (-) strand; PAM type: YTN; PAM sequence: TTT
  source 1..20: mol_type = other DNA
ttactgttttggtatgacta

SEQ ID NO: 26971 - DNA, 20 bp, synthetic construct
  misc_feature 1..20: note = Description of Artificial Sequence: Synthetic oligonucleotide
  misc_feature 1..20: note = Target: FXN; (-) strand; PAM type: YTN; PAM sequence: CTG
  source 1..20: mol_type = other DNA
aaacccatttttactgtttt

SEQ ID NO: 26972 - DNA, 20 bp, synthetic construct
  misc_feature 1..20: note = Description of Artificial Sequence: Synthetic oligonucleotide
  misc_feature 1..20: note = Target: FXN; (-) strand; PAM type: YTN; PAM sequence: TTC
  source 1..20: mol_type = other DNA
ctgaaacccatttttactgt

SEQ ID NO: 26973 - DNA, 20 bp, synthetic construct
  misc_feature 1..20: note = Description of Artificial Sequence: Synthetic oligonucleotide
  misc_feature 1..20: note = Target: FXN; (-) strand; PAM type: YTN; PAM sequence: TTT
  source 1..20: mol_type = other DNA
cctgaaacccatttttactg

SEQ ID NO: 26974 - DNA, 20 bp, synthetic construct
  misc_feature 1..20: note = Description of Artificial Sequence: Synthetic oligonucleotide
  misc_feature 1..20: note = Target: FXN; (-) strand; PAM type: YTN; PAM sequence: TTT
  source 1..20: mol_type = other DNA
tcctgaaacccatttttact

SEQ ID NO: 26975 - DNA, 20 bp, synthetic construct
  misc_feature 1..20: note = Description of Artificial Sequence: Synthetic oligonucleotide
  misc_feature 1..20: note = Target: FXN; (-) strand; PAM type: YTN; PAM sequence: TTT
  source 1..20: mol_type = other DNA
ttcctgaaacccatttttac

SEQ ID NO: 26976 - DNA, 20 bp, synthetic construct
  misc_feature 1..20: note = Description of Artificial Sequence: Synthetic oligonucleotide
  misc_feature 1..20: note = Target: FXN; (-) strand; PAM type: YTN; PAM sequence: TTT
  source 1..20: mol_type = other DNA
tttcctgaaacccattttta

SEQ ID NO: 26977 - DNA, 20 bp, synthetic construct
  misc_feature 1..20: note = Description of Artificial Sequence: Synthetic oligonucleotide
  misc_feature 1..20: note = Target: FXN; (-) strand; PAM type: YTN; PAM sequence: TTT
  source 1..20: mol_type = other DNA
ttttcctgaaacccattttt

SEQ ID NO: 26978 - DNA, 20 bp, synthetic construct
  misc_feature 1..20: note = Description of Artificial Sequence: Synthetic oligonucleotide
  misc_feature 1..20: note = Target: FXN; (-) strand; PAM type: YTN; PAM sequence: TTT
  source 1..20: mol_type = other DNA
tttttcctgaaacccatttt

SEQ ID NO: 26979 - DNA, 20 bp, synthetic construct
  misc_feature 1..20: note = Description of Artificial Sequence: Synthetic oligonucleotide
  misc_feature 1..20: note = Target: FXN; (-) strand; PAM type: YTN; PAM sequence: TTA
  source 1..20: mol_type = other DNA
aaaaaacattttttttcctg

SEQ ID NO: 26980 - DNA, 20 bp, synthetic construct
  misc_feature 1..20: note = Description of Artificial Sequence: Synthetic oligonucleotide
  misc_feature 1..20: note = Target: FXN; (-) strand; PAM type: YTN; PAM sequence: TTT
  source 1..20: mol_type = other DNA
aaaaaaacattttttttcct

SEQ ID NO: 26981 - DNA, 20 bp, synthetic construct
  misc_feature 1..20: note = Description of Artificial Sequence: Synthetic oligonucleotide
  misc_feature 1..20: note = Target: FXN; (-) strand; PAM type: YTN; PAM sequence: TTG
  source 1..20: mol_type = other DNA
tttaaaaaaacatttttttt

SEQ ID NO: 26982 - DNA, 20 bp, synthetic construct
  misc_feature 1..20: note = Description of Artificial Sequence: Synthetic oligonucleotide
  misc_feature 1..20: note = Target: FXN; (-) strand; PAM type: YTN; PAM sequence: TTT
  source 1..20: mol_type = other DNA
gtttaaaaaaacattttttt

SEQ ID NO: 26983 - DNA, 20 bp, synthetic construct
  misc_feature 1..20: note = Description of Artificial Sequence: Synthetic oligonucleotide
  misc_feature 1..20: note = Target: FXN; (-) strand; PAM type: YTN; PAM sequence: TTA
  source 1..20: mol_type = other DNA
tacaatacgtaagtttgttt

SEQ ID NO: 26984 - DNA, 20 bp, synthetic construct
  misc_feature 1..20: note = Description of Artificial Sequence: Synthetic oligonucleotide
  misc_feature 1..20: note = Target: FXN; (-) strand; PAM type: YTN; PAM sequence: CTG
  source 1..20: mol_type = other DNA
ggattatacaatacgtaagt

SEQ ID NO: 26985 - DNA, 20 bp, synthetic construct
  misc_feature 1..20: note = Description of Artificial Sequence: Synthetic oligonucleotide
  misc_feature 1..20: note = Target: FXN; (-) strand; PAM type: YTN; PAM sequence: TTA
  source 1..20: mol_type = other DNA
aaagggctgggattatacaa

SEQ ID NO: 26986 - DNA, 20 bp, synthetic construct
  misc_feature 1..20: note = Description of Artificial Sequence: Synthetic oligonucleotide
  misc_feature 1..20: note = Target: FXN; (-) strand; PAM type: YTN; PAM sequence: TTT
  source 1..20: mol_type = other DNA
aaaagggctgggattataca

SEQ ID NO: 26987 - DNA, 20 bp, synthetic construct
  misc_feature 1..20: note = Description of Artificial Sequence: Synthetic oligonucleotide
  misc_feature 1..20: note = Target: FXN; (-) strand; PAM type: YTN; PAM sequence: TTT
  source 1..20: mol_type = other DNA
taaaagggctgggattatac

SEQ ID NO: 26988 - DNA, 20 bp, synthetic construct
  misc_feature 1..20: note = Description of Artificial Sequence: Synthetic oligonucleotide
  misc_feature 1..20: note = Target: FXN; (-) strand; PAM type: YTN; PAM sequence: TTT
  source 1..20: mol_type = other DNA
ttaaaagggctgggattata

SEQ ID NO: 26989 - DNA, 20 bp, synthetic construct
  misc_feature 1..20: note = Description of Artificial Sequence: Synthetic oligonucleotide
  misc_feature 1..20: note = Target: FXN; (-) strand; PAM type: YTN; PAM sequence: TTT
  source 1..20: mol_type = other DNA
tttaaaagggctgggattat

SEQ ID NO: 26990 - DNA, 20 bp, synthetic construct
  misc_feature 1..20: note = Description of Artificial Sequence: Synthetic oligonucleotide
  misc_feature 1..20: note = Target: FXN; (-) strand; PAM type: YTN; PAM sequence: TTG
  source 1..20: mol_type = other DNA
aaagcattttttaaaagggc

SEQ ID NO: 26991 - DNA, 20 bp, synthetic construct
  misc_feature 1..20: note = Description of Artificial Sequence: Synthetic oligonucleotide
  misc_feature 1..20: note = Target: FXN; (-) strand; PAM type: YTN; PAM sequence: TTT
  source 1..20: mol_type = other DNA
gaaagcattttttaaaaggg

SEQ ID NO: 26992 - DNA, 20 bp, synthetic construct
  misc_feature 1..20: note = Description of Artificial Sequence: Synthetic oligonucleotide
  misc_feature 1..20: note = Target: FXN; (-) strand; PAM type: YTN; PAM sequence: TTT
  source 1..20: mol_type = other DNA
tgaaagcattttttaaaagg

SEQ ID NO: 26993 - DNA, 20 bp, synthetic construct
  misc_feature 1..20: note = Description of Artificial Sequence: Synthetic oligonucleotide
  misc_feature 1..20: note = Target: FXN; (-) strand; PAM type: YTN; PAM sequence: TTT
  source 1..20: mol_type = other DNA
ttgaaagcattttttaaaag

SEQ ID NO: 26994 - DNA, 20 bp, synthetic construct
  misc_feature 1..20: note = Description of Artificial Sequence: Synthetic oligonucleotide
  misc_feature 1..20: note = Target: FXN; (-) strand; PAM type: YTN; PAM sequence: CTG
  source 1..20: mol_type = other DNA
ccagtttttgaaagcatttt

SEQ ID NO: 26995 - DNA, 20 bp, synthetic construct
  misc_feature 1..20: note = Description of Artificial Sequence: Synthetic oligonucleotide
  misc_feature 1..20: note = Target: FXN; (-) strand; PAM type: YTN; PAM sequence: TTG
  source 1..20: mol_type = other DNA
actgccagtttttgaaagca

SEQ ID NO: 26996 - DNA, 20 bp, synthetic construct
  misc_feature 1..20: note = Description of Artificial Sequence: Synthetic oligonucleotide
  misc_feature 1..20: note = Target: FXN; (-) strand; PAM type: YTN; PAM sequence: TTA
  source 1..20: mol_type = other DNA
tgagttgactgccagttttt

SEQ ID NO: 26997 - DNA, 20 bp, synthetic construct
  misc_feature 1..20: note = Description of Artificial Sequence: Synthetic oligonucleotide
  misc_feature 1..20: note = Target: FXN; (-) strand; PAM type: YTN; PAM sequence: TTT
  source 1..20: mol_type = other DNA
atgagttgactgccagtttt

SEQ ID NO: 26998 - DNA, 20 bp, synthetic construct
  misc_feature 1..20: note = Description of Artificial Sequence: Synthetic oligonucleotide
  misc_feature 1..20: note = Target: FXN; (-) strand; PAM type: YTN; PAM sequence: TTT
  source 1..20: mol_type = other DNA
tatgagttgactgccagttt

SEQ ID NO: 26999 - DNA, 20 bp, synthetic construct
  misc_feature 1..20: note = Description of Artificial Sequence: Synthetic oligonucleotide
  misc_feature 1..20: note = Target: FXN; (-) strand; PAM type: YTN; PAM sequence: CTT
  source 1..20: mol_type = other DNA
ttatgagttgactgccagtt

SEQ ID NO: 27000 - DNA, 20 bp, synthetic construct
  misc_feature 1..20: note = Description of Artificial Sequence: Synthetic oligonucleotide
  misc_feature 1..20: note = Target: FXN; (-) strand; PAM type: YTN; PAM sequence: TTG
  source 1..20: mol_type = other DNA
tccttttatgagttgactgc

SEQ ID NO: 27001 - DNA, 20 bp, synthetic construct
  misc_feature 1..20: note = Description of Artificial Sequence: Synthetic oligonucleotide
  misc_feature 1..20: note = Target: FXN; (-) strand; PAM type: YTN; PAM sequence: TTT
  source 1..20: mol_type = other DNA
gtccttttatgagttgactg

SEQ ID NO: 27002 - DNA, 20 bp, synthetic construct
  misc_feature 1..20: note = Description of Artificial Sequence: Synthetic oligonucleotide
  misc_feature 1..20: note = Target: FXN; (-) strand; PAM type: YTN; PAM sequence: TTC
  source 1..20: mol_type = other DNA
atcagtggaatcataagtat

SEQ ID NO: 27003 - DNA, 20 bp, synthetic construct
  misc_feature 1..20: note = Description of Artificial Sequence: Synthetic oligonucleotide
  misc_feature 1..20: note = Target: FXN; (-) strand; PAM type: YTN; PAM sequence: CTT
  source 1..20: mol_type = other DNA
catcagtggaatcataagta

SEQ ID NO: 27004 - DNA, 20 bp, synthetic construct
  misc_feature 1..20: note = Description of Artificial Sequence: Synthetic oligonucleotide
  misc_feature 1..20: note = Target: FXN; (-) strand; PAM type: YTN; PAM sequence: CTA
  source 1..20: mol_type = other DNA
cttcatcagtggaatcataa

SEQ ID NO: 27005 - DNA, 20 bp, synthetic construct
  misc_feature 1..20: note = Description of Artificial Sequence: Synthetic oligonucleotide
  misc_feature 1..20: note = Target: FXN; (-) strand; PAM type: YTN; PAM sequence: TTG
  source 1..20: mol_type = other DNA
actacttcatcagtggaatc

SEQ ID NO: 27006 - DNA, 20 bp, synthetic construct
  misc_feature 1..20: note = Description of Artificial Sequence: Synthetic oligonucleotide
  misc_feature 1..20: note = Target: FXN; (-) strand; PAM type: YTN; PAM sequence: TTT
  source 1..20: mol_type = other DNA
gactacttcatcagtggaat

SEQ ID NO: 27007 - DNA, 20 bp, synthetic construct
  misc_feature 1..20: note = Description of Artificial Sequence: Synthetic oligonucleotide
  misc_feature 1..20: note = Target: FXN; (-) strand; PAM type: YTN; PAM sequence: TTT
  source 1..20: mol_type = other DNA
tgactacttcatcagtggaa

SEQ ID NO: 27008 - DNA, 20 bp, synthetic construct
  misc_feature 1..20: note = Description of Artificial Sequence: Synthetic oligonucleotide
  misc_feature 1..20: note = Target: FXN; (-) strand; PAM type: YTN; PAM sequence: CTT
  source 1..20: mol_type = other DNA
ttgactacttcatcagtgga

SEQ ID NO: 27009 - DNA, 20 bp, synthetic construct
  misc_feature 1..20: note = Description of Artificial Sequence: Synthetic oligonucleotide
  misc_feature 1..20: note = Target: FXN; (-) strand; PAM type: YTN; PAM sequence: CTA
  source 1..20: mol_type = other DNA
cttttgactacttcatcagt

SEQ ID NO: 27010 - DNA, 20 bp, synthetic construct
  misc_feature 1..20: note = Description of Artificial Sequence: Synthetic oligonucleotide
  misc_feature 1..20: note = Target: FXN; (-) strand; PAM type: YTN; PAM sequence: TTG
  source 1..20: mol_type = other DNA
actacttttgactacttcat

SEQ ID NO: 27011 - DNA, 20 bp, synthetic construct
  misc_feature 1..20: note = Description of Artificial Sequence: Synthetic oligonucleotide
  misc_feature 1..20: note = Target: FXN; (-) strand; PAM type: YTN; PAM sequence: TTT
  source 1..20: mol_type = other DNA
gactacttttgactacttca

SEQ ID NO: 27012 - DNA, 20 bp, synthetic construct
  misc_feature 1..20: note = Description of Artificial Sequence: Synthetic oligonucleotide
  misc_feature 1..20: note = Target: FXN; (-) strand; PAM type: YTN; PAM sequence: TTT
  source 1..20: mol_type = other DNA
tgactacttttgactacttc

SEQ ID NO: 27013 - DNA, 20 bp, synthetic construct
  misc_feature 1..20: note = Description of Artificial Sequence: Synthetic oligonucleotide
  misc_feature 1..20: note = Target: FXN; (-) strand; PAM type: YTN; PAM sequence: TTT
  source 1..20: mol_type = other DNA
ttgactacttttgactactt

SEQ ID NO: 27014 - DNA, 20 bp, synthetic construct
  misc_feature 1..20: note = Description of Artificial Sequence: Synthetic oligonucleotide
  misc_feature 1..20: note = Target: FXN; (-) strand; PAM type: YTN; PAM sequence: CTG
  source 1..20: mol_type = other DNA
tgatttttgactacttttga

SEQ ID NO: 27015 - DNA, 20 bp, synthetic construct
  misc_feature 1..20: note = Description of Artificial Sequence: Synthetic oligonucleotide
  misc_feature 1..20: note = Target: FXN; (-) strand; PAM type: YTN; PAM sequence: TTC
  source 1..20: mol_type = other DNA
tgtgatttttgactactttt

SEQ ID NO: 27016 - DNA, 20 bp, synthetic construct
  misc_feature 1..20: note = Description of Artificial Sequence: Synthetic oligonucleotide
  misc_feature 1..20: note = Target: FXN; (-) strand; PAM type: YTN; PAM sequence: TTT
  source 1..20: mol_type = other DNA
ctgtgatttttgactacttt

SEQ ID NO: 27017 - DNA, 20 bp, synthetic construct
  misc_feature 1..20: note = Description of Artificial Sequence: Synthetic oligonucleotide
  misc_feature 1..20: note = Target: FXN; (-) strand; PAM type: YTN; PAM sequence: TTA
  source 1..20: mol_type = other DNA
tggtggtgtttctgtgattt

SEQ ID NO: 27018 - DNA, 20 bp, synthetic construct
  misc_feature 1..20: note = Description of Artificial Sequence: Synthetic oligonucleotide
  misc_feature 1..20: note = Target: FXN; (-) strand; PAM type: YTN; PAM sequence: TTT
  source 1..20: mol_type = other DNA
atggtggtgtttctgtgatt

SEQ ID NO: 27019 - DNA, 20 bp, synthetic construct
  misc_feature 1..20: note = Description of Artificial Sequence: Synthetic oligonucleotide
  misc_feature 1..20: note = Target: FXN; (-) strand; PAM type: YTN; PAM sequence: TTA
  source 1..20: mol_type = other DNA
tacatttatggtggtgtttc

SEQ ID NO: 27020 - DNA, 20 bp, synthetic construct
  misc_feature 1..20: note = Description of Artificial Sequence: Synthetic oligonucleotide
  misc_feature 1..20: note = Target: FXN; (-) strand; PAM type: YTN; PAM sequence: TTG
  source 1..20: mol_type = other DNA
aaaataaaaattatacattt

SEQ ID NO: 27021 - DNA, 20 bp, synthetic construct
  misc_feature 1..20: note = Description of Artificial Sequence: Synthetic oligonucleotide
  misc_feature 1..20: note = Target: FXN; (-) strand; PAM type: YTN; PAM sequence: TTA
  source 1..20: mol_type = other DNA
attgaaaataaaaattatac

SEQ ID NO: 27022 - DNA, 20 bp, synthetic construct
  misc_feature 1..20: note = Description of Artificial Sequence: Synthetic oligonucleotide
  misc_feature 1..20: note = Target: FXN; (-) strand; PAM type: YTN; PAM sequence: TTT
  source 1..20: mol_type = other DNA
aattgaaaataaaaattata

SEQ ID NO: 27023 - DNA, 20 bp, synthetic construct
  misc_feature 1..20: note = Description of Artificial Sequence: Synthetic oligonucleotide
  misc_feature 1..20: note = Target: FXN; (-) strand; PAM type: YTN; PAM sequence: TTT
  source 1..20: mol_type = other DNA
taattgaaaataaaaattat

SEQ ID NO: 27024 - DNA, 20 bp, synthetic construct
  misc_feature 1..20: note = Description of Artificial Sequence: Synthetic oligonucleotide
  misc_feature 1..20: note = Target: FXN; (-) strand; PAM type: YTN; PAM sequence: TTT
  source 1..20: mol_type = other DNA
ttaattgaaaataaaaatta

SEQ ID NO: 27025 - DNA, 20 bp, synthetic construct
  misc_feature 1..20: note = Description of Artificial Sequence: Synthetic oligonucleotide
  misc_feature 1..20: note = Target: FXN; (-) strand; PAM type: YTN; PAM sequence: TTT
  source 1..20: mol_type = other DNA
tttaattgaaaataaaaatt

SEQ ID NO: 27026 - DNA, 20 bp, synthetic construct
  misc_feature 1..20: note = Description of Artificial Sequence: Synthetic oligonucleotide
  misc_feature 1..20: note = Target: FXN; (-) strand; PAM type: YTN; PAM sequence: TTT
  source 1..20: mol_type = other DNA
ttttaattgaaaataaaaat

SEQ ID NO: 27027 - DNA, 20 bp, synthetic construct
  misc_feature 1..20: note = Description of Artificial Sequence: Synthetic oligonucleotide
  misc_feature 1..20: note = Target: FXN; (-) strand; PAM type: YTN; PAM sequence: CTA
  source 1..20: mol_type = other DNA
aaaaaaagatgtttttttaa

SEQ ID NO: 27028 - DNA, 20 bp, synthetic construct
  misc_feature 1..20: note = Description of Artificial Sequence: Synthetic oligonucleotide
  misc_feature 1..20: note = Target: FXN; (-) strand; PAM type: YTN; PAM sequence: TTG
  source 1..20: mol_type = other DNA
actaaaaaaaagatgttttt

SEQ ID NO: 27029 - DNA, 20 bp, synthetic construct
  misc_feature 1..20: note = Description of Artificial Sequence: Synthetic oligonucleotide
  misc_feature 1..20: note = Target: FXN; (-) strand; PAM type: YTN; PAM sequence: TTT
  source 1..20: mol_type = other DNA
gactaaaaaaaagatgtttt

SEQ ID NO: 27030 - DNA, 20 bp, synthetic construct
  misc_feature 1..20: note = Description of Artificial Sequence: Synthetic oligonucleotide
  misc_feature 1..20: note = Target: FXN; (-) strand; PAM type: YTN; PAM sequence: TTT
  source 1..20: mol_type = other DNA
tgactaaaaaaaagatgttt

SEQ ID NO: 27031 - DNA, 20 bp, synthetic construct
  misc_feature 1..20: note = Description of Artificial Sequence: Synthetic oligonucleotide
  misc_feature 1..20: note = Target: FXN; (-) strand; PAM type: YTN; PAM sequence: CTA
  source 1..20: mol_type = other DNA
tgattttgactaaaaaaaag

SEQ ID NO: 27032 - DNA, 20 bp, synthetic construct
  misc_feature 1..20: note = Description of Artificial Sequence: Synthetic oligonucleotide
  misc_feature 1..20: note = Target: FXN; (-) strand; PAM type: YTN; PAM sequence: TTC
  source 1..20: mol_type = other DNA
tatgattttgactaaaaaaa

SEQ ID NO: 27033 - DNA, 20 bp, synthetic construct
  misc_feature 1..20: note = Description of Artificial Sequence: Synthetic oligonucleotide
  misc_feature 1..20: note = Target: FXN; (-) strand; PAM type: YTN; PAM sequence: TTT
  source 1..20: mol_type = other DNA
ctatgattttgactaaaaaa

SEQ ID NO: 27034 - DNA, 20 bp, synthetic construct
  misc_feature 1..20: note = Description of Artificial Sequence: Synthetic oligonucleotide
  misc_feature 1..20: note = Target: FXN; (-) strand; PAM type: YTN; PAM sequence: CTA
  source 1..20: mol_type = other DNA
tttctatgattttgactaaa

SEQ ID NO: 27035 - DNA, 20 bp, synthetic construct
  misc_feature 1..20: note = Description of Artificial Sequence: Synthetic oligonucleotide
  misc_feature 1..20: note = Target: FXN; (-) strand; PAM type: YTN; PAM sequence: TTC
  source 1..20: mol_type = other DNA
tatttctatgattttgacta

SEQ ID NO: 27036 - DNA, 20 bp, synthetic construct
  misc_feature 1..20: note = Description of Artificial Sequence: Synthetic oligonucleotide
  misc_feature 1..20: note = Target: FXN; (-) strand; PAM type: YTN; PAM sequence: TTT
  source 1..20: mol_type = other DNA
ctatttctatgattttgact

SEQ ID NO: 27037 - DNA, 20 bp, synthetic construct
  misc_feature 1..20: note = Description of Artificial Sequence: Synthetic oligonucleotide
  misc_feature 1..20: note = Target: FXN; (-) strand; PAM type: YTN; PAM sequence: CTT
  source 1..20: mol_type = other DNA
tctatttctatgattttgac

SEQ ID NO: 27038 - DNA, 20 bp, synthetic construct
  misc_feature 1..20: note = Description of Artificial Sequence: Synthetic oligonucleotide
  misc_feature 1..20: note = Target: FXN; (-) strand; PAM type: YTN; PAM sequence: CTA
  source 1..20: mol_type = other DNA
ctttctatttctatgatttt

SEQ ID NO: 27039 - DNA, 20 bp, synthetic construct
  misc_feature 1..20: note = Description of Artificial Sequence: Synthetic oligonucleotide
  misc_feature 1..20: note = Target: FXN; (-) strand; PAM type: YTN; PAM sequence: CTG
  source 1..20: mol_type = other DNA
tctactttctatttctatga

SEQ ID NO: 27040 - DNA, 20 bp, synthetic construct
  misc_feature 1..20: note = Description of Artificial Sequence: Synthetic oligonucleotide
  misc_feature 1..20: note = Target: FXN; (-) strand; PAM type: YTN; PAM sequence: TTA
  source 1..20: mol_type = other DNA
gtaaccacctgtctactttc

SEQ ID NO: 27041 - DNA, 20 bp, synthetic construct
  misc_feature 1..20: note = Description of Artificial Sequence: Synthetic oligonucleotide
  misc_feature 1..20: note = Target: FXN; (-) strand; PAM type: YTN; PAM sequence: CTT
  source 1..20: mol_type = other DNA
agtaaccacctgtctacttt

SEQ ID NO: 27042 - DNA, 20 bp, synthetic construct
  misc_feature 1..20: note = Description of Artificial Sequence: Synthetic oligonucleotide
  misc_feature 1..20: note = Target: FXN; (-) strand; PAM type: YTN; PAM sequence: TTC
  source 1..20: mol_type = other DNA
cccatcccatagcccttagt

SEQ ID NO: 27043 - DNA, 20 bp, synthetic construct
  misc_feature 1..20: note = Description of Artificial Sequence: Synthetic oligonucleotide
  misc_feature 1..20: note = Target: FXN; (-) strand; PAM type: YTN; PAM sequence: TTT
  source 1..20: mol_type = other DNA
ccccatcccatagcccttag

SEQ ID NO: 27044 - DNA, 20 bp, synthetic construct
  misc_feature 1..20: note = Description of Artificial Sequence: Synthetic oligonucleotide
  misc_feature 1..20: note = Target: FXN; (-) strand; PAM type: YTN; PAM sequence: CTA
  source 1..20: mol_type = other DNA
atttccccatcccatagccc

SEQ ID NO: 27045 - DNA, 20 bp, synthetic construct
  misc_feature 1..20: note = Description of Artificial Sequence: Synthetic oligonucleotide
  misc_feature 1..20: note = Target: FXN; (-) strand; PAM type: YTN; PAM sequence: TTA
  source 1..20: mol_type = other DNA
gacactaatttccccatccc

SEQ ID NO: 27046 - DNA, 20 bp, synthetic construct
  misc_feature 1..20: note = Description of Artificial Sequence: Synthetic oligonucleotide
  misc_feature 1..20: note = Target: FXN; (-) strand; PAM type: YTN; PAM sequence: CTA
  source 1..20: mol_type = other DNA
tgcccattagacactaattt

SEQ ID NO: 27047 - DNA, 20 bp, synthetic construct
  misc_feature 1..20: note = Description of Artificial Sequence: Synthetic oligonucleotide
  misc_feature 1..20: note = Target: FXN; (-) strand; PAM type: YTN; PAM sequence: CTC
  source 1..20: mol_type = other DNA
tatgcccattagacactaat

SEQ ID NO: 27048 - DNA, 20 bp, synthetic construct
  misc_feature 1..20: note = Description of Artificial Sequence: Synthetic oligonucleotide
  misc_feature 1..20: note = Target: FXN; (-) strand; PAM type: YTN; PAM sequence: CTG
  source 1..20: mol_type = other DNA
aaactctatgcccattagac

SEQ ID NO: 27049 - DNA, 20 bp, synthetic construct
  misc_feature 1..20: note = Description of Artificial Sequence: Synthetic oligonucleotide
  misc_feature 1..20: note = Target: FXN; (-) strand; PAM type: YTN; PAM sequence: TTG
  source 1..20: mol_type = other DNA
taacactgaaactctatgcc

SEQ ID NO: 27050 - DNA, 20 bp, synthetic construct
  misc_feature 1..20: note = Description of Artificial Sequence: Synthetic oligonucleotide
  misc_feature 1..20: note = Target: FXN; (-) strand; PAM type: YTN; PAM sequence: CTT
  source 1..20: mol_type = other DNA
gtaacactgaaactctatgc

SEQ ID NO: 27051 - DNA, 20 bp, synthetic construct
  misc_feature 1..20: note = Description of Artificial Sequence: Synthetic oligonucleotide
  misc_feature 1..20: note = Target: FXN; (-) strand; PAM type: YTN; PAM sequence: TTC
  source 1..20: mol_type = other DNA
accttgtaacactgaaactc

SEQ ID NO: 27052 - DNA, 20 bp, synthetic construct
  misc_feature 1..20: note = Description of Artificial Sequence: Synthetic oligonucleotide
  misc_feature 1..20: note = Target: FXN; (-) strand; PAM type: YTN; PAM sequence: TTT
  source 1..20: mol_type = other DNA
caccttgtaacactgaaact

SEQ ID NO: 27053 - DNA, 20 bp, synthetic construct
  misc_feature 1..20: note = Description of Artificial Sequence: Synthetic oligonucleotide
  misc_feature 1..20: note = Target: FXN; (-) strand; PAM type: YTN; PAM sequence: TTT
  source 1..20: mol_type = other DNA
tcaccttgtaacactgaaac

SEQ ID NO: 27054 - DNA, 20 bp, synthetic construct
  misc_feature 1..20: note = Description of Artificial Sequence: Synthetic oligonucleotide
  misc_feature 1..20: note = Target: FXN; (-) strand; PAM type: YTN; PAM sequence: CTT
  source 1..20: mol_type = other DNA
ttcaccttgtaacactgaaa

SEQ ID NO: 27055 - DNA, 20 bp, synthetic construct
  misc_feature 1..20: note = Description of Artificial Sequence: Synthetic oligonucleotide
  misc_feature 1..20: note = Target: FXN; (-) strand; PAM type: YTN; PAM sequence: CTA
  source 1..20: mol_type = other DNA
gaacttttcaccttgtaaca

SEQ ID NO: 27056 - DNA, 20 bp, synthetic construct
  misc_feature 1..20: note = Description of Artificial Sequence: Synthetic oligonucleotide
  misc_feature 1..20: note = Target: FXN; (-) strand; PAM type: YTN; PAM sequence: CTC
  source 1..20: mol_type = other DNA
tagaacttttcaccttgtaa

SEQ ID NO: 27057 - DNA, 20 bp, synthetic construct
  misc_feature 1..20: note = Description of Artificial Sequence: Synthetic oligonucleotide
  misc_feature 1..20: note = Target: FXN; (-) strand; PAM type: YTN; PAM sequence: CTG
  source 1..20: mol_type = other DNA
ggcagcataactctagaact

SEQ ID NO: 27058 - DNA, 20 bp, synthetic construct
  misc_feature 1..20: note = Description of Artificial Sequence: Synthetic oligonucleotide
  misc_feature 1..20: note = Target: FXN; (-) strand; PAM type: YTN; PAM sequence: CTG
  source 1..20: mol_type = other DNA
ctgggcagcataactctaga

SEQ ID NO: 27059 - DNA, 20 bp, synthetic construct
  misc_feature 1..20: note = Description of Artificial Sequence: Synthetic oligonucleotide
  misc_feature 1..20: note = Target: FXN; (-) strand; PAM type: YTN; PAM sequence: TTC
  source 1..20: mol_type = other DNA
acactgctgggcagcataac

SEQ ID NO: 27060 - DNA, 20 bp, synthetic construct
  misc_feature 1..20: note = Description of Artificial Sequence: Synthetic oligonucleotide
  misc_feature 1..20: note = Target: FXN; (-) strand; PAM type: YTN; PAM sequence: TTA
  source 1..20: mol_type = other DNA
agtgtacagaacaataaagt

SEQ ID NO: 27061 - DNA, 20 bp, synthetic construct
  misc_feature 1..20: note = Description of Artificial Sequence: Synthetic oligonucleotide
  misc_feature 1..20: note = Target: FXN; (-) strand; PAM type: YTN; PAM sequence: TTA
  source 1..20: mol_type = other DNA
accatgttaagtgtacagaa

SEQ ID NO: 27062 - DNA, 20 bp, synthetic construct
  misc_feature 1..20: note = Description of Artificial Sequence: Synthetic oligonucleotide
  misc_feature 1..20: note = Target: FXN; (-) strand; PAM type: YTN; PAM sequence: TTA
  source 1..20: mol_type = other DNA
ccatattaaccatgttaagt

SEQ ID NO: 27063 - DNA, 20 bp, synthetic construct
  misc_feature 1..20: note = Description of Artificial Sequence: Synthetic oligonucleotide
  misc_feature 1..20: note = Target: FXN; (-) strand; PAM type: YTN; PAM sequence: TTT
  source 1..20: mol_type = other DNA
accatattaaccatgttaag

SEQ ID NO: 27064 - DNA, 20 bp, synthetic construct
  misc_feature 1..20: note = Description of Artificial Sequence: Synthetic oligonucleotide
  misc_feature 1..20: note = Target: FXN; (-) strand; PAM type: YTN; PAM sequence: CTA
  source 1..20: mol_type = other DNA
aatttaccatattaaccatg

SEQ ID NO: 27065 - DNA, 20 bp, synthetic construct
  misc_feature 1..20: note = Description of Artificial Sequence: Synthetic oligonucleotide
  misc_feature 1..20: note = Target: FXN; (-) strand; PAM type: YTN; PAM sequence: CTA
  source 1..20: mol_type = other DNA
tagtaaaaagcacataacgc

SEQ ID NO: 27066 - DNA, 20 bp, synthetic construct
  misc_feature 1..20: note = Description of Artificial Sequence: Synthetic oligonucleotide
  misc_feature 1..20: note = Target: FXN; (-) strand; PAM type: YTN; PAM sequence: TTA
  source 1..20: mol_type = other DNA
ctatagtaaaaagcacataa

SEQ ID NO: 27067 - DNA, 20 bp, synthetic construct
  misc_feature 1..20: note = Description of Artificial Sequence: Synthetic oligonucleotide
  misc_feature 1..20: note = Target: FXN; (-) strand; PAM type: YTN; PAM sequence: TTT
  source 1..20: mol_type = other DNA
actatagtaaaaagcacata

SEQ ID NO: 27068 - DNA, 20 bp, synthetic construct
  misc_feature 1..20: note = Description of Artificial Sequence: Synthetic oligonucleotide
  misc_feature 1..20: note = Target: FXN; (-) strand; PAM type: YTN; PAM sequence: TTT
  source 1..20: mol_type = other DNA
tactatagtaaaaagcacat

SEQ ID NO: 27069 - DNA, 20 bp, synthetic construct
  misc_feature 1..20: note = Description of Artificial Sequence: Synthetic oligonucleotide
  misc_feature 1..20: note = Target: FXN; (-) strand; PAM type: YTN; PAM sequence: TTA
  source 1..20: mol_type = other DNA
attttactatagtaaaaagc

SEQ ID NO: 27070 - DNA, 20 bp, synthetic construct
  misc_feature 1..20: note = Description of Artificial Sequence: Synthetic oligonucleotide
  misc_feature 1..20: note = Target: FXN; (-) strand; PAM type: YTN; PAM sequence: TTT
  source 1..20: mol_type = other DNA
aattttactatagtaaaaag

SEQ ID NO: 27071 - DNA, 20 bp, synthetic construct
  misc_feature 1..20: note = Description of Artificial Sequence: Synthetic oligonucleotide
  misc_feature 1..20: note = Target: FXN; (-) strand; PAM type: YTN; PAM sequence: TTT
  source 1..20: mol_type = other DNA
taattttactatagtaaaaa

SEQ ID NO: 27072 - DNA, 20 bp, synthetic construct
  misc_feature 1..20: note = Description of Artificial Sequence: Synthetic oligonucleotide
  misc_feature 1..20: note = Target: FXN; (-) strand; PAM type: YTN; PAM sequence: TTT
  source 1..20: mol_type = other DNA
ttaattttactatagtaaaa

SEQ ID NO: 27073 - DNA, 20 bp, synthetic construct
  misc_feature 1..20: note = Description of Artificial Sequence: Synthetic oligonucleotide
  misc_feature 1..20: note = Target: FXN; (-) strand; PAM type: YTN; PAM sequence: TTT
  source 1..20: mol_type = other DNA
tttaattttactatagtaaa

SEQ ID NO: 27074 - DNA, 20 bp, synthetic construct
  misc_feature 1..20: note = Description of Artificial Sequence: Synthetic oligonucleotide
  misc_feature 1..20: note = Target: FXN; (-) strand; PAM type: YTN; PAM sequence: TTT
  source 1..20: mol_type = other DNA
ttttaattttactatagtaa

SEQ ID NO: 27075 - DNA, 20 bp, synthetic construct
  misc_feature 1..20: note = Description of Artificial Sequence: Synthetic oligonucleotide
  misc_feature 1..20: note = Target: FXN; (-) strand; PAM type: YTN; PAM sequence: TTT
  source 1..20: mol_type = other DNA
tttttaattttactatagta

SEQ ID NO: 27076 - DNA, 20 bp, synthetic construct
  misc_feature 1..20: note = Description of Artificial Sequence: Synthetic oligonucleotide
  misc_feature 1..20: note = Target: FXN; (-) strand; PAM type: YTN; PAM sequence: TTT
  source 1..20: mol_type = other DNA
ttttttaattttactatagt

SEQ ID NO: 27077 - DNA, 20 bp, synthetic construct
  misc_feature 1..20: note = Description of Artificial Sequence: Synthetic oligonucleotide
  misc_feature 1..20: note = Target: FXN; (-) strand; PAM type: YTN; PAM sequence: TTT
  source 1..20: mol_type = other DNA
tttttttaattttactatag

SEQ ID NO: 27078 - DNA, 20 bp, synthetic construct
  misc_feature 1..20: note = Description of Artificial Sequence: Synthetic oligonucleotide
  misc_feature 1..20: note = Target: FXN; (-) strand; PAM type: YTN; PAM sequence: TTT
  source 1..20: mol_type = other DNA
ttttttttaattttactata

SEQ ID NO: 27079 - DNA, 20 bp, synthetic construct
  misc_feature 1..20: note = Description of Artificial Sequence: Synthetic oligonucleotide
  misc_feature 1..20: note = Target: FXN; (-) strand; PAM type: YTN; PAM sequence: TTT
  source 1..20: mol_type = other DNA
tttttttttaattttactat

SEQ ID NO: 27080 - DNA, 20 bp, synthetic construct
  misc_feature 1..20: note = Description of Artificial Sequence: Synthetic oligonucleotide
  misc_feature 1..20: note = Target: FXN; (-) strand; PAM type: YTN; PAM sequence: TTT
  source 1..20: mol_type = other DNA
ttttttttttaattttacta

SEQ ID NO: 27081 - DNA, 20 bp, synthetic construct
  misc_feature 1..20: note = Description of Artificial Sequence: Synthetic oligonucleotide
  misc_feature 1..20: note = Target: FXN; (-) strand; PAM type: YTN; PAM sequence: TTT
  source 1..20: mol_type = other DNA
tttttttttttaattttact

SEQ ID NO: 27082 - DNA, 20 bp, synthetic construct
  misc_feature 1..20: note = Description of Artificial Sequence: Synthetic oligonucleotide
  misc_feature 1..20: note = Target: FXN; (-) strand; PAM type: YTN; PAM sequence: CTC
  source 1..20: mol_type = other DNA
ggccccattttttttttttt

SEQ ID NO: 27083 - DNA, 20 bp, synthetic construct
  misc_feature 1..20: note = Description of Artificial Sequence: Synthetic oligonucleotide
  misc_feature 1..20: note = Target: FXN; (-) strand; PAM type: YTN; PAM sequence: CTG
  source 1..20: mol_type = other DNA
cactcggccccatttttttt

SEQ ID NO: 27084 - DNA, 20 bp, synthetic construct
  misc_feature 1..20: note = Description of Artificial Sequence: Synthetic oligonucleotide
  misc_feature 1..20: note = Target: FXN; (-) strand; PAM type: YTN; PAM sequence: CTA
  source 1..20: mol_type = other DNA
ctgcactcggccccattttt

SEQ ID NO: 27085 - DNA, 20 bp, synthetic construct
  misc_feature 1..20: note = Description of Artificial Sequence: Synthetic oligonucleotide
  misc_feature 1..20: note = Target: FXN; (-) strand; PAM type: YTN; PAM sequence: TTA
  source 1..20: mol_type = other DNA
caggtgtgagctactgcact

SEQ ID NO: 27086 - DNA, 20 bp, synthetic construct
  misc_feature 1..20: note = Description of Artificial Sequence: Synthetic oligonucleotide
  misc_feature 1..20: note = Target: FXN; (-) strand; PAM type: YTN; PAM sequence: TTA
  source 1..20: mol_type = other DNA
tgttacaggtgtgagctact

SEQ ID NO: 27087 - DNA, 20 bp, synthetic construct
  misc_feature 1..20: note = Description of Artificial Sequence: Synthetic oligonucleotide
  misc_feature 1..20: note = Target: FXN; (-) strand; PAM type: YTN; PAM sequence: CTG
  source 1..20: mol_type = other DNA
ggattatgttacaggtgtga

SEQ ID NO: 27088 - DNA, 20 bp, synthetic construct
  misc_feature 1..20: note = Description of Artificial Sequence: Synthetic oligonucleotide
  misc_feature 1..20: note = Target: FXN; (-) strand; PAM type: YTN; PAM sequence: CTC
  source 1..20: mol_type = other DNA
ccaaagtgctgggattatgt

SEQ ID NO: 27089 - DNA, 20 bp, synthetic construct
  misc_feature 1..20: note = Description of Artificial Sequence: Synthetic oligonucleotide
  misc_feature 1..20: note = Target: FXN; (-) strand; PAM type: YTN; PAM sequence: CTC
  source 1..20: mol_type = other DNA
ggcctcccaaagtgctggga

SEQ ID NO: 27090 - DNA, 20 bp, synthetic construct
  misc_feature 1..20: note = Description of Artificial Sequence: Synthetic oligonucleotide
  misc_feature 1..20: note = Target: FXN; (-) strand; PAM type: YTN; PAM sequence: CTA
  source 1..20: mol_type = other DNA
cctcggcctcccaaagtgct

SEQ ID NO: 27091 - DNA, 20 bp, synthetic construct
  misc_feature 1..20: note = Description of Artificial Sequence: Synthetic oligonucleotide
  misc_feature 1..20: note = Target: FXN; (-) strand; PAM type: YTN; PAM sequence: CTC
  source 1..20: mol_type = other DNA
ctacctcggcctcccaaagt

SEQ ID NO: 27092 - DNA, 20 bp, synthetic construct
  misc_feature 1..20: note = Description of Artificial Sequence: Synthetic oligonucleotide
  misc_feature 1..20: note = Target: FXN; (-) strand; PAM type: YTN; PAM sequence: CTC
  source 1..20: mol_type = other DNA
aagtgatcctcctacctcgg

SEQ ID NO: 27093 - DNA, 20 bp, synthetic construct
  misc_feature 1..20: note = Description of Artificial Sequence: Synthetic oligonucleotide
  misc_feature 1..20: note = Target: FXN; (-) strand; PAM type: YTN; PAM sequence: CTG
  source 1..20: mol_type = other DNA
gcctcaagtgatcctcctac

SEQ ID NO: 27094 - DNA, 20 bp, synthetic construct
  misc_feature 1..20: note = Description of Artificial Sequence: Synthetic oligonucleotide
  misc_feature 1..20: note = Target: FXN; (-) strand; PAM type: YTN; PAM sequence: TTC
  source 1..20: mol_type = other DNA
tggcctcaagtgatcctcct

SEQ ID NO: 27095 - DNA, 20 bp, synthetic construct
  misc_feature 1..20: note = Description of Artificial Sequence: Synthetic oligonucleotide
  misc_feature 1..20: note = Target: FXN; (-) strand; PAM type: YTN; PAM sequence: CTT
  source 1..20: mol_type = other DNA
ctggcctcaagtgatcctcc

SEQ ID NO: 27096 - DNA, 20 bp, synthetic construct
  misc_feature 1..20: note = Description of Artificial Sequence: Synthetic oligonucleotide
  misc_feature 1..20: note = Target: FXN; (-) strand; PAM type: YTN; PAM sequence: TTC
  source 1..20: mol_type = other DNA
aaacttctggcctcaagtga

SEQ ID NO: 27097 - DNA, 20 bp, synthetic construct
  misc_feature 1..20: note = Description of Artificial Sequence: Synthetic oligonucleotide
  misc_feature 1..20: note = Target: FXN; (-) strand; PAM type: YTN; PAM sequence: TTT
  source 1..20: mol_type = other DNA
caaacttctggcctcaagtg

SEQ ID NO: 27098 - DNA, 20 bp, synthetic construct
  misc_feature 1..20: note = Description of Artificial Sequence: Synthetic oligonucleotide
  misc_feature 1..20: note = Target: FXN; (-) strand; PAM type: YTN; PAM sequence: CTG
  source 1..20: mol_type = other DNA
gtttcaaacttctggcctca

SEQ ID NO: 27099 - DNA, 20 bp, synthetic construct
  misc_feature 1..20: note = Description of Artificial Sequence: Synthetic oligonucleotide
  misc_feature 1..20: note = Target: FXN; (-) strand; PAM type: YTN; PAM sequence: TTG
  source 1..20: mol_type = other DNA
accaggctggtttcaaactt

SEQ ID NO: 27100 - DNA, 20 bp, synthetic construct
  misc_feature 1..20: note = Description of Artificial Sequence: Synthetic oligonucleotide
  misc_feature 1..20: note = Target: FXN; (-) strand; PAM type: YTN; PAM sequence: CTA
  source 1..20: mol_type = other DNA
tattgaccaggctggtttca

SEQ ID NO: 27101 - DNA, 20 bp, synthetic construct
  misc_feature 1..20: note = Description of Artificial Sequence: Synthetic oligonucleotide
  misc_feature 1..20: note = Target: FXN; (-) strand; PAM type: YTN; PAM sequence: CTC
  source 1..20: mol_type = other DNA
gctatattgaccaggctggt

SEQ ID NO: 27102 - DNA, 20 bp, synthetic construct
  misc_feature 1..20: note = Description of Artificial Sequence: Synthetic oligonucleotide
  misc_feature 1..20: note = Target: FXN; (-) strand; PAM type: YTN; PAM sequence: TTG
  source 1..20: mol_type = other DNA
tagagatgaggtctcgctat

SEQ ID NO: 27103 - DNA, 20 bp, synthetic construct
  misc_feature 1..20: note = Description of Artificial Sequence: Synthetic oligonucleotide
  misc_feature 1..20: note = Target: FXN; (-) strand; PAM type: YTN; PAM sequence: TTT
  source 1..20: mol_type = other DNA
gtagagatgaggtctcgcta

SEQ ID NO: 27104 - DNA, 20 bp, synthetic construct
  misc_feature 1..20: note = Description of Artificial Sequence: Synthetic oligonucleotide
  misc_feature 1..20: note = Target: FXN; (-) strand; PAM type: YTN; PAM sequence: TTT
  source 1..20: mol_type = other DNA
tgtagagatgaggtctcgct

SEQ ID NO: 27105 - DNA, 20 bp, synthetic construct
  misc_feature 1..20: note = Description of Artificial Sequence: Synthetic oligonucleotide
  misc_feature 1..20: note = Target: FXN; (-) strand; PAM type: YTN; PAM sequence: CTT
  source 1..20: mol_type = other DNA
ttgtagagatgaggtctcgc

SEQ ID NO: 27106 - DNA, 20 bp, synthetic construct
  misc_feature 1..20: note = Description of Artificial Sequence: Synthetic oligonucleotide
  misc_feature 1..20: note = Target: FXN; (-) strand; PAM type: YTN; PAM sequence: TTC
  source 1..20: mol_type = other DNA
ttttgtagagatgaggtctc

SEQ ID NO: 27107 - DNA, 20 bp, synthetic construct
  misc_feature 1..20: note = Description of Artificial Sequence: Synthetic oligonucleotide
  misc_feature 1..20: note = Target: FXN; (-) strand; PAM type: YTN; PAM sequence: TTT
  source 1..20: mol_type = other DNA
cttttgtagagatgaggtct

SEQ ID NO: 27108 - DNA, 20 bp, synthetic construct
  misc_feature 1..20: note = Description of Artificial Sequence: Synthetic oligonucleotide
  misc_feature 1..20: note = Target: FXN; (-) strand; PAM type: YTN; PAM sequence: TTT
  source 1..20: mol_type = other DNA
tcttttgtagagatgaggtc

SEQ ID NO: 27109 - DNA, 20 bp, synthetic construct
  misc_feature 1..20: note = Description of Artificial Sequence: Synthetic oligonucleotide
  misc_feature 1..20: note = Target: FXN; (-) strand; PAM type: YTN; PAM sequence: TTT
  source 1..20: mol_type = other DNA
ttcttttgtagagatgaggt

SEQ ID NO: 27110 - DNA, 20 bp, synthetic construct
  misc_feature 1..20: note = Description of Artificial Sequence: Synthetic oligonucleotide
  misc_feature 1..20: note = Target: FXN; (-) strand; PAM type: YTN; PAM sequence: TTA
  source 1..20: mol_type = other DNA
acatttttcttttgtagaga

SEQ ID NO: 27111 - DNA, 20 bp, synthetic construct
  misc_feature 1..20: note = Description of Artificial Sequence: Synthetic oligonucleotide
  misc_feature 1..20: note = Target: FXN; (-) strand; PAM type: YTN; PAM sequence: TTT
  source 1..20: mol_type = other DNA
aacatttttcttttgtagag

SEQ ID NO: 27112 - DNA, 20 bp, synthetic construct
  misc_feature 1..20: note = Description of Artificial Sequence: Synthetic oligonucleotide
  misc_feature 1..20: note = Target: FXN; (-) strand; PAM type: YTN; PAM sequence: TTT
  source 1..20: mol_type = other DNA
taacatttttcttttgtaga

SEQ ID NO: 27113 - DNA, 20 bp, synthetic construct
  misc_feature 1..20: note = Description of Artificial Sequence: Synthetic oligonucleotide
  misc_feature 1..20: note = Target: FXN; (-) strand; PAM type: YTN; PAM sequence: CTA
  source 1..20: mol_type = other DNA
attttaacatttttcttttg

SEQ ID NO: 27114 - DNA, 20 bp, synthetic construct
  misc_feature 1..20: note = Description of Artificial Sequence: Synthetic oligonucleotide
  misc_feature 1..20: note = Target: FXN; (-) strand; PAM type: YTN; PAM sequence: CTG
  source 1..20: mol_type = other DNA
tctaattttaacatttttct

SEQ ID NO: 27115 - DNA, 20 bp, synthetic construct
  misc_feature 1..20: note = Description of Artificial Sequence: Synthetic oligonucleotide
  misc_feature 1..20: note = Target: FXN; (-) strand; PAM type: YTN; PAM sequence: CTA
  source 1..20: mol_type = other DNA
cagacaccacacctgtctaa

SEQ ID NO: 27116 - DNA, 20 bp, synthetic construct
  misc_feature 1..20: note = Description of Artificial Sequence: Synthetic oligonucleotide
  misc_feature 1..20: note = Target: FXN; (-) strand; PAM type: YTN; PAM sequence: CTG
  source 1..20: mol_type = other DNA
ggactacagacaccacacct

SEQ ID NO: 27117 - DNA, 20 bp, synthetic construct
  misc_feature 1..20: note = Description of Artificial Sequence: Synthetic oligonucleotide
  misc_feature 1..20: note = Target: FXN; (-) strand; PAM type: YTN; PAM sequence: CTC
  source 1..20: mol_type = other DNA
cagagagctgggactacaga

SEQ ID NO: 27118 - DNA, 20 bp, synthetic construct
  misc_feature 1..20: note = Description of Artificial Sequence: Synthetic oligonucleotide
  misc_feature 1..20: note = Target: FXN; (-) strand; PAM type: YTN; PAM sequence: CTG
  source 1..20: mol_type = other DNA
cctccagagagctgggacta

SEQ ID NO: 27119 - DNA, 20 bp, synthetic construct
  misc_feature 1..20: note = Description of Artificial Sequence: Synthetic oligonucleotide
  misc_feature 1..20: note = Target: FXN; (-) strand; PAM type: YTN; PAM sequence: CTC
  source 1..20: mol_type = other DNA
agtccctgcctccagagagc

SEQ ID NO: 27120 - DNA, 20 bp, synthetic construct
  misc_feature 1..20: note = Description of Artificial Sequence: Synthetic oligonucleotide
  misc_feature 1..20: note = Target: FXN; (-) strand; PAM type: YTN; PAM sequence: CTG
  source 1..20: mol_type = other DNA
actcagtccctgcctccaga

SEQ ID NO: 27121 - DNA, 20 bp, synthetic construct
  misc_feature 1..20: note = Description of Artificial Sequence: Synthetic oligonucleotide
  misc_feature 1..20: note = Target: FXN; (-) strand; PAM type: YTN; PAM sequence: CTC
  source 1..20: mol_type = other DNA
tgactcagtccctgcctcca

SEQ ID NO: 27122 - DNA, 20 bp, synthetic construct
  misc_feature 1..20: note = Description of Artificial Sequence: Synthetic oligonucleotide
  misc_feature 1..20: note = Target: FXN; (-) strand; PAM type: YTN; PAM sequence: CTC
  source 1..20: mol_type = other DNA
aagtgatcctctgactcagt

SEQ ID NO: 27123 - DNA, 20 bp, synthetic construct
  misc_feature 1..20: note = Description of Artificial Sequence: Synthetic oligonucleotide
  misc_feature 1..20: note = Target: FXN; (-) strand; PAM type: YTN; PAM sequence: CTA
  source 1..20: mol_type = other DNA
tgctcaagtgatcctctgac

SEQ ID NO: 27124 - DNA, 20 bp, synthetic construct
  misc_feature 1..20: note = Description of Artificial Sequence: Synthetic oligonucleotide
  misc_feature 1..20: note = Target: FXN; (-) strand; PAM type: YTN; PAM sequence: CTC
  source 1..20: mol_type = other DNA
aaacccctatgctcaagtga

SEQ ID NO: 27125 - DNA, 20 bp, synthetic construct
  misc_feature 1..20: note = Description of Artificial Sequence: Synthetic oligonucleotide
  misc_feature 1..20: note = Target: FXN; (-) strand; PAM type: YTN; PAM sequence: CTG
  source 1..20: mol_type = other DNA
cagcctcaaacccctatgct

SEQ ID NO: 27126 - DNA, 20 bp, synthetic construct
  misc_feature 1..20: note = Description of Artificial Sequence: Synthetic oligonucleotide
  misc_feature 1..20: note = Target: FXN; (-) strand; PAM type: YTN; PAM sequence: CTC
  source 1..20: mol_type = other DNA
actgcagcctcaaaccccta

SEQ ID NO: 27127 - DNA, 20 bp, synthetic construct
  misc_feature 1..20: note = Description of Artificial Sequence: Synthetic oligonucleotide
  misc_feature 1..20: note = Target: FXN; (-) strand; PAM type: YTN; PAM sequence: CTG
  source 1..20: mol_type = other DNA
cagcagtggcaggatcatgg

SEQ ID NO: 27128 - DNA, 20 bp, synthetic construct
  misc_feature 1..20: note = Description of Artificial Sequence: Synthetic oligonucleotide
  misc_feature 1..20: note = Target: FXN; (-) strand; PAM type: YTN; PAM sequence: CTC
  source 1..20: mol_type = other DNA
aggctgcagcagtggcagga

SEQ ID NO: 27129 - DNA, 20 bp, synthetic construct
  misc_feature 1..20: note = Description of Artificial Sequence: Synthetic oligonucleotide
  misc_feature 1..20: note = Target: FXN; (-) strand; PAM type: YTN; PAM sequence: TTG
  source 1..20: mol_type = other DNA
ctcaggctgcagcagtggca

SEQ ID NO: 27130 - DNA, 20 bp, synthetic construct
  misc_feature 1..20: note = Description of Artificial Sequence: Synthetic oligonucleotide
  misc_feature 1..20: note = Target: FXN; (-) strand; PAM type: YTN; PAM sequence: CTG
  source 1..20: mol_type = other DNA
ttgctcaggctgcagcagtg

SEQ ID NO: 27131 - DNA, 20 bp, synthetic construct
  misc_feature 1..20: note = Description of Artificial Sequence: Synthetic oligonucleotide
  misc_feature 1..20: note = Target: FXN; (-) strand; PAM type: YTN; PAM sequence: CTC
  source 1..20: mol_type = other DNA
tgttgctcaggctgcagcag

SEQ ID NO: 27132 - DNA, 20 bp, synthetic construct
  misc_feature 1..20: note = Description of Artificial Sequence: Synthetic oligonucleotide
  misc_feature 1..20: note = Target: FXN; (-) strand; PAM type: YTN; PAM sequence: TTG
  source 1..20: mol_type = other DNA
ctctgttgctcaggctgcag

SEQ ID NO: 27133 - DNA, 20 bp, synthetic construct
  misc_feature 1..20: note = Description of Artificial Sequence: Synthetic oligonucleotide
  misc_feature 1..20: note = Target: FXN; (-) strand; PAM type: YTN; PAM sequence: CTT
  source 1..20: mol_type = other DNA
gctctgttgctcaggctgca

SEQ ID NO: 27134 - DNA, 20 bp, synthetic construct
  misc_feature 1..20: note = Description of Artificial Sequence: Synthetic oligonucleotide
  misc_feature 1..20: note = Target: FXN; (-) strand; PAM type: YTN; PAM sequence: TTA
  source 1..20: mol_type = other DNA
caacagggtcttgctctgtt

SEQ ID NO: 27135 - DNA, 20 bp, synthetic construct
  misc_feature 1..20: note = Description of Artificial Sequence: Synthetic oligonucleotide
  misc_feature 1..20: note = Target: FXN; (-) strand; PAM type: YTN; PAM sequence: TTT
  source 1..20: mol_type = other DNA
acaacagggtcttgctctgt

SEQ ID NO: 27136 - DNA, 20 bp, synthetic construct
  misc_feature 1..20: note = Description of Artificial Sequence: Synthetic oligonucleotide
  misc_feature 1..20: note = Target: FXN; (-) strand; PAM type: YTN; PAM sequence: TTT
  source 1..20: mol_type = other DNA
tacaacagggtcttgctctg

SEQ ID NO: 27137 - DNA, 20 bp, synthetic construct
  misc_feature 1..20: note = Description of Artificial Sequence: Synthetic oligonucleotide
  misc_feature 1..20: note = Target: FXN; (-) strand; PAM type: YTN; PAM sequence: TTT
  source 1..20: mol_type = other DNA
ttacaacagggtcttgctct

SEQ ID NO: 27138 - DNA, 20 bp, synthetic construct
  misc_feature 1..20: note = Description of Artificial Sequence: Synthetic oligonucleotide
  misc_feature 1..20: note = Target: FXN; (-) strand; PAM type: YTN; PAM sequence: TTG
  source 1..20: mol_type = other DNA
tttttacaacagggtcttgc

SEQ ID NO: 27139 - DNA, 20 bp, synthetic construct
  misc_feature 1..20: note = Description of Artificial Sequence: Synthetic oligonucleotide
  misc_feature 1..20: note = Target: FXN; (-) strand; PAM type: YTN; PAM sequence: TTT
  source 1..20: mol_type = other DNA
gtttttacaacagggtcttg

SEQ ID NO: 27140 - DNA, 20 bp, synthetic construct
  misc_feature 1..20: note = Description of Artificial Sequence: Synthetic oligonucleotide
  misc_feature 1..20: note = Target: FXN; (-) strand; PAM type: YTN; PAM sequence: TTG
  source 1..20: mol_type = other DNA
tttgtttttacaacagggtc

SEQ ID NO: 27141 - DNA, 20 bp, synthetic construct
  misc_feature 1..20: note = Description of Artificial Sequence: Synthetic oligonucleotide
  misc_feature 1..20: note = Target: FXN; (-) strand; PAM type: YTN; PAM sequence: TTT
  source 1..20: mol_type = other DNA
gtttgtttttacaacagggt

SEQ ID NO: 27142 - DNA, 20 bp, synthetic construct
  misc_feature 1..20: note = Description of Artificial Sequence: Synthetic oligonucleotide
  misc_feature 1..20: note = Target: FXN; (-) strand; PAM type: YTN; PAM sequence: TTG
  source 1..20: mol_type = other DNA
tttgtttgtttttacaacag

SEQ ID NO: 27143 - DNA, 20 bp, synthetic construct
  misc_feature 1..20: note = Description of Artificial Sequence: Synthetic oligonucleotide
  misc_feature 1..20: note = Target: FXN; (-) strand; PAM type: YTN; PAM sequence: TTT
  source 1..20: mol_type = other DNA
gtttgtttgtttttacaaca

SEQ ID NO: 27144 - DNA, 20 bp, synthetic construct
  misc_feature 1..20: note = Description of Artificial Sequence: Synthetic oligonucleotide
  misc_feature 1..20: note = Target: FXN; (-) strand; PAM type: YTN; PAM sequence: TTT
  source 1..20: mol_type = other DNA
tgtttgtttgtttttacaac

SEQ ID NO: 27145 - DNA, 20 bp, synthetic construct
  misc_feature 1..20: note = Description of Artificial Sequence: Synthetic oligonucleotide
  misc_feature 1..20: note = Target: FXN; (-) strand; PAM type: YTN; PAM sequence: TTT
  source 1..20: mol_type = other DNA
ttgtttgtttgtttttacaa

SEQ ID NO: 27146 - DNA, 20 bp, synthetic construct
  misc_feature 1..20: note = Description of Artificial Sequence: Synthetic oligonucleotide
  misc_feature 1..20: note = Target: FXN; (-) strand; PAM type: YTN; PAM sequence: CTG
  source 1..20: mol_type = other DNA
ccagtttttgtttgtttgtt

SEQ ID NO: 27147 - DNA, 20 bp, synthetic construct
  misc_feature 1..20: note = Description of Artificial Sequence: Synthetic oligonucleotide
  misc_feature 1..20: note = Target: FXN; (-) strand; PAM type: YTN; PAM sequence: CTC
  source 1..20: mol_type = other DNA
aggtatcagctgccagtttt

SEQ ID NO: 27148 - DNA, 20 bp, synthetic construct
  misc_feature 1..20: note = Description of Artificial Sequence: Synthetic oligonucleotide
  misc_feature 1..20: note = Target: FXN; (-) strand; PAM type: YTN; PAM sequence: CTC
  source 1..20: mol_type = other DNA
tcaggtatcagctgccagtt

SEQ ID NO: 27149 - DNA, 20 bp, synthetic construct
  misc_feature 1..20: note = Description of Artificial Sequence: Synthetic oligonucleotide
  misc_feature 1..20: note = Target: FXN; (-) strand; PAM type: YTN; PAM sequence: TTC
  source 1..20: mol_type = other DNA
actctcaggtatcagctgcc

SEQ ID NO: 27150 - DNA, 20 bp, synthetic construct
  misc_feature 1..20: note = Description of Artificial Sequence: Synthetic oligonucleotide
  misc_feature 1..20: note = Target: FXN; (-) strand; PAM type: YTN; PAM sequence: TTA
  source 1..20: mol_type = other DNA
accagcgataaaagatattc

SEQ ID NO: 27151 - DNA, 20 bp, synthetic construct
  misc_feature 1..20: note = Description of Artificial Sequence: Synthetic oligonucleotide
  misc_feature 1..20: note = Target: FXN; (-) strand; PAM type: YTN; PAM sequence: CTC
  source 1..20: mol_type = other DNA
aatcccattaaccagcgata

SEQ ID NO: 27152 - DNA, 20 bp, synthetic construct
  misc_feature 1..20: note = Description of Artificial Sequence: Synthetic oligonucleotide
  misc_feature 1..20: note = Target: FXN; (-) strand; PAM type: YTN; PAM sequence: CTC
  source 1..20: mol_type = other DNA
tcaatcccattaaccagcga

SEQ ID NO: 27153 - DNA, 20 bp, synthetic construct
  misc_feature 1..20: note = Description of Artificial Sequence: Synthetic oligonucleotide
  misc_feature 1..20: note = Target: FXN; (-) strand; PAM type: YTN; PAM sequence: TTC
  source 1..20: mol_type = other DNA
tctcaatcccattaaccagc

SEQ ID NO: 27154 - DNA, 20 bp, synthetic construct
  misc_feature 1..20: note = Description of Artificial Sequence: Synthetic oligonucleotide
  misc_feature 1..20: note = Target: FXN; (-) strand; PAM type: YTN; PAM sequence: CTA
  source 1..20: mol_type = other DNA
taagatgaagcattctctca

SEQ ID NO: 27155 - DNA, 20 bp, synthetic construct
  misc_feature 1..20: note = Description of Artificial Sequence: Synthetic oligonucleotide
  misc_feature 1..20: note = Target: FXN; (-) strand; PAM type: YTN; PAM sequence: TTC
  source 1..20: mol_type = other DNA
tataagatgaagcattctct

SEQ ID NO: 27156 - DNA, 20 bp, synthetic construct
  misc_feature 1..20: note = Description of Artificial Sequence: Synthetic oligonucleotide
  misc_feature 1..20: note = Target: FXN; (-) strand; PAM type: YTN; PAM sequence: TTT
  source 1..20: mol_type = other DNA
ctataagatgaagcattctc

SEQ ID NO: 27157 - DNA, 20 bp, synthetic construct
  misc_feature 1..20: note = Description of Artificial Sequence: Synthetic oligonucleotide
  misc_feature 1..20: note = Target: FXN; (-) strand; PAM type: YTN; PAM sequence: CTT
  source 1..20: mol_type = other DNA
tctataagatgaagcattct

SEQ ID NO: 27158 - DNA, 20 bp, synthetic construct
  misc_feature 1..20: note = Description of Artificial Sequence: Synthetic oligonucleotide
  misc_feature 1..20: note = Target: FXN; (-) strand; PAM type: YTN; PAM sequence: TTC
  source 1..20: mol_type = other DNA
tttctataagatgaagcatt

SEQ ID NO: 27159 - DNA, 20 bp, synthetic construct
  misc_feature 1..20: note = Description of Artificial Sequence: Synthetic oligonucleotide
  misc_feature 1..20: note = Target: FXN; (-) strand; PAM type: YTN; PAM sequence: CTG
  source 1..20: mol_type = other DNA
ttctttctataagatgaagc

SEQ ID NO: 27160 - DNA, 20 bp, synthetic construct
  misc_feature 1..20: note = Description of Artificial Sequence: Synthetic oligonucleotide
  misc_feature 1..20: note = Target: FXN; (-) strand; PAM type: YTN; PAM sequence: CTG
  source 1..20: mol_type = other DNA
tgggtccaaagacactgttc

SEQ ID NO: 27161 - DNA, 20 bp, synthetic construct
  misc_feature 1..20: note = Description of Artificial Sequence: Synthetic oligonucleotide
  misc_feature 1..20: note = Target: FXN; (-) strand; PAM type: YTN; PAM sequence: CTC
  source 1..20: mol_type = other DNA
tgtgggtccaaagacactgt

SEQ ID NO: 27162 - DNA, 20 bp, synthetic construct
  misc_feature 1..20: note = Description of Artificial Sequence: Synthetic oligonucleotide
  misc_feature 1..20: note = Target: FXN; (-) strand; PAM type: YTN; PAM sequence: TTA
  source 1..20: mol_type = other DNA
aatccaggtctctgtgggtc

SEQ ID NO: 27163 - DNA, 20 bp, synthetic construct
  misc_feature 1..20: note = Description of Artificial Sequence: Synthetic oligonucleotide
  misc_feature 1..20: note = Target: FXN; (-) strand; PAM type: YTN; PAM sequence: CTT
  source 1..20: mol_type = other DNA
aaatccaggtctctgtgggt

SEQ ID NO: 27164 - DNA, 20 bp, synthetic construct
  misc_feature 1..20: note = Description of Artificial Sequence: Synthetic oligonucleotide
  misc_feature 1..20: note = Target: FXN; (-) strand; PAM type: YTN; PAM sequence: CTA
  source 1..20: mol_type = other DNA
atcttaaatccaggtctctg

SEQ ID NO: 27165 - DNA, 20 bp, synthetic construct
  misc_feature 1..20: note = Description of Artificial Sequence: Synthetic oligonucleotide
  misc_feature 1..20: note = Target: FXN; (-) strand; PAM type: YTN; PAM sequence: TTG
  source 1..20: mol_type = other DNA
gcagagctaatcttaaatcc

SEQ ID NO: 27166 - DNA, 20 bp, synthetic construct
  misc_feature 1..20: note = Description of Artificial Sequence: Synthetic oligonucleotide
  misc_feature 1..20: note = Target: FXN; (-) strand; PAM type: YTN; PAM sequence: CTC
  source 1..20: mol_type = other DNA
agtaattggcagagctaatc

SEQ ID NO: 27167 - DNA, 20 bp, synthetic construct
  misc_feature 1..20: note = Description of Artificial Sequence: Synthetic oligonucleotide
  misc_feature 1..20: note = Target: FXN; (-) strand; PAM type: YTN; PAM sequence: TTC
  source 1..20: mol_type = other DNA
atagtaaagagtactcagta

SEQ ID NO: 27168 - DNA, 20 bp, synthetic construct
  misc_feature 1..20: note = Description of Artificial Sequence: Synthetic oligonucleotide
  misc_feature 1..20: note = Target: FXN; (-) strand; PAM type: YTN; PAM sequence: TTC
  source 1..20: mol_type = other DNA
acagatgaggaaaacagagg

SEQ ID NO: 27169 - DNA, 20 bp, synthetic construct
  misc_feature 1..20: note = Description of Artificial Sequence: Synthetic oligonucleotide
  misc_feature 1..20: note = Target: FXN; (-) strand; PAM type: YTN; PAM sequence: TTT
  source 1..20: mol_type = other DNA
cacagatgaggaaaacagag

SEQ ID NO: 27170 - DNA, 20 bp, synthetic construct
  misc_feature 1..20: note = Description of Artificial Sequence: Synthetic oligonucleotide
  misc_feature 1..20: note = Target: FXN; (-) strand; PAM type: YTN; PAM sequence: TTC
  source 1..20: mol_type = other DNA
cagtttcacagatgaggaaa

SEQ ID NO: 27171 - DNA, 20 bp, synthetic construct
  misc_feature 1..20: note = Description of Artificial Sequence: Synthetic oligonucleotide
  misc_feature 1..20: note = Target: FXN; (-) strand; PAM type: YTN; PAM sequence: TTA
  source 1..20: mol_type = other DNA
ttccagtttcacagatgagg

SEQ ID NO: 27172 - DNA, 20 bp, synthetic construct
  misc_feature 1..20: note = Description of Artificial Sequence: Synthetic oligonucleotide
  misc_feature 1..20: note = Target: FXN; (-) strand; PAM type: YTN; PAM sequence: TTC
  source 1..20: mol_type = other DNA
attattccagtttcacagat

SEQ ID NO: 27173 - DNA, 20 bp, synthetic construct
  misc_feature 1..20: note = Description of Artificial Sequence: Synthetic oligonucleotide
  misc_feature 1..20: note = Target: FXN; (-) strand; PAM type: YTN; PAM sequence: TTG
  source 1..20: mol_type = other DNA
gcggtaggattcattattcc

SEQ ID NO: 27174 - DNA, 20 bp, synthetic construct
  misc_feature 1..20: note = Description of Artificial Sequence: Synthetic oligonucleotide
  misc_feature 1..20: note = Target: FXN; (-) strand; PAM type: YTN; PAM sequence: TTG
  source 1..20: mol_type = other DNA
ttggcggtaggattcattat

SEQ ID NO: 27175 - DNA, 20 bp, synthetic construct
  misc_feature 1..20: note = Description of Artificial Sequence: Synthetic oligonucleotide
  misc_feature 1..20: note = Target: FXN; (-) strand; PAM type: YTN; PAM sequence: CTA
  source 1..20: mol_type = other DNA
caattgttggcggtaggatt

SEQ ID NO: 27176 - DNA, 20 bp, synthetic construct
  misc_feature 1..20: note = Description of Artificial Sequence: Synthetic oligonucleotide
  misc_feature 1..20: note = Target: FXN; (-) strand; PAM type: YTN; PAM sequence: TTG
  source 1..20: mol_type = other DNA
actacaattgttggcggtag

SEQ ID NO: 27177 - DNA, 20 bp, synthetic construct
  misc_feature 1..20: note = Description of Artificial Sequence: Synthetic oligonucleotide
  misc_feature 1..20: note = Target: FXN; (-) strand; PAM type: YTN; PAM sequence: CTT
  source 1..20: mol_type = other DNA
gactacaattgttggcggta

SEQ ID NO: 27178 - DNA, 20 bp, synthetic construct
  misc_feature 1..20: note = Description of Artificial Sequence: Synthetic oligonucleotide
  misc_feature 1..20: note = Target: FXN; (-) strand; PAM type: YTN; PAM sequence: TTC
  source 1..20: mol_type = other DNA
caacttgactacaattgttg

SEQ ID NO: 27179 - DNA, 20 bp, synthetic construct
  misc_feature 1..20: note = Description of Artificial Sequence: Synthetic oligonucleotide
  misc_feature 1..20: note = Target: FXN; (-) strand; PAM type: YTN; PAM sequence: TTT
  source 1..20: mol_type = other DNA
ccaacttgactacaattgtt

SEQ ID NO: 27180 - DNA, 20 bp, synthetic construct
  misc_feature 1..20: note = Description of Artificial Sequence: Synthetic oligonucleotide
  misc_feature 1..20: note = Target: FXN; (-) strand; PAM type: YTN; PAM sequence: TTG
  source 1..20: mol_type = other DNA
tttccaacttgactacaatt

SEQ ID NO: 27181 - DNA, 20 bp, synthetic construct
  misc_feature 1..20: note = Description of Artificial Sequence: Synthetic oligonucleotide
  misc_feature 1..20: note = Target: FXN; (-) strand; PAM type: YTN; PAM sequence: TTG
  source 1..20: mol_type = other DNA
tgtaaattgtttccaacttg

SEQ ID NO: 27182 - DNA, 20 bp, synthetic construct
  misc_feature 1..20: note = Description of Artificial Sequence: Synthetic oligonucleotide
  misc_feature 1..20: note = Target: FXN; (-) strand; PAM type: YTN; PAM sequence: TTT
  source 1..20: mol_type = other DNA
gtgtaaattgtttccaactt

SEQ ID NO: 27183 - DNA, 20 bp, synthetic construct
  misc_feature 1..20: note = Description of Artificial Sequence: Synthetic oligonucleotide
  misc_feature 1..20: note = Target: FXN; (-) strand; PAM type: YTN; PAM sequence: CTT
  source 1..20: mol_type = other DNA
tgtgtaaattgtttccaact

SEQ ID NO: 27184 - DNA, 20 bp, synthetic construct
  misc_feature 1..20: note = Description of Artificial Sequence: Synthetic oligonucleotide
  misc_feature 1..20: note = Target: FXN; (-) strand; PAM type: YTN; PAM sequence: TTG
  source 1..20: mol_type = other DNA
gcactttgtgtaaattgttt

SEQ ID NO: 27185 - DNA, 20 bp, synthetic construct
  misc_feature 1..20: note = Description of Artificial Sequence: Synthetic oligonucleotide
  misc_feature 1..20: note = Target: FXN; (-) strand; PAM type: YTN; PAM sequence: TTT
  source 1..20: mol_type = other DNA
ggcactttgtgtaaattgtt

SEQ ID NO: 27186 - DNA, 20 bp, synthetic construct
  misc_feature 1..20: note = Description of Artificial Sequence: Synthetic oligonucleotide
  misc_feature 1..20: note = Target: FXN; (-) strand; PAM type: YTN; PAM sequence: TTG
  source 1..20: mol_type = other DNA
gtgtttggcactttgtgtaa

SEQ ID NO: 27187 - DNA, 20 bp, synthetic construct
  misc_feature 1..20: note = Description of Artificial Sequence: Synthetic oligonucleotide
  misc_feature 1..20: note = Target: FXN; (-) strand; PAM type: YTN; PAM sequence: CTT
  source 1..20: mol_type = other DNA
ggtgtttggcactttgtgta

SEQ ID NO: 27188 - DNA, 20 bp, synthetic construct
  misc_feature 1..20: note = Description of Artificial Sequence: Synthetic oligonucleotide
  misc_feature 1..20: note = Target: FXN; (-) strand; PAM type: YTN; PAM sequence: CTG
  source 1..20: mol_type = other DNA
tgccaggcttggtgtttggc

SEQ ID NO: 27189 - DNA, 20 bp, synthetic construct
  misc_feature 1..20: note = Description of Artificial Sequence: Synthetic oligonucleotide
  misc_feature 1..20: note = Target: FXN; (-) strand; PAM type: YTN; PAM sequence: CTA
  source 1..20: mol_type = other DNA
ctgtgccaggcttggtgttt

SEQ ID NO: 27190 - DNA, 20 bp, synthetic construct
  misc_feature 1..20: note = Description of Artificial Sequence: Synthetic oligonucleotide
  misc_feature 1..20: note = Target: FXN; (-) strand; PAM type: YTN; PAM sequence: TTC
  source 1..20: mol_type = other DNA
ctactgtgccaggcttggtg

SEQ ID NO: 27191 - DNA, 20 bp, synthetic construct
  misc_feature 1..20: note = Description of Artificial Sequence: Synthetic oligonucleotide
  misc_feature 1..20: note = Target: FXN; (-) strand; PAM type: YTN; PAM sequence: CTC
  source 1..20: mol_type = other DNA
ggttcctactgtgccaggct

SEQ ID NO: 27192 - DNA, 20 bp, synthetic construct
  misc_feature 1..20: note = Description of Artificial Sequence: Synthetic oligonucleotide
  misc_feature 1..20: note = Target: FXN; (-) strand; PAM type: YTN; PAM sequence: TTA
  source 1..20: mol_type = other DNA
ctcggttcctactgtgccag

SEQ ID NO: 27193 - DNA, 20 bp, synthetic construct
  misc_feature 1..20: note = Description of Artificial Sequence: Synthetic oligonucleotide
  misc_feature 1..20: note = Target: FXN; (-) strand; PAM type: YTN; PAM sequence: TTT
  source 1..20: mol_type = other DNA
actcggttcctactgtgcca

SEQ ID NO: 27194 - DNA, 20 bp, synthetic construct
  misc_feature 1..20: note = Description of Artificial Sequence: Synthetic oligonucleotide
  misc_feature 1..20: note = Target: FXN; (-) strand; PAM type: YTN; PAM sequence: CTA
  source 1..20: mol_type = other DNA
tttactcggttcctactgtg

SEQ ID NO: 27195 - DNA, 20 bp, synthetic construct
  misc_feature 1..20: note = Description of Artificial Sequence: Synthetic oligonucleotide
  misc_feature 1..20: note = Target: FXN; (-) strand; PAM type: YTN; PAM sequence: TTA
  source 1..20: mol_type = other DNA
accactatttactcggttcc

SEQ ID NO: 27196 - DNA, 20 bp, synthetic construct
  misc_feature 1..20: note = Description of Artificial Sequence: Synthetic oligonucleotide
  misc_feature 1..20: note = Target: FXN; (-) strand; PAM type: YTN; PAM sequence: CTG
  source 1..20: mol_type = other DNA
ataaaaatattaaccactat

SEQ ID NO: 27197 - DNA, 20 bp, synthetic construct
  misc_feature 1..20: note = Description of Artificial Sequence: Synthetic oligonucleotide
  misc_feature 1..20: note = Target: FXN; (-) strand; PAM type: YTN; PAM sequence: TTC
  source 1..20: mol_type = other DNA
aaaaacaaatgtatagaaat

SEQ ID NO: 27198 - DNA, 20 bp, synthetic construct
  misc_feature 1..20: note = Description of Artificial Sequence: Synthetic oligonucleotide
  misc_feature 1..20: note = Target: FXN; (-) strand; PAM type: YTN; PAM sequence: CTG
  source 1..20: mol_type = other DNA
attcaaaaacaaatgtatag

SEQ ID NO: 27199 - DNA, 20 bp, synthetic construct
  misc_feature 1..20: note = Description of Artificial Sequence: Synthetic oligonucleotide
  misc_feature 1..20: note = Target: FXN; (-) strand; PAM type: YTN; PAM sequence: TTC
  source 1..20: mol_type = other DNA
tgattcaaaaacaaatgtat

SEQ ID NO: 27200 - DNA, 20 bp, synthetic construct
  misc_feature 1..20: note = Description of Artificial Sequence: Synthetic oligonucleotide
  misc_feature 1..20: note = Target: FXN; (-) strand; PAM type: YTN; PAM sequence: TTT
  source 1..20: mol_type = other DNA
ctgattcaaaaacaaatgta

SEQ ID NO: 27201 - DNA, 20 bp, synthetic construct
  misc_feature 1..20: note = Description of Artificial Sequence: Synthetic oligonucleotide
  misc_feature 1..20: note = Target: FXN; (-) strand; PAM type: YTN; PAM sequence: TTT
  source 1..20: mol_type = other DNA
tctgattcaaaaacaaatgt

SEQ ID NO: 27202 - DNA, 20 bp, synthetic construct
  misc_feature 1..20: note = Description of Artificial Sequence: Synthetic oligonucleotide
  misc_feature 1..20: note = Target: FXN; (-) strand; PAM type: YTN; PAM sequence: TTT
  source 1..20: mol_type = other DNA
ttctgattcaaaaacaaatg

SEQ ID NO: 27203 - DNA, 20 bp, synthetic construct
  misc_feature 1..20: note = Description of Artificial Sequence: Synthetic oligonucleotide
  misc_feature 1..20: note = Target: FXN; (-) strand; PAM type: YTN; PAM sequence: CTT
  source 1..20: mol_type = other DNA
tttctgattcaaaaacaaat

SEQ ID NO: 27204 - DNA, 20 bp, synthetic construct
  misc_feature 1..20: note = Description of Artificial Sequence: Synthetic oligonucleotide
  misc_feature 1..20: note = Target: FXN; (-) strand; PAM type: YTN; PAM sequence: TTA
  source 1..20: mol_type = other DNA
aaataacatctttttctgat

SEQ ID NO: 27205 - DNA, 20 bp, synthetic construct
  misc_feature 1..20: note = Description of Artificial Sequence: Synthetic oligonucleotide
  misc_feature 1..20: note = Target: FXN; (-) strand; PAM type: YTN; PAM sequence: TTT
  source 1..20: mol_type = other DNA
aaaataacatctttttctga

SEQ ID NO: 27206 - DNA, 20 bp, synthetic construct
  misc_feature 1..20: note = Description of Artificial Sequence: Synthetic oligonucleotide
  misc_feature 1..20: note = Target: FXN; (-) strand; PAM type: YTN; PAM sequence: TTT
  source 1..20: mol_type = other DNA
taaaataacatctttttctg

SEQ ID NO: 27207 - DNA, 20 bp, synthetic construct
  misc_feature 1..20: note = Description of Artificial Sequence: Synthetic oligonucleotide
  misc_feature 1..20: note = Target: FXN; (-) strand; PAM type: YTN; PAM sequence: TTT
  source 1..20: mol_type = other DNA
ttaaaataacatctttttct

SEQ ID NO: 27208 - DNA, 20 bp, synthetic construct
  misc_feature 1..20: note = Description of Artificial Sequence: Synthetic oligonucleotide
  misc_feature 1..20: note = Target: FXN; (-) strand; PAM type: YTN; PAM sequence: TTT
  source 1..20: mol_type = other DNA
tttaaaataacatctttttc

SEQ ID NO: 27209 - DNA, 20 bp, synthetic construct
  misc_feature 1..20: note = Description of Artificial Sequence: Synthetic oligonucleotide
  misc_feature 1..20: note = Target: FXN; (-) strand; PAM type: YTN; PAM sequence: TTT
  source 1..20: mol_type = other DNA
ttttaaaataacatcttttt

SEQ ID NO: 27210 - DNA, 20 bp, synthetic construct
  misc_feature 1..20: note = Description of Artificial Sequence: Synthetic oligonucleotide
  misc_feature 1..20: note = Target: FXN; (-) strand; PAM type: YTN; PAM sequence: TTA
  source 1..20: mol_type = other DNA
tttttttaaaataacatctt

SEQ ID NO: 27211 - DNA, 20 bp, synthetic construct
  misc_feature 1..20: note = Description of Artificial Sequence: Synthetic oligonucleotide
  misc_feature 1..20: note = Target: FXN; (-) strand; PAM type: YTN; PAM sequence: CTG
  source 1..20: mol_type = other DNA
ggttatttttttaaaataac

SEQ ID NO: 27212 - DNA, 20 bp, synthetic construct
  misc_feature 1..20: note = Description of Artificial Sequence: Synthetic oligonucleotide
  misc_feature 1..20: note = Target: FXN; (-) strand; PAM type: YTN; PAM sequence: CTA
  source 1..20: mol_type = other DNA
ctgggttatttttttaaaat

SEQ ID NO: 27213 - DNA, 20 bp, synthetic construct
  misc_feature 1..20: note = Description of Artificial Sequence: Synthetic oligonucleotide
  misc_feature 1..20: note = Target: FXN; (-) strand; PAM type: YTN; PAM sequence: CTG
  source 1..20: mol_type = other DNA
ataggaatgggacaaggggc

SEQ ID NO: 27214 - DNA, 20 bp, synthetic construct
  misc_feature 1..20: note = Description of Artificial Sequence: Synthetic oligonucleotide
  misc_feature 1..20: note = Target: FXN; (-) strand; PAM type: YTN; PAM sequence: TTC
  source 1..20: mol_type = other DNA
cagagggtagtaacaataat

SEQ ID NO: 27215 - DNA, 20 bp, synthetic construct
  misc_feature 1..20: note = Description of Artificial Sequence: Synthetic oligonucleotide
  misc_feature 1..20: note = Target: FXN; (-) strand; PAM type: YTN; PAM sequence: TTG
  source 1..20: mol_type = other DNA
aaattccagagggtagtaac

SEQ ID NO: 27216 - DNA, 20 bp, synthetic construct
  misc_feature 1..20: note = Description of Artificial Sequence: Synthetic oligonucleotide
  misc_feature 1..20: note = Target: FXN; (-) strand; PAM type: YTN; PAM sequence: TTA
  source 1..20: mol_type = other DNA
ttgaaattccagagggtagt

SEQ ID NO: 27217 - DNA, 20 bp, synthetic construct
  misc_feature 1..20: note = Description of Artificial Sequence: Synthetic oligonucleotide
  misc_feature 1..20: note = Target: FXN; (-) strand; PAM type: YTN; PAM sequence: CTC
  source 1..20: mol_type = other DNA
aaaagcaaagcaaaacaaaa

SEQ ID NO: 27218 - DNA, 20 bp, synthetic construct
  misc_feature 1..20: note = Description of Artificial Sequence: Synthetic oligonucleotide
  misc_feature 1..20: note = Target: FXN; (-) strand; PAM type: YTN; PAM sequence: CTG
  source 1..20: mol_type = other DNA
tctcaaaagcaaagcaaaac

SEQ ID NO: 27219 - DNA, 20 bp, synthetic construct
  misc_feature 1..20: note = Description of Artificial Sequence: Synthetic oligonucleotide
  misc_feature 1..20: note = Target: FXN; (-) strand; PAM type: YTN; PAM sequence: CTG
  source 1..20: mol_type = other DNA
ggcgacagagatcctgtctc

SEQ ID NO: 27220 - DNA, 20 bp, synthetic construct
  misc_feature 1..20: note = Description of Artificial Sequence: Synthetic oligonucleotide
  misc_feature 1..20: note = Target: FXN; (-) strand; PAM type: YTN; PAM sequence: CTA
  source 1..20: mol_type = other DNA
cacaccagactgggcgacag

SEQ ID NO: 27221 - DNA, 20 bp, synthetic construct
  misc_feature 1..20: note = Description of Artificial Sequence: Synthetic oligonucleotide
  misc_feature 1..20: note = Target: FXN; (-) strand; PAM type: YTN; PAM sequence: CTG
  source 1..20: mol_type = other DNA
agatcacaccactacacacc

SEQ ID NO: 27222 - DNA, 20 bp, synthetic construct
  misc_feature 1..20: note = Description of Artificial Sequence: Synthetic oligonucleotide
  misc_feature 1..20: note = Target: FXN; (-) strand; PAM type: YTN; PAM sequence: CTG
  source 1..20: mol_type = other DNA
cagtgagctgagatcacacc

SEQ ID NO: 27223 - DNA, 20 bp, synthetic construct
  misc_feature 1..20: note = Description of Artificial Sequence: Synthetic oligonucleotide
  misc_feature 1..20: note = Target: FXN; (-) strand; PAM type: YTN; PAM sequence: TTG
  source 1..20: mol_type = other DNA
aggctgcagtgagctgagat

SEQ ID NO: 27224 - DNA, 20 bp, synthetic construct
  misc_feature 1..20: note = Description of Artificial Sequence: Synthetic oligonucleotide
  misc_feature 1..20: note = Target: FXN; (-) strand; PAM type: YTN; PAM sequence: CTG
  source 1..20: mol_type = other DNA
agcccaggaggttgaggctg

SEQ ID NO: 27225 - DNA, 20 bp, synthetic construct
  misc_feature 1..20: note = Description of Artificial Sequence: Synthetic oligonucleotide
  misc_feature 1..20: note = Target: FXN; (-) strand; PAM type: YTN; PAM sequence: CTG
  source 1..20: mol_type = other DNA
aagtgggaggatcacctgag

SEQ ID NO: 27226 - DNA, 20 bp, synthetic construct
  misc_feature 1..20: note = Description of Artificial Sequence: Synthetic oligonucleotide
  misc_feature 1..20: note = Target: FXN; (-) strand; PAM type: YTN; PAM sequence: TTG
  source 1..20: mol_type = other DNA
ggaggctgaagtgggaggat

SEQ ID NO: 27227 - DNA, 20 bp, synthetic construct
  misc_feature 1..20: note = Description of Artificial Sequence: Synthetic oligonucleotide
  misc_feature 1..20: note = Target: FXN; (-) strand; PAM type: YTN; PAM sequence: CTT
  source 1..20: mol_type = other DNA
gggaggctgaagtgggagga

SEQ ID NO: 27228 - DNA, 20 bp, synthetic construct
  misc_feature 1..20: note = Description of Artificial Sequence: Synthetic oligonucleotide
  misc_feature 1..20: note = Target: FXN; (-) strand; PAM type: YTN; PAM sequence: CTA
  source 1..20: mol_type = other DNA
cttgggaggctgaagtggga

SEQ ID NO: 27229 - DNA, 20 bp, synthetic construct
  misc_feature 1..20: note = Description of Artificial Sequence: Synthetic oligonucleotide
  misc_feature 1..20: note = Target: FXN; (-) strand; PAM type: YTN; PAM sequence: CTG
  source 1..20: mol_type = other DNA
tggtcccagctacttgggag

SEQ ID NO: 27230 - DNA, 20 bp, synthetic construct
  misc_feature 1..20: note = Description of Artificial Sequence: Synthetic oligonucleotide
  misc_feature 1..20: note = Target: FXN; (-) strand; PAM type: YTN; PAM sequence: TTA
  source 1..20: mol_type = other DNA
gccaagtgtggtggcatgcg

SEQ ID NO: 27231 - DNA, 20 bp, synthetic construct
  misc_feature 1..20: note = Description of Artificial Sequence: Synthetic oligonucleotide
  misc_feature 1..20: note = Target: FXN; (-) strand; PAM type: YTN; PAM sequence: CTA
  source 1..20: mol_type = other DNA
aaaatgcaaaaattagccaa

SEQ ID NO: 27232 - DNA, 20 bp, synthetic construct
  misc_feature 1..20: note = Description of Artificial Sequence: Synthetic oligonucleotide
  misc_feature 1..20: note = Target: FXN; (-) strand; PAM type: YTN; PAM sequence: CTA
  source 1..20: mol_type = other DNA
ctaaaaatgcaaaaattagc

SEQ ID NO: 27233 - DNA, 20 bp, synthetic construct
  misc_feature 1..20: note = Description of Artificial Sequence: Synthetic oligonucleotide
  misc_feature 1..20: note = Target: FXN; (-) strand; PAM type: YTN; PAM sequence: CTC
  source 1..20: mol_type = other DNA
tactaaaaatgcaaaaatta

SEQ ID NO: 27234 - DNA, 20 bp, synthetic construct
  misc_feature 1..20: note = Description of Artificial Sequence: Synthetic oligonucleotide
  misc_feature 1..20: note = Target: FXN; (-) strand; PAM type: YTN; PAM sequence: CTG
  source 1..20: mol_type = other DNA
tctctactaaaaatgcaaaa

SEQ ID NO: 27235 - DNA, 20 bp, synthetic construct
  misc_feature 1..20: note = Description of Artificial Sequence: Synthetic oligonucleotide
  misc_feature 1..20: note = Target: FXN; (-) strand; PAM type: YTN; PAM sequence: CTA
  source 1..20: mol_type = other DNA
ggcaatatggcaaaaccctg

SEQ ID NO: 27236 - DNA, 20 bp, synthetic construct
  misc_feature 1..20: note = Description of Artificial Sequence: Synthetic oligonucleotide
  misc_feature 1..20: note = Target: FXN; (-) strand; PAM type: YTN; PAM sequence: TTC
  source 1..20: mol_type = other DNA
cagaccggcctaggcaatat

SEQ ID NO: 27237 - DNA, 20 bp, synthetic construct
  misc_feature 1..20: note = Description of Artificial Sequence: Synthetic oligonucleotide
  misc_feature 1..20: note = Target: FXN; (-) strand; PAM type: YTN; PAM sequence: TTG
  source 1..20: mol_type = other DNA
agcccagaagttccagaccg

SEQ ID NO: 27238 - DNA, 20 bp, synthetic construct
  misc_feature 1..20: note = Description of Artificial Sequence: Synthetic oligonucleotide
  misc_feature 1..20: note = Target: FXN; (-) strand; PAM type: YTN; PAM sequence: CTT
  source 1..20: mol_type = other DNA
gagcccagaagttccagacc

SEQ ID NO: 27239 - DNA, 20 bp, synthetic construct
  misc_feature 1..20: note = Description of Artificial Sequence: Synthetic oligonucleotide
  misc_feature 1..20: note = Target: FXN; (-) strand; PAM type: YTN; PAM sequence: TTG
  source 1..20: mol_type = other DNA
ggaggccgaggcaggcagat

SEQ ID NO: 27240 - DNA, 20 bp, synthetic construct
  misc_feature 1..20: note = Description of Artificial Sequence: Synthetic oligonucleotide
  misc_feature 1..20: note = Target: FXN; (-) strand; PAM type: YTN; PAM sequence: TTT
  source 1..20: mol_type = other DNA
gggaggccgaggcaggcaga

SEQ ID NO: 27241 - DNA, 20 bp, synthetic construct
  misc_feature 1..20: note = Description of Artificial Sequence: Synthetic oligonucleotide
  misc_feature 1..20: note = Target: FXN; (-) strand; PAM type: YTN; PAM sequence: CTT
  source 1..20: mol_type = other DNA
tgggaggccgaggcaggcag

SEQ ID NO: 27242 - DNA, 20 bp, synthetic construct
  misc_feature 1..20: note = Description of Artificial Sequence: Synthetic oligonucleotide
  misc_feature 1..20: note = Target: FXN; (-) strand; PAM type: YTN; PAM sequence: TTC
  source 1..20: mol_type = other DNA
cagcactttgggaggccgag

SEQ ID NO: 27243 - DNA, 20 bp, synthetic construct
  misc_feature 1..20: note = Description of Artificial Sequence: Synthetic oligonucleotide
  misc_feature 1..20: note = Target: FXN; (-) strand; PAM type: YTN; PAM sequence: CTG
  source 1..20: mol_type = other DNA
aaattccagcactttgggag

SEQ ID NO: 27244 - DNA, 20 bp, synthetic construct
  misc_feature 1..20: note = Description of Artificial Sequence: Synthetic oligonucleotide
  misc_feature 1..20: note = Target: FXN; (-) strand; PAM type: YTN; PAM sequence: CTC
  source 1..20: mol_type = other DNA
atgcctgaaattccagcact

SEQ ID NO: 27245 - DNA, 20 bp, synthetic construct
  misc_feature 1..20: note = Description of Artificial Sequence: Synthetic oligonucleotide
  misc_feature 1..20: note = Target: FXN; (-) strand; PAM type: YTN; PAM sequence: TTA
  source 1..20: mol_type = other DNA
ggccaggcatggctcatgcc

SEQ ID NO: 27246 - DNA, 20 bp, synthetic construct
  misc_feature 1..20: note = Description of Artificial Sequence: Synthetic oligonucleotide
  misc_feature 1..20: note = Target: FXN; (-) strand; PAM type: YTN; PAM sequence: TTT
  source 1..20: mol_type = other DNA
aggccaggcatggctcatgc

SEQ ID NO: 27247 - DNA, 20 bp, synthetic construct
  misc_feature 1..20: note = Description of Artificial Sequence: Synthetic oligonucleotide
  misc_feature 1..20: note = Target: FXN; (-) strand; PAM type: YTN; PAM sequence: CTA
  source 1..20: mol_type = other DNA
tttaggccaggcatggctca

SEQ ID NO: 27248 - DNA, 20 bp, synthetic construct
  misc_feature 1..20: note = Description of Artificial Sequence: Synthetic oligonucleotide
  misc_feature 1..20: note = Target: FXN; (-) strand; PAM type: YTN; PAM sequence: TTG
  source 1..20: mol_type = other DNA
caaacacagagagctattta

SEQ ID NO: 27249 - DNA, 20 bp, synthetic construct
  misc_feature 1..20: note = Description of Artificial Sequence: Synthetic oligonucleotide
  misc_feature 1..20: note = Target: FXN; (-) strand; PAM type: YTN; PAM sequence: TTT
  source 1..20: mol_type = other DNA
gcaaacacagagagctattt

SEQ ID NO: 27250 - DNA, 20 bp, synthetic construct
  misc_feature 1..20: note = Description of Artificial Sequence: Synthetic oligonucleotide
  misc_feature 1..20: note = Target: FXN; (-) strand; PAM type: YTN; PAM sequence: TTT
  source 1..20: mol_type = other DNA
tgcaaacacagagagctatt

SEQ ID NO: 27251 - DNA, 20 bp, synthetic construct
  misc_feature 1..20: note = Description of Artificial Sequence: Synthetic oligonucleotide
  misc_feature 1..20: note = Target: FXN; (-) strand; PAM type: YTN; PAM sequence: CTT
  source 1..20: mol_type = other DNA
ttgcaaacacagagagctat

SEQ ID NO: 27252 - DNA, 20 bp, synthetic construct
  misc_feature 1..20: note = Description of Artificial Sequence: Synthetic oligonucleotide
  misc_feature 1..20: note = Target: FXN; (-) strand; PAM type: YTN; PAM sequence: TTA
  source 1..20: mol_type = other DNA
taacacacttttgcaaacac

SEQ ID NO: 27253 - DNA, 20 bp, synthetic construct
  misc_feature 1..20: note = Description of Artificial Sequence: Synthetic oligonucleotide
  misc_feature 1..20: note = Target: FXN; (-) strand; PAM type: YTN; PAM sequence: CTT
  source 1..20: mol_type = other DNA
ataacacacttttgcaaaca

SEQ ID NO: 27254 - DNA, 20 bp, synthetic construct
  misc_feature 1..20: note = Description of Artificial Sequence: Synthetic oligonucleotide
  misc_feature 1..20: note = Target: FXN; (-) strand; PAM type: YTN; PAM sequence: TTC
  source 1..20: mol_type = other DNA
ttataacacacttttgcaaa

SEQ ID NO: 27255 - DNA, 20 bp, synthetic construct
  misc_feature 1..20: note = Description of Artificial Sequence: Synthetic oligonucleotide
  misc_feature 1..20: note = Target: FXN; (-) strand; PAM type: YTN; PAM sequence: CTG
  source 1..20: mol_type = other DNA
aatgattcttataacacact

SEQ ID NO: 27256 - DNA, 20 bp, synthetic construct
  misc_feature 1..20: note = Description of Artificial Sequence: Synthetic oligonucleotide
  misc_feature 1..20: note = Target: FXN; (-) strand; PAM type: YTN; PAM sequence: CTC
  source 1..20: mol_type = other DNA
tgaatgattcttataacaca

SEQ ID NO: 27257 - DNA, 20 bp, synthetic construct
  misc_feature 1..20: note = Description of Artificial Sequence: Synthetic oligonucleotide
  misc_feature 1..20: note = Target: FXN; (-) strand; PAM type: YTN; PAM sequence: CTC
  source 1..20: mol_type = other DNA
catccaatcgagaggctctg

SEQ ID NO: 27258 - DNA, 20 bp, synthetic construct
  misc_feature 1..20: note = Description of Artificial Sequence: Synthetic oligonucleotide
  misc_feature 1..20: note = Target: FXN; (-) strand; PAM type: YTN; PAM sequence: CTA
  source 1..20: mol_type = other DNA
gagcctccatccaatcgaga

SEQ ID NO: 27259 - DNA, 20 bp, synthetic construct
  misc_feature 1..20: note = Description of Artificial Sequence: Synthetic oligonucleotide
  misc_feature 1..20: note = Target: FXN; (-) strand; PAM type: YTN; PAM sequence: TTC
  source 1..20: mol_type = other DNA
tagagcctccatccaatcga

SEQ ID NO: 27260 - DNA, 20 bp, synthetic construct
  misc_feature 1..20: note = Description of Artificial Sequence: Synthetic oligonucleotide
  misc_feature 1..20: note = Target: FXN; (-) strand; PAM type: YTN; PAM sequence: CTG
  source 1..20: mol_type = other DNA
tgcattctagagcctccatc

SEQ ID NO: 27261 - DNA, 20 bp, synthetic construct
  misc_feature 1..20: note = Description of Artificial Sequence: Synthetic oligonucleotide
  misc_feature 1..20: note = Target: FXN; (-) strand; PAM type: YTN; PAM sequence: TTC
  source 1..20: mol_type = other DNA
tgtgcattctagagcctcca

SEQ ID NO: 27262 - DNA, 20 bp, synthetic construct
  misc_feature 1..20: note = Description of Artificial Sequence: Synthetic oligonucleotide
  misc_feature 1..20: note = Target: FXN; (-) strand; PAM type: YTN; PAM sequence: TTT
  source 1..20: mol_type = other DNA
ctgtgcattctagagcctcc

SEQ ID NO: 27263 - DNA, 20 bp, synthetic construct
  misc_feature 1..20: note = Description of Artificial Sequence: Synthetic oligonucleotide
  misc_feature 1..20: note = Target: FXN; (-) strand; PAM type: YTN; PAM sequence: TTT
  source 1..20: mol_type = other DNA
tctgtgcattctagagcctc

SEQ ID NO: 27264 - DNA, 20 bp, synthetic construct
  misc_feature 1..20: note = Description of Artificial Sequence: Synthetic oligonucleotide
  misc_feature 1..20: note = Target: FXN; (-) strand; PAM type: YTN; PAM sequence: TTT
  source 1..20: mol_type = other DNA
ttctgtgcattctagagcct

SEQ ID NO: 27265 - DNA, 20 bp, synthetic construct
  misc_feature 1..20: note = Description of Artificial Sequence: Synthetic oligonucleotide
  misc_feature 1..20: note = Target: FXN; (-) strand; PAM type: YTN; PAM sequence: CTT
  source 1..20: mol_type = other DNA
tttctgtgcattctagagcc

SEQ ID NO: 27266 - DNA, 20 bp, synthetic construct
  misc_feature 1..20: note = Description of Artificial Sequence: Synthetic oligonucleotide
  misc_feature 1..20: note = Target: FXN; (-) strand; PAM type: YTN; PAM sequence: TTG
  source 1..20: mol_type = other DNA
cagagatacacggtggcagc

SEQ ID NO: 27267 - DNA, 20 bp, synthetic construct
  misc_feature 1..20: note = Description of Artificial Sequence: Synthetic oligonucleotide
  misc_feature 1..20: note = Target: FXN; (-) strand; PAM type: YTN; PAM sequence: CTT
  source 1..20: mol_type = other DNA
gcagagatacacggtggcag

SEQ ID NO: 27268 - DNA, 20 bp, synthetic construct
  misc_feature 1..20: note = Description of Artificial Sequence: Synthetic oligonucleotide
  misc_feature 1..20: note = Target: FXN; (-) strand; PAM type: YTN; PAM sequence: TTG
  source 1..20: mol_type = other DNA
tgcatgacttgcagagatac

SEQ ID NO: 27269 - DNA, 20 bp, synthetic construct
  misc_feature 1..20: note = Description of Artificial Sequence: Synthetic oligonucleotide
  misc_feature 1..20: note = Target: FXN; (-) strand; PAM type: YTN; PAM sequence: CTT
  source 1..20: mol_type = other DNA
gtgcatgacttgcagagata

SEQ ID NO: 27270 - DNA, 20 bp, synthetic construct
  misc_feature 1..20: note = Description of Artificial Sequence: Synthetic oligonucleotide
  misc_feature 1..20: note = Target: FXN; (-) strand; PAM type: YTN; PAM sequence: TTC
  source 1..20: mol_type = other DNA
cccatcttgtgcatgacttg

SEQ ID NO: 27271 - DNA, 20 bp, synthetic construct
  misc_feature 1..20: note = Description of Artificial Sequence: Synthetic oligonucleotide
  misc_feature 1..20: note = Target: FXN; (-) strand; PAM type: YTN; PAM sequence: CTG
  source 1..20: mol_type = other DNA
ttccccatcttgtgcatgac

SEQ ID NO: 27272 - DNA, 20 bp, synthetic construct
  misc_feature 1..20: note = Description of Artificial Sequence: Synthetic oligonucleotide
  misc_feature 1..20: note = Target: FXN; (-) strand; PAM type: YTN; PAM sequence: CTG
  source 1..20: mol_type = other DNA
ctgttccccatcttgtgcat

SEQ ID NO: 27273 - DNA, 20 bp, synthetic construct
  misc_feature 1..20: note = Description of Artificial Sequence: Synthetic oligonucleotide
  misc_feature 1..20: note = Target: FXN; (-) strand; PAM type: YTN; PAM sequence: CTG
  source 1..20: mol_type = other DNA
gtaagcagggggaagcctgc

SEQ ID NO: 27274 - DNA, 20 bp, synthetic construct
  misc_feature 1..20: note = Description of Artificial Sequence: Synthetic oligonucleotide
  misc_feature 1..20: note = Target: FXN; (-) strand; PAM type: YTN; PAM sequence: TTG
  source 1..20: mol_type = other DNA
aactggtaagcagggggaag

SEQ ID NO: 27275 - DNA, 20 bp, synthetic construct
  misc_feature 1..20: note = Description of Artificial Sequence: Synthetic oligonucleotide
  misc_feature 1..20: note = Target: FXN; (-) strand; PAM type: YTN; PAM sequence: TTT
  source 1..20: mol_type = other DNA
gaactggtaagcagggggaa

SEQ ID NO: 27276 - DNA, 20 bp, synthetic construct
  misc_feature 1..20: note = Description of Artificial Sequence: Synthetic oligonucleotide
  misc_feature 1..20: note = Target: FXN; (-) strand; PAM type: YTN; PAM sequence: CTG
  source 1..20: mol_type = other DNA
tatttgaactggtaagcagg

SEQ ID NO: 27277 - DNA, 20 bp, synthetic construct
  misc_feature 1..20: note = Description of Artificial Sequence: Synthetic oligonucleotide
  misc_feature 1..20: note = Target: FXN; (-) strand; PAM type: YTN; PAM sequence: CTC
  source 1..20: mol_type = other DNA
tgtatttgaactggtaagca

SEQ ID NO: 27278 - DNA, 20 bp, synthetic construct
  misc_feature 1..20: note = Description of Artificial Sequence: Synthetic oligonucleotide
  misc_feature 1..20: note = Target: FXN; (-) strand; PAM type: YTN; PAM sequence: TTC
  source 1..20: mol_type = other DNA
tctgtatttgaactggtaag

SEQ ID NO: 27279 - DNA, 20 bp, synthetic construct
  misc_feature 1..20: note = Description of Artificial Sequence: Synthetic oligonucleotide
  misc_feature 1..20: note = Target: FXN; (-) strand; PAM type: YTN; PAM sequence: CTA
  source 1..20: mol_type = other DNA
gttctctgtatttgaactgg

SEQ ID NO: 27280 - DNA, 20 bp, synthetic construct
  misc_feature 1..20: note = Description of Artificial Sequence: Synthetic oligonucleotide
  misc_feature 1..20: note = Target: FXN; (-) strand; PAM type: YTN; PAM sequence: CTA
  source 1..20: mol_type = other DNA
cagggctagttctctgtatt

SEQ ID NO: 27281 - DNA, 20 bp, synthetic construct
  misc_feature 1..20: note = Description of Artificial Sequence: Synthetic oligonucleotide
  misc_feature 1..20: note = Target: FXN; (-) strand; PAM type: YTN; PAM sequence: TTA
  source 1..20: mol_type = other DNA
gaatgggtgagatatgaaag

SEQ ID NO: 27282 - DNA, 20 bp, synthetic construct
  misc_feature 1..20: note = Description of Artificial Sequence: Synthetic oligonucleotide
  misc_feature 1..20: note = Target: FXN; (-) strand; PAM type: YTN; PAM sequence: TTT
  source 1..20: mol_type = other DNA
agaatgggtgagatatgaaa

SEQ ID NO: 27283 - DNA, 20 bp, synthetic construct
  misc_feature 1..20: note = Description of Artificial Sequence: Synthetic oligonucleotide
  misc_feature 1..20: note = Target: FXN; (-) strand; PAM type: YTN; PAM sequence: CTT
  source 1..20: mol_type = other DNA
tagaatgggtgagatatgaa

SEQ ID NO: 27284 - DNA, 20 bp, synthetic construct
  misc_feature 1..20: note = Description of Artificial Sequence: Synthetic oligonucleotide
  misc_feature 1..20: note = Target: FXN; (-) strand; PAM type: YTN; PAM sequence: CTC
  source 1..20: mol_type = other DNA
tttagaatgggtgagatatg

SEQ ID NO: 27285 - DNA, 20 bp, synthetic construct
  misc_feature 1..20: note = Description of Artificial Sequence: Synthetic oligonucleotide
  misc_feature 1..20: note = Target: FXN; (-) strand; PAM type: YTN; PAM sequence: CTG
  source 1..20: mol_type = other DNA
tggtctctttagaatgggtg

SEQ ID NO: 27286 - DNA, 20 bp, synthetic construct
  misc_feature 1..20: note = Description of Artificial Sequence: Synthetic oligonucleotide
  misc_feature 1..20: note = Target: FXN; (-) strand; PAM type: YTN; PAM sequence: CTA
  source 1..20: mol_type = other DNA
aggcctgtggtctctttaga

SEQ ID NO: 27287 - DNA, 20 bp, synthetic construct
  misc_feature 1..20: note = Description of Artificial Sequence: Synthetic oligonucleotide
  misc_feature 1..20: note = Target: FXN; (-) strand; PAM type: YTN; PAM sequence: TTC
  source 1..20: mol_type = other DNA
taaggcctgtggtctcttta

SEQ ID NO: 27288 - DNA, 20 bp, synthetic construct
  misc_feature 1..20: note = Description of Artificial Sequence: Synthetic oligonucleotide
  misc_feature 1..20: note = Target: FXN; (-) strand; PAM type: YTN; PAM sequence: CTT
  source 1..20: mol_type = other DNA
ctaaggcctgtggtctcttt

SEQ ID NO: 27289 - DNA, 20 bp, synthetic construct
  misc_feature 1..20: note = Description of Artificial Sequence: Synthetic oligonucleotide
  misc_feature 1..20: note = Target: FXN; (-) strand; PAM type: YTN; PAM sequence: TTA
  source 1..20: mol_type = other DNA
cttctaaggcctgtggtctc

SEQ ID NO: 27290 - DNA, 20 bp, synthetic construct
  misc_feature 1..20: note = Description of Artificial Sequence: Synthetic oligonucleotide
  misc_feature 1..20: note = Target: FXN; (-) strand; PAM type: YTN; PAM sequence: TTT
  source 1..20: mol_type = other DNA
acttctaaggcctgtggtct

SEQ ID NO: 27291 - DNA, 20 bp, synthetic construct
  misc_feature 1..20: note = Description of Artificial Sequence: Synthetic oligonucleotide
  misc_feature 1..20: note = Target: FXN; (-) strand; PAM type: YTN; PAM sequence: CTT
  source 1..20: mol_type = other DNA
tacttctaaggcctgtggtc

SEQ ID NO: 27292 - DNA, 20 bp, synthetic construct
  misc_feature 1..20: note = Description of Artificial Sequence: Synthetic oligonucleotide
  misc_feature 1..20: note = Target: FXN; (-) strand; PAM type: YTN; PAM sequence: TTC
  source 1..20: mol_type = other DNA
aacaaaagagtcctttactt

SEQ ID NO: 27293 - DNA, 20 bp, synthetic construct
  misc_feature 1..20: note = Description of Artificial Sequence: Synthetic oligonucleotide
  misc_feature 1..20: note = Target: FXN; (-) strand; PAM type: YTN; PAM sequence: TTT
  source 1..20: mol_type = other DNA
caacaaaagagtcctttact

SEQ ID NO: 27294 - DNA, 20 bp, synthetic construct
  misc_feature 1..20: note = Description of Artificial Sequence: Synthetic oligonucleotide
  misc_feature 1..20: note = Target: FXN; (-) strand; PAM type: YTN; PAM sequence: CTT
  source 1..20: mol_type = other DNA
tcaacaaaagagtcctttac

SEQ ID NO: 27295 - DNA, 20 bp, synthetic construct
  misc_feature 1..20: note = Description of Artificial Sequence: Synthetic oligonucleotide
  misc_feature 1..20: note = Target: FXN; (-) strand; PAM type: YTN; PAM sequence: CTC
  source 1..20: mol_type = other DNA
tttcaacaaaagagtccttt

SEQ ID NO: 27296 - DNA, 20 bp, synthetic construct
  misc_feature 1..20: note = Description of Artificial Sequence: Synthetic oligonucleotide
  misc_feature 1..20: note = Target: FXN; (-) strand; PAM type: YTN; PAM sequence: TTG
  source 1..20: mol_type = other DNA
aaaacactctttcaacaaaa

SEQ ID NO: 27297 - DNA, 20 bp, synthetic construct
  misc_feature 1..20: note = Description of Artificial Sequence: Synthetic oligonucleotide
  misc_feature 1..20: note = Target: FXN; (-) strand; PAM type: YTN; PAM sequence: TTT
  source 1..20: mol_type = other DNA
gaaaacactctttcaacaaa

SEQ ID NO: 27298 - DNA, 20 bp, synthetic construct
  misc_feature 1..20: note = Description of Artificial Sequence: Synthetic oligonucleotide
  misc_feature 1..20: note = Target: FXN; (-) strand; PAM type: YTN; PAM sequence: TTA
  source 1..20: mol_type = other DNA
aatttgaaaacactctttca

SEQ ID NO: 27299 - DNA, 20 bp, synthetic construct
  misc_feature 1..20: note = Description of Artificial Sequence: Synthetic oligonucleotide
  misc_feature 1..20: note = Target: FXN; (-) strand; PAM type: YTN; PAM sequence: TTT
  source 1..20: mol_type = other DNA
aaatttgaaaacactctttc

SEQ ID NO: 27300 - DNA, 20 bp, synthetic construct
  misc_feature 1..20: note = Description of Artificial Sequence: Synthetic oligonucleotide
  misc_feature 1..20: note = Target: FXN; (-) strand; PAM type: YTN; PAM sequence: CTC
  source 1..20: mol_type = other DNA
atttaaatttgaaaacactc

SEQ ID NO: 27301 - DNA, 20 bp, synthetic construct
  misc_feature 1..20: note = Description of Artificial Sequence: Synthetic oligonucleotide
  misc_feature 1..20: note = Target: FXN; (-) strand; PAM type: YTN; PAM sequence: TTG
  source 1..20: mol_type = other DNA
accaataaatgctcatttaa

SEQ ID NO: 27302 - DNA, 20 bp, synthetic construct
  misc_feature 1..20: note = Description of Artificial Sequence: Synthetic oligonucleotide
  misc_feature 1..20: note = Target: FXN; (-) strand; PAM type: YTN; PAM sequence: TTT
  source 1..20: mol_type = other DNA
gaccaataaatgctcattta

SEQ ID NO: 27303 - DNA, 20 bp, synthetic construct
  misc_feature 1..20: note = Description of Artificial Sequence: Synthetic oligonucleotide
  misc_feature 1..20: note = Target: FXN; (-) strand; PAM type: YTN; PAM sequence: CTT
  source 1..20: mol_type = other DNA
tgaccaataaatgctcattt

SEQ ID NO: 27304 - DNA, 20 bp, synthetic construct
  misc_feature 1..20: note = Description of Artificial Sequence: Synthetic oligonucleotide
  misc_feature 1..20: note = Target: FXN; (-) strand; PAM type: YTN; PAM sequence: TTG
  source 1..20: mol_type = other DNA
gtgcatctttgaccaataaa

SEQ ID NO: 27305 - DNA, 20 bp, synthetic construct
  misc_feature 1..20: note = Description of Artificial Sequence: Synthetic oligonucleotide
  misc_feature 1..20: note = Target: FXN; (-) strand; PAM type: YTN; PAM sequence: CTA
  source 1..20: mol_type = other DNA
gttggtgcatctttgaccaa

SEQ ID NO: 27306 - DNA, 20 bp, synthetic construct
  misc_feature 1..20: note = Description of Artificial Sequence: Synthetic oligonucleotide
  misc_feature 1..20: note = Target: FXN; (-) strand; PAM type: YTN; PAM sequence: TTC
  source 1..20: mol_type = other DNA
aaaagactagttggtgcatc

SEQ ID NO: 27307 - DNA, 20 bp, synthetic construct
  misc_feature 1..20: note = Description of Artificial Sequence: Synthetic oligonucleotide
  misc_feature 1..20: note = Target: FXN; (-) strand; PAM type: YTN; PAM sequence: CTT
  source 1..20: mol_type = other DNA
caaaagactagttggtgcat

SEQ ID NO: 27308 - DNA, 20 bp, synthetic construct
  misc_feature 1..20: note = Description of Artificial Sequence: Synthetic oligonucleotide
  misc_feature 1..20: note = Target: FXN; (-) strand; PAM type: YTN; PAM sequence: TTC
  source 1..20: mol_type = other DNA
ttcaaaagactagttggtgc

SEQ ID NO: 27309 - DNA, 20 bp, synthetic construct
  misc_feature 1..20: note = Description of Artificial Sequence: Synthetic oligonucleotide
  misc_feature 1..20: note = Target: FXN; (-) strand; PAM type: YTN; PAM sequence: TTG
  source 1..20: mol_type = other DNA
aattcttcaaaagactagtt

SEQ ID NO: 27310 - DNA, 20 bp, synthetic construct
  misc_feature 1..20: note = Description of Artificial Sequence: Synthetic oligonucleotide
  misc_feature 1..20: note = Target: FXN; (-) strand; PAM type: YTN; PAM sequence: CTT
  source 1..20: mol_type = other DNA
gaattcttcaaaagactagt

SEQ ID NO: 27311 - DNA, 20 bp, synthetic construct
  misc_feature 1..20: note = Description of Artificial Sequence: Synthetic oligonucleotide
  misc_feature 1..20: note = Target: FXN; (-) strand; PAM type: YTN; PAM sequence: CTA
  source 1..20: mol_type = other DNA
aagagccttgaattcttcaa

SEQ ID NO: 27312 - DNA, 20 bp, synthetic construct
  misc_feature 1..20: note = Description of Artificial Sequence: Synthetic oligonucleotide
  misc_feature 1..20: note = Target: FXN; (-) strand; PAM type: YTN; PAM sequence: CTC
  source 1..20: mol_type = other DNA
taaagagccttgaattcttc

SEQ ID NO: 27313 - DNA, 20 bp, synthetic construct
  misc_feature 1..20: note = Description of Artificial Sequence: Synthetic oligonucleotide
  misc_feature 1..20: note = Target: FXN; (-) strand; PAM type: YTN; PAM sequence: TTC
  source 1..20: mol_type = other DNA
tctaaagagccttgaattct

SEQ ID NO: 27314 - DNA, 20 bp, synthetic construct
  misc_feature 1..20: note = Description of Artificial Sequence: Synthetic oligonucleotide
  misc_feature 1..20: note = Target: FXN; (-) strand; PAM type: YTN; PAM sequence: TTT
  source 1..20: mol_type = other DNA
ctctaaagagccttgaattc

SEQ ID NO: 27315 - DNA, 20 bp, synthetic construct
  misc_feature 1..20: note = Description of Artificial Sequence: Synthetic oligonucleotide
  misc_feature 1..20: note = Target: FXN; (-) strand; PAM type: YTN; PAM sequence: TTT
  source 1..20: mol_type = other DNA
tctctaaagagccttgaatt

SEQ ID NO: 27316 - DNA, 20 bp, synthetic construct
  misc_feature 1..20: note = Description of Artificial Sequence: Synthetic oligonucleotide
  misc_feature 1..20: note = Target: FXN; (-) strand; PAM type: YTN; PAM sequence: TTT
  source 1..20: mol_type = other DNA
ttctctaaagagccttgaat

SEQ ID NO: 27317 - DNA, 20 bp, synthetic construct
  misc_feature 1..20: note = Description of Artificial Sequence: Synthetic oligonucleotide
  misc_feature 1..20: note = Target: FXN; (-) strand; PAM type: YTN; PAM sequence: TTA
  source 1..20: mol_type = other DNA
tttttctctaaagagccttg

SEQ ID NO: 27318 - DNA, 20 bp, synthetic construct
  misc_feature 1..20: note = Description of Artificial Sequence: Synthetic oligonucleotide
  misc_feature 1..20: note = Target: FXN; (-) strand; PAM type: YTN; PAM sequence: TTT
  source 1..20: mol_type = other DNA
atttttctctaaagagcctt

SEQ ID NO: 27319 - DNA, 20 bp, synthetic construct
  misc_feature 1..20: note = Description of Artificial Sequence: Synthetic oligonucleotide
  misc_feature 1..20: note = Target: FXN; (-) strand; PAM type: YTN; PAM sequence: CTT
  source 1..20: mol_type = other DNA
tatttttctctaaagagcct

SEQ ID NO: 27320 - DNA, 20 bp, synthetic construct
  misc_feature 1..20: note = Description of Artificial Sequence: Synthetic oligonucleotide
  misc_feature 1..20: note = Target: FXN; (-) strand; PAM type: YTN; PAM sequence: CTC
  source 1..20: mol_type = other DNA
caaggctttatttttctcta

SEQ ID NO: 27321 - DNA, 20 bp, synthetic construct
  misc_feature 1..20: note = Description of Artificial Sequence: Synthetic oligonucleotide
  misc_feature 1..20: note = Target: FXN; (-) strand; PAM type: YTN; PAM sequence: CTC
  source 1..20: mol_type = other DNA
ctccaaggctttatttttct

SEQ ID NO: 27322 - DNA, 20 bp, synthetic construct
  misc_feature 1..20: note = Description of Artificial Sequence: Synthetic oligonucleotide
  misc_feature 1..20: note = Target: FXN; (-) strand; PAM type: YTN; PAM sequence: CTC
  source 1..20: mol_type = other DNA
agatactcctccaaggcttt

SEQ ID NO: 27323 - DNA, 20 bp, synthetic construct
  misc_feature 1..20: note = Description of Artificial Sequence: Synthetic oligonucleotide
  misc_feature 1..20: note = Target: FXN; (-) strand; PAM type: YTN; PAM sequence: TTC
  source 1..20: mol_type = other DNA
tcagatactcctccaaggct

SEQ ID NO: 27324 - DNA, 20 bp, synthetic construct
  misc_feature 1..20: note = Description of Artificial Sequence: Synthetic oligonucleotide
  misc_feature 1..20: note = Target: FXN; (-) strand; PAM type: YTN; PAM sequence: CTT
  source 1..20: mol_type = other DNA
ctcagatactcctccaaggc

SEQ ID NO: 27325 - DNA, 20 bp, synthetic construct
  misc_feature 1..20: note = Description of Artificial Sequence: Synthetic oligonucleotide
  misc_feature 1..20: note = Target: FXN; (-) strand; PAM type: YTN; PAM sequence: CTA
  source 1..20: mol_type = other DNA
acaagcttctcagatactcc

SEQ ID NO: 27326 - DNA, 20 bp, synthetic construct
  misc_feature 1..20: note = Description of Artificial Sequence: Synthetic oligonucleotide
  misc_feature 1..20: note = Target: FXN; (-) strand; PAM type: YTN; PAM sequence: TTC
  source 1..20: mol_type = other DNA
ccacgcatctaacaagcttc

SEQ ID NO: 27327 - DNA, 20 bp, synthetic construct
  misc_feature 1..20: note = Description of Artificial Sequence: Synthetic oligonucleotide
  misc_feature 1..20: note = Target: FXN; (-) strand; PAM type: YTN; PAM sequence: CTT
  source 1..20: mol_type = other DNA
cccacgcatctaacaagctt

SEQ ID NO: 27328 - DNA, 20 bp, synthetic construct
  misc_feature 1..20: note = Description of Artificial Sequence: Synthetic oligonucleotide
  misc_feature 1..20: note = Target: FXN; (-) strand; PAM type: YTN; PAM sequence: CTC
  source 1..20: mol_type = other DNA
ttcccacgcatctaacaagc

SEQ ID NO: 27329 - DNA, 20 bp, synthetic construct
  misc_feature 1..20: note = Description of Artificial Sequence: Synthetic oligonucleotide
  misc_feature 1..20: note = Target: FXN; (-) strand; PAM type: YTN; PAM sequence: TTC
  source 1..20: mol_type = other DNA
cagactcttcccacgcatct

SEQ ID NO: 27330 - DNA, 20 bp, synthetic construct
  misc_feature 1..20: note = Description of Artificial Sequence: Synthetic oligonucleotide
  misc_feature 1..20: note = Target: FXN; (-) strand; PAM type: YTN; PAM sequence: TTT
  source 1..20: mol_type = other DNA
ccagactcttcccacgcatc

SEQ ID NO: 27331 - DNA, 20 bp, synthetic construct
  misc_feature 1..20: note = Description of Artificial Sequence: Synthetic oligonucleotide
  misc_feature 1..20: note = Target: FXN; (-) strand; PAM type: YTN; PAM sequence: TTA
  source 1..20: mol_type = other DNA
tttccagactcttcccacgc

SEQ ID NO: 27332 - DNA, 20 bp, synthetic construct
  misc_feature 1..20: note = Description of Artificial Sequence: Synthetic oligonucleotide
  misc_feature 1..20: note = Target: FXN; (-) strand; PAM type: YTN; PAM sequence: TTT
  source 1..20: mol_type = other DNA
atttccagactcttcccacg

SEQ ID NO: 27333 - DNA, 20 bp, synthetic construct
  misc_feature 1..20: note = Description of Artificial Sequence: Synthetic oligonucleotide
  misc_feature 1..20: note = Target: FXN; (-) strand; PAM type: YTN; PAM sequence: TTT
  source 1..20: mol_type = other DNA
tatttccagactcttcccac

SEQ ID NO: 27334 - DNA, 20 bp, synthetic construct
  misc_feature 1..20: note = Description of Artificial Sequence: Synthetic oligonucleotide
  misc_feature 1..20: note = Target: FXN; (-) strand; PAM type: YTN; PAM sequence: TTT
  source 1..20: mol_type = other DNA
ttatttccagactcttccca

SEQ ID NO: 27335 - DNA, 20 bp, synthetic construct
  misc_feature 1..20: note = Description of Artificial Sequence: Synthetic oligonucleotide
  misc_feature 1..20: note = Target: FXN; (-) strand; PAM type: YTN; PAM sequence: TTT
  source 1..20: mol_type = other DNA
tttatttccagactcttccc

SEQ ID NO: 27336 - DNA, 20 bp, synthetic construct
  misc_feature 1..20: note = Description of Artificial Sequence: Synthetic oligonucleotide
  misc_feature 1..20: note = Target: FXN; (-) strand; PAM type: YTN; PAM sequence: CTC
  source 1..20: mol_type = other DNA
cagatgaagttttttatttc

SEQ ID NO: 27337 - DNA, 20 bp, synthetic construct
  misc_feature 1..20: note = Description of Artificial Sequence: Synthetic oligonucleotide
  misc_feature 1..20: note = Target: FXN; (-) strand; PAM type: YTN; PAM sequence: TTG
  source 1..20: mol_type = other DNA
gtagaaggcagaaactccag

SEQ ID NO: 27338 - DNA, 20 bp, synthetic construct
  misc_feature 1..20: note = Description of Artificial Sequence: Synthetic oligonucleotide
  misc_feature 1..20: note = Target: FXN; (-) strand; PAM type: YTN; PAM sequence: CTG
  source 1..20: mol_type = other DNA
ttggtagaaggcagaaactc

SEQ ID NO: 27339 - DNA, 20 bp, synthetic construct
  misc_feature 1..20: note = Description of Artificial Sequence: Synthetic oligonucleotide
  misc_feature 1..20: note = Target: FXN; (-) strand; PAM type: YTN; PAM sequence: CTC
  source 1..20: mol_type = other DNA
tgttggtagaaggcagaaac

SEQ ID NO: 27340 - DNA, 20 bp, synthetic construct
  misc_feature 1..20: note = Description of Artificial Sequence: Synthetic oligonucleotide
  misc_feature 1..20: note = Target: FXN; (-) strand; PAM type: YTN; PAM sequence: TTC
  source 1..20: mol_type = other DNA
agctctgttggtagaaggca

SEQ ID NO: 27341 - DNA, 20 bp, synthetic construct
  misc_feature 1..20: note = Description of Artificial Sequence: Synthetic oligonucleotide
  misc_feature 1..20: note = Target: FXN; (-) strand; PAM type: YTN; PAM sequence: CTT
  source 1..20: mol_type = other DNA
cagctctgttggtagaaggc

SEQ ID NO: 27342 - DNA, 20 bp, synthetic construct
  misc_feature 1..20: note = Description of Artificial Sequence: Synthetic oligonucleotide
  misc_feature 1..20: note = Target: FXN; (-) strand; PAM type: YTN; PAM sequence: TTA
  source 1..20: mol_type = other DNA
gcttcagctctgttggtaga

SEQ ID NO: 27343 - DNA, 20 bp, synthetic construct
  misc_feature 1..20: note = Description of Artificial Sequence: Synthetic oligonucleotide
  misc_feature 1..20: note = Target: FXN; (-) strand; PAM type: YTN; PAM sequence: TTA
  source 1..20: mol_type = other DNA
ggagagcattagcttcagct

SEQ ID NO: 27344 - DNA, 20 bp, synthetic construct
  misc_feature 1..20: note = Description of Artificial Sequence: Synthetic oligonucleotide
  misc_feature 1..20: note = Target: FXN; (-) strand; PAM type: YTN; PAM sequence: CTT
  source 1..20: mol_type = other DNA
aggagagcattagcttcagc

SEQ ID NO: 27345 - DNA, 20 bp, synthetic construct
  misc_feature 1..20: note = Description of Artificial Sequence: Synthetic oligonucleotide
  misc_feature 1..20: note = Target: FXN; (-) strand; PAM type: YTN; PAM sequence: TTG
  source 1..20: mol_type = other DNA
tcttaggagagcattagctt

SEQ ID NO: 27346 - DNA, 20 bp, synthetic construct
  misc_feature 1..20: note = Description of Artificial Sequence: Synthetic oligonucleotide
  misc_feature 1..20: note = Target: FXN; (-) strand; PAM type: YTN; PAM sequence: CTT
  source 1..20: mol_type = other DNA
gtcttaggagagcattagct

SEQ ID NO: 27347 - DNA, 20 bp, synthetic construct
  misc_feature 1..20: note = Description of Artificial Sequence: Synthetic oligonucleotide
  misc_feature 1..20: note = Target: FXN; (-) strand; PAM type: YTN; PAM sequence: TTG
  source 1..20: mol_type = other DNA
cttgtcttaggagagcatta

SEQ ID NO: 27348 - DNA, 20 bp, synthetic construct
  misc_feature 1..20: note = Description of Artificial Sequence: Synthetic oligonucleotide
  misc_feature 1..20: note = Target: FXN; (-) strand; PAM type: YTN; PAM sequence: TTT
  source 1..20: mol_type = other DNA
gcttgtcttaggagagcatt

SEQ ID NO: 27349 - DNA, 20 bp, synthetic construct
  misc_feature 1..20: note = Description of Artificial Sequence: Synthetic oligonucleotide
  misc_feature 1..20: note = Target: FXN; (-) strand; PAM type: YTN; PAM sequence: CTT
  source 1..20: mol_type = other DNA
tgcttgtcttaggagagcat

SEQ ID NO: 27350 - DNA, 20 bp, synthetic construct
  misc_feature 1..20: note = Description of Artificial Sequence: Synthetic oligonucleotide
  misc_feature 1..20: note = Target: FXN; (-) strand; PAM type: YTN; PAM sequence: CTG
  source 1..20: mol_type = other DNA
ctttgcttgtcttaggagag

SEQ ID NO: 27351 - DNA, 20 bp, synthetic construct
  misc_feature 1..20: note = Description of Artificial Sequence: Synthetic oligonucleotide
  misc_feature 1..20: note = Target: FXN; (-) strand; PAM type: YTN; PAM sequence: TTA
  source 1..20: mol_type = other DNA
cagaggaagtaaaaggaagg

SEQ ID NO: 27352 - DNA, 20 bp, synthetic construct
  misc_feature 1..20: note = Description of Artificial Sequence: Synthetic oligonucleotide
  misc_feature 1..20: note = Target: FXN; (-) strand; PAM type: YTN; PAM sequence: CTA
  source 1..20: mol_type = other DNA
ttacagaggaagtaaaagga

SEQ ID NO: 27353 - DNA, 20 bp, synthetic construct
  misc_feature 1..20: note = Description of Artificial Sequence: Synthetic oligonucleotide
  misc_feature 1..20: note = Target: FXN; (-) strand; PAM type: YTN; PAM sequence: CTC
  source 1..20: mol_type = other DNA
aaacatcagacatgacaagt

SEQ ID NO: 27354 - DNA, 20 bp, synthetic construct
  misc_feature 1..20: note = Description of Artificial Sequence: Synthetic oligonucleotide
  misc_feature 1..20: note = Target: FXN; (-) strand; PAM type: YTN; PAM sequence: TTA
  source 1..20: mol_type = other DNA
gagtaccacgtcaactcaaa

SEQ ID NO: 27355 - DNA, 20 bp, synthetic construct
  misc_feature 1..20: note = Description of Artificial Sequence: Synthetic oligonucleotide
  misc_feature 1..20: note = Target: FXN; (-) strand; PAM type: YTN; PAM sequence: CTA
  source 1..20: mol_type = other DNA
ttagagtaccacgtcaactc

SEQ ID NO: 27356 - DNA, 20 bp, synthetic construct
  misc_feature 1..20: note = Description of Artificial Sequence: Synthetic oligonucleotide
  misc_feature 1..20: note = Target: FXN; (-) strand; PAM type: YTN; PAM sequence: CTC
  source 1..20: mol_type = other DNA
tattagagtaccacgtcaac

SEQ ID NO: 27357 - DNA, 20 bp, synthetic construct
  misc_feature 1..20: note = Description of Artificial Sequence: Synthetic oligonucleotide
  misc_feature 1..20: note = Target: FXN; (-) strand; PAM type: YTN; PAM sequence: CTA
  source 1..20: mol_type = other DNA
actctattagagtaccacgt

SEQ ID NO: 27358 - DNA, 20 bp, synthetic construct
  misc_feature 1..20: note = Description of Artificial Sequence: Synthetic oligonucleotide
  misc_feature 1..20: note = Target: FXN; (-) strand; PAM type: YTN; PAM sequence: CTC
  source 1..20: mol_type = other DNA
taactctattagagtaccac

SEQ ID NO: 27359 - DNA, 20 bp, synthetic construct
  misc_feature 1..20: note = Description of Artificial Sequence: Synthetic oligonucleotide
  misc_feature 1..20: note = Target: FXN; (-) strand; PAM type: YTN; PAM sequence: CTA
  source 1..20: mol_type = other DNA
gaggacataaaaaaaatgca

SEQ ID NO: 27360 - DNA, 20 bp, synthetic construct
  misc_feature 1..20: note = Description of Artificial Sequence: Synthetic oligonucleotide
  misc_feature 1..20: note = Target: FXN; (-) strand; PAM type: YTN; PAM sequence: CTC
  source 1..20: mol_type = other DNA
aaccatcaaccagaacatac

SEQ ID NO: 27361 - DNA, 20 bp, synthetic construct
  misc_feature 1..20: note = Description of Artificial Sequence: Synthetic oligonucleotide
  misc_feature 1..20: note = Target: FXN; (-) strand; PAM type: YTN; PAM sequence: TTG
  source 1..20: mol_type = other DNA
ccctcaaccatcaaccagaa

SEQ ID NO: 27362 - DNA, 20 bp, synthetic construct
  misc_feature 1..20: note = Description of Artificial Sequence: Synthetic oligonucleotide
  misc_feature 1..20: note = Target: FXN; (-) strand; PAM type: YTN; PAM sequence: TTG
  source 1..20: mol_type = other DNA
ttgccctcaaccatcaacca

SEQ ID NO: 27363 - DNA, 20 bp, synthetic construct
  misc_feature 1..20: note = Description of Artificial Sequence: Synthetic oligonucleotide
  misc_feature 1..20: note = Target: FXN; (-) strand; PAM type: YTN; PAM sequence: TTT
  source 1..20: mol_type = other DNA
gttgccctcaaccatcaacc

SEQ ID NO: 27364 - DNA, 20 bp, synthetic construct
  misc_feature 1..20: note = Description of Artificial Sequence: Synthetic oligonucleotide
  misc_feature 1..20: note = Target: FXN; (-) strand; PAM type: YTN; PAM sequence: CTG
  source 1..20: mol_type = other DNA
gtttgttgccctcaaccatc

SEQ ID NO: 27365 - DNA, 20 bp, synthetic construct
  misc_feature 1..20: note = Description of Artificial Sequence: Synthetic oligonucleotide
  misc_feature 1..20: note = Target: FXN; (-) strand; PAM type: YTN; PAM sequence: CTG
  source 1..20: mol_type = other DNA
ctggtttgttgccctcaacc

SEQ ID NO: 27366 - DNA, 20 bp, synthetic construct
  misc_feature 1..20: note = Description of Artificial Sequence: Synthetic oligonucleotide
  misc_feature 1..20: note = Target: FXN; (-) strand; PAM type: YTN; PAM sequence: CTG
  source 1..20: mol_type = other DNA
ggactgctggtttgttgccc

SEQ ID NO: 27367 - DNA, 20 bp, synthetic construct
  misc_feature 1..20: note = Description of Artificial Sequence: Synthetic oligonucleotide
  misc_feature 1..20: note = Target: FXN; (-) strand; PAM type: YTN; PAM sequence: CTG
  source 1..20: mol_type = other DNA
gcatctgggactgctggttt

SEQ ID NO: 27368 - DNA, 20 bp, synthetic construct
  misc_feature 1..20: note = Description of Artificial Sequence: Synthetic oligonucleotide
  misc_feature 1..20: note = Target: FXN; (-) strand; PAM type: YTN; PAM sequence: TTG
  source 1..20: mol_type = other DNA
gtgctggcatctgggactgc

SEQ ID NO: 27369 - DNA, 20 bp, synthetic construct
  misc_feature 1..20: note = Description of Artificial Sequence: Synthetic oligonucleotide
  misc_feature 1..20: note = Target: FXN; (-) strand; PAM type: YTN; PAM sequence: CTT
  source 1..20: mol_type = other DNA
ggtgctggcatctgggactg

SEQ ID NO: 27370 - DNA, 20 bp, synthetic construct
  misc_feature 1..20: note = Description of Artificial Sequence: Synthetic oligonucleotide
  misc_feature 1..20: note = Target: FXN; (-) strand; PAM type: YTN; PAM sequence: CTC
  source 1..20: mol_type = other DNA
aggtcttggtgctggcatct

SEQ ID NO: 27371 - DNA, 20 bp, synthetic construct
  misc_feature 1..20: note = Description of Artificial Sequence: Synthetic oligonucleotide
  misc_feature 1..20: note = Target: FXN; (-) strand; PAM type: YTN; PAM sequence: CTG
  source 1..20: mol_type = other DNA
tctcaggtcttggtgctggc

SEQ ID NO: 27372 - DNA, 20 bp, synthetic construct
  misc_feature 1..20: note = Description of Artificial Sequence: Synthetic oligonucleotide
  misc_feature 1..20: note = Target: FXN; (-) strand; PAM type: YTN; PAM sequence: TTA
  source 1..20: mol_type = other DNA
agtgacctgtctcaggtctt

SEQ ID NO: 27373 - DNA, 20 bp, synthetic construct
  misc_feature 1..20: note = Description of Artificial Sequence: Synthetic oligonucleotide
  misc_feature 1..20: note = Target: FXN; (-) strand; PAM type: YTN; PAM sequence: CTC
  source 1..20: mol_type = other DNA
ggagagttaagtgacctgtc

SEQ ID NO: 27374 - DNA, 20 bp, synthetic construct
  misc_feature 1..20: note = Description of Artificial Sequence: Synthetic oligonucleotide
  misc_feature 1..20: note = Target: FXN; (-) strand; PAM type: YTN; PAM sequence: CTG
  source 1..20: mol_type = other DNA
caaggtgagaatggtggtga

SEQ ID NO: 27375 - DNA, 20 bp, synthetic construct
  misc_feature 1..20: note = Description of Artificial Sequence: Synthetic oligonucleotide
  misc_feature 1..20: note = Target: FXN; (-) strand; PAM type: YTN; PAM sequence: CTG
  source 1..20: mol_type = other DNA
tgaggtctgcaaggtgagaa

SEQ ID NO: 27376 - DNA, 20 bp, synthetic construct
  misc_feature 1..20: note = Description of Artificial Sequence: Synthetic oligonucleotide
  misc_feature 1..20: note = Target: FXN; (-) strand; PAM type: YTN; PAM sequence: TTC
  source 1..20: mol_type = other DNA
cctgtgaggtctgcaaggtg

SEQ ID NO: 27377 - DNA, 20 bp, synthetic construct
  misc_feature 1..20: note = Description of Artificial Sequence: Synthetic oligonucleotide
  misc_feature 1..20: note = Target: FXN; (-) strand; PAM type: YTN; PAM sequence: CTG
  source 1..20: mol_type = other DNA
ttccctgtgaggtctgcaag

SEQ ID NO: 27378 - DNA, 20 bp, synthetic construct
  misc_feature 1..20: note = Description of Artificial Sequence: Synthetic oligonucleotide
  misc_feature 1..20: note = Target: FXN; (-) strand; PAM type: YTN; PAM sequence: TTC
  source 1..20: mol_type = other DNA
cctgttccctgtgaggtctg

SEQ ID NO: 27379 - DNA, 20 bp, synthetic construct
  misc_feature 1..20: note = Description of Artificial Sequence: Synthetic oligonucleotide
  misc_feature 1..20: note = Target: FXN; (-) strand; PAM type: YTN; PAM sequence: TTT
  source 1..20: mol_type = other DNA
ccctgttccctgtgaggtct

SEQ ID NO: 27380 - DNA, 20 bp, synthetic construct
  misc_feature 1..20: note = Description of Artificial Sequence: Synthetic oligonucleotide
  misc_feature 1..20: note = Target: FXN; (-) strand; PAM type: YTN; PAM sequence: CTT
  source 1..20: mol_type = other DNA
tccctgttccctgtgaggtc

SEQ ID NO: 27381 - DNA, 20 bp, synthetic construct
  misc_feature 1..20: note = Description of Artificial Sequence: Synthetic oligonucleotide
  misc_feature 1..20: note = Target: FXN; (-) strand; PAM type: YTN; PAM sequence: CTC
  source 1..20: mol_type = other DNA
atagagctttccctgttccc

SEQ ID NO: 27382 - DNA, 20 bp, synthetic construct
  misc_feature 1..20: note = Description of Artificial Sequence: Synthetic oligonucleotide
  misc_feature 1..20: note = Target: FXN; (-) strand; PAM type: YTN; PAM sequence: TTG
  source 1..20: mol_type = other DNA
tatctcatagagctttccct

SEQ ID NO: 27383 - DNA, 20 bp, synthetic construct
  misc_feature 1..20: note = Description of Artificial Sequence: Synthetic oligonucleotide
  misc_feature 1..20: note = Target: FXN; (-) strand; PAM type: YTN; PAM sequence: TTA
  source 1..20: mol_type = other DNA
atcataatgatgttgtatct

SEQ ID NO: 27384 - DNA, 20 bp, synthetic construct
  misc_feature 1..20: note = Description of Artificial Sequence: Synthetic oligonucleotide
  misc_feature 1..20: note = Target: FXN; (-) strand; PAM type: YTN; PAM sequence: TTC
  source 1..20: mol_type = other DNA
agaatcagaataggattaat

SEQ ID NO: 27385 - DNA, 20 bp, synthetic construct
  misc_feature 1..20: note = Description of Artificial Sequence: Synthetic oligonucleotide
  misc_feature 1..20: note = Target: FXN; (-) strand; PAM type: YTN; PAM sequence: TTT
  source 1..20: mol_type = other DNA
cagaatcagaataggattaa

SEQ ID NO: 27386 - DNA, 20 bp, synthetic construct
  misc_feature 1..20: note = Description of Artificial Sequence: Synthetic oligonucleotide
  misc_feature 1..20: note = Target: FXN; (-) strand; PAM type: YTN; PAM sequence: CTT
  source 1..20: mol_type = other DNA
tcagaatcagaataggatta

SEQ ID NO: 27387 - DNA, 20 bp, synthetic construct
  misc_feature 1..20: note = Description of Artificial Sequence: Synthetic oligonucleotide
  misc_feature 1..20: note = Target: FXN; (-) strand; PAM type: YTN; PAM sequence: TTG
  source 1..20: mol_type = other DNA
ctttcagaatcagaatagga

SEQ ID NO: 27388 - DNA, 20 bp, synthetic construct
  misc_feature 1..20: note = Description of Artificial Sequence: Synthetic oligonucleotide
  misc_feature 1..20: note = Target: FXN; (-) strand; PAM type: YTN; PAM sequence: TTT
  source 1..20: mol_type = other DNA
gctttcagaatcagaatagg

SEQ ID NO: 27389 - DNA, 20 bp, synthetic construct
  misc_feature 1..20: note = Description of Artificial Sequence: Synthetic oligonucleotide
  misc_feature 1..20: note = Target: FXN; (-) strand; PAM type: YTN; PAM sequence: CTT
  source 1..20: mol_type = other DNA
tgctttcagaatcagaatag

SEQ ID NO: 27390 - DNA, 20 bp, synthetic construct
  misc_feature 1..20: note = Description of Artificial Sequence: Synthetic oligonucleotide
  misc_feature 1..20: note = Target: FXN; (-) strand; PAM type: YTN; PAM sequence: TTG
  source 1..20: mol_type = other DNA
tgtaggaagagctttgcttt

SEQ ID NO: 27391 - DNA, 20 bp, synthetic construct
  misc_feature 1..20: note = Description of Artificial Sequence: Synthetic oligonucleotide
  misc_feature 1..20: note = Target: FXN; (-) strand; PAM type: YTN; PAM sequence: TTT
  source 1..20: mol_type = other DNA
gtgtaggaagagctttgctt

SEQ ID NO: 27392 - DNA, 20 bp, synthetic construct
  misc_feature 1..20: note = Description of Artificial Sequence: Synthetic oligonucleotide
  misc_feature 1..20: note = Target: FXN; (-) strand; PAM type: YTN; PAM sequence: TTA
  source 1..20: mol_type = other DNA
gaaataggagtttgtgtagg

SEQ ID NO: 27393 - DNA, 20 bp, synthetic construct
  misc_feature 1..20: note = Description of Artificial Sequence: Synthetic oligonucleotide
  misc_feature 1..20: note = Target: FXN; (-) strand; PAM type: YTN; PAM sequence: TTT
  source 1..20: mol_type = other DNA
agaaataggagtttgtgtag

SEQ ID NO: 27394 - DNA, 20 bp, synthetic construct
  misc_feature 1..20: note = Description of Artificial Sequence: Synthetic oligonucleotide
  misc_feature 1..20: note = Target: FXN; (-) strand; PAM type: YTN; PAM sequence: TTA
  source 1..20: mol_type = other DNA
gtatttagaaataggagttt

SEQ ID NO: 27395 - DNA, 20 bp, synthetic construct
  misc_feature 1..20: note = Description of Artificial Sequence: Synthetic oligonucleotide
  misc_feature 1..20: note = Target: FXN; (-) strand; PAM type: YTN; PAM sequence: TTT
  source 1..20: mol_type = other DNA
agtatttagaaataggagtt

SEQ ID NO: 27396 - DNA, 20 bp, synthetic construct
  misc_feature 1..20: note = Description of Artificial Sequence: Synthetic oligonucleotide
  misc_feature 1..20: note = Target: FXN; (-) strand; PAM type: YTN; PAM sequence: TTT
  source 1..20: mol_type = other DNA
tagtatttagaaataggagt

SEQ ID NO: 27397 - DNA, 20 bp, synthetic construct
  misc_feature 1..20: note = Description of Artificial Sequence: Synthetic oligonucleotide
  misc_feature 1..20: note = Target: FXN; (-) strand; PAM type: YTN; PAM sequence: CTT
  source 1..20: mol_type = other DNA
ttagtatttagaaataggag

SEQ ID NO: 27398 - DNA, 20 bp, synthetic construct
  misc_feature 1..20: note = Description of Artificial Sequence: Synthetic oligonucleotide
  misc_feature 1..20: note = Target: FXN; (-) strand; PAM type: YTN; PAM sequence: CTA
  source 1..20: mol_type = other DNA
caagtacacaaaatacacca

SEQ ID NO: 27399 - DNA, 20 bp, synthetic construct
  misc_feature 1..20: note = Description of Artificial Sequence: Synthetic oligonucleotide
  misc_feature 1..20: note = Target: FXN; (-) strand; PAM type: YTN; PAM sequence: TTC
  source 1..20: mol_type = other DNA
tacaagtacacaaaatacac

SEQ ID NO: 27400 - DNA, 20 bp, synthetic construct
  misc_feature 1..20: note = Description of Artificial Sequence: Synthetic oligonucleotide
  misc_feature 1..20: note = Target: FXN; (-) strand; PAM type: YTN; PAM sequence: TTT
  source 1..20: mol_type = other DNA
ctacaagtacacaaaataca

SEQ ID NO: 27401 - DNA, 20 bp, synthetic construct
  misc_feature 1..20: note = Description of Artificial Sequence: Synthetic oligonucleotide
  misc_feature 1..20: note = Target: FXN; (-) strand; PAM type: YTN; PAM sequence: TTC
  source 1..20: mol_type = other DNA
catttctacaagtacacaaa

SEQ ID NO: 27402 - DNA, 20 bp, synthetic construct
  misc_feature 1..20: note = Description of Artificial Sequence: Synthetic oligonucleotide
  misc_feature 1..20: note = Target: FXN; (-) strand; PAM type: YTN; PAM sequence: TTT
  source 1..20: mol_type = other DNA
ccatttctacaagtacacaa

SEQ ID NO: 27403 - DNA, 20 bp, synthetic construct
  misc_feature 1..20: note = Description of Artificial Sequence: Synthetic oligonucleotide
  misc_feature 1..20: note = Target: FXN; (-) strand; PAM type: YTN; PAM sequence: CTT
  source 1..20: mol_type = other DNA
tccatttctacaagtacaca

SEQ ID NO: 27404 - DNA, 20 bp, synthetic construct
  misc_feature 1..20: note = Description of Artificial Sequence: Synthetic oligonucleotide
  misc_feature 1..20: note = Target: FXN; (-) strand; PAM type: YTN; PAM sequence: CTC
  source 1..20: mol_type = other DNA
aacactttccatttctacaa

SEQ ID NO: 27405 - DNA, 20 bp, synthetic construct
  misc_feature 1..20: note = Description of Artificial Sequence: Synthetic oligonucleotide
  misc_feature 1..20: note = Target: FXN; (-) strand; PAM type: YTN; PAM sequence: TTA
  source 1..20: mol_type = other DNA
tctcaacactttccatttct

SEQ ID NO: 27406 - DNA, 20 bp, synthetic construct
  misc_feature 1..20: note = Description of Artificial Sequence: Synthetic oligonucleotide
  misc_feature 1..20: note = Target: FXN; (-) strand; PAM type: YTN; PAM sequence: TTT
  source 1..20: mol_type = other DNA
atctcaacactttccatttc

SEQ ID NO: 27407 - DNA, 20 bp, synthetic construct
  misc_feature 1..20: note = Description of Artificial Sequence: Synthetic oligonucleotide
  misc_feature 1..20: note = Target: FXN; (-) strand; PAM type: YTN; PAM sequence: TTT
  source 1..20: mol_type = other DNA
tatctcaacactttccattt

SEQ ID NO: 27408 - DNA, 20 bp, synthetic construct
  misc_feature 1..20: note = Description of Artificial Sequence: Synthetic oligonucleotide
  misc_feature 1..20: note = Target: FXN; (-) strand; PAM type: YTN; PAM sequence: TTC
  source 1..20: mol_type = other DNA
atgttttatctcaacacttt

SEQ ID NO: 27409 - DNA, 20 bp, synthetic construct
  misc_feature 1..20: note = Description of Artificial Sequence: Synthetic oligonucleotide
  misc_feature 1..20: note = Target: FXN; (-) strand; PAM type: YTN; PAM sequence: CTT
  source 1..20: mol_type = other DNA
catgttttatctcaacactt

SEQ ID NO: 27410 - DNA, 20 bp, synthetic construct
  misc_feature 1..20: note = Description of Artificial Sequence: Synthetic oligonucleotide
  misc_feature 1..20: note = Target: FXN; (-) strand; PAM type: YTN; PAM sequence: TTG
  source 1..20: mol_type = other DNA
cttcatgttttatctcaaca

SEQ ID NO: 27411 - DNA, 20 bp, synthetic construct
  misc_feature 1..20: note = Description of Artificial Sequence: Synthetic oligonucleotide
  misc_feature 1..20: note = Target: FXN; (-) strand; PAM type: YTN; PAM sequence: TTG
  source 1..20: mol_type = other DNA
tcatcattgcttcatgtttt

SEQ ID NO: 27412 - DNA, 20 bp, synthetic construct
  misc_feature 1..20: note = Description of Artificial Sequence: Synthetic oligonucleotide
  misc_feature 1..20: note = Target: FXN; (-) strand; PAM type: YTN; PAM sequence: TTT
  source 1..20: mol_type = other DNA
gtcatcattgcttcatgttt

SEQ ID NO: 27413 - DNA, 20 bp, synthetic construct
  misc_feature 1..20: note = Description of Artificial Sequence: Synthetic oligonucleotide
  misc_feature 1..20: note = Target: FXN; (-) strand; PAM type: YTN; PAM sequence: CTT
  source 1..20: mol_type = other DNA
tgtcatcattgcttcatgtt

SEQ ID NO: 27414 - DNA, 20 bp, synthetic construct
  misc_feature 1..20: note = Description of Artificial Sequence: Synthetic oligonucleotide
  misc_feature 1..20: note = Target: FXN; (-) strand; PAM type: YTN; PAM sequence: TTA
  source 1..20: mol_type = other DNA
gcactttgtcatcattgctt

SEQ ID NO: 27415 - DNA, 20 bp, synthetic construct
  misc_feature 1..20: note = Description of Artificial Sequence: Synthetic oligonucleotide
  misc_feature 1..20: note = Target: FXN; (-) strand; PAM type: YTN; PAM sequence: TTA
  source 1..20: mol_type = other DNA
aaacaagaaaaagttagcac

SEQ ID NO: 27416 - DNA, 20 bp, synthetic construct
  misc_feature 1..20: note = Description of Artificial Sequence: Synthetic oligonucleotide
  misc_feature 1..20: note = Target: FXN; (-) strand; PAM type: YTN; PAM sequence: TTA
  source 1..20: mol_type = other DNA
ggtggaaaaaaagcataaag

SEQ ID NO: 27417 - DNA, 20 bp, synthetic construct
  misc_feature 1..20: note = Description of Artificial Sequence: Synthetic oligonucleotide
  misc_feature 1..20: note = Target: FXN; (-) strand; PAM type: YTN; PAM sequence: CTA
  source 1..20: mol_type = other DNA
ggggattaggtggaaaaaaa

SEQ ID NO: 27418 - DNA, 20 bp, synthetic construct
  misc_feature 1..20: note = Description of Artificial Sequence: Synthetic oligonucleotide
  misc_feature 1..20: note = Target: FXN; (-) strand; PAM type: YTN; PAM sequence: CTC
  source 1..20: mol_type = other DNA
taggggattaggtggaaaaa

SEQ ID NO: 27419 - DNA, 20 bp, synthetic construct
  misc_feature 1..20: note = Description of Artificial Sequence: Synthetic oligonucleotide
  misc_feature 1..20: note = Target: FXN; (-) strand; PAM type: YTN; PAM sequence: TTA
  source 1..20: mol_type = other DNA
agacaccactctaggggatt

SEQ ID NO: 27420 - DNA, 20 bp, synthetic construct
  misc_feature 1..20: note = Description of Artificial Sequence: Synthetic oligonucleotide
  misc_feature 1..20: note = Target: FXN; (-) strand; PAM type: YTN; PAM sequence: TTG
  source 1..20: mol_type = other DNA
acagttaagacaccactcta

SEQ ID NO: 27421 - DNA, 20 bp, synthetic construct
  misc_feature 1..20: note = Description of Artificial Sequence: Synthetic oligonucleotide
  misc_feature 1..20: note = Target: FXN; (-) strand; PAM type: YTN; PAM sequence: TTT
  source 1..20: mol_type = other DNA
gacagttaagacaccactct

SEQ ID NO: 27422 - DNA, 20 bp, synthetic construct
  misc_feature 1..20: note = Description of Artificial Sequence: Synthetic oligonucleotide
  misc_feature 1..20: note = Target: FXN; (-) strand; PAM type: YTN; PAM sequence: CTC
  source 1..20: mol_type = other DNA
cacccagtttgacagttaag

SEQ ID NO: 27423 - DNA, 20 bp, synthetic construct
  misc_feature 1..20: note = Description of Artificial Sequence: Synthetic oligonucleotide
  misc_feature 1..20: note = Target: FXN; (-) strand; PAM type: YTN; PAM sequence: CTA
  source 1..20: mol_type = other DNA
gatctccacccagtttgaca

SEQ ID NO: 27424 - DNA, 20 bp, synthetic construct
  misc_feature 1..20: note = Description of Artificial Sequence: Synthetic oligonucleotide
  misc_feature 1..20: note = Target: FXN; (-) strand; PAM type: YTN; PAM sequence: TTC
  source 1..20: mol_type = other DNA
ctagatctccacccagtttg

SEQ ID NO: 27425 - DNA, 20 bp, synthetic construct
  misc_feature 1..20: note = Description of Artificial Sequence: Synthetic oligonucleotide
  misc_feature 1..20: note = Target: FXN; (-) strand; PAM type: YTN; PAM sequence: TTG
  source 1..20: mol_type = other DNA
atcacataggttcctagatc

SEQ ID NO: 27426 - DNA, 20 bp, synthetic construct
  misc_feature 1..20: note = Description of Artificial Sequence: Synthetic oligonucleotide
  misc_feature 1..20: note = Target: FXN; (-) strand; PAM type: YTN; PAM sequence: TTG
  source 1..20: mol_type = other DNA
ttgatcacataggttcctag

SEQ ID NO: 27427 - DNA, 20 bp, synthetic construct
  misc_feature 1..20: note = Description of Artificial Sequence: Synthetic oligonucleotide
  misc_feature 1..20: note = Target: FXN; (-) strand; PAM type: YTN; PAM sequence: CTT
  source 1..20: mol_type = other DNA
gttgatcacataggttccta

SEQ ID NO: 27428 - DNA, 20 bp, synthetic construct
  misc_feature 1..20: note = Description of Artificial Sequence: Synthetic oligonucleotide
  misc_feature 1..20: note = Target: FXN; (-) strand; PAM type: YTN; PAM sequence: CTG
  source 1..20: mol_type = other DNA
cttgttgatcacataggttc

SEQ ID NO: 27429 - DNA, 20 bp, synthetic construct
  misc_feature 1..20: note = Description of Artificial Sequence: Synthetic oligonucleotide
  misc_feature 1..20: note = Target: FXN; (-) strand; PAM type: YTN; PAM sequence: TTG
  source 1..20: mol_type = other DNA
gcgtctgcttgttgatcaca

SEQ ID NO: 27430 - DNA, 20 bp, synthetic construct
  misc_feature 1..20: note = Description of Artificial Sequence: Synthetic oligonucleotide
  misc_feature 1..20: note = Target: FXN; (-) strand; PAM type: YTN; PAM sequence: TTT
  source 1..20: mol_type = other DNA
ggcgtctgcttgttgatcac

SEQ ID NO: 27431 - DNA, 20 bp, synthetic construct
  misc_feature 1..20: note = Description of Artificial Sequence: Synthetic oligonucleotide
  misc_feature 1..20: note = Target: FXN; (-) strand; PAM type: YTN; PAM sequence: TTG
  source 1..20: mol_type = other DNA
tttggcgtctgcttgttgat

SEQ ID NO: 27432 - DNA, 20 bp, synthetic construct
  misc_feature 1..20: note = Description of Artificial Sequence: Synthetic oligonucleotide
  misc_feature 1..20: note = Target: FXN; (-) strand; PAM type: YTN; PAM sequence: CTT
  source 1..20: mol_type = other DNA
gtttggcgtctgcttgttga

SEQ ID NO: 27433 - DNA, 20 bp, synthetic construct
  misc_feature 1..20: note = Description of Artificial Sequence: Synthetic oligonucleotide
  misc_feature 1..20: note = Target: FXN; (-) strand; PAM type: YTN; PAM sequence: TTG
  source 1..20: mol_type = other DNA
cttgtttggcgtctgcttgt

SEQ ID NO: 27434 - DNA, 20 bp, synthetic construct
  misc_feature 1..20: note = Description of Artificial Sequence: Synthetic oligonucleotide
  misc_feature 1..20: note = Target: FXN; (-) strand; PAM type: YTN; PAM sequence: TTT
  source 1..20: mol_type = other DNA
gcttgtttggcgtctgcttg

SEQ ID NO: 27435 - DNA, 20 bp, synthetic construct
  misc_feature 1..20: note = Description of Artificial Sequence: Synthetic oligonucleotide
  misc_feature 1..20: note = Target: FXN; (-) strand; PAM type: YTN; PAM sequence: CTG
  source 1..20: mol_type = other DNA
gatggagaagatagccagat

SEQ ID NO: 27436 - DNA, 20 bp, synthetic construct
  misc_feature 1..20: note = Description of Artificial Sequence: Synthetic oligonucleotide
  misc_feature 1..20: note = Target: FXN; (-) strand; PAM type: YTN; PAM sequence: CTA
  source 1..20: mol_type = other DNA
catacctggatggagaagat

SEQ ID NO: 27437 - DNA, 20 bp, synthetic construct
  misc_feature 1..20: note = Description of Artificial Sequence: Synthetic oligonucleotide
  misc_feature 1..20: note = Target: FXN; (-) strand; PAM type: YTN; PAM sequence: CTG
  source 1..20: mol_type = other DNA
aacatacctacatacctgga

SEQ ID NO: 27438 - DNA, 20 bp, synthetic construct
  misc_feature 1..20: note = Description of Artificial Sequence: Synthetic oligonucleotide
  misc_feature 1..20: note = Target: FXN; (-) strand; PAM type: YTN; PAM sequence: TTC
  source 1..20: mol_type = other DNA
tgaacatacctacatacctg

SEQ ID NO: 27439 - DNA, 20 bp, synthetic construct
  misc_feature 1..20: note = Description of Artificial Sequence: Synthetic oligonucleotide
  misc_feature 1..20: note = Target: FXN; (-) strand; PAM type: YTN; PAM sequence: CTT
  source 1..20: mol_type = other DNA
ctgaacatacctacatacct

SEQ ID NO: 27440 - DNA, 20 bp, synthetic construct
  misc_feature 1..20: note = Description of Artificial Sequence: Synthetic oligonucleotide
  misc_feature 1..20: note = Target: FXN; (-) strand; PAM type: YTN; PAM sequence: TTG
  source 1..20: mol_type = other DNA
acttctgaacatacctacat

SEQ ID NO: 27441 - DNA, 20 bp, synthetic construct
  misc_feature 1..20: note = Description of Artificial Sequence: Synthetic oligonucleotide
  misc_feature 1..20: note = Target: FXN; (-) strand; PAM type: YTN; PAM sequence: TTA
  source 1..20: mol_type = other DNA
catatgttgacttctgaaca

SEQ ID NO: 27442 - DNA, 20 bp, synthetic construct
  misc_feature 1..20: note = Description of Artificial Sequence: Synthetic oligonucleotide
  misc_feature 1..20: note = Target: FXN; (-) strand; PAM type: YTN; PAM sequence: TTA
  source 1..20: mol_type = other DNA
agaattacatatgttgactt

SEQ ID NO: 27443 - DNA, 20 bp, synthetic construct
  misc_feature 1..20: note = Description of Artificial Sequence: Synthetic oligonucleotide
  misc_feature 1..20: note = Target: FXN; (-) strand; PAM type: YTN; PAM sequence: TTT
  source 1..20: mol_type = other DNA
aagaattacatatgttgact

SEQ ID NO: 27444 - DNA, 20 bp, synthetic construct
  misc_feature 1..20: note = Description of Artificial Sequence: Synthetic oligonucleotide
  misc_feature 1..20: note = Target: FXN; (-) strand; PAM type: YTN; PAM sequence: CTT
  source 1..20: mol_type = other DNA
taagaattacatatgttgac

SEQ ID NO: 27445 - DNA, 20 bp, synthetic construct
  misc_feature 1..20: note = Description of Artificial Sequence: Synthetic oligonucleotide
  misc_feature 1..20: note = Target: FXN; (-) strand; PAM type: YTN; PAM sequence: TTC
  source 1..20: mol_type = other DNA
ggaagtctttaagaattaca

SEQ ID NO: 27446 - DNA, 20 bp, synthetic construct
  misc_feature 1..20: note = Description of Artificial Sequence: Synthetic oligonucleotide
  misc_feature 1..20: note = Target: FXN; (-) strand; PAM type: YTN; PAM sequence: TTT
  source 1..20: mol_type = other DNA
cggaagtctttaagaattac

SEQ ID NO: 27447 - DNA, 20 bp, synthetic construct
  misc_feature 1..20: note = Description of Artificial Sequence: Synthetic oligonucleotide
  misc_feature 1..20: note = Target: FXN; (-) strand; PAM type: YTN; PAM sequence: TTA
  source 1..20: mol_type = other DNA
aatggtccacaatgtcacat

SEQ ID NO: 27448 - DNA, 20 bp, synthetic construct
  misc_feature 1..20: note = Description of Artificial Sequence: Synthetic oligonucleotide
  misc_feature 1..20: note = Target: FXN; (-) strand; PAM type: YTN; PAM sequence: CTT
  source 1..20: mol_type = other DNA
aaatggtccacaatgtcaca

SEQ ID NO: 27449 - DNA, 20 bp, synthetic construct
  misc_feature 1..20: note = Description of Artificial Sequence: Synthetic oligonucleotide
  misc_feature 1..20: note = Target: FXN; (-) strand; PAM type: YTN; PAM sequence: TTC
  source 1..20: mol_type = other DNA
ttaaatggtccacaatgtca

SEQ ID NO: 27450 - DNA, 20 bp, synthetic construct
  misc_feature 1..20: note = Description of Artificial Sequence: Synthetic oligonucleotide
  misc_feature 1..20: note = Target: FXN; (-) strand; PAM type: YTN; PAM sequence: TTT
  source 1..20: mol_type = other DNA
cttaaatggtccacaatgtc

SEQ ID NO: 27451 - DNA, 20 bp, synthetic construct
  misc_feature 1..20: note = Description of Artificial Sequence: Synthetic oligonucleotide
  misc_feature 1..20: note = Target: FXN; (-) strand; PAM type: YTN; PAM sequence: CTC
  source 1..20: mol_type = other DNA
agccgacatttcttaaatgg

SEQ ID NO: 27452 - DNA, 20 bp, synthetic construct
  misc_feature 1..20: note = Description of Artificial Sequence: Synthetic oligonucleotide
  misc_feature 1..20: note = Target: FXN; (-) strand; PAM type: YTN; PAM sequence: CTG
  source 1..20: mol_type = other DNA
tgctcagccgacatttctta

SEQ ID NO: 27453 - DNA, 20 bp, synthetic construct
  misc_feature 1..20: note = Description of Artificial Sequence: Synthetic oligonucleotide
  misc_feature 1..20: note = Target: FXN; (-) strand; PAM type: YTN; PAM sequence: TTA
  source 1..20: mol_type = other DNA
caggtgtcagccactgtgct

SEQ ID NO: 27454 - DNA, 20 bp, synthetic construct
  misc_feature 1..20: note = Description of Artificial Sequence: Synthetic oligonucleotide
  misc_feature 1..20: note = Target: FXN; (-) strand; PAM type: YTN; PAM sequence: TTG
  source 1..20: mol_type = other DNA
ggattacaggtgtcagccac

SEQ ID NO: 27455 - DNA, 20 bp, synthetic construct
  misc_feature 1..20: note = Description of Artificial Sequence: Synthetic oligonucleotide
  misc_feature 1..20: note = Target: FXN; (-) strand; PAM type: YTN; PAM sequence: CTC
  source 1..20: mol_type = other DNA
aaagtgttgggattacaggt

SEQ ID NO: 27456 - DNA, 20 bp, synthetic construct
  misc_feature 1..20: note = Description of Artificial Sequence: Synthetic oligonucleotide
  misc_feature 1..20: note = Target: FXN; (-) strand; PAM type: YTN; PAM sequence: CTC
  source 1..20: mol_type = other DNA
tcaaagtgttgggattacag

SEQ ID NO: 27457 - DNA, 20 bp, synthetic construct
  misc_feature 1..20: note = Description of Artificial Sequence: Synthetic oligonucleotide
  misc_feature 1..20: note = Target: FXN; (-) strand; PAM type: YTN; PAM sequence: CTC
  source 1..20: mol_type = other DNA
agcctctcaaagtgttggga

SEQ ID NO: 27458 - DNA, 20 bp, synthetic construct
  misc_feature 1..20: note = Description of Artificial Sequence: Synthetic oligonucleotide
  misc_feature 1..20: note = Target: FXN; (-) strand; PAM type: YTN; PAM sequence: CTA
  source 1..20: mol_type = other DNA
cctcagcctctcaaagtgtt

SEQ ID NO: 27459 - DNA, 20 bp, synthetic construct
  misc_feature 1..20: note = Description of Artificial Sequence: Synthetic oligonucleotide
  misc_feature 1..20: note = Target: FXN; (-) strand; PAM type: YTN; PAM sequence: CTC
  source 1..20: mol_type = other DNA
ctacctcagcctctcaaagt

SEQ ID NO: 27460 - DNA, 20 bp, synthetic construct
  misc_feature 1..20: note = Description of Artificial Sequence: Synthetic oligonucleotide
  misc_feature 1..20: note = Target: FXN; (-) strand; PAM type: YTN; PAM sequence: CTC
  source 1..20: mol_type = other DNA
aagtgatcctcctacctcag

SEQ ID NO: 27461 - DNA, 20 bp, synthetic construct
  misc_feature 1..20: note = Description of Artificial Sequence: Synthetic oligonucleotide
  misc_feature 1..20: note = Target: FXN; (-) strand; PAM type: YTN; PAM sequence: CTG
  source 1..20: mol_type = other DNA
tcctcaagtgatcctcctac

SEQ ID NO: 27462 - DNA, 20 bp, synthetic construct
  misc_feature 1..20: note = Description of Artificial Sequence: Synthetic oligonucleotide
  misc_feature 1..20: note = Target: FXN; (-) strand; PAM type: YTN; PAM sequence: CTC
  source 1..20: mol_type = other DNA
ctgtcctcaagtgatcctcc

SEQ ID NO: 27463 - DNA, 20 bp, synthetic construct
  misc_feature 1..20: note = Description of Artificial Sequence: Synthetic oligonucleotide
  misc_feature 1..20: note = Target: FXN; (-) strand; PAM type: YTN; PAM sequence: CTG
  source 1..20: mol_type = other DNA
aactcctgtcctcaagtgat

SEQ ID NO: 27464 - DNA, 20 bp, synthetic construct
  misc_feature 1..20: note = Description of Artificial Sequence: Synthetic oligonucleotide
  misc_feature 1..20: note = Target: FXN; (-) strand; PAM type: YTN; PAM sequence: TTC
  source 1..20: mol_type = other DNA
tgaactcctgtcctcaagtg

SEQ ID NO: 27465 - DNA, 20 bp, synthetic construct
  misc_feature 1..20: note = Description of Artificial Sequence: Synthetic oligonucleotide
  misc_feature 1..20: note = Target: FXN; (-) strand; PAM type: YTN; PAM sequence: TTG
  source 1..20: mol_type = other DNA
cccaggatggttctgaactc

SEQ ID NO: 27466 - DNA, 20 bp, synthetic construct
  misc_feature 1..20: note = Description of Artificial Sequence: Synthetic oligonucleotide
  misc_feature 1..20: note = Target: FXN; (-) strand; PAM type: YTN; PAM sequence: CTA
  source 1..20: mol_type = other DNA
tgttgcccaggatggttctg

SEQ ID NO: 27467 - DNA, 20 bp, synthetic construct
  misc_feature 1..20: note = Description of Artificial Sequence: Synthetic oligonucleotide
  misc_feature 1..20: note = Target: FXN; (-) strand; PAM type: YTN; PAM sequence: CTC
  source 1..20: mol_type = other DNA
actatgttgcccaggatggt

SEQ ID NO: 27468 - DNA, 20 bp, synthetic construct
  misc_feature 1..20: note = Description of Artificial Sequence: Synthetic oligonucleotide
  misc_feature 1..20: note = Target: FXN; (-) strand; PAM type: YTN; PAM sequence: TTA
  source 1..20: mol_type = other DNA
cagagacagggactcactat

SEQ ID NO: 27469 - DNA, 20 bp, synthetic construct
  misc_feature 1..20: note = Description of Artificial Sequence: Synthetic oligonucleotide
  misc_feature 1..20: note = Target: FXN; (-) strand; PAM type: YTN; PAM sequence: TTT
  source 1..20: mol_type = other DNA
acagagacagggactcacta

SEQ ID NO: 27470 - DNA, 20 bp, synthetic construct
  misc_feature 1..20: note = Description of Artificial Sequence: Synthetic oligonucleotide
  misc_feature 1..20: note = Target: FXN; (-) strand; PAM type: YTN; PAM sequence: CTT
  source 1..20: mol_type = other DNA
tacagagacagggactcact

SEQ ID NO: 27471 - DNA, 20 bp, synthetic construct
  misc_feature 1..20: note = Description of Artificial Sequence: Synthetic oligonucleotide
  misc_feature 1..20: note = Target: FXN; (-) strand; PAM type: YTN; PAM sequence: TTC
  source 1..20: mol_type = other DNA
tttacagagacagggactca

SEQ ID NO: 27472 - DNA, 20 bp, synthetic construct
  misc_feature 1..20: note = Description of Artificial Sequence: Synthetic oligonucleotide
  misc_feature 1..20: note = Target: FXN; (-) strand; PAM type: YTN; PAM sequence: TTT
  source 1..20: mol_type = other DNA
ctttacagagacagggactc

SEQ ID NO: 27473 - DNA, 20 bp, synthetic construct
  misc_feature 1..20: note = Description of Artificial Sequence: Synthetic oligonucleotide
  misc_feature 1..20: note = Target: FXN; (-) strand; PAM type: YTN; PAM sequence: TTT
  source 1..20: mol_type = other DNA
tctttacagagacagggact

SEQ ID NO: 27474 - DNA, 20 bp, synthetic construct
  misc_feature 1..20: note = Description of Artificial Sequence: Synthetic oligonucleotide
  misc_feature 1..20: note = Target: FXN; (-) strand; PAM type: YTN; PAM sequence: TTA
  source 1..20: mol_type = other DNA
ttttctttacagagacaggg

SEQ ID NO: 27475 - DNA, 20 bp, synthetic construct
  misc_feature 1..20: note = Description of Artificial Sequence: Synthetic oligonucleotide
  misc_feature 1..20: note = Target: FXN; (-) strand; PAM type: YTN; PAM sequence: TTT
  source 1..20: mol_type = other DNA
attttctttacagagacagg

SEQ ID NO: 27476 - DNA, 20 bp, synthetic construct
  misc_feature 1..20: note = Description of Artificial Sequence: Synthetic oligonucleotide
  misc_feature 1..20: note = Target: FXN; (-) strand; PAM type: YTN; PAM sequence: TTT
  source 1..20: mol_type = other DNA
tattttctttacagagacag

SEQ ID NO: 27477 - DNA, 20 bp, synthetic construct
  misc_feature 1..20: note = Description of Artificial Sequence: Synthetic oligonucleotide
  misc_feature 1..20: note = Target: FXN; (-) strand; PAM type: YTN; PAM sequence: TTT
  source 1..20: mol_type = other DNA
ttattttctttacagagaca

SEQ ID NO: 27478 - DNA, 20 bp, synthetic construct
  misc_feature 1..20: note = Description of Artificial Sequence: Synthetic oligonucleotide
  misc_feature 1..20: note = Target: FXN; (-) strand; PAM type: YTN; PAM sequence: TTA
  source 1..20: mol_type = other DNA
tttttattttctttacagag

SEQ ID NO: 27479 - DNA, 20 bp, synthetic construct
  misc_feature 1..20: note = Description of Artificial Sequence: Synthetic oligonucleotide
  misc_feature 1..20: note = Target: FXN; (-) strand; PAM type: YTN; PAM sequence: TTT
  source 1..20: mol_type = other DNA
atttttattttctttacaga

SEQ ID NO: 27480 - DNA, 20 bp, synthetic construct
  misc_feature 1..20: note = Description of Artificial Sequence: Synthetic oligonucleotide
  misc_feature 1..20: note = Target: FXN; (-) strand; PAM type: YTN; PAM sequence: CTT
  source 1..20: mol_type = other DNA
tatttttattttctttacag

SEQ ID NO: 27481 - DNA, 20 bp, synthetic construct
  misc_feature 1..20: note = Description of Artificial Sequence: Synthetic oligonucleotide
  misc_feature 1..20: note = Target: FXN; (-) strand; PAM type: YTN; PAM sequence: CTG
  source 1..20: mol_type = other DNA
tgactttatttttattttct

SEQ ID NO: 27482 - DNA, 20 bp, synthetic construct
  misc_feature 1..20: note = Description of Artificial Sequence: Synthetic oligonucleotide
  misc_feature 1..20: note = Target: FXN; (-) strand; PAM type: YTN; PAM sequence: CTG
  source 1..20: mol_type = other DNA
cacccagctgtgactttatt

SEQ ID NO: 27483 - DNA, 20 bp, synthetic construct
  misc_feature 1..20: note = Description of Artificial Sequence: Synthetic oligonucleotide
  misc_feature 1..20: note = Target: FXN; (-) strand; PAM type: YTN; PAM sequence: TTA
  source 1..20: mol_type = other DNA
caggtgtaagcctgcaccca

SEQ ID NO: 27484 - DNA, 20 bp, synthetic construct
  misc_feature 1..20: note = Description of Artificial Sequence: Synthetic oligonucleotide
  misc_feature 1..20: note = Target: FXN; (-) strand; PAM type: YTN; PAM sequence: CTG
  source 1..20: mol_type = other DNA
ggattacaggtgtaagcctg

SEQ ID NO: 27485 - DNA, 20 bp, synthetic construct
  misc_feature 1..20: note = Description of Artificial Sequence: Synthetic oligonucleotide
  misc_feature 1..20: note = Target: FXN; (-) strand; PAM type: YTN; PAM sequence: CTC
  source 1..20: mol_type = other DNA
ccaaagtgctgggattacag

SEQ ID NO: 27486 - DNA, 20 bp, synthetic construct
  misc_feature 1..20: note = Description of Artificial Sequence: Synthetic oligonucleotide
  misc_feature 1..20: note = Target: FXN; (-) strand; PAM type: YTN; PAM sequence: TTG
  source 1..20: mol_type = other DNA
gcctcccaaagtgctgggat

SEQ ID NO: 27487 - DNA, 20 bp, synthetic construct
  misc_feature 1..20: note = Description of Artificial Sequence: Synthetic oligonucleotide
  misc_feature 1..20: note = Target: FXN; (-) strand; PAM type: YTN; PAM sequence: CTT
  source 1..20: mol_type = other DNA
ggcctcccaaagtgctggga

SEQ ID NO: 27488 - DNA, 20 bp, synthetic construct
  misc_feature 1..20: note = Description of Artificial Sequence: Synthetic oligonucleotide
  misc_feature 1..20: note = Target: FXN; (-) strand; PAM type: YTN; PAM sequence: CTC
  source 1..20: mol_type = other DNA
aagtgatccacaggccttgg

SEQ ID NO: 27489 - DNA, 20 bp, synthetic construct
  misc_feature 1..20: note = Description of Artificial Sequence: Synthetic oligonucleotide
  misc_feature 1..20: note = Target: FXN; (-) strand; PAM type: YTN; PAM sequence: CTG
  source 1..20: mol_type = other DNA
agctcaagtgatccacaggc

SEQ ID NO: 27490 - DNA, 20 bp, synthetic construct
  misc_feature 1..20: note = Description of Artificial Sequence: Synthetic oligonucleotide
  misc_feature 1..20: note = Target: FXN; (-) strand; PAM type: YTN; PAM sequence: CTC
  source 1..20: mol_type = other DNA
ctgagctcaagtgatccaca

SEQ ID NO: 27491 - DNA, 20 bp, synthetic construct
  misc_feature 1..20: note = Description of Artificial Sequence: Synthetic oligonucleotide
  misc_feature 1..20: note = Target: FXN; (-) strand; PAM type: YTN; PAM sequence: CTC
  source 1..20: mol_type = other DNA
aaactcctgagctcaagtga

SEQ ID NO: 27492 - DNA, 20 bp, synthetic construct
  misc_feature 1..20: note = Description of Artificial Sequence: Synthetic oligonucleotide
  misc_feature 1..20: note = Target: FXN; (-) strand; PAM type: YTN; PAM sequence: CTG
  source 1..20: mol_type = other DNA
gtctcaaactcctgagctca

SEQ ID NO: 27493 - DNA, 20 bp, synthetic construct
  misc_feature 1..20: note = Description of Artificial Sequence: Synthetic oligonucleotide
  misc_feature 1..20: note = Target: FXN; (-) strand; PAM type: YTN; PAM sequence: TTG
  source 1..20: mol_type = other DNA
cccaggctggtctcaaactc

SEQ ID NO: 27494 - DNA, 20 bp, synthetic construct
  misc_feature 1..20: note = Description of Artificial Sequence: Synthetic oligonucleotide
  misc_feature 1..20: note = Target: FXN; (-) strand; PAM type: YTN; PAM sequence: TTG
  source 1..20: mol_type = other DNA
tgacattgcccaggctggtc

SEQ ID NO: 27495 - DNA, 20 bp, synthetic construct
  misc_feature 1..20: note = Description of Artificial Sequence: Synthetic oligonucleotide
  misc_feature 1..20: note = Target: FXN; (-) strand; PAM type: YTN; PAM sequence: TTT
  source 1..20: mol_type = other DNA
gtgacattgcccaggctggt

SEQ ID NO: 27496 - DNA, 20 bp, synthetic construct
  misc_feature 1..20: note = Description of Artificial Sequence: Synthetic oligonucleotide
  misc_feature 1..20: note = Target: FXN; (-) strand; PAM type: YTN; PAM sequence: CTT
  source 1..20: mol_type = other DNA
tgtgacattgcccaggctgg

SEQ ID NO: 27497 - DNA, 20 bp, synthetic construct
  misc_feature 1..20: note = Description of Artificial Sequence: Synthetic oligonucleotide
  misc_feature 1..20: note = Target: FXN; (-) strand; PAM type: YTN; PAM sequence: TTA
  source 1..20: mol_type = other DNA
gtagaggtggggctttgtga

SEQ ID NO: 27498 - DNA, 20 bp, synthetic construct
  misc_feature 1..20: note = Description of Artificial Sequence: Synthetic oligonucleotide
  misc_feature 1..20: note = Target: FXN; (-) strand; PAM type: YTN; PAM sequence: TTT
  source 1..20: mol_type = other DNA
agtagaggtggggctttgtg

SEQ ID NO: 27499 - DNA, 20 bp, synthetic construct
  misc_feature 1..20: note = Description of Artificial Sequence: Synthetic oligonucleotide
  misc_feature 1..20: note = Target: FXN; (-) strand; PAM type: YTN; PAM sequence: TTT
  source 1..20: mol_type = other DNA
tagtagaggtggggctttgt

SEQ ID NO: 27500 - DNA, 20 bp, synthetic construct
  misc_feature 1..20: note = Description of Artificial Sequence: Synthetic oligonucleotide
  misc_feature 1..20: note = Target: FXN; (-) strand; PAM type: YTN; PAM sequence: TTT
  source 1..20: mol_type = other DNA
ttagtagaggtggggctttg

SEQ ID NO: 27501 - DNA, 20 bp, synthetic construct
  misc_feature 1..20: note = Description of Artificial Sequence: Synthetic oligonucleotide
  misc_feature 1..20: note = Target: FXN; (-) strand; PAM type: YTN; PAM sequence: TTA
  source 1..20: mol_type = other DNA
tatttttagtagaggtgggg

SEQ ID NO: 27502 - DNA, 20 bp, synthetic construct
  misc_feature 1..20: note = Description of Artificial Sequence: Synthetic oligonucleotide
  misc_feature 1..20: note = Target: FXN; (-) strand; PAM type: YTN; PAM sequence: TTT
  source 1..20: mol_type = other DNA
atatttttagtagaggtggg

SEQ ID NO: 27503 - DNA, 20 bp, synthetic construct
  misc_feature 1..20: note = Description of Artificial Sequence: Synthetic oligonucleotide
  misc_feature 1..20: note = Target: FXN; (-) strand; PAM type: YTN; PAM sequence: TTT
  source 1..20: mol_type = other DNA
tatatttttagtagaggtgg

SEQ ID NO: 27504 - DNA, 20 bp, synthetic construct
  misc_feature 1..20: note = Description of Artificial Sequence: Synthetic oligonucleotide
  misc_feature 1..20: note = Target: FXN; (-) strand; PAM type: YTN; PAM sequence: TTT
  source 1..20: mol_type = other DNA
ttatatttttagtagaggtg

SEQ ID NO: 27505 - DNA, 20 bp, synthetic construct
  misc_feature 1..20: note = Description of Artificial Sequence: Synthetic oligonucleotide
  misc_feature 1..20: note = Target: FXN; (-) strand; PAM type: YTN; PAM sequence: CTA
  source 1..20: mol_type = other DNA
atttttatatttttagtaga

SEQ ID NO: 27506 - DNA, 20 bp, synthetic construct
  misc_feature 1..20: note = Description of Artificial Sequence: Synthetic oligonucleotide
  misc_feature 1..20: note = Target: FXN; (-) strand; PAM type: YTN; PAM sequence: CTG
  source 1..20: mol_type = other DNA
gctaatttttatatttttag

SEQ ID NO: 27507 - DNA, 20 bp, synthetic construct
  misc_feature 1..20: note = Description of Artificial Sequence: Synthetic oligonucleotide
  misc_feature 1..20: note = Target: FXN; (-) strand; PAM type: YTN; PAM sequence: CTA
  source 1..20: mol_type = other DNA
taggcgtgtgccaccacacc

SEQ ID NO: 27508 - DNA, 20 bp, synthetic construct
  misc_feature 1..20: note = Description of Artificial Sequence: Synthetic oligonucleotide
  misc_feature 1..20: note = Target: FXN; (-) strand; PAM type: YTN; PAM sequence: TTG
  source 1..20: mol_type = other DNA
ggactataggcgtgtgccac

SEQ ID NO: 27509 - DNA, 20 bp, synthetic construct
  misc_feature 1..20: note = Description of Artificial Sequence: Synthetic oligonucleotide
  misc_feature 1..20: note = Target: FXN; (-) strand; PAM type: YTN; PAM sequence: TTC
  source 1..20: mol_type = other DNA
caagtagttgggactatagg

SEQ ID NO: 27510 - DNA, 20 bp, synthetic construct
  misc_feature 1..20: note = Description of Artificial Sequence: Synthetic oligonucleotide
  misc_feature 1..20: note = Target: FXN; (-) strand; PAM type: YTN; PAM sequence: CTT
  source 1..20: mol_type = other DNA
ccaagtagttgggactatag

SEQ ID NO: 27511 - DNA, 20 bp, synthetic construct
  misc_feature 1..20: note = Description of Artificial Sequence: Synthetic oligonucleotide
  misc_feature 1..20: note = Target: FXN; (-) strand; PAM type: YTN; PAM sequence: CTC
  source 1..20: mol_type = other DNA
agccttccaagtagttggga

SEQ ID NO: 27512 - DNA, 20 bp, synthetic construct
  misc_feature 1..20: note = Description of Artificial Sequence: Synthetic oligonucleotide
  misc_feature 1..20: note = Target: FXN; (-) strand; PAM type: YTN; PAM sequence: CTC
  source 1..20: mol_type = other DNA
aacctcagccttccaagtag

SEQ ID NO: 27513 - DNA, 20 bp, synthetic construct
  misc_feature 1..20: note = Description of Artificial Sequence: Synthetic oligonucleotide
  misc_feature 1..20: note = Target: FXN; (-) strand; PAM type: YTN; PAM sequence: CTG
  source 1..20: mol_type = other DNA
aggctcaacctcagccttcc

SEQ ID NO: 27514 - DNA, 20 bp, synthetic construct
  misc_feature 1..20: note = Description of Artificial Sequence: Synthetic oligonucleotide
  misc_feature 1..20: note = Target: FXN; (-) strand; PAM type: YTN; PAM sequence: CTC
  source 1..20: mol_type = other DNA
aggctgaggctcaacctcag

SEQ ID NO: 27515 - DNA, 20 bp, synthetic construct
  misc_feature 1..20: note = Description of Artificial Sequence: Synthetic oligonucleotide
  misc_feature 1..20: note = Target: FXN; (-) strand; PAM type: YTN; PAM sequence: CTG
  source 1..20: mol_type = other DNA
ggctcaggctgaggctcaac

SEQ ID NO: 27516 - DNA, 20 bp, synthetic construct
  misc_feature 1..20: note = Description of Artificial Sequence: Synthetic oligonucleotide
  misc_feature 1..20: note = Target: FXN; (-) strand; PAM type: YTN; PAM sequence: CTC
  source 1..20: mol_type = other DNA
ctgggctcaggctgaggctc

SEQ ID NO: 27517 - DNA, 20 bp, synthetic construct
  misc_feature 1..20: note = Description of Artificial Sequence: Synthetic oligonucleotide
  misc_feature 1..20: note = Target: FXN; (-) strand; PAM type: YTN; PAM sequence: CTC
  source 1..20: mol_type = other DNA
cacctcctgggctcaggctg

SEQ ID NO: 27518 - DNA, 20 bp, synthetic construct
  misc_feature 1..20: note = Description of Artificial Sequence: Synthetic oligonucleotide
  misc_feature 1..20: note = Target: FXN; (-) strand; PAM type: YTN; PAM sequence: CTG
  source 1..20: mol_type = other DNA
caacctccacctcctgggct

SEQ ID NO: 27519 - DNA, 20 bp, synthetic construct
  misc_feature 1..20: note = Description of Artificial Sequence: Synthetic oligonucleotide
  misc_feature 1..20: note = Target: FXN; (-) strand; PAM type: YTN; PAM sequence: CTC
  source 1..20: mol_type = other DNA
actgcaacctccacctcctg

SEQ ID NO: 27520 - DNA, 20 bp, synthetic construct
  misc_feature 1..20: note = Description of Artificial Sequence: Synthetic oligonucleotide
  misc_feature 1..20: note = Target: FXN; (-) strand; PAM type: YTN; PAM sequence: TTG
  source 1..20: mol_type = other DNA
gctcactgcaacctccacct

SEQ ID NO: 27521 - DNA, 20 bp, synthetic construct
  misc_feature 1..20: note = Description of Artificial Sequence: Synthetic oligonucleotide
  misc_feature 1..20: note = Target: FXN; (-) strand; PAM type: YTN; PAM sequence: CTT
  source 1..20: mol_type = other DNA
ggctcactgcaacctccacc

SEQ ID NO: 27522 - DNA, 20 bp, synthetic construct
  misc_feature 1..20: note = Description of Artificial Sequence: Synthetic oligonucleotide
  misc_feature 1..20: note = Target: FXN; (-) strand; PAM type: YTN; PAM sequence: CTG
  source 1..20: mol_type = other DNA
gagtgcagtggcgcgatctt

SEQ ID NO: 27523 - DNA, 20 bp, synthetic construct
  misc_feature 1..20: note = Description of Artificial Sequence: Synthetic oligonucleotide
  misc_feature 1..20: note = Target: FXN; (-) strand; PAM type: YTN; PAM sequence: TTG
  source 1..20: mol_type = other DNA
cccaggctggagtgcagtgg

SEQ ID NO: 27524 - DNA, 20 bp, synthetic construct
  misc_feature 1..20: note = Description of Artificial Sequence: Synthetic oligonucleotide
  misc_feature 1..20: note = Target: FXN; (-) strand; PAM type: YTN; PAM sequence: CTG
  source 1..20: mol_type = other DNA
ttgcccaggctggagtgcag

SEQ ID NO: 27525 - DNA, 20 bp, synthetic construct
  misc_feature 1..20: note = Description of Artificial Sequence: Synthetic oligonucleotide
  misc_feature 1..20: note = Target: FXN; (-) strand; PAM type: YTN; PAM sequence: CTG
  source 1..20: mol_type = other DNA
gccctgttgcccaggctgga

SEQ ID NO: 27526 - DNA, 20 bp, synthetic construct
  misc_feature 1..20: note = Description of Artificial Sequence: Synthetic oligonucleotide
  misc_feature 1..20: note = Target: FXN; (-) strand; PAM type: YTN; PAM sequence: TTG
  source 1..20: mol_type = other DNA
ggacagggtctggccctgtt

SEQ ID NO: 27527 - DNA, 20 bp, synthetic construct
  misc_feature 1..20: note = Description of Artificial Sequence: Synthetic oligonucleotide
  misc_feature 1..20: note = Target: FXN; (-) strand; PAM type: YTN; PAM sequence: TTT
  source 1..20: mol_type = other DNA
gggacagggtctggccctgt

SEQ ID NO: 27528 - DNA, 20 bp, synthetic construct
  misc_feature 1..20: note = Description of Artificial Sequence: Synthetic oligonucleotide
  misc_feature 1..20: note = Target: FXN; (-) strand; PAM type: YTN; PAM sequence: TTT
  source 1..20: mol_type = other DNA
tgggacagggtctggccctg

SEQ ID NO: 27529 - DNA, 20 bp, synthetic construct
  misc_feature 1..20: note = Description of Artificial Sequence: Synthetic oligonucleotide
  misc_feature 1..20: note = Target: FXN; (-) strand; PAM type: YTN; PAM sequence: TTT
  source 1..20: mol_type = other DNA
ttgggacagggtctggccct

SEQ ID NO: 27530 - DNA, 20 bp, synthetic construct
  misc_feature 1..20: note = Description of Artificial Sequence: Synthetic oligonucleotide
  misc_feature 1..20: note = Target: FXN; (-) strand; PAM type: YTN; PAM sequence: TTT
  source 1..20: mol_type = other DNA
tttgggacagggtctggccc

SEQ ID NO: 27531 - DNA, 20 bp, synthetic construct
  misc_feature 1..20: note = Description of Artificial Sequence: Synthetic oligonucleotide
  misc_feature 1..20: note = Target: FXN; (-) strand; PAM type: YTN; PAM sequence: TTT
  source 1..20: mol_type = other DNA
ttttgggacagggtctggcc

SEQ ID NO: 27532 - DNA, 20 bp, synthetic construct
  misc_feature 1..20: note = Description of Artificial Sequence: Synthetic oligonucleotide
  misc_feature 1..20: note = Target: FXN; (-) strand; PAM type: YTN; PAM sequence: TTT
  source 1..20: mol_type = other DNA
tttttgggacagggtctggc

SEQ ID NO: 27533 - DNA, 20 bp, synthetic construct
  misc_feature 1..20: note = Description of Artificial Sequence: Synthetic oligonucleotide
  misc_feature 1..20: note = Target: FXN; (-) strand; PAM type: YTN; PAM sequence: TTT
  source 1..20: mol_type = other DNA
ttttttgggacagggtctgg

SEQ ID NO: 27534 - DNA, 20 bp, synthetic construct
  misc_feature 1..20: note = Description of Artificial Sequence: Synthetic oligonucleotide
  misc_feature 1..20: note = Target: FXN; (-) strand; PAM type: YTN; PAM sequence: TTT
  source 1..20: mol_type = other DNA
tttttttgggacagggtctg

SEQ ID NO: 27535 - DNA, 20 bp, synthetic construct
  misc_feature 1..20: note = Description of Artificial Sequence: Synthetic oligonucleotide
  misc_feature 1..20: note = Target: FXN; (-) strand; PAM type: YTN; PAM sequence: TTT
  source 1..20: mol_type = other DNA
ttttttttgggacagggtct

SEQ ID NO: 27536 - DNA, 20 bp, synthetic construct
  misc_feature 1..20: note = Description of Artificial Sequence: Synthetic oligonucleotide
  misc_feature 1..20: note = Target: FXN; (-) strand; PAM type: YTN; PAM sequence: TTT
  source 1..20: mol_type = other DNA
tttttttttgggacagggtc

SEQ ID NO: 27537 - DNA, 20 bp, synthetic construct
  misc_feature 1..20: note = Description of Artificial Sequence: Synthetic oligonucleotide
  misc_feature 1..20: note = Target: FXN; (-) strand; PAM type: YTN; PAM sequence: TTT
  source 1..20: mol_type = other DNA
ttttttttttgggacagggt

SEQ ID NO: 27538 - DNA, 20 bp, synthetic construct
  misc_feature 1..20: note = Description of Artificial Sequence: Synthetic oligonucleotide
  misc_feature 1..20: note = Target: FXN; (-) strand; PAM type: YTN; PAM sequence: TTT
  source 1..20: mol_type = other DNA
tttttttttttgggacaggg

SEQ ID NO: 27539 - DNA, 20 bp, synthetic construct
  misc_feature 1..20: note = Description of Artificial Sequence: Synthetic oligonucleotide
  misc_feature 1..20: note = Target: FXN; (-) strand; PAM type: YTN; PAM sequence: TTT
  source 1..20: mol_type = other DNA
ttttttttttttgggacagg

SEQ ID NO: 27540 - DNA, 20 bp, synthetic construct
  misc_feature 1..20: note = Description of Artificial Sequence: Synthetic oligonucleotide
  misc_feature 1..20: note = Target: FXN; (-) strand; PAM type: YTN; PAM sequence: CTT
  source 1..20: mol_type = other DNA
tttttttttttttgggacag

SEQ ID NO: 27541 - DNA, 20 bp, synthetic construct
  misc_feature 1..20: note = Description of Artificial Sequence: Synthetic oligonucleotide
  misc_feature 1..20: note = Target: FXN; (-) strand; PAM type: YTN; PAM sequence: CTA
  source 1..20: mol_type = other DNA
acataagacgatgacttttt

SEQ ID NO: 27542 - DNA, 20 bp, synthetic construct
  misc_feature 1..20: note = Description of Artificial Sequence: Synthetic oligonucleotide
  misc_feature 1..20: note = Target: FXN; (-) strand; PAM type: YTN; PAM sequence: TTA
  source 1..20: mol_type = other DNA
caaggatgctaacataagac

SEQ ID NO: 27543 - DNA, 20 bp, synthetic construct
  misc_feature 1..20: note = Description of Artificial Sequence: Synthetic oligonucleotide
  misc_feature 1..20: note = Target: FXN; (-) strand; PAM type: YTN; PAM sequence: CTT
  source 1..20: mol_type = other DNA
acaaggatgctaacataaga

SEQ ID NO: 27544 - DNA, 20 bp, synthetic construct
  misc_feature 1..20: note = Description of Artificial Sequence: Synthetic oligonucleotide
  misc_feature 1..20: note = Target: FXN; (-) strand; PAM type: YTN; PAM sequence: CTC
  source 1..20: mol_type = other DNA
acttacaaggatgctaacat

SEQ ID NO: 27545 - DNA, 20 bp, synthetic construct
  misc_feature 1..20: note = Description of Artificial Sequence: Synthetic oligonucleotide
  misc_feature 1..20: note = Target: FXN; (-) strand; PAM type: YTN; PAM sequence: CTG
  source 1..20: mol_type = other DNA
caaaatatcaggaaaggctc

SEQ ID NO: 27546 - DNA, 20 bp, synthetic construct
  misc_feature 1..20: note = Description of Artificial Sequence: Synthetic oligonucleotide
  misc_feature 1..20: note = Target: FXN; (-) strand; PAM type: YTN; PAM sequence: CTG
  source 1..20: mol_type = other DNA
agaatgagacaggctgcaaa

SEQ ID NO: 27547 - DNA, 20 bp, synthetic construct
  misc_feature 1..20: note = Description of Artificial Sequence: Synthetic oligonucleotide
  misc_feature 1..20: note = Target: FXN; (-) strand; PAM type: YTN; PAM sequence: CTA
  source 1..20: mol_type = other DNA
ctgagaatgagacaggctgc

SEQ ID NO: 27548 - DNA, 20 bp, synthetic construct
  misc_feature 1..20: note = Description of Artificial Sequence: Synthetic oligonucleotide
  misc_feature 1..20: note = Target: FXN; (-) strand; PAM type: YTN; PAM sequence: TTC
  source 1..20: mol_type = other DNA
tactgagaatgagacaggct

SEQ ID NO: 27549 - DNA, 20 bp, synthetic construct
  misc_feature 1..20: note = Description of Artificial Sequence: Synthetic oligonucleotide
  misc_feature 1..20: note = Target: FXN; (-) strand; PAM type: YTN; PAM sequence: TTT
  source 1..20: mol_type = other DNA
ctactgagaatgagacaggc

SEQ ID NO: 27550 - DNA, 20 bp, synthetic construct
  misc_feature 1..20: note = Description of Artificial Sequence: Synthetic oligonucleotide
  misc_feature 1..20: note = Target: FXN; (-) strand; PAM type: YTN; PAM sequence: TTT
  source 1..20: mol_type = other DNA
tctactgagaatgagacagg

SEQ ID NO: 27551 - DNA, 20 bp, synthetic construct
  misc_feature 1..20: note = Description of Artificial Sequence: Synthetic oligonucleotide
  misc_feature 1..20: note = Target: FXN; (-) strand; PAM type: YTN; PAM sequence: CTT
  source 1..20: mol_type = other DNA
ttctactgagaatgagacag

SEQ ID NO: 27552 - DNA, 20 bp, synthetic construct
  misc_feature 1..20: note = Description of Artificial Sequence: Synthetic oligonucleotide
  misc_feature 1..20: note = Target: FXN; (-) strand; PAM type: YTN; PAM sequence: CTA
  source 1..20: mol_type = other DNA
gagtaaacttttctactgag

SEQ ID NO: 27553 - DNA, 20 bp, synthetic construct
  misc_feature 1..20: note = Description of Artificial Sequence: Synthetic oligonucleotide
  misc_feature 1..20: note = Target: FXN; (-) strand; PAM type: YTN; PAM sequence: TTA
  source 1..20: mol_type = other DNA
tgtaactagagtaaactttt

SEQ ID NO: 27554 - DNA, 20 bp, synthetic construct
  misc_feature 1..20: note = Description of Artificial Sequence: Synthetic oligonucleotide
  misc_feature 1..20: note = Target: FXN; (-) strand; PAM type: YTN; PAM sequence: TTG
  source 1..20: mol_type = other DNA
tcagcagggagaagttatgt

SEQ ID NO: 27555 - DNA, 20 bp, synthetic construct
  misc_feature 1..20: note = Description of Artificial Sequence: Synthetic oligonucleotide
  misc_feature 1..20: note = Target: FXN; (-) strand; PAM type: YTN; PAM sequence: TTA
  source 1..20: mol_type = other DNA
cagtatccaaattgtcagca

SEQ ID NO: 27556 - DNA, 20 bp, synthetic construct
  misc_feature 1..20: note = Description of Artificial Sequence: Synthetic oligonucleotide
  misc_feature 1..20: note = Target: FXN; (-) strand; PAM type: YTN; PAM sequence: CTT
  source 1..20: mol_type = other DNA
acagtatccaaattgtcagc

SEQ ID NO: 27557 - DNA, 20 bp, synthetic construct
  misc_feature 1..20: note = Description of Artificial Sequence: Synthetic oligonucleotide
  misc_feature 1..20: note = Target: FXN; (-) strand; PAM type: YTN; PAM sequence: CTG
  source 1..20: mol_type = other DNA
cttacagtatccaaattgtc

SEQ ID NO: 27558 - DNA, 20 bp, synthetic construct
  misc_feature 1..20: note = Description of Artificial Sequence: Synthetic oligonucleotide
  misc_feature 1..20: note = Target: FXN; (-) strand; PAM type: YTN; PAM sequence: CTG
  source 1..20: mol_type = other DNA
atgcctgcttacagtatcca

SEQ ID NO: 27559 - DNA, 20 bp, synthetic construct
  misc_feature 1..20: note = Description of Artificial Sequence: Synthetic oligonucleotide
  misc_feature 1..20: note = Target: FXN; (-) strand; PAM type: YTN; PAM sequence: TTA
  source 1..20: mol_type = other DNA
atatcctgatgcctgcttac

SEQ ID NO: 27560 - DNA, 20 bp, synthetic construct
  misc_feature 1..20: note = Description of Artificial Sequence: Synthetic oligonucleotide
  misc_feature 1..20: note = Target: FXN; (-) strand; PAM type: YTN; PAM sequence: CTT
  source 1..20: mol_type = other DNA
aatatcctgatgcctgctta

SEQ ID NO: 27561 - DNA, 20 bp, synthetic construct
  misc_feature 1..20: note = Description of Artificial Sequence: Synthetic oligonucleotide
  misc_feature 1..20: note = Target: FXN; (-) strand; PAM type: YTN; PAM sequence: TTC
  source 1..20: mol_type = other DNA
agatcttaatatcctgatgc

SEQ ID NO: 27562 - DNA, 20 bp, synthetic construct
  misc_feature 1..20: note = Description of Artificial Sequence: Synthetic oligonucleotide
  misc_feature 1..20: note = Target: FXN; (-) strand; PAM type: YTN; PAM sequence: CTT
  source 1..20: mol_type = other DNA
cagatcttaatatcctgatg

SEQ ID NO: 27563 - DNA, 20 bp, synthetic construct
  misc_feature 1..20: note = Description of Artificial Sequence: Synthetic oligonucleotide
  misc_feature 1..20: note = Target: FXN; (-) strand; PAM type: YTN; PAM sequence: CTC
  source 1..20: mol_type = other DNA
acttcagatcttaatatcct

SEQ ID NO: 27564 - DNA, 20 bp, synthetic construct
  misc_feature 1..20: note = Description of Artificial Sequence: Synthetic oligonucleotide
  misc_feature 1..20: note = Target: FXN; (-) strand; PAM type: YTN; PAM sequence: CTA
  source 1..20: mol_type = other DNA
ctcacttcagatcttaatat

SEQ ID NO: 27565 - DNA, 20 bp, synthetic construct
  misc_feature 1..20: note = Description of Artificial Sequence: Synthetic oligonucleotide
  misc_feature 1..20: note = Target: FXN; (-) strand; PAM type: YTN; PAM sequence: TTA
  source 1..20: mol_type = other DNA
taagctactcacttcagatc

SEQ ID NO: 27566 - DNA, 20 bp, synthetic construct
  misc_feature 1..20: note = Description of Artificial Sequence: Synthetic oligonucleotide
  misc_feature 1..20: note = Target: FXN; (-) strand; PAM type: YTN; PAM sequence: TTG
  source 1..20: mol_type = other DNA
gaaaagttataagctactca

SEQ ID NO: 27567 - DNA, 20 bp, synthetic construct
  misc_feature 1..20: note = Description of Artificial Sequence: Synthetic oligonucleotide
  misc_feature 1..20: note = Target: FXN; (-) strand; PAM type: YTN; PAM sequence: TTT
  source 1..20: mol_type = other DNA
ggaaaagttataagctactc

SEQ ID NO: 27568 - DNA, 20 bp, synthetic construct
  misc_feature 1..20: note = Description of Artificial Sequence: Synthetic oligonucleotide
  misc_feature 1..20: note = Target: FXN; (-) strand; PAM type: YTN; PAM sequence: CTG
  source 1..20: mol_type = other DNA
gatttggaaaagttataagc

SEQ ID NO: 27569 - DNA, 20 bp, synthetic construct
  misc_feature 1..20: note = Description of Artificial Sequence: Synthetic oligonucleotide
  misc_feature 1..20: note = Target: FXN; (-) strand; PAM type: YTN; PAM sequence: CTA
  source 1..20: mol_type = other DNA
ggctggatttggaaaagtta

SEQ ID NO: 27570 - DNA, 20 bp, synthetic construct
  misc_feature 1..20: note = Description of Artificial Sequence: Synthetic oligonucleotide
  misc_feature 1..20: note = Target: FXN; (-) strand; PAM type: YTN; PAM sequence: CTG
  source 1..20: mol_type = other DNA
tctaggctggatttggaaaa

SEQ ID NO: 27571 - DNA, 20 bp, synthetic construct
  misc_feature 1..20: note = Description of Artificial Sequence: Synthetic oligonucleotide
  misc_feature 1..20: note = Target: FXN; (-) strand; PAM type: YTN; PAM sequence: TTA
  source 1..20: mol_type = other DNA
atagaggaaaactgtctagg

SEQ ID NO: 27572 - DNA, 20 bp, synthetic construct
  misc_feature 1..20: note = Description of Artificial Sequence: Synthetic oligonucleotide
  misc_feature 1..20: note = Target: FXN; (-) strand; PAM type: YTN; PAM sequence: TTT
  source 1..20: mol_type = other DNA
aatagaggaaaactgtctag

SEQ ID NO: 27573 - DNA, 20 bp, synthetic construct
  misc_feature 1..20: note = Description of Artificial Sequence: Synthetic oligonucleotide
  misc_feature 1..20: note = Target: FXN; (-) strand; PAM type: YTN; PAM sequence: TTA
  source 1..20: mol_type = other DNA
aagtcagggcaataatttaa

SEQ ID NO: 27574 - DNA, 20 bp, synthetic construct
  misc_feature 1..20: note = Description of Artificial Sequence: Synthetic oligonucleotide
  misc_feature 1..20: note = Target: FXN; (-) strand; PAM type: YTN; PAM sequence: TTT
  source 1..20: mol_type = other DNA
aaagtcagggcaataattta

SEQ ID NO: 27575 - DNA, 20 bp, synthetic construct
  misc_feature 1..20: note = Description of Artificial Sequence: Synthetic oligonucleotide
  misc_feature 1..20: note = Target: FXN; (-) strand; PAM type: YTN; PAM sequence: TTT
  source 1..20: mol_type = other DNA
taaagtcagggcaataattt

SEQ ID NO: 27576 - DNA, 20 bp, synthetic construct
  misc_feature 1..20: note = Description of Artificial Sequence: Synthetic oligonucleotide
  misc_feature 1..20: note = Target: FXN; (-) strand; PAM type: YTN; PAM sequence: CTT
  source 1..20: mol_type = other DNA
ttaaagtcagggcaataatt

SEQ ID NO: 27577 - DNA, 20 bp, synthetic construct
  misc_feature 1..20: note = Description of Artificial Sequence: Synthetic oligonucleotide
  misc_feature 1..20: note = Target: FXN; (-) strand; PAM type: YTN; PAM sequence: TTC
  source 1..20: mol_type = other DNA
ttttaaagtcagggcaataa

SEQ ID NO: 27578 - DNA, 20 bp, synthetic construct
  misc_feature 1..20: note = Description of Artificial Sequence: Synthetic oligonucleotide
  misc_feature 1..20: note = Target: FXN; (-) strand; PAM type: YTN; PAM sequence: CTT
  source 1..20: mol_type = other DNA
cttttaaagtcagggcaata

SEQ ID NO: 27579 - DNA, 20 bp, synthetic construct
  misc_feature 1..20: note = Description of Artificial Sequence: Synthetic oligonucleotide
  misc_feature 1..20: note = Target: FXN; (-) strand; PAM type: YTN; PAM sequence: CTA
  source 1..20: mol_type = other DNA
caaggtcaaaagtagcttct

SEQ ID NO: 27580 - DNA, 20 bp, synthetic construct
  misc_feature 1..20: note = Description of Artificial Sequence: Synthetic oligonucleotide
  misc_feature 1..20: note = Target: FXN; (-) strand; PAM type: YTN; PAM sequence: TTC
  source 1..20: mol_type = other DNA
aaacgctacaaggtcaaaag

SEQ ID NO: 27581 - DNA, 20 bp, synthetic construct
  misc_feature 1..20: note = Description of Artificial Sequence: Synthetic oligonucleotide
  misc_feature 1..20: note = Target: FXN; (-) strand; PAM type: YTN; PAM sequence: TTG
  source 1..20: mol_type = other DNA
ttcaaacgctacaaggtcaa

SEQ ID NO: 27582 - DNA, 20 bp, synthetic construct
  misc_feature 1..20: note = Description of Artificial Sequence: Synthetic oligonucleotide
  misc_feature 1..20: note = Target: FXN; (-) strand; PAM type: YTN; PAM sequence: CTT
  source 1..20: mol_type = other DNA
gttcaaacgctacaaggtca

SEQ ID NO: 27583 - DNA, 20 bp, synthetic construct
  misc_feature 1..20: note = Description of Artificial Sequence: Synthetic oligonucleotide
  misc_feature 1..20: note = Target: FXN; (-) strand; PAM type: YTN; PAM sequence: TTG
  source 1..20: mol_type = other DNA
aagacaaagtgcaacttgtt

SEQ ID NO: 27584 - DNA, 20 bp, synthetic construct
  misc_feature 1..20: note = Description of Artificial Sequence: Synthetic oligonucleotide
  misc_feature 1..20: note = Target: FXN; (-) strand; PAM type: YTN; PAM sequence: TTT
  source 1..20: mol_type = other DNA
gaagacaaagtgcaacttgt

SEQ ID NO: 27585 - DNA, 20 bp, synthetic construct
  misc_feature 1..20: note = Description of Artificial Sequence: Synthetic oligonucleotide
  misc_feature 1..20: note = Target: FXN; (-) strand; PAM type: YTN; PAM sequence: CTT
  source 1..20: mol_type = other DNA
tgaagacaaagtgcaacttg

SEQ ID NO: 27586 - DNA, 20 bp, synthetic construct
  misc_feature 1..20: note = Description of Artificial Sequence: Synthetic oligonucleotide
  misc_feature 1..20: note = Target: FXN; (-) strand; PAM type: YTN; PAM sequence: TTG
  source 1..20: mol_type = other DNA
ctttgaagacaaagtgcaac

SEQ ID NO: 27587 - DNA, 20 bp, synthetic construct
  misc_feature 1..20: note = Description of Artificial Sequence: Synthetic oligonucleotide
  misc_feature 1..20: note = Target: FXN; (-) strand; PAM type: YTN; PAM sequence: CTT
  source 1..20: mol_type = other DNA
gctttgaagacaaagtgcaa

SEQ ID NO: 27588 - DNA, 20 bp, synthetic construct
  misc_feature 1..20: note = Description of Artificial Sequence: Synthetic oligonucleotide
  misc_feature 1..20: note = Target: FXN; (-) strand; PAM type: YTN; PAM sequence: TTA
  source 1..20: mol_type = other DNA
acttgctttgaagacaaagt

SEQ ID NO: 27589 - DNA, 20 bp, synthetic construct
  misc_feature 1..20: note = Description of Artificial Sequence: Synthetic oligonucleotide
  misc_feature 1..20: note = Target: FXN; (-) strand; PAM type: YTN; PAM sequence: TTT
  source 1..20: mol_type = other DNA
aacttgctttgaagacaaag

SEQ ID NO: 27590 - DNA, 20 bp, synthetic construct
  misc_feature 1..20: note = Description of Artificial Sequence: Synthetic oligonucleotide
  misc_feature 1..20: note = Target: FXN; (-) strand; PAM type: YTN; PAM sequence: CTT
  source 1..20: mol_type = other DNA
taacttgctttgaagacaaa

SEQ ID NO: 27591 - DNA, 20 bp, synthetic construct
  misc_feature 1..20: note = Description of Artificial Sequence: Synthetic oligonucleotide
  misc_feature 1..20: note = Target: FXN; (-) strand; PAM type: YTN; PAM sequence: CTC
  source 1..20: mol_type = other DNA
aaaacaagtagaggtcaaac

SEQ ID NO: 27592 - DNA, 20 bp, synthetic construct
  misc_feature 1..20: note = Description of Artificial Sequence: Synthetic oligonucleotide
  misc_feature 1..20: note = Target: FXN; (-) strand; PAM type: YTN; PAM sequence: CTG
  source 1..20: mol_type = other DNA
agaggctcaaaacaagtaga

SEQ ID NO: 27593 - DNA, 20 bp, synthetic construct
  misc_feature 1..20: note = Description of Artificial Sequence: Synthetic oligonucleotide
  misc_feature 1..20: note = Target: FXN; (-) strand; PAM type: YTN; PAM sequence: TTA
  source 1..20: mol_type = other DNA
cctgagaggctcaaaacaag

SEQ ID NO: 27594 - DNA, 20 bp, synthetic construct
  misc_feature 1..20: note = Description of Artificial Sequence: Synthetic oligonucleotide
  misc_feature 1..20: note = Target: FXN; (-) strand; PAM type: YTN; PAM sequence: TTT
  source 1..20: mol_type = other DNA
acctgagaggctcaaaacaa

SEQ ID NO: 27595 - DNA, 20 bp, synthetic construct
  misc_feature 1..20: note = Description of Artificial Sequence: Synthetic oligonucleotide
  misc_feature 1..20: note = Target: FXN; (-) strand; PAM type: YTN; PAM sequence: CTT
  source 1..20: mol_type = other DNA
tacctgagaggctcaaaaca

SEQ ID NO: 27596 - DNA, 20 bp, synthetic construct
  misc_feature 1..20: note = Description of Artificial Sequence: Synthetic oligonucleotide
  misc_feature 1..20: note = Target: FXN; (-) strand; PAM type: YTN; PAM sequence: TTC
  source 1..20: mol_type = other DNA
aaataaccctttacctgaga

SEQ ID NO: 27597 - DNA, 20 bp, synthetic construct
  misc_feature 1..20: note = Description of Artificial Sequence: Synthetic oligonucleotide
  misc_feature 1..20: note = Target: FXN; (-) strand; PAM type: YTN; PAM sequence: CTG
  source 1..20: mol_type = other DNA
caaagggaattcaaataacc

SEQ ID NO: 27598 - DNA, 20 bp, synthetic construct
  misc_feature 1..20: note = Description of Artificial Sequence: Synthetic oligonucleotide
  misc_feature 1..20: note = Target: FXN; (-) strand; PAM type: YTN; PAM sequence: CTC
  source 1..20: mol_type = other DNA
cacagggtacacaaccccaa

SEQ ID NO: 27599 - DNA, 20 bp, synthetic construct
  misc_feature 1..20: note = Description of Artificial Sequence: Synthetic oligonucleotide
  misc_feature 1..20: note = Target: FXN; (-) strand; PAM type: YTN; PAM sequence: CTA
  source 1..20: mol_type = other DNA
ccacctccacagggtacaca

SEQ ID NO: 27600 - DNA, 20 bp, synthetic construct
  misc_feature 1..20: note = Description of Artificial Sequence: Synthetic oligonucleotide
  misc_feature 1..20: note = Target: FXN; (-) strand; PAM type: YTN; PAM sequence: CTC
  source 1..20: mol_type = other DNA
taccacctccacagggtaca

SEQ ID NO: 27601 - DNA, 20 bp, synthetic construct
  misc_feature 1..20: note = Description of Artificial Sequence: Synthetic oligonucleotide
  misc_feature 1..20: note = Target: FXN; (-) strand; PAM type: YTN; PAM sequence: CTG
  source 1..20: mol_type = other DNA
gagcagcaatatataacact

SEQ ID NO: 27602 - DNA, 20 bp, synthetic construct
  misc_feature 1..20: note = Description of Artificial Sequence: Synthetic oligonucleotide
  misc_feature 1..20: note = Target: FXN; (-) strand; PAM type: YTN; PAM sequence: TTA
  source 1..20: mol_type = other DNA
aatgccctggagcagcaata

SEQ ID NO: 27603 - DNA, 20 bp, synthetic construct
  misc_feature 1..20: note = Description of Artificial Sequence: Synthetic oligonucleotide
  misc_feature 1..20: note = Target: FXN; (-) strand; PAM type: YTN; PAM sequence: TTG
  source 1..20: mol_type = other DNA
aaagcacatcaatggaaaag

SEQ ID NO: 27604 - DNA, 20 bp, synthetic construct
  misc_feature 1..20: note = Description of Artificial Sequence: Synthetic oligonucleotide
  misc_feature 1..20: note = Target: FXN; (-) strand; PAM type: YTN; PAM sequence: CTA
  source 1..20: mol_type = other DNA
gattgaaagcacatcaatgg

SEQ ID NO: 27605 - DNA, 20 bp, synthetic construct
  misc_feature 1..20: note = Description of Artificial Sequence: Synthetic oligonucleotide
  misc_feature 1..20: note = Target: FXN; (-) strand; PAM type: YTN; PAM sequence: CTC
  source 1..20: mol_type = other DNA
tagattgaaagcacatcaat

SEQ ID NO: 27606 - DNA, 20 bp, synthetic construct
  misc_feature 1..20: note = Description of Artificial Sequence: Synthetic oligonucleotide
  misc_feature 1..20: note = Target: FXN; (-) strand; PAM type: YTN; PAM sequence: TTC
  source 1..20: mol_type = other DNA
ctctagattgaaagcacatc

SEQ ID NO: 27607 - DNA, 20 bp, synthetic construct
  misc_feature 1..20: note = Description of Artificial Sequence: Synthetic oligonucleotide
  misc_feature 1..20: note = Target: FXN; (-) strand; PAM type: YTN; PAM sequence: TTA
  source 1..20: mol_type = other DNA
ttcctctagattgaaagcac

SEQ ID NO: 27608 - DNA, 20 bp, synthetic construct
  misc_feature 1..20: note = Description of Artificial Sequence: Synthetic oligonucleotide
  misc_feature 1..20: note = Target: FXN; (-) strand; PAM type: YTN; PAM sequence: TTT
  source 1..20: mol_type = other DNA
attcctctagattgaaagca

SEQ ID NO: 27609 - DNA, 20 bp, synthetic construct
  misc_feature 1..20: note = Description of Artificial Sequence: Synthetic oligonucleotide
  misc_feature 1..20: note = Target: FXN; (-) strand; PAM type: YTN; PAM sequence: TTT
  source 1..20: mol_type = other DNA
tattcctctagattgaaagc

SEQ ID NO: 27610 - DNA, 20 bp, synthetic construct
  misc_feature 1..20: note = Description of Artificial Sequence: Synthetic oligonucleotide
  misc_feature 1..20: note = Target: FXN; (-) strand; PAM type: YTN; PAM sequence: CTT
  source 1..20: mol_type = other DNA
ttattcctctagattgaaag

SEQ ID NO: 27611 - DNA, 20 bp, synthetic construct
  misc_feature 1..20: note = Description of Artificial Sequence: Synthetic oligonucleotide
  misc_feature 1..20: note = Target: FXN; (-) strand; PAM type: YTN; PAM sequence: CTC
  source 1..20: mol_type = other DNA
caacacaatcttttattcct

SEQ ID NO: 27612 - DNA, 20 bp, synthetic construct
  misc_feature 1..20: note = Description of Artificial Sequence: Synthetic oligonucleotide
  misc_feature 1..20: note = Target: FXN; (-) strand; PAM type: YTN; PAM sequence: TTG
  source 1..20: mol_type = other DNA
tgtctccaacacaatctttt

SEQ ID NO: 27613 - DNA, 20 bp, synthetic construct
  misc_feature 1..20: note = Description of Artificial Sequence: Synthetic oligonucleotide
  misc_feature 1..20: note = Target: FXN; (-) strand; PAM type: YTN; PAM sequence: CTA
  source 1..20: mol_type = other DNA
tgcaggccacattgtgtctc

SEQ ID NO: 27614 - DNA, 20 bp, synthetic construct
  misc_feature 1..20: note = Description of Artificial Sequence: Synthetic oligonucleotide
  misc_feature 1..20: note = Target: FXN; (-) strand; PAM type: YTN; PAM sequence: TTC
  source 1..20: mol_type = other DNA
agatgctatgcaggccacat

SEQ ID NO: 27615 - DNA, 20 bp, synthetic construct
  misc_feature 1..20: note = Description of Artificial Sequence: Synthetic oligonucleotide
  misc_feature 1..20: note = Target: FXN; (-) strand; PAM type: YTN; PAM sequence: TTT
  source 1..20: mol_type = other DNA
cagatgctatgcaggccaca

SEQ ID NO: 27616 - DNA, 20 bp, synthetic construct
  misc_feature 1..20: note = Description of Artificial Sequence: Synthetic oligonucleotide
  misc_feature 1..20: note = Target: FXN; (-) strand; PAM type: YTN; PAM sequence: CTT
  source 1..20: mol_type = other DNA
tcagatgctatgcaggccac

SEQ ID NO: 27617 - DNA, 20 bp, synthetic construct
  misc_feature 1..20: note = Description of Artificial Sequence: Synthetic oligonucleotide
  misc_feature 1..20: note = Target: FXN; (-) strand; PAM type: YTN; PAM sequence: CTC
  source 1..20: mol_type = other DNA
aggctttcagatgctatgca

SEQ ID NO: 27618 - DNA, 20 bp, synthetic construct
  misc_feature 1..20: note = Description of Artificial Sequence: Synthetic oligonucleotide
  misc_feature 1..20: note = Target: FXN; (-) strand; PAM type: YTN; PAM sequence: TTC
  source 1..20: mol_type = other DNA
tcaggctttcagatgctatg

SEQ ID NO: 27619 - DNA, 20 bp, synthetic construct
  misc_feature 1..20: note = Description of Artificial Sequence: Synthetic oligonucleotide
  misc_feature 1..20: note = Target: FXN; (-) strand; PAM type: YTN; PAM sequence: CTG
  source 1..20: mol_type = other DNA
catgttctcaggctttcaga

SEQ ID NO: 27620 - DNA, 20 bp, synthetic construct
  misc_feature 1..20: note = Description of Artificial Sequence: Synthetic oligonucleotide
  misc_feature 1..20: note = Target: FXN; (-) strand; PAM type: YTN; PAM sequence: CTC
  source 1..20: mol_type = other DNA
cctgcatgttctcaggcttt

SEQ ID NO: 27621 - DNA, 20 bp, synthetic construct
  misc_feature 1..20: note = Description of Artificial Sequence: Synthetic oligonucleotide
  misc_feature 1..20: note = Target: FXN; (-) strand; PAM type: YTN; PAM sequence: CTC
  source 1..20: mol_type = other DNA
tccctgcatgttctcaggct

SEQ ID NO: 27622 - DNA, 20 bp, synthetic construct
  misc_feature 1..20: note = Description of Artificial Sequence: Synthetic oligonucleotide
  misc_feature 1..20: note = Target: FXN; (-) strand; PAM type: YTN; PAM sequence: CTG
  source 1..20: mol_type = other DNA
agggatgagggatgtctctc

SEQ ID NO: 27623 - DNA, 20 bp, synthetic construct
  misc_feature 1..20: note = Description of Artificial Sequence: Synthetic oligonucleotide
  misc_feature 1..20: note = Target: FXN; (-) strand; PAM type: YTN; PAM sequence: CTG
  source 1..20: mol_type = other DNA
ctgagggatgagggatgtct

SEQ ID NO: 27624 - DNA, 20 bp, synthetic construct
  misc_feature 1..20: note = Description of Artificial Sequence: Synthetic oligonucleotide
  misc_feature 1..20: note = Target: FXN; (-) strand; PAM type: YTN; PAM sequence: TTC
  source 1..20: mol_type = other DNA
aacagcagccaggctgctga

SEQ ID NO: 27625 - DNA, 20 bp, synthetic construct
  misc_feature 1..20: note = Description of Artificial Sequence: Synthetic oligonucleotide
  misc_feature 1..20: note = Target: FXN; (-) strand; PAM type: YTN; PAM sequence: CTT
  source 1..20: mol_type = other DNA
caacagcagccaggctgctg

SEQ ID NO: 27626 - DNA, 20 bp, synthetic construct
  misc_feature 1..20: note = Description of Artificial Sequence: Synthetic oligonucleotide
  misc_feature 1..20: note = Target: FXN; (-) strand; PAM type: YTN; PAM sequence: TTA
  source 1..20: mol_type = other DNA
caaccacttcaacagcagcc

SEQ ID NO: 27627 - DNA, 20 bp, synthetic construct
  misc_feature 1..20: note = Description of Artificial Sequence: Synthetic oligonucleotide
  misc_feature 1..20: note = Target: FXN; (-) strand; PAM type: YTN; PAM sequence: CTT
  source 1..20: mol_type = other DNA
acaaccacttcaacagcagc

SEQ ID NO: 27628 - DNA, 20 bp, synthetic construct
  misc_feature 1..20: note = Description of Artificial Sequence: Synthetic oligonucleotide
  misc_feature 1..20: note = Target: FXN; (-) strand; PAM type: YTN; PAM sequence: TTC
  source 1..20: mol_type = other DNA
ttacaaccacttcaacagca

SEQ ID NO: 27629 - DNA, 20 bp, synthetic construct
  misc_feature 1..20: note = Description of Artificial Sequence: Synthetic oligonucleotide
  misc_feature 1..20: note = Target: FXN; (-) strand; PAM type: YTN; PAM sequence: TTT
  source 1..20: mol_type = other DNA
cttacaaccacttcaacagc

SEQ ID NO: 27630 - DNA, 20 bp, synthetic construct
  misc_feature 1..20: note = Description of Artificial Sequence: Synthetic oligonucleotide
  misc_feature 1..20: note = Target: FXN; (-) strand; PAM type: YTN; PAM sequence: CTT
  source 1..20: mol_type = other DNA
tcttacaaccacttcaacag

SEQ ID NO: 27631 - DNA, 20 bp, synthetic construct
  misc_feature 1..20: note = Description of Artificial Sequence: Synthetic oligonucleotide
  misc_feature 1..20: note = Target: FXN; (-) strand; PAM type: YTN; PAM sequence: TTA
  source 1..20: mol_type = other DNA
ctttcttacaaccacttcaa

SEQ ID NO: 27632 - DNA, 20 bp, synthetic construct
  misc_feature 1..20: note = Description of Artificial Sequence: Synthetic oligonucleotide
  misc_feature 1..20: note = Target: FXN; (-) strand; PAM type: YTN; PAM sequence: TTT
  source 1..20: mol_type = other DNA
actttcttacaaccacttca

SEQ ID NO: 27633 - DNA, 20 bp, synthetic construct
  misc_feature 1..20: note = Description of Artificial Sequence: Synthetic oligonucleotide
  misc_feature 1..20: note = Target: FXN; (-) strand; PAM type: YTN; PAM sequence: TTT
  source 1..20: mol_type = other DNA
tactttcttacaaccacttc

SEQ ID NO: 27634 - DNA, 20 bp, synthetic construct
  misc_feature 1..20: note = Description of Artificial Sequence: Synthetic oligonucleotide
  misc_feature 1..20: note = Target: FXN; (-) strand; PAM type: YTN; PAM sequence: CTT
  source 1..20: mol_type = other DNA
ttactttcttacaaccactt

SEQ ID NO: 27635 - DNA, 20 bp, synthetic construct
  misc_feature 1..20: note = Description of Artificial Sequence: Synthetic oligonucleotide
  misc_feature 1..20: note = Target: FXN; (-) strand; PAM type: YTN; PAM sequence: CTC
  source 1..20: mol_type = other DNA
ttttactttcttacaaccac

SEQ ID NO: 27636 - DNA, 20 bp, synthetic construct
  misc_feature 1..20: note = Description of Artificial Sequence: Synthetic oligonucleotide
  misc_feature 1..20: note = Target: FXN; (-) strand; PAM type: YTN; PAM sequence: TTC
  source 1..20: mol_type = other DNA
tcttttactttcttacaacc

SEQ ID NO: 27637 - DNA, 20 bp, synthetic construct
  misc_feature 1..20: note = Description of Artificial Sequence: Synthetic oligonucleotide
  misc_feature 1..20: note = Target: FXN; (-) strand; PAM type: YTN; PAM sequence: TTT
  source 1..20: mol_type = other DNA
ctcttttactttcttacaac

SEQ ID NO: 27638 - DNA, 20 bp, synthetic construct
  misc_feature 1..20: note = Description of Artificial Sequence: Synthetic oligonucleotide
  misc_feature 1..20: note = Target: FXN; (-) strand; PAM type: YTN; PAM sequence: TTG
  source 1..20: mol_type = other DNA
tgggcatttctcttttactt

SEQ ID NO: 27639 - DNA, 20 bp, synthetic construct
  misc_feature 1..20: note = Description of Artificial Sequence: Synthetic oligonucleotide
  misc_feature 1..20: note = Target: FXN; (-) strand; PAM type: YTN; PAM sequence: TTT
  source 1..20: mol_type = other DNA
gtgggcatttctcttttact

SEQ ID NO: 27640 - DNA, 20 bp, synthetic construct
  misc_feature 1..20: note = Description of Artificial Sequence: Synthetic oligonucleotide
  misc_feature 1..20: note = Target: FXN; (-) strand; PAM type: YTN; PAM sequence: TTT
  source 1..20: mol_type = other DNA
tgtgggcatttctcttttac

SEQ ID NO: 27641 - DNA, 20 bp, synthetic construct
  misc_feature 1..20: note = Description of Artificial Sequence: Synthetic oligonucleotide
  misc_feature 1..20: note = Target: FXN; (-) strand; PAM type: YTN; PAM sequence: CTG
  source 1..20: mol_type = other DNA
agaacgttttgtgggcattt

SEQ ID NO: 27642 - DNA, 20 bp, synthetic construct
  misc_feature 1..20: note = Description of Artificial Sequence: Synthetic oligonucleotide
  misc_feature 1..20: note = Target: FXN; (-) strand; PAM type: YTN; PAM sequence: CTG
  source 1..20: mol_type = other DNA
gatctgagaacgttttgtgg

SEQ ID NO: 27643 - DNA, 20 bp, synthetic construct
  misc_feature 1..20: note = Description of Artificial Sequence: Synthetic oligonucleotide
  misc_feature 1..20: note = Target: FXN; (-) strand; PAM type: YTN; PAM sequence: CTA
  source 1..20: mol_type = other DNA
atgaatgactggatctgaga

SEQ ID NO: 27644 - DNA, 20 bp, synthetic construct
  misc_feature 1..20: note = Description of Artificial Sequence: Synthetic oligonucleotide
  misc_feature 1..20: note = Target: FXN; (-) strand; PAM type: YTN; PAM sequence: TTG
  source 1..20: mol_type = other DNA
gaagtgctaatgaatgactg

SEQ ID NO: 27645 - DNA, 20 bp, synthetic construct
  misc_feature 1..20: note = Description of Artificial Sequence: Synthetic oligonucleotide
  misc_feature 1..20: note = Target: FXN; (-) strand; PAM type: YTN; PAM sequence: TTT
  source 1..20: mol_type = other DNA
ggaagtgctaatgaatgact

SEQ ID NO: 27646 - DNA, 20 bp, synthetic construct
  misc_feature 1..20: note = Description of Artificial Sequence: Synthetic oligonucleotide
  misc_feature 1..20: note = Target: FXN; (-) strand; PAM type: YTN; PAM sequence: CTT
  source 1..20: mol_type = other DNA
tggaagtgctaatgaatgac

SEQ ID NO: 27647 - DNA, 20 bp, synthetic construct
  misc_feature 1..20: note = Description of Artificial Sequence: Synthetic oligonucleotide
  misc_feature 1..20: note = Target: FXN; (-) strand; PAM type: YTN; PAM sequence: CTC
  source 1..20: mol_type = other DNA
tttggaagtgctaatgaatg

SEQ ID NO: 27648 - DNA, 20 bp, synthetic construct
  misc_feature 1..20: note = Description of Artificial Sequence: Synthetic oligonucleotide
  misc_feature 1..20: note = Target: FXN; (-) strand; PAM type: YTN; PAM sequence: CTC
  source 1..20: mol_type = other DNA
tctttggaagtgctaatgaa

SEQ ID NO: 27649 - DNA, 20 bp, synthetic construct
  misc_feature 1..20: note = Description of Artificial Sequence: Synthetic oligonucleotide
  misc_feature 1..20: note = Target: FXN; (-) strand; PAM type: YTN; PAM sequence: TTC
  source 1..20: mol_type = other DNA
acagtcaacatgctctcttt

SEQ ID NO: 27650 - DNA, 20 bp, synthetic construct
  misc_feature 1..20: note = Description of Artificial Sequence: Synthetic oligonucleotide
  misc_feature 1..20: note = Target: FXN; (-) strand; PAM type: YTN; PAM sequence: TTC
  source 1..20: mol_type = other DNA
ccaattcacagtcaacatgc

SEQ ID NO: 27651 - DNA, 20 bp, synthetic construct
  misc_feature 1..20: note = Description of Artificial Sequence: Synthetic oligonucleotide
  misc_feature 1..20: note = Target: FXN; (-) strand; PAM type: YTN; PAM sequence: TTT
  source 1..20: mol_type = other DNA
cccaattcacagtcaacatg

SEQ ID NO: 27652 - DNA, 20 bp, synthetic construct
  misc_feature 1..20: note = Description of Artificial Sequence: Synthetic oligonucleotide
  misc_feature 1..20: note = Target: FXN; (-) strand; PAM type: YTN; PAM sequence: CTT
  source 1..20: mol_type = other DNA
tcccaattcacagtcaacat

SEQ ID NO: 27653 - DNA, 20 bp, synthetic construct
  misc_feature 1..20: note = Description of Artificial Sequence: Synthetic oligonucleotide
  misc_feature 1..20: note = Target: FXN; (-) strand; PAM type: YTN; PAM sequence: CTG
  source 1..20: mol_type = other DNA
gccctttcccaattcacagt

SEQ ID NO: 27654 - DNA, 20 bp, synthetic construct
  misc_feature 1..20: note = Description of Artificial Sequence: Synthetic oligonucleotide
  misc_feature 1..20: note = Target: FXN; (-) strand; PAM type: YTN; PAM sequence: TTA
  source 1..20: mol_type = other DNA
tctggccctttcccaattca

SEQ ID NO: 27655 - DNA, 20 bp, synthetic construct
  misc_feature 1..20: note = Description of Artificial Sequence: Synthetic oligonucleotide
  misc_feature 1..20: note = Target: FXN; (-) strand; PAM type: YTN; PAM sequence: TTT
  source 1..20: mol_type = other DNA
atctggccctttcccaattc

SEQ ID NO: 27656 - DNA, 20 bp, synthetic construct
  misc_feature 1..20: note = Description of Artificial Sequence: Synthetic oligonucleotide
  misc_feature 1..20: note = Target: FXN; (-) strand; PAM type: YTN; PAM sequence: TTT
  source 1..20: mol_type = other DNA
tatctggccctttcccaatt

SEQ ID NO: 27657 - DNA, 20 bp, synthetic construct
  misc_feature 1..20: note = Description of Artificial Sequence: Synthetic oligonucleotide
  misc_feature 1..20: note = Target: FXN; (-) strand; PAM type: YTN; PAM sequence: CTA
  source 1..20: mol_type = other DNA
gttttatctggccctttccc

SEQ ID NO: 27658 - DNA, 20 bp, synthetic construct
  misc_feature 1..20: note = Description of Artificial Sequence: Synthetic oligonucleotide
  misc_feature 1..20: note = Target: FXN; (-) strand; PAM type: YTN; PAM sequence: CTA
  source 1..20: mol_type = other DNA
tgctagttttatctggccct

SEQ ID NO: 27659 - DNA, 20 bp, synthetic construct
  misc_feature 1..20: note = Description of Artificial Sequence: Synthetic oligonucleotide
  misc_feature 1..20: note = Target: FXN; (-) strand; PAM type: YTN; PAM sequence: TTC
  source 1..20: mol_type = other DNA
tatgctagttttatctggcc

SEQ ID NO: 27660 - DNA, 20 bp, synthetic construct
  misc_feature 1..20: note = Description of Artificial Sequence: Synthetic oligonucleotide
  misc_feature 1..20: note = Target: FXN; (-) strand; PAM type: YTN; PAM sequence: TTC
  source 1..20: mol_type = other DNA
aaagaattctatgctagttt

SEQ ID NO: 27661 - DNA, 20 bp, synthetic construct
  misc_feature 1..20: note = Description of Artificial Sequence: Synthetic oligonucleotide
  misc_feature 1..20: note = Target: FXN; (-) strand; PAM type: YTN; PAM sequence: TTT
  source 1..20: mol_type = other DNA
caaagaattctatgctagtt

SEQ ID NO: 27662 - DNA, 20 bp, synthetic construct
  misc_feature 1..20: note = Description of Artificial Sequence: Synthetic oligonucleotide
  misc_feature 1..20: note = Target: FXN; (-) strand; PAM type: YTN; PAM sequence: CTT
  source 1..20: mol_type = other DNA
tcaaagaattctatgctagt

SEQ ID NO: 27663 - DNA, 20 bp, synthetic construct
  misc_feature 1..20: note = Description of Artificial Sequence: Synthetic oligonucleotide
  misc_feature 1..20: note = Target: FXN; (-) strand; PAM type: YTN; PAM sequence: TTA
  source 1..20: mol_type = other DNA
gtctttcaaagaattctatg

SEQ ID NO: 27664 - DNA, 20 bp, synthetic construct
  misc_feature 1..20: note = Description of Artificial Sequence: Synthetic oligonucleotide
  misc_feature 1..20: note = Target: FXN; (-) strand; PAM type: YTN; PAM sequence: TTA
  source 1..20: mol_type = other DNA
aaaaatgcaaataccgttag

SEQ ID NO: 27665 - DNA, 20 bp, synthetic construct
  misc_feature 1..20: note = Description of Artificial Sequence: Synthetic oligonucleotide
  misc_feature 1..20: note = Target: FXN; (-) strand; PAM type: YTN; PAM sequence: TTT
  source 1..20: mol_type = other DNA
aaaaaatgcaaataccgtta

SEQ ID NO: 27666 - DNA, 20 bp, synthetic construct
  misc_feature 1..20: note = Description of Artificial Sequence: Synthetic oligonucleotide
  misc_feature 1..20: note = Target: FXN; (-) strand; PAM type: YTN; PAM sequence: TTT
  source 1..20: mol_type = other DNA
taaaaaatgcaaataccgtt

SEQ ID NO: 27667 - DNA, 20 bp, synthetic construct
  misc_feature 1..20: note = Description of Artificial Sequence: Synthetic oligonucleotide
  misc_feature 1..20: note = Target: FXN; (-) strand; PAM type: YTN; PAM sequence: TTT
  source 1..20: mol_type = other DNA
ttaaaaaatgcaaataccgt

SEQ ID NO: 27668 - DNA, 20 bp, synthetic construct
  misc_feature 1..20: note = Description of Artificial Sequence: Synthetic oligonucleotide
  misc_feature 1..20: note = Target: FXN; (-) strand; PAM type: YTN; PAM sequence: TTA
  source 1..20: mol_type = other DNA
taatttttaaaaaatgcaaa

SEQ ID NO: 27669 - DNA, 20 bp, synthetic construct
  misc_feature 1..20: note = Description of Artificial Sequence: Synthetic oligonucleotide
  misc_feature 1..20: note = Target: FXN; (-) strand; PAM type: YTN; PAM sequence: TTA
  source 1..20: mol_type = other DNA
gggggtagagtaaggttata

SEQ ID NO: 27670 - DNA, 20 bp, synthetic construct
  misc_feature 1..20: note = Description of Artificial Sequence: Synthetic oligonucleotide
  misc_feature 1..20: note = Target: FXN; (-) strand; PAM type: YTN; PAM sequence: CTA
  source 1..20: mol_type = other DNA
aaaatgatgtcaatgttagg

SEQ ID NO: 27671 - DNA, 20 bp, synthetic construct
  misc_feature 1..20: note = Description of Artificial Sequence: Synthetic oligonucleotide
  misc_feature 1..20: note = Target: FXN; (-) strand; PAM type: YTN; PAM sequence: TTA
  source 1..20: mol_type = other DNA
cctaaaaatgatgtcaatgt

SEQ ID NO: 27672 - DNA, 20 bp, synthetic construct
  misc_feature 1..20: note = Description of Artificial Sequence: Synthetic oligonucleotide
  misc_feature 1..20: note = Target: FXN; (-) strand; PAM type: YTN; PAM sequence: TTA
  source 1..20: mol_type = other DNA
attacctaaaaatgatgtca

SEQ ID NO: 27673 - DNA, 20 bp, synthetic construct
  misc_feature 1..20: note = Description of Artificial Sequence: Synthetic oligonucleotide
  misc_feature 1..20: note = Target: FXN; (-) strand; PAM type: YTN; PAM sequence: TTA
  source 1..20: mol_type = other DNA
gagatcacagaataataaat

SEQ ID NO: 27674 - DNA, 20 bp, synthetic construct
  misc_feature 1..20: note = Description of Artificial Sequence: Synthetic oligonucleotide
  misc_feature 1..20: note = Target: FXN; (-) strand; PAM type: YTN; PAM sequence: CTG
  source 1..20: mol_type = other DNA
aacaaagcattagagatcac

SEQ ID NO: 27675 - DNA, 20 bp, synthetic construct
  misc_feature 1..20: note = Description of Artificial Sequence: Synthetic oligonucleotide
  misc_feature 1..20: note = Target: FXN; (-) strand; PAM type: YTN; PAM sequence: TTC
  source 1..20: mol_type = other DNA
tgaacaaagcattagagatc

SEQ ID NO: 27676 - DNA, 20 bp, synthetic construct
  misc_feature 1..20: note = Description of Artificial Sequence: Synthetic oligonucleotide
  misc_feature 1..20: note = Target: FXN; (-) strand; PAM type: YTN; PAM sequence: TTA
  source 1..20: mol_type = other DNA
ttctgaacaaagcattagag

SEQ ID NO: 27677 - DNA, 20 bp, synthetic construct
  misc_feature 1..20: note = Description of Artificial Sequence: Synthetic oligonucleotide
  misc_feature 1..20: note = Target: FXN; (-) strand; PAM type: YTN; PAM sequence: TTT
  source 1..20: mol_type = other DNA
attctgaacaaagcattaga

SEQ ID NO: 27678 - DNA, 20 bp, synthetic construct
  misc_feature 1..20: note = Description of Artificial Sequence: Synthetic oligonucleotide
  misc_feature 1..20: note = Target: FXN; (-) strand; PAM type: YTN; PAM sequence: CTA
  source 1..20: mol_type = other DNA
tttattctgaacaaagcatt

SEQ ID NO: 27679 - DNA, 20 bp, synthetic construct
  misc_feature 1..20: note = Description of Artificial Sequence: Synthetic oligonucleotide
  misc_feature 1..20: note = Target: FXN; (-) strand; PAM type: YTN; PAM sequence: TTG
  source 1..20: mol_type = other DNA
gatgaaagtgtggggaaagg

SEQ ID NO: 27680 - DNA, 20 bp, synthetic construct
  misc_feature 1..20: note = Description of Artificial Sequence: Synthetic oligonucleotide
  misc_feature 1..20: note = Target: FXN; (-) strand; PAM type: YTN; PAM sequence: CTT
  source 1..20: mol_type = other DNA
ggatgaaagtgtggggaaag

SEQ ID NO: 27681 - DNA, 20 bp, synthetic construct
  misc_feature 1..20: note = Description of Artificial Sequence: Synthetic oligonucleotide
  misc_feature 1..20: note = Target: FXN; (-) strand; PAM type: YTN; PAM sequence: TTC
  source 1..20: mol_type = other DNA
ttggatgaaagtgtggggaa

SEQ ID NO: 27682 - DNA, 20 bp, synthetic construct
  misc_feature 1..20: note = Description of Artificial Sequence: Synthetic oligonucleotide
  misc_feature 1..20: note = Target: FXN; (-) strand; PAM type: YTN; PAM sequence: CTT
  source 1..20: mol_type = other DNA
cttggatgaaagtgtgggga

SEQ ID NO: 27683 - DNA, 20 bp, synthetic construct
  misc_feature 1..20: note = Description of Artificial Sequence: Synthetic oligonucleotide
  misc_feature 1..20: note = Target: FXN; (-) strand; PAM type: YTN; PAM sequence: CTA
  source 1..20: mol_type = other DNA
gcacacttcttggatgaaag

SEQ ID NO: 27684 - DNA, 20 bp, synthetic construct
  misc_feature 1..20: note = Description of Artificial Sequence: Synthetic oligonucleotide
  misc_feature 1..20: note = Target: FXN; (-) strand; PAM type: YTN; PAM sequence: CTC
  source 1..20: mol_type = other DNA
tagcacacttcttggatgaa

SEQ ID NO: 27685 - DNA, 20 bp, synthetic construct
  misc_feature 1..20: note = Description of Artificial Sequence: Synthetic oligonucleotide
  misc_feature 1..20: note = Target: FXN; (-) strand; PAM type: YTN; PAM sequence: TTG
  source 1..20: mol_type = other DNA
aactctagcacacttcttgg

SEQ ID NO: 27686 - DNA, 20 bp, synthetic construct
  misc_feature 1..20: note = Description of Artificial Sequence: Synthetic oligonucleotide
  misc_feature 1..20: note = Target: FXN; (-) strand; PAM type: YTN; PAM sequence: TTG
  source 1..20: mol_type = other DNA
ttgaactctagcacacttct

SEQ ID NO: 27687 - DNA, 20 bp, synthetic construct
  misc_feature 1..20: note = Description of Artificial Sequence: Synthetic oligonucleotide
  misc_feature 1..20: note = Target: FXN; (-) strand; PAM type: YTN; PAM sequence: TTT
  source 1..20: mol_type = other DNA
gttgaactctagcacacttc

SEQ ID NO: 27688 - DNA, 20 bp, synthetic construct
  misc_feature 1..20: note = Description of Artificial Sequence: Synthetic oligonucleotide
  misc_feature 1..20: note = Target: FXN; (-) strand; PAM type: YTN; PAM sequence: TTT
  source 1..20: mol_type = other DNA
tgttgaactctagcacactt

SEQ ID NO: 27689 - DNA, 20 bp, synthetic construct
  misc_feature 1..20: note = Description of Artificial Sequence: Synthetic oligonucleotide
  misc_feature 1..20: note = Target: FXN; (-) strand; PAM type: YTN; PAM sequence: TTT
  source 1..20: mol_type = other DNA
ttgttgaactctagcacact

SEQ ID NO: 27690 - DNA, 20 bp, synthetic construct
  misc_feature 1..20: note = Description of Artificial Sequence: Synthetic oligonucleotide
  misc_feature 1..20: note = Target: FXN; (-) strand; PAM type: YTN; PAM sequence: CTG
  source 1..20: mol_type = other DNA
tttttgttgaactctagcac

SEQ ID NO: 27691 - DNA, 20 bp, synthetic construct
  misc_feature 1..20: note = Description of Artificial Sequence: Synthetic oligonucleotide
  misc_feature 1..20: note = Target: FXN; (-) strand; PAM type: YTN; PAM sequence: CTA
  source 1..20: mol_type = other DNA
gtgctgtttttgttgaactc

SEQ ID NO: 27692 - DNA, 20 bp, synthetic construct
  misc_feature 1..20: note = Description of Artificial Sequence: Synthetic oligonucleotide
  misc_feature 1..20: note = Target: FXN; (-) strand; PAM type: YTN; PAM sequence: TTC
  source 1..20: mol_type = other DNA
tagtgctgtttttgttgaac

SEQ ID NO: 27693 - DNA, 20 bp, synthetic construct
  misc_feature 1..20: note = Description of Artificial Sequence: Synthetic oligonucleotide
  misc_feature 1..20: note = Target: FXN; (-) strand; PAM type: YTN; PAM sequence: TTT
  source 1..20: mol_type = other DNA
ctagtgctgtttttgttgaa

SEQ ID NO: 27694 - DNA, 20 bp, synthetic construct
  misc_feature 1..20: note = Description of Artificial Sequence: Synthetic oligonucleotide
  misc_feature 1..20: note = Target: FXN; (-) strand; PAM type: YTN; PAM sequence: CTA
  source 1..20: mol_type = other DNA
gaatgacagtgatttctagt

SEQ ID NO: 27695 - DNA, 20 bp, synthetic construct
  misc_feature 1..20: note = Description of Artificial Sequence: Synthetic oligonucleotide
  misc_feature 1..20: note = Target: FXN; (-) strand; PAM type: YTN; PAM sequence: TTC
  source 1..20: mol_type = other DNA
ctagaatgacagtgatttct

SEQ ID NO: 27696 - DNA, 20 bp, synthetic construct
  misc_feature 1..20: note = Description of Artificial Sequence: Synthetic oligonucleotide
  misc_feature 1..20: note = Target: FXN; (-) strand; PAM type: YTN; PAM sequence: CTT
  source 1..20: mol_type = other DNA
cctagaatgacagtgatttc

SEQ ID NO: 27697 - DNA, 20 bp, synthetic construct
  misc_feature 1..20: note = Description of Artificial Sequence: Synthetic oligonucleotide
  misc_feature 1..20: note = Target: FXN; (-) strand; PAM type: YTN; PAM sequence: TTA
  source 1..20: mol_type = other DNA
gggccttcctagaatgacag

SEQ ID NO: 27698 - DNA, 20 bp, synthetic construct
  misc_feature 1..20: note = Description of Artificial Sequence: Synthetic oligonucleotide
  misc_feature 1..20: note = Target: FXN; (-) strand; PAM type: YTN; PAM sequence: CTG
  source 1..20: mol_type = other DNA
tgaattagggccttcctaga

SEQ ID NO: 27699 - DNA, 20 bp, synthetic construct
  misc_feature 1..20: note = Description of Artificial Sequence: Synthetic oligonucleotide
  misc_feature 1..20: note = Target: FXN; (-) strand; PAM type: YTN; PAM sequence: CTA
  source 1..20: mol_type = other DNA
aaaaccaatacaatctgtga

SEQ ID NO: 27700 - DNA, 20 bp, synthetic construct
  misc_feature 1..20: note = Description of Artificial Sequence: Synthetic oligonucleotide
  misc_feature 1..20: note = Target: FXN; (-) strand; PAM type: YTN; PAM sequence: CTG
  source 1..20: mol_type = other DNA
ggtctaaaaaccaatacaat

SEQ ID NO: 27701 - DNA, 20 bp, synthetic construct
  misc_feature 1..20: note = Description of Artificial Sequence: Synthetic oligonucleotide
  misc_feature 1..20: note = Target: FXN; (-) strand; PAM type: YTN; PAM sequence: CTA
  source 1..20: mol_type = other DNA
actgggtctaaaaaccaata

SEQ ID NO: 27702 - DNA, 20 bp, synthetic construct
  misc_feature 1..20: note = Description of Artificial Sequence: Synthetic oligonucleotide
  misc_feature 1..20: note = Target: FXN; (-) strand; PAM type: YTN; PAM sequence: CTC
  source 1..20: mol_type = other DNA
cagcacactaactgggtcta

SEQ ID NO: 27703 - DNA, 20 bp, synthetic construct
  misc_feature 1..20: note = Description of Artificial Sequence: Synthetic oligonucleotide
  misc_feature 1..20: note = Target: FXN; (-) strand; PAM type: YTN; PAM sequence: CTC
  source 1..20: mol_type = other DNA
caacctccagcacactaact

SEQ ID NO: 27704 - DNA, 20 bp, synthetic construct
  misc_feature 1..20: note = Description of Artificial Sequence: Synthetic oligonucleotide
  misc_feature 1..20: note = Target: FXN; (-) strand; PAM type: YTN; PAM sequence: TTA
  source 1..20: mol_type = other DNA
aaatcctccaacctccagca

SEQ ID NO: 27705 - DNA, 20 bp, synthetic construct
  misc_feature 1..20: note = Description of Artificial Sequence: Synthetic oligonucleotide
  misc_feature 1..20: note = Target: FXN; (-) strand; PAM type: YTN; PAM sequence: TTG
  source 1..20: mol_type = other DNA
gcccacagaggttaaaatcc

SEQ ID NO: 27706 - DNA, 20 bp, synthetic construct
  misc_feature 1..20: note = Description of Artificial Sequence: Synthetic oligonucleotide
  misc_feature 1..20: note = Target: FXN; (-) strand; PAM type: YTN; PAM sequence: CTA
  source 1..20: mol_type = other DNA
gttggcccacagaggttaaa

SEQ ID NO: 27707 - DNA, 20 bp, synthetic construct
  misc_feature 1..20: note = Description of Artificial Sequence: Synthetic oligonucleotide
  misc_feature 1..20: note = Target: FXN; (-) strand; PAM type: YTN; PAM sequence: CTG
  source 1..20: mol_type = other DNA
aggccacagaggctagttgg

SEQ ID NO: 27708 - DNA, 20 bp, synthetic construct
  misc_feature 1..20: note = Description of Artificial Sequence: Synthetic oligonucleotide
  misc_feature 1..20: note = Target: FXN; (-) strand; PAM type: YTN; PAM sequence: CTC
  source 1..20: mol_type = other DNA
aagcacagccagggtcagga

SEQ ID NO: 27709 - DNA, 20 bp, synthetic construct
  misc_feature 1..20: note = Description of Artificial Sequence: Synthetic oligonucleotide
  misc_feature 1..20: note = Target: FXN; (-) strand; PAM type: YTN; PAM sequence: TTC
  source 1..20: mol_type = other DNA
ccccggagatgaaggataag

SEQ ID NO: 27710 - DNA, 20 bp, synthetic construct
  misc_feature 1..20: note = Description of Artificial Sequence: Synthetic oligonucleotide
  misc_feature 1..20: note = Target: FXN; (-) strand; PAM type: YTN; PAM sequence: TTC
  source 1..20: mol_type = other DNA
gttcccccggagatgaagga

SEQ ID NO: 27711 - DNA, 20 bp, synthetic construct
  misc_feature 1..20: note = Description of Artificial Sequence: Synthetic oligonucleotide
  misc_feature 1..20: note = Target: FXN; (-) strand; PAM type: YTN; PAM sequence: CTT
  source 1..20: mol_type = other DNA
cgttcccccggagatgaagg

SEQ ID NO: 27712 - DNA, 20 bp, synthetic construct
  misc_feature 1..20: note = Description of Artificial Sequence: Synthetic oligonucleotide
  misc_feature 1..20: note = Target: FXN; (-) strand; PAM type: YTN; PAM sequence: CTG
  source 1..20: mol_type = other DNA
atccacttcgttcccccgga

SEQ ID NO: 27713 - DNA, 20 bp, synthetic construct
  misc_feature 1..20: note = Description of Artificial Sequence: Synthetic oligonucleotide
  misc_feature 1..20: note = Target: FXN; (-) strand; PAM type: YTN; PAM sequence: CTG
  source 1..20: mol_type = other DNA
gaccgagctgatccacttcg

SEQ ID NO: 27714 - DNA, 20 bp, synthetic construct
  misc_feature 1..20: note = Description of Artificial Sequence: Synthetic oligonucleotide
  misc_feature 1..20: note = Target: FXN; (-) strand; PAM type: YTN; PAM sequence: CTG
  source 1..20: mol_type = other DNA
atccccaaaagtgatcgctg

SEQ ID NO: 27715 - DNA, 20 bp, synthetic construct
  misc_feature 1..20: note = Description of Artificial Sequence: Synthetic oligonucleotide
  misc_feature 1..20: note = Target: FXN; (-) strand; PAM type: YTN; PAM sequence: CTA
  source 1..20: mol_type = other DNA
caaagccactgatccccaaa

SEQ ID NO: 27716 - DNA, 20 bp, synthetic construct
  misc_feature 1..20: note = Description of Artificial Sequence: Synthetic oligonucleotide
  misc_feature 1..20: note = Target: FXN; (-) strand; PAM type: YTN; PAM sequence: CTG
  source 1..20: mol_type = other DNA
cccgatatctacaaagccac

SEQ ID NO: 27717 - DNA, 20 bp, synthetic construct
  misc_feature 1..20: note = Description of Artificial Sequence: Synthetic oligonucleotide
  misc_feature 1..20: note = Target: FXN; (-) strand; PAM type: YTN; PAM sequence: TTG
  source 1..20: mol_type = other DNA
gggtaagtgcctgcccgata

SEQ ID NO: 27718 - DNA, 20 bp, synthetic construct
  misc_feature 1..20: note = Description of Artificial Sequence: Synthetic oligonucleotide
  misc_feature 1..20: note = Target: FXN; (-) strand; PAM type: YTN; PAM sequence: TTT
  source 1..20: mol_type = other DNA
ggggtaagtgcctgcccgat

SEQ ID NO: 27719 - DNA, 20 bp, synthetic construct
  misc_feature 1..20: note = Description of Artificial Sequence: Synthetic oligonucleotide
  misc_feature 1..20: note = Target: FXN; (-) strand; PAM type: YTN; PAM sequence: TTT
  source 1..20: mol_type = other DNA
tggggtaagtgcctgcccga

SEQ ID NO: 27720 - DNA, 20 bp, synthetic construct
  misc_feature 1..20: note = Description of Artificial Sequence: Synthetic oligonucleotide
  misc_feature 1..20: note = Target: FXN; (-) strand; PAM type: YTN; PAM sequence: CTT
  source 1..20: mol_type = other DNA
ttggggtaagtgcctgcccg

SEQ ID NO: 27721 - DNA, 20 bp, synthetic construct
  misc_feature 1..20: note = Description of Artificial Sequence: Synthetic oligonucleotide
  misc_feature 1..20: note = Target: FXN; (-) strand; PAM type: YTN; PAM sequence: TTC
  source 1..20: mol_type = other DNA
ttttggggtaagtgcctgcc

SEQ ID NO: 27722 - DNA, 20 bp, synthetic construct
  misc_feature 1..20: note = Description of Artificial Sequence: Synthetic oligonucleotide
  misc_feature 1..20: note = Target: FXN; (-) strand; PAM type: YTN; PAM sequence: TTC
  source 1..20: mol_type = other DNA
agatatggggaaagttcttt

SEQ ID NO: 27723 - DNA, 20 bp, synthetic construct
  misc_feature 1..20: note = Description of Artificial Sequence: Synthetic oligonucleotide
  misc_feature 1..20: note = Target: FXN; (-) strand; PAM type: YTN; PAM sequence: CTT
  source 1..20: mol_type = other DNA
cagatatggggaaagttctt

SEQ ID NO: 27724 - DNA, 20 bp, synthetic construct
  misc_feature 1..20: note = Description of Artificial Sequence: Synthetic oligonucleotide
  misc_feature 1..20: note = Target: FXN; (-) strand; PAM type: YTN; PAM sequence: TTC
  source 1..20: mol_type = other DNA
agtcttcagatatggggaaa

SEQ ID NO: 27725 - DNA, 20 bp, synthetic construct
  misc_feature 1..20: note = Description of Artificial Sequence: Synthetic oligonucleotide
  misc_feature 1..20: note = Target: FXN; (-) strand; PAM type: YTN; PAM sequence: TTT
  source 1..20: mol_type = other DNA
cagtcttcagatatggggaa

SEQ ID NO: 27726 - DNA, 20 bp, synthetic construct
  misc_feature 1..20: note = Description of Artificial Sequence: Synthetic oligonucleotide
  misc_feature 1..20: note = Target: FXN; (-) strand; PAM type: YTN; PAM sequence: TTT
  source 1..20: mol_type = other DNA
tcagtcttcagatatgggga

SEQ ID NO: 27727 - DNA, 20 bp, synthetic construct
  misc_feature 1..20: note = Description of Artificial Sequence: Synthetic oligonucleotide
  misc_feature 1..20: note = Target: FXN; (-) strand; PAM type: YTN; PAM sequence: CTG
  source 1..20: mol_type = other DNA
ggcagtgtgtccaaatacga

SEQ ID NO: 27728 - DNA, 20 bp, synthetic construct
  misc_feature 1..20: note = Description of Artificial Sequence: Synthetic oligonucleotide
  misc_feature 1..20: note = Target: FXN; (-) strand; PAM type: YTN; PAM sequence: TTG
  source 1..20: mol_type = other DNA
ctgggcagtgtgtccaaata

SEQ ID NO: 27729 - DNA, 20 bp, synthetic construct
  misc_feature 1..20: note = Description of Artificial Sequence: Synthetic oligonucleotide
  misc_feature 1..20: note = Target: FXN; (-) strand; PAM type: YTN; PAM sequence: CTA
  source 1..20: mol_type = other DNA
gagcgtattgctgggcagtg

SEQ ID NO: 27730 - DNA, 20 bp, synthetic construct
  misc_feature 1..20: note = Description of Artificial Sequence: Synthetic oligonucleotide
  misc_feature 1..20: note = Target: FXN; (-) strand; PAM type: YTN; PAM sequence: CTG
  source 1..20: mol_type = other DNA
aacacagctagagcgtattg

SEQ ID NO: 27731 - DNA, 20 bp, synthetic construct
  misc_feature 1..20: note = Description of Artificial Sequence: Synthetic oligonucleotide
  misc_feature 1..20: note = Target: FXN; (-) strand; PAM type: YTN; PAM sequence: TTC
  source 1..20: mol_type = other DNA
tgaacacagctagagcgtat

SEQ ID NO: 27732 - DNA, 20 bp, synthetic construct
  misc_feature 1..20: note = Description of Artificial Sequence: Synthetic oligonucleotide
  misc_feature 1..20: note = Target: FXN; (-) strand; PAM type: YTN; PAM sequence: CTT
  source 1..20: mol_type = other DNA
ctgaacacagctagagcgta

SEQ ID NO: 27733 - DNA, 20 bp, synthetic construct
  misc_feature 1..20: note = Description of Artificial Sequence: Synthetic oligonucleotide
  misc_feature 1..20: note = Target: FXN; (-) strand; PAM type: YTN; PAM sequence: TTC
  source 1..20: mol_type = other DNA
ccatgcttctgaacacagct

SEQ ID NO: 27734 - DNA, 20 bp, synthetic construct
  misc_feature 1..20: note = Description of Artificial Sequence: Synthetic oligonucleotide
  misc_feature 1..20: note = Target: FXN; (-) strand; PAM type: YTN; PAM sequence: TTC
  source 1..20: mol_type = other DNA
caaattcccatgcttctgaa

SEQ ID NO: 27735 - DNA, 20 bp, synthetic construct
  misc_feature 1..20: note = Description of Artificial Sequence: Synthetic oligonucleotide
  misc_feature 1..20: note = Target: FXN; (-) strand; PAM type: YTN; PAM sequence: TTT
  source 1..20: mol_type = other DNA
ccaaattcccatgcttctga

SEQ ID NO: 27736 - DNA, 20 bp, synthetic construct
  misc_feature 1..20: note = Description of Artificial Sequence: Synthetic oligonucleotide
  misc_feature 1..20: note = Target: FXN; (-) strand; PAM type: YTN; PAM sequence: CTT
  source 1..20: mol_type = other DNA
tccaaattcccatgcttctg

SEQ ID NO: 27737 - DNA, 20 bp, synthetic construct
  misc_feature 1..20: note = Description of Artificial Sequence: Synthetic oligonucleotide
  misc_feature 1..20: note = Target: FXN; (-) strand; PAM type: YTN; PAM sequence: CTC
  source 1..20: mol_type = other DNA
agcagatctttccaaattcc

SEQ ID NO: 27738 - DNA, 20 bp, synthetic construct
  misc_feature 1..20: note = Description of Artificial Sequence: Synthetic oligonucleotide
  misc_feature 1..20: note = Target: FXN; (-) strand; PAM type: YTN; PAM sequence: CTG
  source 1..20: mol_type = other DNA
tgacagtaaacggcatgctc

SEQ ID NO: 27739 - DNA, 20 bp, synthetic construct
  misc_feature 1..20: note = Description of Artificial Sequence: Synthetic oligonucleotide
  misc_feature 1..20: note = Target: FXN; (-) strand; PAM type: YTN; PAM sequence: TTG
  source 1..20: mol_type = other DNA
aggaagatagtatctgtgac

SEQ ID NO: 27740 - DNA, 20 bp, synthetic construct
  misc_feature 1..20: note = Description of Artificial Sequence: Synthetic oligonucleotide
  misc_feature 1..20: note = Target: FXN; (-) strand; PAM type: YTN; PAM sequence: TTT
  source 1..20: mol_type = other DNA
gaggaagatagtatctgtga

SEQ ID NO: 27741 - DNA, 20 bp, synthetic construct
  misc_feature 1..20: note = Description of Artificial Sequence: Synthetic oligonucleotide
  misc_feature 1..20: note = Target: FXN; (-) strand; PAM type: YTN; PAM sequence: TTT
  source 1..20: mol_type = other DNA
tgaggaagatagtatctgtg

SEQ ID NO: 27742 - DNA, 20 bp, synthetic construct
  misc_feature 1..20: note = Description of Artificial Sequence: Synthetic oligonucleotide
  misc_feature 1..20: note = Target: FXN; (-) strand; PAM type: YTN; PAM sequence: TTT
  source 1..20: mol_type = other DNA
ttgaggaagatagtatctgt

SEQ ID NO: 27743 - DNA, 20 bp, synthetic construct
  misc_feature 1..20: note = Description of Artificial Sequence: Synthetic oligonucleotide
  misc_feature 1..20: note = Target: FXN; (-) strand; PAM type: YTN; PAM sequence: TTT
  source 1..20: mol_type = other DNA
tttgaggaagatagtatctg

SEQ ID NO: 27744 - DNA, 20 bp, synthetic construct
  misc_feature 1..20: note = Description of Artificial Sequence: Synthetic oligonucleotide
  misc_feature 1..20: note = Target: FXN; (-) strand; PAM type: YTN; PAM sequence: TTT
  source 1..20: mol_type = other DNA
ttttgaggaagatagtatct

SEQ ID NO: 27745 - DNA, 20 bp, synthetic construct
  misc_feature 1..20: note = Description of Artificial Sequence: Synthetic oligonucleotide
  misc_feature 1..20: note = Target: FXN; (-) strand; PAM type: YTN; PAM sequence: TTT
  source 1..20: mol_type = other DNA
tttttgaggaagatagtatc

SEQ ID NO: 27746 - DNA, 20 bp, synthetic construct
  misc_feature 1..20: note = Description of Artificial Sequence: Synthetic oligonucleotide
  misc_feature 1..20: note = Target: FXN; (-) strand; PAM type: YTN; PAM sequence: TTT
  source 1..20: mol_type = other DNA
ttttttgaggaagatagtat

SEQ ID NO: 27747 - DNA, 20 bp, synthetic construct
  misc_feature 1..20: note = Description of Artificial Sequence: Synthetic oligonucleotide
  misc_feature 1..20: note = Target: FXN; (-) strand; PAM type: YTN; PAM sequence: TTT
  source 1..20: mol_type = other DNA
tttttttgaggaagatagta

SEQ ID NO: 27748 - DNA, 20 bp, synthetic construct
  misc_feature 1..20: note = Description of Artificial Sequence: Synthetic oligonucleotide
  misc_feature 1..20: note = Target: FXN; (-) strand; PAM type: YTN; PAM sequence: TTT
  source 1..20: mol_type = other DNA
ttttttttgaggaagatagt

SEQ ID NO: 27749 - DNA, 20 bp, synthetic construct
  misc_feature 1..20: note = Description of Artificial Sequence: Synthetic oligonucleotide
  misc_feature 1..20: note = Target: FXN; (-) strand; PAM type: YTN; PAM sequence: TTT
  source 1..20: mol_type = other DNA
tttttttttgaggaagatag

SEQ ID NO: 27750 - DNA, 20 bp, synthetic construct
  misc_feature 1..20: note = Description of Artificial Sequence: Synthetic oligonucleotide
  misc_feature 1..20: note = Target: FXN; (-) strand; PAM type: YTN; PAM sequence: CTG
  source 1..20: mol_type = other DNA
ccccgtcccccatatatata

SEQ ID NO: 27751 - DNA, 20 bp, synthetic construct
  misc_feature 1..20: note = Description of Artificial Sequence: Synthetic oligonucleotide
  misc_feature 1..20: note = Target: FXN; (-) strand; PAM type: YTN; PAM sequence: CTC
  source 1..20: mol_type = other DNA
aacctgccccgtcccccata

SEQ ID NO: 27752 - DNA, 20 bp, synthetic construct
  misc_feature 1..20: note = Description of Artificial Sequence: Synthetic oligonucleotide
  misc_feature 1..20: note = Target: FXN; (-) strand; PAM type: YTN; PAM sequence: CTC
  source 1..20: mol_type = other DNA
acccagtctcaacctgcccc

SEQ ID NO: 27753 - DNA, 20 bp, synthetic construct
  misc_feature 1..20: note = Description of Artificial Sequence: Synthetic oligonucleotide
  misc_feature 1..20: note = Target: FXN; (-) strand; PAM type: YTN; PAM sequence: TTC
  source 1..20: mol_type = other DNA
agtctcacccagtctcaacc

SEQ ID NO: 27754 - DNA, 20 bp, synthetic construct
  misc_feature 1..20: note = Description of Artificial Sequence: Synthetic oligonucleotide
  misc_feature 1..20: note = Target: FXN; (-) strand; PAM type: YTN; PAM sequence: CTT
  source 1..20: mol_type = other DNA
cagtctcacccagtctcaac

SEQ ID NO: 27755 - DNA, 20 bp, synthetic construct
  misc_feature 1..20: note = Description of Artificial Sequence: Synthetic oligonucleotide
  misc_feature 1..20: note = Target: FXN; (-) strand; PAM type: YTN; PAM sequence: CTC
  source 1..20: mol_type = other DNA
ttcagtctcacccagtctca

SEQ ID NO: 27756 - DNA, 20 bp, synthetic construct
  misc_feature 1..20: note = Description of Artificial Sequence: Synthetic oligonucleotide
  misc_feature 1..20: note = Target: FXN; (-) strand; PAM type: YTN; PAM sequence: CTG
  source 1..20: mol_type = other DNA
gccaaggcacctcttcagtc

SEQ ID NO: 27757 - DNA, 20 bp, synthetic construct
  misc_feature 1..20: note = Description of Artificial Sequence: Synthetic oligonucleotide
  misc_feature 1..20: note = Target: FXN; (-) strand; PAM type: YTN; PAM sequence: CTC
  source 1..20: mol_type = other DNA
tggccaaggcacctcttcag

SEQ ID NO: 27758 - DNA, 20 bp, synthetic construct
  misc_feature 1..20: note = Description of Artificial Sequence: Synthetic oligonucleotide
  misc_feature 1..20: note = Target: FXN; (-) strand; PAM type: YTN; PAM sequence: CTG
  source 1..20: mol_type = other DNA
ctctggccaaggcacctctt

SEQ ID NO: 27759 - DNA, 20 bp, synthetic construct
  misc_feature 1..20: note = Description of Artificial Sequence: Synthetic oligonucleotide
  misc_feature 1..20: note = Target: FXN; (-) strand; PAM type: YTN; PAM sequence: CTG
  source 1..20: mol_type = other DNA
ggtgtggcctgctctggcca

SEQ ID NO: 27760 - DNA, 20 bp, synthetic construct
  misc_feature 1..20: note = Description of Artificial Sequence: Synthetic oligonucleotide
  misc_feature 1..20: note = Target: FXN; (-) strand; PAM type: YTN; PAM sequence: CTC
  source 1..20: mol_type = other DNA
tgggtgtggcctgctctggc

SEQ ID NO: 27761 - DNA, 20 bp, synthetic construct
  misc_feature 1..20: note = Description of Artificial Sequence: Synthetic oligonucleotide
  misc_feature 1..20: note = Target: FXN; (-) strand; PAM type: YTN; PAM sequence: CTG
  source 1..20: mol_type = other DNA
tggtctctgggtgtggcctg

SEQ ID NO: 27762 - DNA, 20 bp, synthetic construct
  misc_feature 1..20: note = Description of Artificial Sequence: Synthetic oligonucleotide
  misc_feature 1..20: note = Target: FXN; (-) strand; PAM type: YTN; PAM sequence: CTG
  source 1..20: mol_type = other DNA
aggtggaccggggagcctgt

SEQ ID NO: 27763 - DNA, 20 bp, synthetic construct
  misc_feature 1..20: note = Description of Artificial Sequence: Synthetic oligonucleotide
  misc_feature 1..20: note = Target: FXN; (-) strand; PAM type: YTN; PAM sequence: CTG
  source 1..20: mol_type = other DNA
ccggaaacggcgcaggaagg

SEQ ID NO: 27764 - DNA, 20 bp, synthetic construct
  misc_feature 1..20: note = Description of Artificial Sequence: Synthetic oligonucleotide
  misc_feature 1..20: note = Target: FXN; (-) strand; PAM type: YTN; PAM sequence: CTG
  source 1..20: mol_type = other DNA
gatctgccggaaacggcgca

SEQ ID NO: 27765 - DNA, 20 bp, synthetic construct
  misc_feature 1..20: note = Description of Artificial Sequence: Synthetic oligonucleotide
  misc_feature 1..20: note = Target: FXN; (-) strand; PAM type: YTN; PAM sequence: CTC
  source 1..20: mol_type = other DNA
tggatctgccggaaacggcg

SEQ ID NO: 27766 - DNA, 20 bp, synthetic construct
  misc_feature 1..20: note = Description of Artificial Sequence: Synthetic oligonucleotide
  misc_feature 1..20: note = Target: FXN; (-) strand; PAM type: YTN; PAM sequence: CTC
  source 1..20: mol_type = other DNA
ccatccggcggtggccactc

SEQ ID NO: 27767 - DNA, 20 bp, synthetic construct
  misc_feature 1..20: note = Description of Artificial Sequence: Synthetic oligonucleotide
  misc_feature 1..20: note = Target: FXN; (-) strand; PAM type: YTN; PAM sequence: TTC
  source 1..20: mol_type = other DNA
ccccgactcccatccggcgg

SEQ ID NO: 27768 - DNA, 20 bp, synthetic construct
  misc_feature 1..20: note = Description of Artificial Sequence: Synthetic oligonucleotide
  misc_feature 1..20: note = Target: FXN; (-) strand; PAM type: YTN; PAM sequence: CTT
  source 1..20: mol_type = other DNA
cccccgactcccatccggcg

SEQ ID NO: 27769 - DNA, 20 bp, synthetic construct
  misc_feature 1..20: note = Description of Artificial Sequence: Synthetic oligonucleotide
  misc_feature 1..20: note = Target: FXN; (-) strand; PAM type: YTN; PAM sequence: CTC
  source 1..20: mol_type = other DNA
ccttcccccgactcccatcc

SEQ ID NO: 27770 - DNA, 20 bp, synthetic construct
  misc_feature 1..20: note = Description of Artificial Sequence: Synthetic oligonucleotide
  misc_feature 1..20: note = Target: FXN; (-) strand; PAM type: YTN; PAM sequence: CTG
  source 1..20: mol_type = other DNA
cctcccttcccccgactccc

SEQ ID NO: 27771 - DNA, 20 bp, synthetic construct
  misc_feature 1..20: note = Description of Artificial Sequence: Synthetic oligonucleotide
  misc_feature 1..20: note = Target: FXN; (-) strand; PAM type: YTN; PAM sequence: CTC
  source 1..20: mol_type = other DNA
tgcctcccttcccccgactc

SEQ ID NO: 27772 - DNA, 20 bp, synthetic construct
  misc_feature 1..20: note = Description of Artificial Sequence: Synthetic oligonucleotide
  misc_feature 1..20: note = Target: FXN; (-) strand; PAM type: YTN; PAM sequence: TTC
  source 1..20: mol_type = other DNA
tctgcctcccttcccccgac

SEQ ID NO: 27773 - DNA, 20 bp, synthetic construct
  misc_feature 1..20: note = Description of Artificial Sequence: Synthetic oligonucleotide
  misc_feature 1..20: note = Target: FXN; (-) strand; PAM type: YTN; PAM sequence: CTT
  source 1..20: mol_type = other DNA
ctctgcctcccttcccccga

SEQ ID NO: 27774 - DNA, 20 bp, synthetic construct
  misc_feature 1..20: note = Description of Artificial Sequence: Synthetic oligonucleotide
  misc_feature 1..20: note = Target: FXN; (-) strand; PAM type: YTN; PAM sequence: CTC
  source 1..20: mol_type = other DNA
agggcccgcttctctgcctc

SEQ ID NO: 27775 - DNA, 20 bp, synthetic construct
  misc_feature 1..20: note = Description of Artificial Sequence: Synthetic oligonucleotide
  misc_feature 1..20: note = Target: FXN; (-) strand; PAM type: YTN; PAM sequence: TTG
  source 1..20: mol_type = other DNA
tcctcagggcccgcttctct

SEQ ID NO: 27776 - DNA, 20 bp, synthetic construct
  misc_feature 1..20: note = Description of Artificial Sequence: Synthetic oligonucleotide
  misc_feature 1..20: note = Target: FXN; (-) strand; PAM type: YTN; PAM sequence: CTT
  source 1..20: mol_type = other DNA
gtcctcagggcccgcttctc

SEQ ID NO: 27777 - DNA, 20 bp, synthetic construct
  misc_feature 1..20: note = Description of Artificial Sequence: Synthetic oligonucleotide
  misc_feature 1..20: note = Target: FXN; (-) strand; PAM type: YTN; PAM sequence: CTG
  source 1..20: mol_type = other DNA
agagcttgtcctcagggccc

SEQ ID NO: 27778 - DNA, 20 bp, synthetic construct
  misc_feature 1..20: note = Description of Artificial Sequence: Synthetic oligonucleotide
  misc_feature 1..20: note = Target: FXN; (-) strand; PAM type: YTN; PAM sequence: TTC
  source 1..20: mol_type = other DNA
ccacagaagcactgagagct

SEQ ID NO: 27779 - DNA, 20 bp, synthetic construct
  misc_feature 1..20: note = Description of Artificial Sequence: Synthetic oligonucleotide
  misc_feature 1..20: note = Target: FXN; (-) strand; PAM type: YTN; PAM sequence: CTT
  source 1..20: mol_type = other DNA
cccacagaagcactgagagc

SEQ ID NO: 27780 - DNA, 20 bp, synthetic construct
  misc_feature 1..20: note = Description of Artificial Sequence: Synthetic oligonucleotide
  misc_feature 1..20: note = Target: FXN; (-) strand; PAM type: YTN; PAM sequence: TTG
  source 1..20: mol_type = other DNA
ccgccacttcccacagaagc

SEQ ID NO: 27781 - DNA, 20 bp, synthetic construct
  misc_feature 1..20: note = Description of Artificial Sequence: Synthetic oligonucleotide
  misc_feature 1..20: note = Target: FXN; (-) strand; PAM type: YTN; PAM sequence: CTT
  source 1..20: mol_type = other DNA
gccgccacttcccacagaag

SEQ ID NO: 27782 - DNA, 20 bp, synthetic construct
  misc_feature 1..20: note = Description of Artificial Sequence: Synthetic oligonucleotide
  misc_feature 1..20: note = Target: FXN; (-) strand; PAM type: YTN; PAM sequence: CTG
  source 1..20: mol_type = other DNA
ccgtcttgccgccacttccc

SEQ ID NO: 27783 - DNA, 20 bp, synthetic construct
  misc_feature 1..20: note = Description of Artificial Sequence: Synthetic oligonucleotide
  misc_feature 1..20: note = Target: FXN; (-) strand; PAM type: YTN; PAM sequence: CTG
  source 1..20: mol_type = other DNA
ggagctgccgtcttgccgcc

SEQ ID NO: 27784 - DNA, 20 bp, synthetic construct
  misc_feature 1..20: note = Description of Artificial Sequence: Synthetic oligonucleotide
  misc_feature 1..20: note = Target: FXN; (-) strand; PAM type: YTN; PAM sequence: CTC
  source 1..20: mol_type = other DNA
catcccccgctgggagctgc

SEQ ID NO: 27785 - DNA, 20 bp, synthetic construct
  misc_feature 1..20: note = Description of Artificial Sequence: Synthetic oligonucleotide
  misc_feature 1..20: note = Target: FXN; (-) strand; PAM type: YTN; PAM sequence: CTC
  source 1..20: mol_type = other DNA
ggcctccatcccccgctggg

SEQ ID NO: 27786 - DNA, 20 bp, synthetic construct
  misc_feature 1..20: note = Description of Artificial Sequence: Synthetic oligonucleotide
  misc_feature 1..20: note = Target: FXN; (-) strand; PAM type: YTN; PAM sequence: CTG
  source 1..20: mol_type = other DNA
actcggcctccatcccccgc

SEQ ID NO: 27787 - DNA, 20 bp, synthetic construct
  misc_feature 1..20: note = Description of Artificial Sequence: Synthetic oligonucleotide
  misc_feature 1..20: note = Target: FXN; (-) strand; PAM type: YTN; PAM sequence: CTC
  source 1..20: mol_type = other DNA
cagtgaccagcagactgact

SEQ ID NO: 27788 - DNA, 20 bp, synthetic construct
  misc_feature 1..20: note = Description of Artificial Sequence: Synthetic oligonucleotide
  misc_feature 1..20: note = Target: FXN; (-) strand; PAM type: YTN; PAM sequence: CTG
  source 1..20: mol_type = other DNA
gcctccagtgaccagcagac

SEQ ID NO: 27789 - DNA, 20 bp, synthetic construct
  misc_feature 1..20: note = Description of Artificial Sequence: Synthetic oligonucleotide
  misc_feature 1..20: note = Target: FXN; (-) strand; PAM type: YTN; PAM sequence: TTA
  source 1..20: mol_type = other DNA
ggcagcatcctggcctccag

SEQ ID NO: 27790 - DNA, 20 bp, synthetic construct
  misc_feature 1..20: note = Description of Artificial Sequence: Synthetic oligonucleotide
  misc_feature 1..20: note = Target: FXN; (-) strand; PAM type: YTN; PAM sequence: CTG
  source 1..20: mol_type = other DNA
tgttaggcagcatcctggcc

SEQ ID NO: 27791 - DNA, 20 bp, synthetic construct
  misc_feature 1..20: note = Description of Artificial Sequence: Synthetic oligonucleotide
  misc_feature 1..20: note = Target: FXN; (-) strand; PAM type: YTN; PAM sequence: CTG
  source 1..20: mol_type = other DNA
gtggtgaggcccggagcggg

SEQ ID NO: 27792 - DNA, 20 bp, synthetic construct
  misc_feature 1..20: note = Description of Artificial Sequence: Synthetic oligonucleotide
  misc_feature 1..20: note = Target: FXN; (-) strand; PAM type: YTN; PAM sequence: CTG
  source 1..20: mol_type = other DNA
tgtgggcagcaggccgggag

SEQ ID NO: 27793 - DNA, 20 bp, synthetic construct
  misc_feature 1..20: note = Description of Artificial Sequence: Synthetic oligonucleotide
  misc_feature 1..20: note = Target: FXN; (-) strand; PAM type: YTN; PAM sequence: CTC
  source 1..20: mol_type = other DNA
ccccggaaccccgcagtctg

SEQ ID NO: 27794 - DNA, 20 bp, synthetic construct
  misc_feature 1..20: note = Description of Artificial Sequence: Synthetic oligonucleotide
  misc_feature 1..20: note = Target: FXN; (-) strand; PAM type: YTN; PAM sequence: CTG
  source 1..20: mol_type = other DNA
ctcccccggaaccccgcagt

SEQ ID NO: 27795 - DNA, 20 bp, synthetic construct
  misc_feature 1..20: note = Description of Artificial Sequence: Synthetic oligonucleotide
  misc_feature 1..20: note = Target: FXN; (-) strand; PAM type: YTN; PAM sequence: CTG
  source 1..20: mol_type = other DNA
ggtcctgctcccccggaacc

SEQ ID NO: 27796 - DNA, 20 bp, synthetic construct
  misc_feature 1..20: note = Description of Artificial Sequence: Synthetic oligonucleotide
  misc_feature 1..20: note = Target: FXN; (-) strand; PAM type: YTN; PAM sequence: TTC
  source 1..20: mol_type = other DNA
caagaagacaggcgcagaac

SEQ ID NO: 27797 - DNA, 20 bp, synthetic construct
  misc_feature 1..20: note = Description of Artificial Sequence: Synthetic oligonucleotide
  misc_feature 1..20: note = Target: FXN; (-) strand; PAM type: YTN; PAM sequence: CTT
  source 1..20: mol_type = other DNA
ccaagaagacaggcgcagaa

SEQ ID NO: 27798 - DNA, 20 bp, synthetic construct
  misc_feature 1..20: note = Description of Artificial Sequence: Synthetic oligonucleotide
  misc_feature 1..20: note = Target: FXN; (-) strand; PAM type: YTN; PAM sequence: CTC
  source 1..20: mol_type = other DNA
cttccaagaagacaggcgca

SEQ ID NO: 27799 - DNA, 20 bp, synthetic construct
  misc_feature 1..20: note = Description of Artificial Sequence: Synthetic oligonucleotide
  misc_feature 1..20: note = Target: FXN; (-) strand; PAM type: YTN; PAM sequence: CTG
  source 1..20: mol_type = other DNA
ctccttccaagaagacaggc

SEQ ID NO: 27800 - DNA, 20 bp, synthetic construct
  misc_feature 1..20: note = Description of Artificial Sequence: Synthetic oligonucleotide
  misc_feature 1..20: note = Target: FXN; (-) strand; PAM type: YTN; PAM sequence: CTC
  source 1..20: mol_type = other DNA
cggcctgctccttccaagaa

SEQ ID NO: 27801 - DNA, 20 bp, synthetic construct
  misc_feature 1..20: note = Description of Artificial Sequence: Synthetic oligonucleotide
  misc_feature 1..20: note = Target: FXN; (-) strand; PAM type: YTN; PAM sequence: CTC
  source 1..20: mol_type = other DNA
ccgcgctccggcctgctcct

SEQ ID NO: 27802 - DNA, 20 bp, synthetic construct
  misc_feature 1..20: note = Description of Artificial Sequence: Synthetic oligonucleotide
  misc_feature 1..20: note = Target: FXN; (-) strand; PAM type: YTN; PAM sequence: CTA
  source 1..20: mol_type = other DNA
cacggcgctcccgcgctccg

SEQ ID NO: 27803 - DNA, 20 bp, synthetic construct
  misc_feature 1..20: note = Description of Artificial Sequence: Synthetic oligonucleotide
  misc_feature 1..20: note = Target: FXN; (-) strand; PAM type: YTN; PAM sequence: TTC
  source 1..20: mol_type = other DNA
gcaggtacagctacacggcg

SEQ ID NO: 27804 - DNA, 20 bp, synthetic construct
  misc_feature 1..20: note = Description of Artificial Sequence: Synthetic oligonucleotide
  misc_feature 1..20: note = Target: FXN; (-) strand; PAM type: YTN; PAM sequence: CTT
  source 1..20: mol_type = other DNA
cgcaggtacagctacacggc

SEQ ID NO: 27805 - DNA, 20 bp, synthetic construct
  misc_feature 1..20: note = Description of Artificial Sequence: Synthetic oligonucleotide
  misc_feature 1..20: note = Target: FXN; (-) strand; PAM type: YTN; PAM sequence: CTG
  source 1..20: mol_type = other DNA
tgccttcgcaggtacagcta

SEQ ID NO: 27806 - DNA, 20 bp, synthetic construct
  misc_feature 1..20: note = Description of Artificial Sequence: Synthetic oligonucleotide
  misc_feature 1..20: note = Target: FXN; (-) strand; PAM type: YTN; PAM sequence: TTC
  source 1..20: mol_type = other DNA
ccgcggaatcctgtgccttc

SEQ ID NO: 27807 - DNA, 20 bp, synthetic construct
  misc_feature 1..20: note = Description of Artificial Sequence: Synthetic oligonucleotide
  misc_feature 1..20: note = Target: FXN; (-) strand; PAM type: YTN; PAM sequence: CTT
  source 1..20: mol_type = other DNA
cccgcggaatcctgtgcctt

SEQ ID NO: 27808 - DNA, 20 bp, synthetic construct
  misc_feature 1..20: note = Description of Artificial Sequence: Synthetic oligonucleotide
  misc_feature 1..20: note = Target: FXN; (-) strand; PAM type: YTN; PAM sequence: CTG
  source 1..20: mol_type = other DNA
cgggatcttcccgcggaatc

SEQ ID NO: 27809 - DNA, 20 bp, synthetic construct
  misc_feature 1..20: note = Description of Artificial Sequence: Synthetic oligonucleotide
  misc_feature 1..20: note = Target: FXN; (-) strand; PAM type: YTN; PAM sequence: TTG
  source 1..20: mol_type = other DNA
ccacaggtataaaaacaatg

SEQ ID NO: 27810 - DNA, 20 bp, synthetic construct
  misc_feature 1..20: note = Description of Artificial Sequence: Synthetic oligonucleotide
  misc_feature 1..20: note = Target: FXN; (-) strand; PAM type: YTN; PAM sequence: TTT
  source 1..20: mol_type = other DNA
gccacaggtataaaaacaat

SEQ ID NO: 27811 - DNA, 20 bp, synthetic construct
  misc_feature 1..20: note = Description of Artificial Sequence: Synthetic oligonucleotide
  misc_feature 1..20: note = Target: FXN; (-) strand; PAM type: YTN; PAM sequence: CTG
  source 1..20: mol_type = other DNA
gtcatgccatttgccacagg

SEQ ID NO: 27812 - DNA, 20 bp, synthetic construct
  misc_feature 1..20: note = Description of Artificial Sequence: Synthetic oligonucleotide
  misc_feature 1..20: note = Target: FXN; (-) strand; PAM type: YTN; PAM sequence: CTC
  source 1..20: mol_type = other DNA
cagacataaccgtgtgtctg

SEQ ID NO: 27813 - DNA, 20 bp, synthetic construct
  misc_feature 1..20: note = Description of Artificial Sequence: Synthetic oligonucleotide
  misc_feature 1..20: note = Target: FXN; (-) strand; PAM type: YTN; PAM sequence: TTC
  source 1..20: mol_type = other DNA
tccagacataaccgtgtgtc

SEQ ID NO: 27814 - DNA, 20 bp, synthetic construct
  misc_feature 1..20: note = Description of Artificial Sequence: Synthetic oligonucleotide
  misc_feature 1..20: note = Target: FXN; (-) strand; PAM type: YTN; PAM sequence: TTT
  source 1..20: mol_type = other DNA
ctccagacataaccgtgtgt

SEQ ID NO: 27815 - DNA, 20 bp, synthetic construct
  misc_feature 1..20: note = Description of Artificial Sequence: Synthetic oligonucleotide
  misc_feature 1..20: note = Target: FXN; (-) strand; PAM type: YTN; PAM sequence: CTA
  source 1..20: mol_type = other DNA
caggggtttctccagacata

SEQ ID NO: 27816 - DNA, 20 bp, synthetic construct
  misc_feature 1..20: note = Description of Artificial Sequence: Synthetic oligonucleotide
  misc_feature 1..20: note = Target: FXN; (-) strand; PAM type: YTN; PAM sequence: CTC
  source 1..20: mol_type = other DNA
tacaggggtttctccagaca

SEQ ID NO: 27817 - DNA, 20 bp, synthetic construct
  misc_feature 1..20: note = Description of Artificial Sequence: Synthetic oligonucleotide
  misc_feature 1..20: note = Target: FXN; (-) strand; PAM type: YTN; PAM sequence: CTC
  source 1..20: mol_type = other DNA
ctctacaggggtttctccag

SEQ ID NO: 27818 - DNA, 20 bp, synthetic construct
  misc_feature 1..20: note = Description of Artificial Sequence: Synthetic oligonucleotide
  misc_feature 1..20: note = Target: FXN; (-) strand; PAM type: YTN; PAM sequence: CTG
  source 1..20: mol_type = other DNA
ctcctctacaggggtttctc

SEQ ID NO: 27819 - DNA, 20 bp, synthetic construct
  misc_feature 1..20: note = Description of Artificial Sequence: Synthetic oligonucleotide
  misc_feature 1..20: note = Target: FXN; (-) strand; PAM type: YTN; PAM sequence: CTC
  source 1..20: mol_type = other DNA
ctgctcctctacaggggttt

SEQ ID NO: 27820 - DNA, 20 bp, synthetic construct
  misc_feature 1..20: note = Description of Artificial Sequence: Synthetic oligonucleotide
  misc_feature 1..20: note = Target: FXN; (-) strand; PAM type: YTN; PAM sequence: CTG
  source 1..20: mol_type = other DNA
tccgggccacagcatgtcca

SEQ ID NO: 27821 - DNA, 20 bp, synthetic construct
  misc_feature 1..20: note = Description of Artificial Sequence: Synthetic oligonucleotide
  misc_feature 1..20: note = Target: FXN; (-) strand; PAM type: YTN; PAM sequence: CTC
  source 1..20: mol_type = other DNA
ggcagccactgtccgggcca

SEQ ID NO: 27822 - DNA, 20 bp, synthetic construct
  misc_feature 1..20: note = Description of Artificial Sequence: Synthetic oligonucleotide
  misc_feature 1..20: note = Target: FXN; (-) strand; PAM type: YTN; PAM sequence: CTG
  source 1..20: mol_type = other DNA
ctcggcagccactgtccggg

SEQ ID NO: 27823 - DNA, 20 bp, synthetic construct
  misc_feature 1..20: note = Description of Artificial Sequence: Synthetic oligonucleotide
  misc_feature 1..20: note = Target: FXN; (-) strand; PAM type: YTN; PAM sequence: CTC
  source 1..20: mol_type = other DNA
caactgctcggcagccactg

SEQ ID NO: 27824 - DNA, 20 bp, synthetic construct
  misc_feature 1..20: note = Description of Artificial Sequence: Synthetic oligonucleotide
  misc_feature 1..20: note = Target: FXN; (-) strand; PAM type: YTN; PAM sequence: TTG
  source 1..20: mol_type = other DNA
ggcgggtgcaggctccaact

SEQ ID NO: 27825 - DNA, 20 bp, synthetic construct
  misc_feature 1..20: note = Description of Artificial Sequence: Synthetic oligonucleotide
  misc_feature 1..20: note = Target: FXN; (-) strand; PAM type: YTN; PAM sequence: TTA
  source 1..20: mol_type = other DNA
gccaagttgggcgggtgcag

SEQ ID NO: 27826 - DNA, 20 bp, synthetic construct
  misc_feature 1..20: note = Description of Artificial Sequence: Synthetic oligonucleotide
  misc_feature 1..20: note = Target: FXN; (-) strand; PAM type: YTN; PAM sequence: TTT
  source 1..20: mol_type = other DNA
agccaagttgggcgggtgca

SEQ ID NO: 27827 - DNA, 20 bp, synthetic construct
  misc_feature 1..20: note = Description of Artificial Sequence: Synthetic oligonucleotide
  misc_feature 1..20: note = Target: FXN; (-) strand; PAM type: YTN; PAM sequence: CTT
  source 1..20: mol_type = other DNA
tagccaagttgggcgggtgc

SEQ ID NO: 27828 - DNA, 20 bp, synthetic construct
  misc_feature 1..20: note = Description of Artificial Sequence: Synthetic oligonucleotide
  misc_feature 1..20: note = Target: FXN; (-) strand; PAM type: YTN; PAM sequence: TTC
  source 1..20: mol_type = other DNA
tttagccaagttgggcgggt

SEQ ID NO: 27829 - DNA, 20 bp, synthetic construct
  misc_feature 1..20: note = Description of Artificial Sequence: Synthetic oligonucleotide
  misc_feature 1..20: note = Target: FXN; (-) strand; PAM type: YTN; PAM sequence: CTT
  source 1..20: mol_type = other DNA
ctttagccaagttgggcggg

SEQ ID NO: 27830 - DNA, 20 bp, synthetic construct
  misc_feature 1..20: note = Description of Artificial Sequence: Synthetic oligonucleotide
  misc_feature 1..20: note = Target: FXN; (-) strand; PAM type: YTN; PAM sequence: TTC
  source 1..20: mol_type = other DNA
cacagagagtatggggactt

SEQ ID NO: 27831 - DNA, 20 bp, synthetic construct
  misc_feature 1..20: note = Description of Artificial Sequence: Synthetic oligonucleotide
  misc_feature 1..20: note = Target: FXN; (-) strand; PAM type: YTN; PAM sequence: TTT
  source 1..20: mol_type = other DNA
ccacagagagtatggggact

SEQ ID NO: 27832 - DNA, 20 bp, synthetic construct
  misc_feature 1..20: note = Description of Artificial Sequence: Synthetic oligonucleotide
  misc_feature 1..20: note = Target: FXN; (-) strand; PAM type: YTN; PAM sequence: TTT
  source 1..20: mol_type = other DNA
tccacagagagtatggggac

SEQ ID NO: 27833 - DNA, 20 bp, synthetic construct
  misc_feature 1..20: note = Description of Artificial Sequence: Synthetic oligonucleotide
  misc_feature 1..20: note = Target: FXN; (-) strand; PAM type: YTN; PAM sequence: CTT
  source 1..20: mol_type = other DNA
ttccacagagagtatgggga

SEQ ID NO: 27834 - DNA, 20 bp, synthetic construct
  misc_feature 1..20: note = Description of Artificial Sequence: Synthetic oligonucleotide
  misc_feature 1..20: note = Target: FXN; (-) strand; PAM type: YTN; PAM sequence: CTG
  source 1..20: mol_type = other DNA
gaaatcttttccacagagag

SEQ ID NO: 27835 - DNA, 20 bp, synthetic construct
  misc_feature 1..20: note = Description of Artificial Sequence: Synthetic oligonucleotide
  misc_feature 1..20: note = Target: FXN; (-) strand; PAM type: YTN; PAM sequence: TTC
  source 1..20: mol_type = other DNA
tggaaatcttttccacagag

SEQ ID NO: 27836 - DNA, 20 bp, synthetic construct
  misc_feature 1..20: note = Description of Artificial Sequence: Synthetic oligonucleotide
  misc_feature 1..20: note = Target: FXN; (-) strand; PAM type: YTN; PAM sequence: CTT
  source 1..20: mol_type = other DNA
ctggaaatcttttccacaga

SEQ ID NO: 27837 - DNA, 20 bp, synthetic construct
  misc_feature 1..20: note = Description of Artificial Sequence: Synthetic oligonucleotide
  misc_feature 1..20: note = Target: FXN; (-) strand; PAM type: YTN; PAM sequence: TTG
  source 1..20: mol_type = other DNA
acacaacagcttctggaaat

SEQ ID NO: 27838 - DNA, 20 bp, synthetic construct
  misc_feature 1..20: note = Description of Artificial Sequence: Synthetic oligonucleotide
  misc_feature 1..20: note = Target: FXN; (-) strand; PAM type: YTN; PAM sequence: TTG
  source 1..20: mol_type = other DNA
atattgacacaacagcttct

SEQ ID NO: 27839 - DNA, 20 bp, synthetic construct
  misc_feature 1..20: note = Description of Artificial Sequence: Synthetic oligonucleotide
  misc_feature 1..20: note = Target: FXN; (-) strand; PAM type: YTN; PAM sequence: TTT
  source 1..20: mol_type = other DNA
gatattgacacaacagcttc

SEQ ID NO: 27840 - DNA, 20 bp, synthetic construct
  misc_feature 1..20: note = Description of Artificial Sequence: Synthetic oligonucleotide
  misc_feature 1..20: note = Target: FXN; (-) strand; PAM type: YTN; PAM sequence: CTT
  source 1..20: mol_type = other DNA
tgatattgacacaacagctt

SEQ ID NO: 27841 - DNA, 20 bp, synthetic construct
  misc_feature 1..20: note = Description of Artificial Sequence: Synthetic oligonucleotide
  misc_feature 1..20: note = Target: FXN; (-) strand; PAM type: YTN; PAM sequence: TTG
  source 1..20: mol_type = other DNA
aggctttgatattgacacaa

SEQ ID NO: 27842 - DNA, 20 bp, synthetic construct
  misc_feature 1..20: note = Description of Artificial Sequence: Synthetic oligonucleotide
  misc_feature 1..20: note = Target: FXN; (-) strand; PAM type: YTN; PAM sequence: TTT
  source 1..20: mol_type = other DNA
gaggctttgatattgacaca

SEQ ID NO: 27843 - DNA, 20 bp, synthetic construct
  misc_feature 1..20: note = Description of Artificial Sequence: Synthetic oligonucleotide
  misc_feature 1..20: note = Target: FXN; (-) strand; PAM type: YTN; PAM sequence: TTT
  source 1..20: mol_type = other DNA
tgaggctttgatattgacac

SEQ ID NO: 27844 - DNA, 20 bp, synthetic construct
  misc_feature 1..20: note = Description of Artificial Sequence: Synthetic oligonucleotide
  misc_feature 1..20: note = Target: FXN; (-) strand; PAM type: YTN; PAM sequence: TTG
  source 1..20: mol_type = other DNA
ttttgaggctttgatattga

SEQ ID NO: 27845 - DNA, 20 bp, synthetic construct
  misc_feature 1..20: note = Description of Artificial Sequence: Synthetic oligonucleotide
  misc_feature 1..20: note = Target: FXN; (-) strand; PAM type: YTN; PAM sequence: TTG
  source 1..20: mol_type = other DNA
ttgttttgaggctttgatat

SEQ ID NO: 27846 - DNA, 20 bp, synthetic construct
  misc_feature 1..20: note = Description of Artificial Sequence: Synthetic oligonucleotide
  misc_feature 1..20: note = Target: FXN; (-) strand; PAM type: YTN; PAM sequence: TTG
  source 1..20: mol_type = other DNA
ttgttgttttgaggctttga

SEQ ID NO: 27847 - DNA, 20 bp, synthetic construct
  misc_feature 1..20: note = Description of Artificial Sequence: Synthetic oligonucleotide
  misc_feature 1..20: note = Target: FXN; (-) strand; PAM type: YTN; PAM sequence: TTG
  source 1..20: mol_type = other DNA
ttgttgttgttttgaggctt

SEQ ID NO: 27848 - DNA, 20 bp, synthetic construct
  misc_feature 1..20: note = Description of Artificial Sequence: Synthetic oligonucleotide
  misc_feature 1..20: note = Target: FXN; (-) strand; PAM type: YTN; PAM sequence: TTG
  source 1..20: mol_type = other DNA
ttgttgttgttgttttgagg

SEQ ID NO: 27849 - DNA, 20 bp, synthetic construct
  misc_feature 1..20: note = Description of Artificial Sequence: Synthetic oligonucleotide
  misc_feature 1..20: note = Target: FXN; (-) strand; PAM type: YTN; PAM sequence: TTG
  source 1..20: mol_type = other DNA
ttgttgttgttgttgttttg

SEQ ID NO: 27850 - DNA, 20 bp, synthetic construct
  misc_feature 1..20: note = Description of Artificial Sequence: Synthetic oligonucleotide
  misc_feature 1..20: note = Target: FXN; (-) strand; PAM type: YTN; PAM sequence: TTT
  source 1..20: mol_type = other DNA
gttgttgttgttgttgtttt

SEQ ID NO: 27851 - DNA, 20 bp, synthetic construct
  misc_feature 1..20: note = Description of Artificial Sequence: Synthetic oligonucleotide
  misc_feature 1..20: note = Target: FXN; (-) strand; PAM type: YTN; PAM sequence: TTT
  source 1..20: mol_type = other DNA
tgttgttgttgttgttgttt

SEQ ID NO: 27852 - DNA, 20 bp, synthetic construct
  misc_feature 1..20: note = Description of Artificial Sequence: Synthetic oligonucleotide
  misc_feature 1..20: note = Target: FXN; (-) strand; PAM type: YTN; PAM sequence: TTT
  source 1..20: mol_type = other DNA
ttgttgttgttgttgttgtt

SEQ ID NO: 27853 - DNA, 20 bp, synthetic construct
  misc_feature 1..20: note = Description of Artificial Sequence: Synthetic oligonucleotide
  misc_feature 1..20: note = Target: FXN; (-) strand; PAM type: YTN; PAM sequence: TTC
  source 1..20: mol_type = other DNA
atgtttttgttgttgttgtt

SEQ ID NO: 27854 - DNA, 20 bp, synthetic construct
  misc_feature 1..20: note = Description of Artificial Sequence: Synthetic oligonucleotide
  misc_feature 1..20: note = Target: FXN; (-) strand; PAM type: YTN; PAM sequence: TTT
  source 1..20: mol_type = other DNA
catgtttttgttgttgttgt

SEQ ID NO: 27855 - DNA, 20 bp, synthetic construct
  misc_feature 1..20: note = Description of Artificial Sequence: Synthetic oligonucleotide
  misc_feature 1..20: note = Target: FXN; (-) strand; PAM type: YTN; PAM sequence: TTG
  source 1..20: mol_type = other DNA
ataatttcatgtttttgttg

SEQ ID NO: 27856 - DNA, 20 bp, synthetic construct
  misc_feature 1..20: note = Description of Artificial Sequence: Synthetic oligonucleotide
  misc_feature 1..20: note = Target: FXN; (-) strand; PAM type: YTN; PAM sequence: TTG
  source 1..20: mol_type = other DNA
ttgataatttcatgtttttg

SEQ ID NO: 27857 - DNA, 20 bp, synthetic construct
  misc_feature 1..20: note = Description of Artificial Sequence: Synthetic oligonucleotide
  misc_feature 1..20: note = Target: FXN; (-) strand; PAM type: YTN; PAM sequence: TTA
  source 1..20: mol_type = other DNA
ttgttgataatttcatgttt

SEQ ID NO: 27858 - DNA, 20 bp, synthetic construct
  misc_feature 1..20: note = Description of Artificial Sequence: Synthetic oligonucleotide
  misc_feature 1..20: note = Target: FXN; (-) strand; PAM type: YTN; PAM sequence: TTT
  source 1..20: mol_type = other DNA
attgttgataatttcatgtt

SEQ ID NO: 27859 - DNA, 20 bp, synthetic construct
  misc_feature 1..20: note = Description of Artificial Sequence: Synthetic oligonucleotide
  misc_feature 1..20: note = Target: FXN; (-) strand; PAM type: YTN; PAM sequence: CTT
  source 1..20: mol_type = other DNA
tattgttgataatttcatgt

SEQ ID NO: 27860 - DNA, 20 bp, synthetic construct
  misc_feature 1..20: note = Description of Artificial Sequence: Synthetic oligonucleotide
  misc_feature 1..20: note = Target: FXN; (-) strand; PAM type: YTN; PAM sequence: CTC
  source 1..20: mol_type = other DNA
aaggatgatctttattgttg

SEQ ID NO: 27861 - DNA, 20 bp, synthetic construct
  misc_feature 1..20: note = Description of Artificial Sequence: Synthetic oligonucleotide
  misc_feature 1..20: note = Target: FXN; (-) strand; PAM type: YTN; PAM sequence: TTC
  source 1..20: mol_type = other DNA
aaagcagactcaaggatgat

SEQ ID NO: 27862 - DNA, 20 bp, synthetic construct
  misc_feature 1..20: note = Description of Artificial Sequence: Synthetic oligonucleotide
  misc_feature 1..20: note = Target: FXN; (-) strand; PAM type: YTN; PAM sequence: TTT
  source 1..20: mol_type = other DNA
caaagcagactcaaggatga

SEQ ID NO: 27863 - DNA, 20 bp, synthetic construct
  misc_feature 1..20: note = Description of Artificial Sequence: Synthetic oligonucleotide
  misc_feature 1..20: note = Target: FXN; (-) strand; PAM type: YTN; PAM sequence: TTT
  source 1..20: mol_type = other DNA
tcaaagcagactcaaggatg

SEQ ID NO: 27864 - DNA, 20 bp, synthetic construct
  misc_feature 1..20: note = Description of Artificial Sequence: Synthetic oligonucleotide
  misc_feature 1..20: note = Target: FXN; (-) strand; PAM type: YTN; PAM sequence: CTT
  source 1..20: mol_type = other DNA
ttcaaagcagactcaaggat

SEQ ID NO: 27865 - DNA, 20 bp, synthetic construct
  misc_feature 1..20: note = Description of Artificial Sequence: Synthetic oligonucleotide
  misc_feature 1..20: note = Target: FXN; (-) strand; PAM type: YTN; PAM sequence: CTA
  source 1..20: mol_type = other DNA
cttttcaaagcagactcaag

SEQ ID NO: 27866 - DNA, 20 bp, synthetic construct
  misc_feature 1..20: note = Description of Artificial Sequence: Synthetic oligonucleotide
  misc_feature 1..20: note = Target: FXN; (-) strand; PAM type: YTN; PAM sequence: TTC
  source 1..20: mol_type = other DNA
accctacttttcaaagcaga

SEQ ID NO: 27867 - DNA, 20 bp, synthetic construct
  misc_feature 1..20: note = Description of Artificial Sequence: Synthetic oligonucleotide
  misc_feature 1..20: note = Target: FXN; (-) strand; PAM type: YTN; PAM sequence: TTT
  source 1..20: mol_type = other DNA
caccctacttttcaaagcag

SEQ ID NO: 27868 - DNA, 20 bp, synthetic construct
  misc_feature 1..20: note = Description of Artificial Sequence: Synthetic oligonucleotide
  misc_feature 1..20: note = Target: FXN; (-) strand; PAM type: YTN; PAM sequence: CTG
  source 1..20: mol_type = other DNA
cagaatttcaccctactttt

SEQ ID NO: 27869 - DNA, 20 bp, synthetic construct
  misc_feature 1..20: note = Description of Artificial Sequence: Synthetic oligonucleotide
  misc_feature 1..20: note = Target: FXN; (-) strand; PAM type: YTN; PAM sequence: CTC
  source 1..20: mol_type = other DNA
tgcagaatttcaccctactt

SEQ ID NO: 27870 - DNA, 20 bp, synthetic construct
  misc_feature 1..20: note = Description of Artificial Sequence: Synthetic oligonucleotide
  misc_feature 1..20: note = Target: FXN; (-) strand; PAM type: YTN; PAM sequence: TTG
  source 1..20: mol_type = other DNA
aatgcctctgcagaatttca

SEQ ID NO: 27871 - DNA, 20 bp, synthetic construct
  misc_feature 1..20: note = Description of Artificial Sequence: Synthetic oligonucleotide
  misc_feature 1..20: note = Target: FXN; (-) strand; PAM type: YTN; PAM sequence: TTG
  source 1..20: mol_type = other DNA
ccagttgaatgcctctgcag

SEQ ID NO: 27872 - DNA, 20 bp, synthetic construct
  misc_feature 1..20: note = Description of Artificial Sequence: Synthetic oligonucleotide
  misc_feature 1..20: note = Target: FXN; (-) strand; PAM type: YTN; PAM sequence: CTT
  source 1..20: mol_type = other DNA
gccagttgaatgcctctgca

SEQ ID NO: 27873 - DNA, 20 bp, synthetic construct
  misc_feature 1..20: note = Description of Artificial Sequence: Synthetic oligonucleotide
  misc_feature 1..20: note = Target: FXN; (-) strand; PAM type: YTN; PAM sequence: CTA
  source 1..20: mol_type = other DNA
tgagggtggtatcttgccag

SEQ ID NO: 27874 - DNA, 20 bp, synthetic construct
  misc_feature 1..20: note = Description of Artificial Sequence: Synthetic oligonucleotide
  misc_feature 1..20: note = Target: FXN; (-) strand; PAM type: YTN; PAM sequence: CTG
  source 1..20: mol_type = other DNA
gctatgagggtggtatcttg

SEQ ID NO: 27875 - DNA, 20 bp, synthetic construct
  misc_feature 1..20: note = Description of Artificial Sequence: Synthetic oligonucleotide
  misc_feature 1..20: note = Target: FXN; (-) strand; PAM type: YTN; PAM sequence: CTG
  source 1..20: mol_type = other DNA
cagatctggctatgagggtg

SEQ ID NO: 27876 - DNA, 20 bp, synthetic construct
  misc_feature 1..20: note = Description of Artificial Sequence: Synthetic oligonucleotide
  misc_feature 1..20: note = Target: FXN; (-) strand; PAM type: YTN; PAM sequence: CTG
  source 1..20: mol_type = other DNA
agacctgcagatctggctat

SEQ ID NO: 27877 - DNA, 20 bp, synthetic construct
  misc_feature 1..20: note = Description of Artificial Sequence: Synthetic oligonucleotide
  misc_feature 1..20: note = Target: FXN; (-) strand; PAM type: YTN; PAM sequence: CTG
  source 1..20: mol_type = other DNA
gcatgatggctgagacctgc

SEQ ID NO: 27878 - DNA, 20 bp, synthetic construct
  misc_feature 1..20: note = Description of Artificial Sequence: Synthetic oligonucleotide
  misc_feature 1..20: note = Target: FXN; (-) strand; PAM type: YTN; PAM sequence: TTC
  source 1..20: mol_type = other DNA
cctggcatgatggctgagac

SEQ ID NO: 27879 - DNA, 20 bp, synthetic construct
  misc_feature 1..20: note = Description of Artificial Sequence: Synthetic oligonucleotide
  misc_feature 1..20: note = Target: FXN; (-) strand; PAM type: YTN; PAM sequence: TTT
  source 1..20: mol_type = other DNA
ccctggcatgatggctgaga

SEQ ID NO: 27880 - DNA, 20 bp, synthetic construct
  misc_feature 1..20: note = Description of Artificial Sequence: Synthetic oligonucleotide
  misc_feature 1..20: note = Target: FXN; (-) strand; PAM type: YTN; PAM sequence: TTT
  source 1..20: mol_type = other DNA
tccctggcatgatggctgag

SEQ ID NO: 27881 - DNA, 20 bp, synthetic construct
  misc_feature 1..20: note = Description of Artificial Sequence: Synthetic oligonucleotide
  misc_feature 1..20: note = Target: FXN; (-) strand; PAM type: YTN; PAM sequence: CTG
  source 1..20: mol_type = other DNA
aggagtggtgaatggagcat

SEQ ID NO: 27882 - DNA, 20 bp, synthetic construct
  misc_feature 1..20: note = Description of Artificial Sequence: Synthetic oligonucleotide
  misc_feature 1..20: note = Target: FXN; (-) strand; PAM type: YTN; PAM sequence: CTG
  source 1..20: mol_type = other DNA
aaaccagaagcagaagctga

SEQ ID NO: 27883 - DNA, 20 bp, synthetic construct
  misc_feature 1..20: note = Description of Artificial Sequence: Synthetic oligonucleotide
  misc_feature 1..20: note = Target: FXN; (-) strand; PAM type: YTN; PAM sequence: CTC
  source 1..20: mol_type = other DNA
tgaaaccagaagcagaagct

SEQ ID NO: 27884 - DNA, 20 bp, synthetic construct
  misc_feature 1..20: note = Description of Artificial Sequence: Synthetic oligonucleotide
  misc_feature 1..20: note = Target: FXN; (-) strand; PAM type: YTN; PAM sequence: CTC
  source 1..20: mol_type = other DNA
caatacagagacctctgaaa

SEQ ID NO: 27885 - DNA, 20 bp, synthetic construct
  misc_feature 1..20: note = Description of Artificial Sequence: Synthetic oligonucleotide
  misc_feature 1..20: note = Target: FXN; (-) strand; PAM type: YTN; PAM sequence: TTA
  source 1..20: mol_type = other DNA
aagcccctccaatacagaga

SEQ ID NO: 27886 - DNA, 20 bp, synthetic construct
  misc_feature 1..20: note = Description of Artificial Sequence: Synthetic oligonucleotide
  misc_feature 1..20: note = Target: FXN; (-) strand; PAM type: YTN; PAM sequence: TTT
  source 1..20: mol_type = other DNA
aaagcccctccaatacagag

SEQ ID NO: 27887 - DNA, 20 bp, synthetic construct
  misc_feature 1..20: note = Description of Artificial Sequence: Synthetic oligonucleotide
  misc_feature 1..20: note = Target: FXN; (-) strand; PAM type: YTN; PAM sequence: CTT
  source 1..20: mol_type = other DNA
taaagcccctccaatacaga

SEQ ID NO: 27888 - DNA, 20 bp, synthetic construct
  misc_feature 1..20: note = Description of Artificial Sequence: Synthetic oligonucleotide
  misc_feature 1..20: note = Target: FXN; (-) strand; PAM type: YTN; PAM sequence: TTG
  source 1..20: mol_type = other DNA
ctttaaagcccctccaatac

SEQ ID NO: 27889 - DNA, 20 bp, synthetic construct
  misc_feature 1..20: note = Description of Artificial Sequence: Synthetic oligonucleotide
  misc_feature 1..20: note = Target: FXN; (-) strand; PAM type: YTN; PAM sequence: CTT
  source 1..20: mol_type = other DNA
gctttaaagcccctccaata

SEQ ID NO: 27890 - DNA, 20 bp, synthetic construct
  misc_feature 1..20: note = Description of Artificial Sequence: Synthetic oligonucleotide
  misc_feature 1..20: note = Target: FXN; (-) strand; PAM type: YTN; PAM sequence: TTC
  source 1..20: mol_type = other DNA
ttgctttaaagcccctccaa

SEQ ID NO: 27891 - DNA, 20 bp, synthetic construct
  misc_feature 1..20: note = Description of Artificial Sequence: Synthetic oligonucleotide
  misc_feature 1..20: note = Target: FXN; (-) strand; PAM type: YTN; PAM sequence: CTT
  source 1..20: mol_type = other DNA
cttgctttaaagcccctcca

SEQ ID NO: 27892 - DNA, 20 bp, synthetic construct
  misc_feature 1..20: note = Description of Artificial Sequence: Synthetic oligonucleotide
  misc_feature 1..20: note = Target: FXN; (-) strand; PAM type: YTN; PAM sequence: CTG
  source 1..20: mol_type = other DNA
tgaataagagtaagtgggta

SEQ ID NO: 27893 - DNA, 20 bp, synthetic construct
  misc_feature 1..20: note = Description of Artificial Sequence: Synthetic oligonucleotide
  misc_feature 1..20: note = Target: FXN; (-) strand; PAM type: YTN; PAM sequence: TTC
  source 1..20: mol_type = other DNA
acatctgtgaataagagtaa

SEQ ID NO: 27894 - DNA, 20 bp, synthetic construct
  misc_feature 1..20: note = Description of Artificial Sequence: Synthetic oligonucleotide
  misc_feature 1..20: note = Target: FXN; (-) strand; PAM type: YTN; PAM sequence: CTG
  source 1..20: mol_type = other DNA
catattcacatctgtgaata

SEQ ID NO: 27895 - DNA, 20 bp, synthetic construct
  misc_feature 1..20: note = Description of Artificial Sequence: Synthetic oligonucleotide
  misc_feature 1..20: note = Target: FXN; (-) strand; PAM type: YTN; PAM sequence: CTG
  source 1..20: mol_type = other DNA
gacctgcatattcacatctg

SEQ ID NO: 27896 - DNA, 20 bp, synthetic construct
  misc_feature 1..20: note = Description of Artificial Sequence: Synthetic oligonucleotide
  misc_feature 1..20: note = Target: FXN; (-) strand; PAM type: YTN; PAM sequence: TTC
  source 1..20: mol_type = other DNA
cccactggacctgcatattc

SEQ ID NO: 27897 - DNA, 20 bp, synthetic construct
  misc_feature 1..20: note = Description of Artificial Sequence: Synthetic oligonucleotide
  misc_feature 1..20: note = Target: FXN; (-) strand; PAM type: YTN; PAM sequence: TTT
  source 1..20: mol_type = other DNA
ccccactggacctgcatatt

SEQ ID NO: 27898 - DNA, 20 bp, synthetic construct
  misc_feature 1..20: note = Description of Artificial Sequence: Synthetic oligonucleotide
  misc_feature 1..20: note = Target: FXN; (-) strand; PAM type: YTN; PAM sequence: CTT
  source 1..20: mol_type = other DNA
tccccactggacctgcatat

SEQ ID NO: 27899 - DNA, 20 bp, synthetic construct
  misc_feature 1..20: note = Description of Artificial Sequence: Synthetic oligonucleotide
  misc_feature 1..20: note = Target: FXN; (-) strand; PAM type: YTN; PAM sequence: TTA
  source 1..20: mol_type = other DNA
ggacatgtcactttccccac

SEQ ID NO: 27900 - DNA, 20 bp, synthetic construct
  misc_feature 1..20: note = Description of Artificial Sequence: Synthetic oligonucleotide
  misc_feature 1..20: note = Target: FXN; (-) strand; PAM type: YTN; PAM sequence: CTT
  source 1..20: mol_type = other DNA
aggacatgtcactttcccca

SEQ ID NO: 27901 - DNA, 20 bp, synthetic construct
  misc_feature 1..20: note = Description of Artificial Sequence: Synthetic oligonucleotide
  misc_feature 1..20: note = Target: FXN; (-) strand; PAM type: YTN; PAM sequence: CTG
  source 1..20: mol_type = other DNA
acttaggacatgtcactttc

SEQ ID NO: 27902 - DNA, 20 bp, synthetic construct
  misc_feature 1..20: note = Description of Artificial Sequence: Synthetic oligonucleotide
  misc_feature 1..20: note = Target: FXN; (-) strand; PAM type: YTN; PAM sequence: TTC
  source 1..20: mol_type = other DNA
tgacttaggacatgtcactt

SEQ ID NO: 27903 - DNA, 20 bp, synthetic construct
  misc_feature 1..20: note = Description of Artificial Sequence: Synthetic oligonucleotide
  misc_feature 1..20: note = Target: FXN; (-) strand; PAM type: YTN; PAM sequence: CTA
  source 1..20: mol_type = other DNA
ttctgacttaggacatgtca

SEQ ID NO: 27904 - DNA, 20 bp, synthetic construct
  misc_feature 1..20: note = Description of Artificial Sequence: Synthetic oligonucleotide
  misc_feature 1..20: note = Target: FXN; (-) strand; PAM type: YTN; PAM sequence: CTC
  source 1..20: mol_type = other DNA
tattctgacttaggacatgt

SEQ ID NO: 27905 - DNA, 20 bp, synthetic construct
  misc_feature 1..20: note = Description of Artificial Sequence: Synthetic oligonucleotide
  misc_feature 1..20: note = Target: FXN; (-) strand; PAM type: YTN; PAM sequence: TTG
  source 1..20: mol_type = other DNA
actctattctgacttaggac

SEQ ID NO: 27906 - DNA, 20 bp, synthetic construct
  misc_feature 1..20: note = Description of Artificial Sequence: Synthetic oligonucleotide
  misc_feature 1..20: note = Target: FXN; (-) strand; PAM type: YTN; PAM sequence: TTG
  source 1..20: mol_type = other DNA
ttgactctattctgacttag

SEQ ID NO: 27907 - DNA, 20 bp, synthetic construct
  misc_feature 1..20: note = Description of Artificial Sequence: Synthetic oligonucleotide
  misc_feature 1..20: note = Target: FXN; (-) strand; PAM type: YTN; PAM sequence: CTT
  source 1..20: mol_type = other DNA
gttgactctattctgactta

SEQ ID NO: 27908 - DNA, 20 bp, synthetic construct
  misc_feature 1..20: note = Description of Artificial Sequence: Synthetic oligonucleotide
  misc_feature 1..20: note = Target: FXN; (-) strand; PAM type: YTN; PAM sequence: TTC
  source 1..20: mol_type = other DNA
ttgttgactctattctgact

SEQ ID NO: 27909 - DNA, 20 bp, synthetic construct
  misc_feature 1..20: note = Description of Artificial Sequence: Synthetic oligonucleotide
  misc_feature 1..20: note = Target: FXN; (-) strand; PAM type: YTN; PAM sequence: TTT
  source 1..20: mol_type = other DNA
cttgttgactctattctgac

SEQ ID NO: 27910 - DNA, 20 bp, synthetic construct
  misc_feature 1..20: note = Description of Artificial Sequence: Synthetic oligonucleotide
  misc_feature 1..20: note = Target: FXN; (-) strand; PAM type: YTN; PAM sequence: TTT
  source 1..20: mol_type = other DNA
tcttgttgactctattctga

SEQ ID NO: 27911 - DNA, 20 bp, synthetic construct
  misc_feature 1..20: note = Description of Artificial Sequence: Synthetic oligonucleotide
  misc_feature 1..20: note = Target: FXN; (-) strand; PAM type: YTN; PAM sequence: CTG
  source 1..20: mol_type = other DNA
ttttcttgttgactctattc

SEQ ID NO: 27912 - DNA, 20 bp, synthetic construct
  misc_feature 1..20: note = Description of Artificial Sequence: Synthetic oligonucleotide
  misc_feature 1..20: note = Target: FXN; (-) strand; PAM type: YTN; PAM sequence: TTG
  source 1..20: mol_type = other DNA
ggccctgttttcttgttgac

SEQ ID NO: 27913 - DNA, 20 bp, synthetic construct
  misc_feature 1..20: note = Description of Artificial Sequence: Synthetic oligonucleotide
  misc_feature 1..20: note = Target: FXN; (-) strand; PAM type: YTN; PAM sequence: TTT
  source 1..20: mol_type = other DNA
gggccctgttttcttgttga

SEQ ID NO: 27914 - DNA, 20 bp, synthetic construct
  misc_feature 1..20: note = Description of Artificial Sequence: Synthetic oligonucleotide
  misc_feature 1..20: note = Target: FXN; (-) strand; PAM type: YTN; PAM sequence: TTT
  source 1..20: mol_type = other DNA
tgggccctgttttcttgttg

SEQ ID NO: 27915 - DNA, 20 bp, synthetic construct
  misc_feature 1..20: note = Description of Artificial Sequence: Synthetic oligonucleotide
  misc_feature 1..20: note = Target: FXN; (-) strand; PAM type: YTN; PAM sequence: CTA
  source 1..20: mol_type = other DNA
agtcattttgggccctgttt

SEQ ID NO: 27916 - DNA, 20 bp, synthetic construct
  misc_feature 1..20: note = Description of Artificial Sequence: Synthetic oligonucleotide
  misc_feature 1..20: note = Target: FXN; (-) strand; PAM type: YTN; PAM sequence: CTA
  source 1..20: mol_type = other DNA
gaggctaagtcattttgggc

SEQ ID NO: 27917 - DNA, 20 bp, synthetic construct
  misc_feature 1..20: note = Description of Artificial Sequence: Synthetic oligonucleotide
  misc_feature 1..20: note = Target: FXN; (-) strand; PAM type: YTN; PAM sequence: TTA
  source 1..20: mol_type = other DNA
tacactagaggctaagtcat

SEQ ID NO: 27918 - DNA, 20 bp, synthetic construct
  misc_feature 1..20: note = Description of Artificial Sequence: Synthetic oligonucleotide
  misc_feature 1..20: note = Target: FXN; (-) strand; PAM type: YTN; PAM sequence: CTC
  source 1..20: mol_type = other DNA
atcaatgcccattatacact

SEQ ID NO: 27919 - DNA, 20 bp, synthetic construct
  misc_feature 1..20: note = Description of Artificial Sequence: Synthetic oligonucleotide
  misc_feature 1..20: note = Target: FXN; (-) strand; PAM type: YTN; PAM sequence: TTC
  source 1..20: mol_type = other DNA
cagtagctcatcaatgccca

SEQ ID NO: 27920 - DNA, 20 bp, synthetic construct
  misc_feature 1..20: note = Description of Artificial Sequence: Synthetic oligonucleotide
  misc_feature 1..20: note = Target: FXN; (-) strand; PAM type: YTN; PAM sequence: TTT
  source 1..20: mol_type = other DNA
ccagtagctcatcaatgccc

SEQ ID NO: 27921 - DNA, 20 bp, synthetic construct
  misc_feature 1..20: note = Description of Artificial Sequence: Synthetic oligonucleotide
  misc_feature 1..20: note = Target: FXN; (-) strand; PAM type: YTN; PAM sequence: CTG
  source 1..20: mol_type = other DNA
tatttccagtagctcatcaa

SEQ ID NO: 27922 - DNA, 20 bp, synthetic construct
  misc_feature 1..20: note = Description of Artificial Sequence: Synthetic oligonucleotide
  misc_feature 1..20: note = Target: FXN; (-) strand; PAM type: YTN; PAM sequence: CTC
  source 1..20: mol_type = other DNA
tgtatttccagtagctcatc

SEQ ID NO: 27923 - DNA, 20 bp, synthetic construct
  misc_feature 1..20: note = Description of Artificial Sequence: Synthetic oligonucleotide
  misc_feature 1..20: note = Target: FXN; (-) strand; PAM type: YTN; PAM sequence: TTC
  source 1..20: mol_type = other DNA
atctctgtatttccagtagc

SEQ ID NO: 27924 - DNA, 20 bp, synthetic construct
  misc_feature 1..20: note = Description of Artificial Sequence: Synthetic oligonucleotide
  misc_feature 1..20: note = Target: FXN; (-) strand; PAM type: YTN; PAM sequence: CTT
  source 1..20: mol_type = other DNA
catctctgtatttccagtag

SEQ ID NO: 27925 - DNA, 20 bp, synthetic construct
  misc_feature 1..20: note = Description of Artificial Sequence: Synthetic oligonucleotide
  misc_feature 1..20: note = Target: FXN; (-) strand; PAM type: YTN; PAM sequence: TTC
  source 1..20: mol_type = other DNA
ttcatctctgtatttccagt

SEQ ID NO: 27926 - DNA, 20 bp, synthetic construct
  misc_feature 1..20: note = Description of Artificial Sequence: Synthetic oligonucleotide
  misc_feature 1..20: note = Target: FXN; (-) strand; PAM type: YTN; PAM sequence: TTT
  source 1..20: mol_type = other DNA
cttcatctctgtatttccag

SEQ ID NO: 27927 - DNA, 20 bp, synthetic construct
  misc_feature 1..20: note = Description of Artificial Sequence: Synthetic oligonucleotide
  misc_feature 1..20: note = Target: FXN; (-) strand; PAM type: YTN; PAM sequence: TTT
  source 1..20: mol_type = other DNA
tcttcatctctgtatttcca

SEQ ID NO: 27928 - DNA, 20 bp, synthetic construct
  misc_feature 1..20: note = Description of Artificial Sequence: Synthetic oligonucleotide
  misc_feature 1..20: note = Target: FXN; (-) strand; PAM type: YTN; PAM sequence: CTG
  source 1..20: mol_type = other DNA
tgttttcttcatctctgtat

SEQ ID NO: 27929 - DNA, 20 bp, synthetic construct
  misc_feature 1..20: note = Description of Artificial Sequence: Synthetic oligonucleotide
  misc_feature 1..20: note = Target: FXN; (-) strand; PAM type: YTN; PAM sequence: TTG
  source 1..20: mol_type = other DNA
aagatgggactgtgttttct

SEQ ID NO: 27930 - DNA, 20 bp, synthetic construct
  misc_feature 1..20: note = Description of Artificial Sequence: Synthetic oligonucleotide
  misc_feature 1..20: note = Target: FXN; (-) strand; PAM type: YTN; PAM sequence: CTT
  source 1..20: mol_type = other DNA
gaagatgggactgtgttttc

SEQ ID NO: 27931 - DNA, 20 bp, synthetic construct
  misc_feature 1..20: note = Description of Artificial Sequence: Synthetic oligonucleotide
  misc_feature 1..20: note = Target: FXN; (-) strand; PAM type: YTN; PAM sequence: CTC
  source 1..20: mol_type = other DNA
cttgaagatgggactgtgtt

SEQ ID NO: 27932 - DNA, 20 bp, synthetic construct
  misc_feature 1..20: note = Description of Artificial Sequence: Synthetic oligonucleotide
  misc_feature 1..20: note = Target: FXN; (-) strand; PAM type: YTN; PAM sequence: TTG
  source 1..20: mol_type = other DNA
agctccttgaagatgggact

SEQ ID NO: 27933 - DNA, 20 bp, synthetic construct
  misc_feature 1..20: note = Description of Artificial Sequence: Synthetic oligonucleotide
  misc_feature 1..20: note = Target: FXN; (-) strand; PAM type: YTN; PAM sequence: CTA
  source 1..20: mol_type = other DNA
gattgagctccttgaagatg

SEQ ID NO: 27934 - DNA, 20 bp, synthetic construct
  misc_feature 1..20: note = Description of Artificial Sequence: Synthetic oligonucleotide
  misc_feature 1..20: note = Target: FXN; (-) strand; PAM type: YTN; PAM sequence: TTG
  source 1..20: mol_type = other DNA
ctagattgagctccttgaag

SEQ ID NO: 27935 - DNA, 20 bp, synthetic construct
  misc_feature 1..20: note = Description of Artificial Sequence: Synthetic oligonucleotide
  misc_feature 1..20: note = Target: FXN; (-) strand; PAM type: YTN; PAM sequence: CTT
  source 1..20: mol_type = other DNA
gctagattgagctccttgaa

SEQ ID NO: 27936 - DNA, 20 bp, synthetic construct
  misc_feature 1..20: note = Description of Artificial Sequence: Synthetic oligonucleotide
  misc_feature 1..20: note = Target: FXN; (-) strand; PAM type: YTN; PAM sequence: CTC
  source 1..20: mol_type = other DNA
ccttgctagattgagctcct

SEQ ID NO: 27937 - DNA, 20 bp, synthetic construct
  misc_feature 1..20: note = Description of Artificial Sequence: Synthetic oligonucleotide
  misc_feature 1..20: note = Target: FXN; (-) strand; PAM type: YTN; PAM sequence: CTG
  source 1..20: mol_type = other DNA
tctcccttgctagattgagc

SEQ ID NO: 27938 - DNA, 20 bp, synthetic construct
  misc_feature 1..20: note = Description of Artificial Sequence: Synthetic oligonucleotide
  misc_feature 1..20: note = Target: FXN; (-) strand; PAM type: YTN; PAM sequence: CTA
  source 1..20: mol_type = other DNA
caaagagtctgtctcccttg

SEQ ID NO: 27939 - DNA, 20 bp, synthetic construct
  misc_feature 1..20: note = Description of Artificial Sequence: Synthetic oligonucleotide
  misc_feature 1..20: note = Target: FXN; (-) strand; PAM type: YTN; PAM sequence: CTG
  source 1..20: mol_type = other DNA
cagggaagcccggtcccacc

SEQ ID NO: 27940 - DNA, 20 bp, synthetic construct
  misc_feature 1..20: note = Description of Artificial Sequence: Synthetic oligonucleotide
  misc_feature 1..20: note = Target: FXN; (-) strand; PAM type: YTN; PAM sequence: CTG
  source 1..20: mol_type = other DNA
ctgcagggaagcccggtccc

SEQ ID NO: 27941 - DNA, 20 bp, synthetic construct
  misc_feature 1..20: note = Description of Artificial Sequence: Synthetic oligonucleotide
  misc_feature 1..20: note = Target: FXN; (-) strand; PAM type: YTN; PAM sequence: TTC
  source 1..20: mol_type = other DNA
tgctgcagggaagcccggtc

SEQ ID NO: 27942 - DNA, 20 bp, synthetic construct
  misc_feature 1..20: note = Description of Artificial Sequence: Synthetic oligonucleotide
  misc_feature 1..20: note = Target: FXN; (-) strand; PAM type: YTN; PAM sequence: CTT
  source 1..20: mol_type = other DNA
ctgctgcagggaagcccggt

SEQ ID NO: 27943 - DNA, 20 bp, synthetic construct
  misc_feature 1..20: note = Description of Artificial Sequence: Synthetic oligonucleotide
  misc_feature 1..20: note = Target: FXN; (-) strand; PAM type: YTN; PAM sequence: TTC
  source 1..20: mol_type = other DNA
cttctgctgcagggaagccc

SEQ ID NO: 27944 - DNA, 20 bp, synthetic construct
  misc_feature 1..20: note = Description of Artificial Sequence: Synthetic oligonucleotide
  misc_feature 1..20: note = Target: FXN; (-) strand; PAM type: YTN; PAM sequence: CTT
  source 1..20: mol_type = other DNA
ccttctgctgcagggaagcc

SEQ ID NO: 27945 - DNA, 20 bp, synthetic construct
  misc_feature 1..20: note = Description of Artificial Sequence: Synthetic oligonucleotide
  misc_feature 1..20: note = Target: FXN; (-) strand; PAM type: YTN; PAM sequence: TTC
  source 1..20: mol_type = other DNA
aagcttccttctgctgcagg

SEQ ID NO: 27946 - DNA, 20 bp, synthetic construct
  misc_feature 1..20: note = Description of Artificial Sequence: Synthetic oligonucleotide
  misc_feature 1..20: note = Target: FXN; (-) strand; PAM type: YTN; PAM sequence: TTT
  source 1..20: mol_type = other DNA
caagcttccttctgctgcag

SEQ ID NO: 27947 - DNA, 20 bp, synthetic construct
  misc_feature 1..20: note = Description of Artificial Sequence: Synthetic oligonucleotide
  misc_feature 1..20: note = Target: FXN; (-) strand; PAM type: YTN; PAM sequence: TTA
  source 1..20: mol_type = other DNA
ccaatttcaagcttccttct

SEQ ID NO: 27948 - DNA, 20 bp, synthetic construct
  misc_feature 1..20: note = Description of Artificial Sequence: Synthetic oligonucleotide
  misc_feature 1..20: note = Target: FXN; (-) strand; PAM type: YTN; PAM sequence: CTC
  source 1..20: mol_type = other DNA
gttaccaatttcaagcttcc

SEQ ID NO: 27949 - DNA, 20 bp, synthetic construct
  misc_feature 1..20: note = Description of Artificial Sequence: Synthetic oligonucleotide
  misc_feature 1..20: note = Target: FXN; (-) strand; PAM type: YTN; PAM sequence: CTG
  source 1..20: mol_type = other DNA
aggctcgttaccaatttcaa

SEQ ID NO: 27950 - DNA, 20 bp, synthetic construct
  misc_feature 1..20: note = Description of Artificial Sequence: Synthetic oligonucleotide
  misc_feature 1..20: note = Target: FXN; (-) strand; PAM type: YTN; PAM sequence: TTC
  source 1..20: mol_type = other DNA
tgaggctcgttaccaatttc

SEQ ID NO: 27951 - DNA, 20 bp, synthetic construct
  misc_feature 1..20: note = Description of Artificial Sequence: Synthetic oligonucleotide
  misc_feature 1..20: note = Target: FXN; (-) strand; PAM type: YTN; PAM sequence: CTT
  source 1..20: mol_type = other DNA
ctgaggctcgttaccaattt

SEQ ID NO: 27952 - DNA, 20 bp, synthetic construct
  misc_feature 1..20: note = Description of Artificial Sequence: Synthetic oligonucleotide
  misc_feature 1..20: note = Target: FXN; (-) strand; PAM type: YTN; PAM sequence: CTG
  source 1..20: mol_type = other DNA
tcccttctgaggctcgttac

SEQ ID NO: 27953 - DNA, 20 bp, synthetic construct
  misc_feature 1..20: note = Description of Artificial Sequence: Synthetic oligonucleotide
  misc_feature 1..20: note = Target: FXN; (-) strand; PAM type: YTN; PAM sequence: CTC
  source 1..20: mol_type = other DNA
tgtcccttctgaggctcgtt

SEQ ID NO: 27954 - DNA, 20 bp, synthetic construct
  misc_feature 1..20: note = Description of Artificial Sequence: Synthetic oligonucleotide
  misc_feature 1..20: note = Target: FXN; (-) strand; PAM type: YTN; PAM sequence: CTG
  source 1..20: mol_type = other DNA
cctctgtcccttctgaggct

SEQ ID NO: 27955 - DNA, 20 bp, synthetic construct
  misc_feature 1..20: note = Description of Artificial Sequence: Synthetic oligonucleotide
  misc_feature 1..20: note = Target: FXN; (-) strand; PAM type: YTN; PAM sequence: CTC
  source 1..20: mol_type = other DNA
agggtagcatggtggcctgc

SEQ ID NO: 27956 - DNA, 20 bp, synthetic construct
  misc_feature 1..20: note = Description of Artificial Sequence: Synthetic oligonucleotide
  misc_feature 1..20: note = Target: FXN; (-) strand; PAM type: YTN; PAM sequence: CTC
  source 1..20: mol_type = other DNA
tcagggtagcatggtggcct

SEQ ID NO: 27957 - DNA, 20 bp, synthetic construct
  misc_feature 1..20: note = Description of Artificial Sequence: Synthetic oligonucleotide
  misc_feature 1..20: note = Target: FXN; (-) strand; PAM type: YTN; PAM sequence: CTA
  source 1..20: mol_type = other DNA
gtgggtcaaagcagggccag

SEQ ID NO: 27958 - DNA, 20 bp, synthetic construct
  misc_feature 1..20: note = Description of Artificial Sequence: Synthetic oligonucleotide
  misc_feature 1..20: note = Target: FXN; (-) strand; PAM type: YTN; PAM sequence: CTA
  source 1..20: mol_type = other DNA
cagcacagctagtgggtcaa

SEQ ID NO: 27959 - DNA, 20 bp, synthetic construct
  misc_feature 1..20: note = Description of Artificial Sequence: Synthetic oligonucleotide
  misc_feature 1..20: note = Target: FXN; (-) strand; PAM type: YTN; PAM sequence: CTG
  source 1..20: mol_type = other DNA
gccctacagcacagctagtg

SEQ ID NO: 27960 - DNA, 20 bp, synthetic construct
  misc_feature 1..20: note = Description of Artificial Sequence: Synthetic oligonucleotide
  misc_feature 1..20: note = Target: FXN; (-) strand; PAM type: YTN; PAM sequence: CTC
  source 1..20: mol_type = other DNA
cacctggccctacagcacag

SEQ ID NO: 27961 - DNA, 20 bp, synthetic construct
  misc_feature 1..20: note = Description of Artificial Sequence: Synthetic oligonucleotide
  misc_feature 1..20: note = Target: FXN; (-) strand; PAM type: YTN; PAM sequence: CTC
  source 1..20: mol_type = other DNA
caggctccacctggccctac

SEQ ID NO: 27962 - DNA, 20 bp, synthetic construct
  misc_feature 1..20: note = Description of Artificial Sequence: Synthetic oligonucleotide
  misc_feature 1..20: note = Target: FXN; (-) strand; PAM type: YTN; PAM sequence: TTA
  source 1..20: mol_type = other DNA
gcacaggccactccaggctc

SEQ ID NO: 27963 - DNA, 20 bp, synthetic construct
  misc_feature 1..20: note = Description of Artificial Sequence: Synthetic oligonucleotide
  misc_feature 1..20: note = Target: FXN; (-) strand; PAM type: YTN; PAM sequence: CTT
  source 1..20: mol_type = other DNA
agcacaggccactccaggct

SEQ ID NO: 27964 - DNA, 20 bp, synthetic construct
  misc_feature 1..20: note = Description of Artificial Sequence: Synthetic oligonucleotide
  misc_feature 1..20: note = Target: FXN; (-) strand; PAM type: YTN; PAM sequence: CTC
  source 1..20: mol_type = other DNA
atagtagccccttagcacag

SEQ ID NO: 27965 - DNA, 20 bp, synthetic construct
  misc_feature 1..20: note = Description of Artificial Sequence: Synthetic oligonucleotide
  misc_feature 1..20: note = Target: FXN; (-) strand; PAM type: YTN; PAM sequence: TTG
  source 1..20: mol_type = other DNA
ggggagtggaaagagctcat

SEQ ID NO: 27966 - DNA, 20 bp, synthetic construct
  misc_feature 1..20: note = Description of Artificial Sequence: Synthetic oligonucleotide
  misc_feature 1..20: note = Target: FXN; (-) strand; PAM type: YTN; PAM sequence: CTT
  source 1..20: mol_type = other DNA
gggggagtggaaagagctca

SEQ ID NO: 27967 - DNA, 20 bp, synthetic construct
  misc_feature 1..20: note = Description of Artificial Sequence: Synthetic oligonucleotide
  misc_feature 1..20: note = Target: FXN; (-) strand; PAM type: YTN; PAM sequence: TTA
  source 1..20: mol_type = other DNA
tgcaatgccttgggggagtg

SEQ ID NO: 27968 - DNA, 20 bp, synthetic construct
  misc_feature 1..20: note = Description of Artificial Sequence: Synthetic oligonucleotide
  misc_feature 1..20: note = Target: FXN; (-) strand; PAM type: YTN; PAM sequence: TTT
  source 1..20: mol_type = other DNA
atgcaatgccttgggggagt

SEQ ID NO: 27969 - DNA, 20 bp, synthetic construct
  misc_feature 1..20: note = Description of Artificial Sequence: Synthetic oligonucleotide
  misc_feature 1..20: note = Target: FXN; (-) strand; PAM type: YTN; PAM sequence: TTA
  source 1..20: mol_type = other DNA
tttatgcaatgccttggggg

SEQ ID NO: 27970 - DNA, 20 bp, synthetic construct
  misc_feature 1..20: note = Description of Artificial Sequence: Synthetic oligonucleotide
  misc_feature 1..20: note = Target: FXN; (-) strand; PAM type: YTN; PAM sequence: CTG
  source 1..20: mol_type = other DNA
tgcaaacagaaagtgacatt

SEQ ID NO: 27971 - DNA, 20 bp, synthetic construct
  misc_feature 1..20: note = Description of Artificial Sequence: Synthetic oligonucleotide
  misc_feature 1..20: note = Target: FXN; (-) strand; PAM type: YTN; PAM sequence: TTG
  source 1..20: mol_type = other DNA
ctgtgcaaacagaaagtgac

SEQ ID NO: 27972 - DNA, 20 bp, synthetic construct
  misc_feature 1..20: note = Description of Artificial Sequence: Synthetic oligonucleotide
  misc_feature 1..20: note = Target: FXN; (-) strand; PAM type: YTN; PAM sequence: TTT
  source 1..20: mol_type = other DNA
gctgtgcaaacagaaagtga

SEQ ID NO: 27973 - DNA, 20 bp, synthetic construct
  misc_feature 1..20: note = Description of Artificial Sequence: Synthetic oligonucleotide
  misc_feature 1..20: note = Target: FXN; (-) strand; PAM type: YTN; PAM sequence: TTT
  source 1..20: mol_type = other DNA
tgctgtgcaaacagaaagtg

SEQ ID NO: 27974 - DNA, 20 bp, synthetic construct
  misc_feature 1..20: note = Description of Artificial Sequence: Synthetic oligonucleotide
  misc_feature 1..20: note = Target: FXN; (-) strand; PAM type: YTN; PAM sequence: CTG
  source 1..20: mol_type = other DNA
attttgctgtgcaaacagaa

SEQ ID NO: 27975 - DNA, 20 bp, synthetic construct
  misc_feature 1..20: note = Description of Artificial Sequence: Synthetic oligonucleotide
  misc_feature 1..20: note = Target: FXN; (-) strand; PAM type: YTN; PAM sequence: TTG
  source 1..20: mol_type = other DNA
tgtccctgattttgctgtgc

SEQ ID NO: 27976 - DNA, 20 bp, synthetic construct
  misc_feature 1..20: note = Description of Artificial Sequence: Synthetic oligonucleotide
  misc_feature 1..20: note = Target: FXN; (-) strand; PAM type: YTN; PAM sequence: CTA
  source 1..20: mol_type = other DNA
gaaaattgtgtccctgattt

SEQ ID NO: 27977 - DNA, 20 bp, synthetic construct
  misc_feature 1..20: note = Description of Artificial Sequence: Synthetic oligonucleotide
  misc_feature 1..20: note = Target: FXN; (-) strand; PAM type: YTN; PAM sequence: TTC
  source 1..20: mol_type = other DNA
tagaaaattgtgtccctgat

SEQ ID NO: 27978 - DNA, 20 bp, synthetic construct
  misc_feature 1..20: note = Description of Artificial Sequence: Synthetic oligonucleotide
  misc_feature 1..20: note = Target: FXN; (-) strand; PAM type: YTN; PAM sequence: CTG
  source 1..20: mol_type = other DNA
gggggaggggaggcacccca

SEQ ID NO: 27979 - DNA, 20 bp, synthetic construct
  misc_feature 1..20: note = Description of Artificial Sequence: Synthetic oligonucleotide
  misc_feature 1..20: note = Target: FXN; (-) strand; PAM type: YTN; PAM sequence: TTG
  source 1..20: mol_type = other DNA
ggctggggggaggggaggca

SEQ ID NO: 27980 - DNA, 20 bp, synthetic construct
  misc_feature 1..20: note = Description of Artificial Sequence: Synthetic oligonucleotide
  misc_feature 1..20: note = Target: FXN; (-) strand; PAM type: YTN; PAM sequence: CTG
  source 1..20: mol_type = other DNA
ttgggctggggggaggggag

SEQ ID NO: 27981 - DNA, 20 bp, synthetic construct
  misc_feature 1..20: note = Description of Artificial Sequence: Synthetic oligonucleotide
  misc_feature 1..20: note = Target: FXN; (-) strand; PAM type: YTN; PAM sequence: TTC
  source 1..20: mol_type = other DNA
tgttgggctggggggagggg

SEQ ID NO: 27982 - DNA, 20 bp, synthetic construct
  misc_feature 1..20: note = Description of Artificial Sequence: Synthetic oligonucleotide
  misc_feature 1..20: note = Target: FXN; (-) strand; PAM type: YTN; PAM sequence: CTT
  source 1..20: mol_type = other DNA
ctgttgggctggggggaggg

SEQ ID NO: 27983 - DNA, 20 bp, synthetic construct
  misc_feature 1..20: note = Description of Artificial Sequence: Synthetic oligonucleotide
  misc_feature 1..20: note = Target: FXN; (-) strand; PAM type: YTN; PAM sequence: TTG
  source 1..20: mol_type = other DNA
tagaacttctgttgggctgg

SEQ ID NO: 27984 - DNA, 20 bp, synthetic construct
  misc_feature 1..20: note = Description of Artificial Sequence: Synthetic oligonucleotide
  misc_feature 1..20: note = Target: FXN; (-) strand; PAM type: YTN; PAM sequence: CTC
  source 1..20: mol_type = other DNA
aaacaaaaacaagggcccat

SEQ ID NO: 27985 - DNA, 20 bp, synthetic construct
  misc_feature 1..20: note = Description of Artificial Sequence: Synthetic oligonucleotide
  misc_feature 1..20: note = Target: FXN; (-) strand; PAM type: YTN; PAM sequence: TTC
  source 1..20: mol_type = other DNA
cgtctcaaacaaaaacaagg

SEQ ID NO: 27986 - DNA, 20 bp, synthetic construct
  misc_feature 1..20: note = Description of Artificial Sequence: Synthetic oligonucleotide
  misc_feature 1..20: note = Target: FXN; (-) strand; PAM type: YTN; PAM sequence: CTG
  source 1..20: mol_type = other DNA
tggggtgttccgtctcaaac

SEQ ID NO: 27987 - DNA, 20 bp, synthetic construct
  misc_feature 1..20: note = Description of Artificial Sequence: Synthetic oligonucleotide
  misc_feature 1..20: note = Target: FXN; (-) strand; PAM type: YTN; PAM sequence: CTC
  source 1..20: mol_type = other DNA
ggaaccctgtggggtgttcc

SEQ ID NO: 27988 - DNA, 20 bp, synthetic construct
  misc_feature 1..20: note = Description of Artificial Sequence: Synthetic oligonucleotide
  misc_feature 1..20: note = Target: FXN; (-) strand; PAM type: YTN; PAM sequence: CTG
  source 1..20: mol_type = other DNA
tgggccacaaatcaccactc

SEQ ID NO: 27989 - DNA, 20 bp, synthetic construct
  misc_feature 1..20: note = Description of Artificial Sequence: Synthetic oligonucleotide
  misc_feature 1..20: note = Target: FXN; (-) strand; PAM type: YTN; PAM sequence: TTG
  source 1..20: mol_type = other DNA
ccagtggcctgtgggccaca

SEQ ID NO: 27990 - DNA, 20 bp, synthetic construct
  misc_feature 1..20: note = Description of Artificial Sequence: Synthetic oligonucleotide
  misc_feature 1..20: note = Target: FXN; (-) strand; PAM type: YTN; PAM sequence: CTT
  source 1..20: mol_type = other DNA
gccagtggcctgtgggccac

SEQ ID NO: 27991 - DNA, 20 bp, synthetic construct
  misc_feature 1..20: note = Description of Artificial Sequence: Synthetic oligonucleotide
  misc_feature 1..20: note = Target: FXN; (-) strand; PAM type: YTN; PAM sequence: CTC
  source 1..20: mol_type = other DNA
cacttgccagtggcctgtgg

SEQ ID NO: 27992 - DNA, 20 bp, synthetic construct
  misc_feature 1..20: note = Description of Artificial Sequence: Synthetic oligonucleotide
  misc_feature 1..20: note = Target: FXN; (-) strand; PAM type: YTN; PAM sequence: CTG
  source 1..20: mol_type = other DNA
cctccacttgccagtggcct

SEQ ID NO: 27993 - DNA, 20 bp, synthetic construct
  misc_feature 1..20: note = Description of Artificial Sequence: Synthetic oligonucleotide
  misc_feature 1..20: note = Target: FXN; (-) strand; PAM type: YTN; PAM sequence: CTC
  source 1..20: mol_type = other DNA
tgcctccacttgccagtggc

SEQ ID NO: 27994 - DNA, 20 bp, synthetic construct
  misc_feature 1..20: note = Description of Artificial Sequence: Synthetic oligonucleotide
  misc_feature 1..20: note = Target: FXN; (-) strand; PAM type: YTN; PAM sequence: CTG
  source 1..20: mol_type = other DNA
cagctctgcctccacttgcc

SEQ ID NO: 27995 - DNA, 20 bp, synthetic construct
  misc_feature 1..20: note = Description of Artificial Sequence: Synthetic oligonucleotide
  misc_feature 1..20: note = Target: FXN; (-) strand; PAM type: YTN; PAM sequence: CTC
  source 1..20: mol_type = other DNA
tgcagctctgcctccacttg

SEQ ID NO: 27996 - DNA, 20 bp, synthetic construct
  misc_feature 1..20: note = Description of Artificial Sequence: Synthetic oligonucleotide
  misc_feature 1..20: note = Target: FXN; (-) strand; PAM type: YTN; PAM sequence: CTC
  source 1..20: mol_type = other DNA
ccgagggctctgcagctctg

SEQ ID NO: 27997 - DNA, 20 bp, synthetic construct
  misc_feature 1..20: note = Description of Artificial Sequence: Synthetic oligonucleotide
  misc_feature 1..20: note = Target: FXN; (-) strand; PAM type: YTN; PAM sequence: CTG
  source 1..20: mol_type = other DNA
tggctcccgagggctctgca

SEQ ID NO: 27998 - DNA, 20 bp, synthetic construct
  misc_feature 1..20: note = Description of Artificial Sequence: Synthetic oligonucleotide
  misc_feature 1..20: note = Target: FXN; (-) strand; PAM type: YTN; PAM sequence: CTC
  source 1..20: mol_type = other DNA
tgtggctcccgagggctctg

SEQ ID NO: 27999 - DNA, 20 bp, synthetic construct
  misc_feature 1..20: note = Description of Artificial Sequence: Synthetic oligonucleotide
  misc_feature 1..20: note = Target: FXN; (-) strand; PAM type: YTN; PAM sequence: TTG
  source 1..20: mol_type = other DNA
gcatgtcgtggcggccagca

SEQ ID NO: 28000 - DNA, 20 bp, synthetic construct
  misc_feature 1..20: note = Description of Artificial Sequence: Synthetic oligonucleotide
  misc_feature 1..20: note = Target: FXN; (-) strand; PAM type: YTN; PAM sequence: CTG
  source 1..20: mol_type = other DNA
agttggcatgtcgtggcggc

SEQ ID NO: 28001 - DNA, 20 bp, synthetic construct
  misc_feature 1..20: note = Description of Artificial Sequence: Synthetic oligonucleotide
  misc_feature 1..20: note = Target: FXN; (-) strand; PAM type: YTN; PAM sequence: CTG
  source 1..20: mol_type = other DNA
ccgcccacaggagggccagc

SEQ ID NO: 28002 - DNA, 20 bp, synthetic construct
  misc_feature 1..20: note = Description of Artificial Sequence: Synthetic oligonucleotide
  misc_feature 1..20: note = Target: FXN; (-) strand; PAM type: YTN; PAM sequence: CTA
  source 1..20: mol_type = other DNA
gcactgccgcccacaggagg

SEQ ID NO: 28003 - DNA, 20 bp, synthetic construct
  misc_feature 1..20: note = Description of Artificial Sequence: Synthetic oligonucleotide
  misc_feature 1..20: note = Target: FXN; (-) strand; PAM type: YTN; PAM sequence: CTG
  source 1..20: mol_type = other DNA
cacatcactagcactgccgc

SEQ ID NO: 28004 - DNA, 20 bp, synthetic construct
  misc_feature 1..20: note = Description of Artificial Sequence: Synthetic oligonucleotide
  misc_feature 1..20: note = Target: FXN; (-) strand; PAM type: YTN; PAM sequence: TTC
  source 1..20: mol_type = other DNA
tgcacatcactagcactgcc

SEQ ID NO: 28005 - DNA, 20 bp, synthetic construct
  misc_feature 1..20: note = Description of Artificial Sequence: Synthetic oligonucleotide
  misc_feature 1..20: note = Target: FXN; (-) strand; PAM type: YTN; PAM sequence: CTA
  source 1..20: mol_type = other DNA
agattctgcacatcactagc

SEQ ID NO: 28006 - DNA, 20 bp, synthetic construct
  misc_feature 1..20: note = Description of Artificial Sequence: Synthetic oligonucleotide
  misc_feature 1..20: note = Target: FXN; (-) strand; PAM type: YTN; PAM sequence: CTA
  source 1..20: mol_type = other DNA
gtcctaagattctgcacatc

SEQ ID NO: 28007 - DNA, 20 bp, synthetic construct
  misc_feature 1..20: note = Description of Artificial Sequence: Synthetic oligonucleotide
  misc_feature 1..20: note = Target: FXN; (-) strand; PAM type: YTN; PAM sequence: TTG
  source 1..20: mol_type = other DNA
gcactagtcctaagattctg

SEQ ID NO: 28008 - DNA, 20 bp, synthetic construct
  misc_feature 1..20: note = Description of Artificial Sequence: Synthetic oligonucleotide
  misc_feature 1..20: note = Target: FXN; (-) strand; PAM type: YTN; PAM sequence: CTT
  source 1..20: mol_type = other DNA
ggcactagtcctaagattct

SEQ ID NO: 28009 - DNA, 20 bp, synthetic construct
  misc_feature 1..20: note = Description of Artificial Sequence: Synthetic oligonucleotide
  misc_feature 1..20: note = Target: FXN; (-) strand; PAM type: YTN; PAM sequence: TTC
  source 1..20: mol_type = other DNA
cttggcactagtcctaagat

SEQ ID NO: 28010 - DNA, 20 bp, synthetic construct
  misc_feature 1..20: note = Description of Artificial Sequence: Synthetic oligonucleotide
  misc_feature 1..20: note = Target: FXN; (-) strand; PAM type: YTN; PAM sequence: TTA
  source 1..20: mol_type = other DNA
taggttccttggcactagtc

SEQ ID NO: 28011 - DNA, 20 bp, synthetic construct
  misc_feature 1..20: note = Description of Artificial Sequence: Synthetic oligonucleotide
  misc_feature 1..20: note = Target: FXN; (-) strand; PAM type: YTN; PAM sequence: TTT
  source 1..20: mol_type = other DNA
ataggttccttggcactagt

SEQ ID NO: 28012 - DNA, 20 bp, synthetic construct
  misc_feature 1..20: note = Description of Artificial Sequence: Synthetic oligonucleotide
  misc_feature 1..20: note = Target: FXN; (-) strand; PAM type: YTN; PAM sequence: CTG
  source 1..20: mol_type = other DNA
ggtcacccagggtatttata

SEQ ID NO: 28013 - DNA, 20 bp, synthetic construct
  misc_feature 1..20: note = Description of Artificial Sequence: Synthetic oligonucleotide
  misc_feature 1..20: note = Target: FXN; (-) strand; PAM type: YTN; PAM sequence: CTG
  source 1..20: mol_type = other DNA
tgaaggccaccacagcagtg

SEQ ID NO: 28014 - DNA, 20 bp, synthetic construct
  misc_feature 1..20: note = Description of Artificial Sequence: Synthetic oligonucleotide
  misc_feature 1..20: note = Target: FXN; (-) strand; PAM type: YTN; PAM sequence: CTG
  source 1..20: mol_type = other DNA
actgtgaaggccaccacagc

SEQ ID NO: 28015 - DNA, 20 bp, synthetic construct
  misc_feature 1..20: note = Description of Artificial Sequence: Synthetic oligonucleotide
  misc_feature 1..20: note = Target: FXN; (-) strand; PAM type: YTN; PAM sequence: TTC
  source 1..20: mol_type = other DNA
tgactgtgaaggccaccaca

SEQ ID NO: 28016 - DNA, 20 bp, synthetic construct
  misc_feature 1..20: note = Description of Artificial Sequence: Synthetic oligonucleotide
  misc_feature 1..20: note = Target: FXN; (-) strand; PAM type: YTN; PAM sequence: CTT
  source 1..20: mol_type = other DNA
ctgactgtgaaggccaccac

SEQ ID NO: 28017 - DNA, 20 bp, synthetic construct
  misc_feature 1..20: note = Description of Artificial Sequence: Synthetic oligonucleotide
  misc_feature 1..20: note = Target: FXN; (-) strand; PAM type: YTN; PAM sequence: TTG
  source 1..20: mol_type = other DNA
tcatcttctgactgtgaagg

SEQ ID NO: 28018 - DNA, 20 bp, synthetic construct
  misc_feature 1..20: note = Description of Artificial Sequence: Synthetic oligonucleotide
  misc_feature 1..20: note = Target: FXN; (-) strand; PAM type: YTN; PAM sequence: CTT
  source 1..20: mol_type = other DNA
gtcatcttctgactgtgaag

SEQ ID NO: 28019 - DNA, 20 bp, synthetic construct
  misc_feature 1..20: note = Description of Artificial Sequence: Synthetic oligonucleotide
  misc_feature 1..20: note = Target: FXN; (-) strand; PAM type: YTN; PAM sequence: CTC
  source 1..20: mol_type = other DNA
agcttgtcatcttctgactg

SEQ ID NO: 28020 - DNA, 20 bp, synthetic construct
  misc_feature 1..20: note = Description of Artificial Sequence: Synthetic oligonucleotide
  misc_feature 1..20: note = Target: FXN; (-) strand; PAM type: YTN; PAM sequence: TTC
  source 1..20: mol_type = other DNA
tcagcttgtcatcttctgac

SEQ ID NO: 28021 - DNA, 20 bp, synthetic construct
  misc_feature 1..20: note = Description of Artificial Sequence: Synthetic oligonucleotide
  misc_feature 1..20: note = Target: FXN; (-) strand; PAM type: YTN; PAM sequence: CTT
  source 1..20: mol_type = other DNA
ctcagcttgtcatcttctga

SEQ ID NO: 28022 - DNA, 20 bp, synthetic construct
  misc_feature 1..20: note = Description of Artificial Sequence: Synthetic oligonucleotide
  misc_feature 1..20: note = Target: FXN; (-) strand; PAM type: YTN; PAM sequence: CTC
  source 1..20: mol_type = other DNA
cccttctcagcttgtcatct

SEQ ID NO: 28023 - DNA, 20 bp, synthetic construct
  misc_feature 1..20: note = Description of Artificial Sequence: Synthetic oligonucleotide
  misc_feature 1..20: note = Target: FXN; (-) strand; PAM type: YTN; PAM sequence: TTC
  source 1..20: mol_type = other DNA
tccccttctcagcttgtcat

SEQ ID NO: 28024 - DNA, 20 bp, synthetic construct
  misc_feature 1..20: note = Description of Artificial Sequence: Synthetic oligonucleotide
  misc_feature 1..20: note = Target: FXN; (-) strand; PAM type: YTN; PAM sequence: TTG
  source 1..20: mol_type = other DNA
ggccgattctccccttctca

SEQ ID NO: 28025 - DNA, 20 bp, synthetic construct
  misc_feature 1..20: note = Description of Artificial Sequence: Synthetic oligonucleotide
  misc_feature 1..20: note = Target: FXN; (-) strand; PAM type: YTN; PAM sequence: CTT
  source 1..20: mol_type = other DNA
gggccgattctccccttctc

SEQ ID NO: 28026 - DNA, 20 bp, synthetic construct
  misc_feature 1..20: note = Description of Artificial Sequence: Synthetic oligonucleotide
  misc_feature 1..20: note = Target: FXN; (-) strand; PAM type: YTN; PAM sequence: CTC
  source 1..20: mol_type = other DNA
accttgggccgattctcccc

SEQ ID NO: 28027 - DNA, 20 bp, synthetic construct
  misc_feature 1..20: note = Description of Artificial Sequence: Synthetic oligonucleotide
  misc_feature 1..20: note = Target: FXN; (-) strand; PAM type: YTN; PAM sequence: CTG
  source 1..20: mol_type = other DNA
tggatctcaccttgggccga

SEQ ID NO: 28028 - DNA, 20 bp, synthetic construct
  misc_feature 1..20: note = Description of Artificial Sequence: Synthetic oligonucleotide
  misc_feature 1..20: note = Target: FXN; (-) strand; PAM type: YTN; PAM sequence: TTC
  source 1..20: mol_type = other DNA
tgtggatctcaccttgggcc

SEQ ID NO: 28029 - DNA, 20 bp, synthetic construct
  misc_feature 1..20: note = Description of Artificial Sequence: Synthetic oligonucleotide
  misc_feature 1..20: note = Target: FXN; (-) strand; PAM type: YTN; PAM sequence: TTT
  source 1..20: mol_type = other DNA
ctgtggatctcaccttgggc

SEQ ID NO: 28030 - DNA, 20 bp, synthetic construct
  misc_feature 1..20: note = Description of Artificial Sequence: Synthetic oligonucleotide
  misc_feature 1..20: note = Target: FXN; (-) strand; PAM type: YTN; PAM sequence: CTT
  source 1..20: mol_type = other DNA
tctgtggatctcaccttggg

SEQ ID NO: 28031 - DNA, 20 bp, synthetic construct
  misc_feature 1..20: note = Description of Artificial Sequence: Synthetic oligonucleotide
  misc_feature 1..20: note = Target: FXN; (-) strand; PAM type: YTN; PAM sequence: CTG
  source 1..20: mol_type = other DNA
gcctttctgtggatctcacc

SEQ ID NO: 28032 - DNA, 20 bp, synthetic construct
  misc_feature 1..20: note = Description of Artificial Sequence: Synthetic oligonucleotide
  misc_feature 1..20: note = Target: FXN; (-) strand; PAM type: YTN; PAM sequence: TTG
  source 1..20: mol_type = other DNA
gccctggcctttctgtggat

SEQ ID NO: 28033 - DNA, 20 bp, synthetic construct
  misc_feature 1..20: note = Description of Artificial Sequence: Synthetic oligonucleotide
  misc_feature 1..20: note = Target: FXN; (-) strand; PAM type: YTN; PAM sequence: CTT
  source 1..20: mol_type = other DNA
ggccctggcctttctgtgga

SEQ ID NO: 28034 - DNA, 20 bp, synthetic construct
  misc_feature 1..20: note = Description of Artificial Sequence: Synthetic oligonucleotide
  misc_feature 1..20: note = Target: FXN; (-) strand; PAM type: YTN; PAM sequence: CTG
  source 1..20: mol_type = other DNA
gccgcatcttggccctggcc

SEQ ID NO: 28035 - DNA, 20 bp, synthetic construct
  misc_feature 1..20: note = Description of Artificial Sequence: Synthetic oligonucleotide
  misc_feature 1..20: note = Target: FXN; (-) strand; PAM type: YTN; PAM sequence: CTG
  source 1..20: mol_type = other DNA
aggtgctggccgcatcttgg

SEQ ID NO: 28036 - DNA, 20 bp, synthetic construct
  misc_feature 1..20: note = Description of Artificial Sequence: Synthetic oligonucleotide
  misc_feature 1..20: note = Target: FXN; (-) strand; PAM type: YTN; PAM sequence: CTG
  source 1..20: mol_type = other DNA
gcatggtcaacgtaagacca

SEQ ID NO: 28037 - DNA, 20 bp, synthetic construct
  misc_feature 1..20: note = Description of Artificial Sequence: Synthetic oligonucleotide
  misc_feature 1..20: note = Target: FXN; (-) strand; PAM type: YTN; PAM sequence: CTC
  source 1..20: mol_type = other DNA
tggcatggtcaacgtaagac

SEQ ID NO: 28038 - DNA, 20 bp, synthetic construct
  misc_feature 1..20: note = Description of Artificial Sequence: Synthetic oligonucleotide
  misc_feature 1..20: note = Target: FXN; (-) strand; PAM type: YTN; PAM sequence: CTG
  source 1..20: mol_type = other DNA
gcctctggcatggtcaacgt

SEQ ID NO: 28039 - DNA, 20 bp, synthetic construct
  misc_feature 1..20: note = Description of Artificial Sequence: Synthetic oligonucleotide
  misc_feature 1..20: note = Target: FXN; (-) strand; PAM type: YTN; PAM sequence: TTG
  source 1..20: mol_type = other DNA
gagcaatcaaggactggcct

SEQ ID NO: 28040 - DNA, 20 bp, synthetic construct
  misc_feature 1..20: note = Description of Artificial Sequence: Synthetic oligonucleotide
  misc_feature 1..20: note = Target: FXN; (-) strand; PAM type: YTN; PAM sequence: TTT
  source 1..20: mol_type = other DNA
ggagcaatcaaggactggcc

SEQ ID NO: 28041 - DNA, 20 bp, synthetic construct
  misc_feature 1..20: note = Description of Artificial Sequence: Synthetic oligonucleotide
  misc_feature 1..20: note = Target: FXN; (-) strand; PAM type: YTN; PAM sequence: CTC
  source 1..20: mol_type = other DNA
gaacagagggtttggagcaa

SEQ ID NO: 28042 - DNA, 20 bp, synthetic construct
  misc_feature 1..20: note = Description of Artificial Sequence: Synthetic oligonucleotide
  misc_feature 1..20: note = Target: FXN; (-) strand; PAM type: YTN; PAM sequence: TTG
  source 1..20: mol_type = other DNA
gaaccctcgaacagagggtt

SEQ ID NO: 28043 - DNA, 20 bp, synthetic construct
  misc_feature 1..20: note = Description of Artificial Sequence: Synthetic oligonucleotide
  misc_feature 1..20: note = Target: FXN; (-) strand; PAM type: YTN; PAM sequence: TTT
  source 1..20: mol_type = other DNA
ggaaccctcgaacagagggt

SEQ ID NO: 28044 - DNA, 20 bp, synthetic construct
  misc_feature 1..20: note = Description of Artificial Sequence: Synthetic oligonucleotide
  misc_feature 1..20: note = Target: FXN; (-) strand; PAM type: YTN; PAM sequence: TTC
  source 1..20: mol_type = other DNA
atttggaaccctcgaacaga

SEQ ID NO: 28045 - DNA, 20 bp, synthetic construct
  misc_feature 1..20: note = Description of Artificial Sequence: Synthetic oligonucleotide
  misc_feature 1..20: note = Target: FXN; (-) strand; PAM type: YTN; PAM sequence: TTT
  source 1..20: mol_type = other DNA
catttggaaccctcgaacag

SEQ ID NO: 28046 - DNA, 20 bp, synthetic construct
  misc_feature 1..20: note = Description of Artificial Sequence: Synthetic oligonucleotide
  misc_feature 1..20: note = Target: FXN; (-) strand; PAM type: YTN; PAM sequence: CTC
  source 1..20: mol_type = other DNA
atttcatttggaaccctcga

SEQ ID NO: 28047 - DNA, 20 bp, synthetic construct
  misc_feature 1..20: note = Description of Artificial Sequence: Synthetic oligonucleotide
  misc_feature 1..20: note = Target: FXN; (-) strand; PAM type: YTN; PAM sequence: CTG
  source 1..20: mol_type = other DNA
ctcatttcatttggaaccct

SEQ ID NO: 28048 - DNA, 20 bp, synthetic construct
  misc_feature 1..20: note = Description of Artificial Sequence: Synthetic oligonucleotide
  misc_feature 1..20: note = Target: FXN; (-) strand; PAM type: YTN; PAM sequence: CTG
  source 1..20: mol_type = other DNA
acacgaggacctgctcattt

SEQ ID NO: 28049 - DNA, 20 bp, synthetic construct
  misc_feature 1..20: note = Description of Artificial Sequence: Synthetic oligonucleotide
  misc_feature 1..20: note = Target: FXN; (-) strand; PAM type: YTN; PAM sequence: CTA
  source 1..20: mol_type = other DNA
ggtcctgacacgaggacctg

SEQ ID NO: 28050 - DNA, 20 bp, synthetic construct
  misc_feature 1..20: note = Description of Artificial Sequence: Synthetic oligonucleotide
  misc_feature 1..20: note = Target: FXN; (-) strand; PAM type: YTN; PAM sequence: CTA
  source 1..20: mol_type = other DNA
acctaggtcctgacacgagg

SEQ ID NO: 28051 - DNA, 20 bp, synthetic construct
  misc_feature 1..20: note = Description of Artificial Sequence: Synthetic oligonucleotide
  misc_feature 1..20: note = Target: FXN; (-) strand; PAM type: YTN; PAM sequence: TTC
  source 1..20: mol_type = other DNA
agaaactaacctaggtcctg

SEQ ID NO: 28052 - DNA, 20 bp, synthetic construct
  misc_feature 1..20: note = Description of Artificial Sequence: Synthetic oligonucleotide
  misc_feature 1..20: note = Target: FXN; (-) strand; PAM type: YTN; PAM sequence: TTT
  source 1..20: mol_type = other DNA
cagaaactaacctaggtcct

SEQ ID NO: 28053 - DNA, 20 bp, synthetic construct
  misc_feature 1..20: note = Description of Artificial Sequence: Synthetic oligonucleotide
  misc_feature 1..20: note = Target: FXN; (-) strand; PAM type: YTN; PAM sequence: TTT
  source 1..20: mol_type = other DNA
tcagaaactaacctaggtcc

SEQ ID NO: 28054 - DNA, 20 bp, synthetic construct
  misc_feature 1..20: note = Description of Artificial Sequence: Synthetic oligonucleotide
  misc_feature 1..20: note = Target: FXN; (-) strand; PAM type: YTN; PAM sequence: TTT
  source 1..20: mol_type = other DNA
ttcagaaactaacctaggtc

SEQ ID NO: 28055 - DNA, 20 bp, synthetic construct
  misc_feature 1..20: note = Description of Artificial Sequence: Synthetic oligonucleotide
  misc_feature 1..20: note = Target: FXN; (-) strand; PAM type: YTN; PAM sequence: CTT
  source 1..20: mol_type = other DNA
tttcagaaactaacctaggt

SEQ ID NO: 28056 - DNA, 20 bp, synthetic construct
  misc_feature 1..20: note = Description of Artificial Sequence: Synthetic oligonucleotide
  misc_feature 1..20: note = Target: FXN; (-) strand; PAM type: YTN; PAM sequence: TTC
  source 1..20: mol_type = other DNA
atgctttttcagaaactaac

SEQ ID NO: 28057 - DNA, 20 bp, synthetic construct
  misc_feature 1..20: note = Description of Artificial Sequence: Synthetic oligonucleotide
  misc_feature 1..20: note = Target: FXN; (-) strand; PAM type: YTN; PAM sequence: TTT
  source 1..20: mol_type = other DNA
catgctttttcagaaactaa

SEQ ID NO: 28058 - DNA, 20 bp, synthetic construct
  misc_feature 1..20: note = Description of Artificial Sequence: Synthetic oligonucleotide
  misc_feature 1..20: note = Target: FXN; (-) strand; PAM type: YTN; PAM sequence: TTT
  source 1..20: mol_type = other DNA
tcatgctttttcagaaacta

SEQ ID NO: 28059 - DNA, 20 bp, synthetic construct
  misc_feature 1..20: note = Description of Artificial Sequence: Synthetic oligonucleotide
  misc_feature 1..20: note = Target: FXN; (-) strand; PAM type: YTN; PAM sequence: CTT
  source 1..20: mol_type = other DNA
ttcatgctttttcagaaact

SEQ ID NO: 28060 - DNA, 20 bp, synthetic construct
  misc_feature 1..20: note = Description of Artificial Sequence: Synthetic oligonucleotide
  misc_feature 1..20: note = Target: FXN; (-) strand; PAM type: YTN; PAM sequence: CTG
  source 1..20: mol_type = other DNA
cttttcatgctttttcagaa

SEQ ID NO: 28061 - DNA, 20 bp, synthetic construct
  misc_feature 1..20: note = Description of Artificial Sequence: Synthetic oligonucleotide
  misc_feature 1..20: note = Target: FXN; (-) strand; PAM type: YTN; PAM sequence: TTC
  source 1..20: mol_type = other DNA
aggaggcctgcttttcatgc

SEQ ID NO: 28062 - DNA, 20 bp, synthetic construct
  misc_feature 1..20: note = Description of Artificial Sequence: Synthetic oligonucleotide
  misc_feature 1..20: note = Target: FXN; (-) strand; PAM type: YTN; PAM sequence: CTC
  source 1..20: mol_type = other DNA
ggggaagttcaggaggcctg

SEQ ID NO: 28063 - DNA, 20 bp, synthetic construct
  misc_feature 1..20: note = Description of Artificial Sequence: Synthetic oligonucleotide
  misc_feature 1..20: note = Target: FXN; (-) strand; PAM type: YTN; PAM sequence: TTG
  source 1..20: mol_type = other DNA
catcagtcactcggggaagt

SEQ ID NO: 28064 - DNA, 20 bp, synthetic construct
  misc_feature 1..20: note = Description of Artificial Sequence: Synthetic oligonucleotide
  misc_feature 1..20: note = Target: FXN; (-) strand; PAM type: YTN; PAM sequence: TTT
  source 1..20: mol_type = other DNA
gcatcagtcactcggggaag

SEQ ID NO: 28065 - DNA, 20 bp, synthetic construct
  misc_feature 1..20: note = Description of Artificial Sequence: Synthetic oligonucleotide
  misc_feature 1..20: note = Target: FXN; (-) strand; PAM type: YTN; PAM sequence: CTT
  source 1..20: mol_type = other DNA
tgcatcagtcactcggggaa

SEQ ID NO: 28066 - DNA, 20 bp, synthetic construct
  misc_feature 1..20: note = Description of Artificial Sequence: Synthetic oligonucleotide
  misc_feature 1..20: note = Target: FXN; (-) strand; PAM type: YTN; PAM sequence: CTG
  source 1..20: mol_type = other DNA
tgaagcatgcaggacgcact

SEQ ID NO: 28067 - DNA, 20 bp, synthetic construct
  misc_feature 1..20: note = Description of Artificial Sequence: Synthetic oligonucleotide
  misc_feature 1..20: note = Target: FXN; (-) strand; PAM type: YTN; PAM sequence: CTC
  source 1..20: mol_type = other DNA
catggtgctgtgaagcatgc

SEQ ID NO: 28068 - DNA, 20 bp, synthetic construct
  misc_feature 1..20: note = Description of Artificial Sequence: Synthetic oligonucleotide
  misc_feature 1..20: note = Target: FXN; (-) strand; PAM type: YTN; PAM sequence: CTC
  source 1..20: mol_type = other DNA
tccatggtgctgtgaagcat

SEQ ID NO: 28069 - DNA, 20 bp, synthetic construct
  misc_feature 1..20: note = Description of Artificial Sequence: Synthetic oligonucleotide
  misc_feature 1..20: note = Target: FXN; (-) strand; PAM type: YTN; PAM sequence: CTG
  source 1..20: mol_type = other DNA
aagatcctctccatggtgct

SEQ ID NO: 28070 - DNA, 20 bp, synthetic construct
  misc_feature 1..20: note = Description of Artificial Sequence: Synthetic oligonucleotide
  misc_feature 1..20: note = Target: FXN; (-) strand; PAM type: YTN; PAM sequence: TTG
  source 1..20: mol_type = other DNA
cccctgaagatcctctccat

SEQ ID NO: 28071 - DNA, 20 bp, synthetic construct
  misc_feature 1..20: note = Description of Artificial Sequence: Synthetic oligonucleotide
  misc_feature 1..20: note = Target: FXN; (-) strand; PAM type: YTN; PAM sequence: TTT
  source 1..20: mol_type = other DNA
gcccctgaagatcctctcca

SEQ ID NO: 28072 - DNA, 20 bp, synthetic construct
  misc_feature 1..20: note = Description of Artificial Sequence: Synthetic oligonucleotide
  misc_feature 1..20: note = Target: FXN; (-) strand; PAM type: YTN; PAM sequence: CTG
  source 1..20: mol_type = other DNA
cagtttgcccctgaagatcc

SEQ ID NO: 28073 - DNA, 20 bp, synthetic construct
  misc_feature 1..20: note = Description of Artificial Sequence: Synthetic oligonucleotide
  misc_feature 1..20: note = Target: FXN; (-) strand; PAM type: YTN; PAM sequence: TTC
  source 1..20: mol_type = other DNA
agatagtctgcagtttgccc

SEQ ID NO: 28074 - DNA, 20 bp, synthetic construct
  misc_feature 1..20: note = Description of Artificial Sequence: Synthetic oligonucleotide
  misc_feature 1..20: note = Target: FXN; (-) strand; PAM type: YTN; PAM sequence: CTG
  source 1..20: mol_type = other DNA
atggtcagtgccgtcattca

SEQ ID NO: 28075 - DNA, 20 bp, synthetic construct
  misc_feature 1..20: note = Description of Artificial Sequence: Synthetic oligonucleotide
  misc_feature 1..20: note = Target: FXN; (-) strand; PAM type: YTN; PAM sequence: TTG
  source 1..20: mol_type = other DNA
ctgatggtcagtgccgtcat

SEQ ID NO: 28076 - DNA, 20 bp, synthetic construct
  misc_feature 1..20: note = Description of Artificial Sequence: Synthetic oligonucleotide
  misc_feature 1..20: note = Target: FXN; (-) strand; PAM type: YTN; PAM sequence: TTT
  source 1..20: mol_type = other DNA
gctgatggtcagtgccgtca

SEQ ID NO: 28077 - DNA, 20 bp, synthetic construct
  misc_feature 1..20: note = Description of Artificial Sequence: Synthetic oligonucleotide
  misc_feature 1..20: note = Target: FXN; (-) strand; PAM type: YTN; PAM sequence: CTG
  source 1..20: mol_type = other DNA
cggtttgctgatggtcagtg

SEQ ID NO: 28078 - DNA, 20 bp, synthetic construct
  misc_feature 1..20: note = Description of Artificial Sequence: Synthetic oligonucleotide
  misc_feature 1..20: note = Target: FXN; (-) strand; PAM type: YTN; PAM sequence: CTC
  source 1..20: mol_type = other DNA
tgcggtttgctgatggtcag

SEQ ID NO: 28079 - DNA, 20 bp, synthetic construct
  misc_feature 1..20: note = Description of Artificial Sequence: Synthetic oligonucleotide
  misc_feature 1..20: note = Target: FXN; (-) strand; PAM type: YTN; PAM sequence: TTG
  source 1..20: mol_type = other DNA
gtcaggcagctctgcggttt

SEQ ID NO: 28080 - DNA, 20 bp, synthetic construct
  misc_feature 1..20: note = Description of Artificial Sequence: Synthetic oligonucleotide
  misc_feature 1..20: note = Target: FXN; (-) strand; PAM type: YTN; PAM sequence: CTT
  source 1..20: mol_type = other DNA
ggtcaggcagctctgcggtt

SEQ ID NO: 28081 - DNA, 20 bp, synthetic construct
  misc_feature 1..20: note = Description of Artificial Sequence: Synthetic oligonucleotide
  misc_feature 1..20: note = Target: FXN; (-) strand; PAM type: YTN; PAM sequence: TTC
  source 1..20: mol_type = other DNA
ttggtcaggcagctctgcgg

SEQ ID NO: 28082 - DNA, 20 bp, synthetic construct
  misc_feature 1..20: note = Description of Artificial Sequence: Synthetic oligonucleotide
  misc_feature 1..20: note = Target: FXN; (-) strand; PAM type: YTN; PAM sequence: TTT
  source 1..20: mol_type = other DNA
cttggtcaggcagctctgcg

SEQ ID NO: 28083 - DNA, 20 bp, synthetic construct
  misc_feature 1..20: note = Description of Artificial Sequence: Synthetic oligonucleotide
  misc_feature 1..20: note = Target: FXN; (-) strand; PAM type: YTN; PAM sequence: CTC
  source 1..20: mol_type = other DNA
gcaatttcttggtcaggcag

SEQ ID NO: 28084 - DNA, 20 bp, synthetic construct
  misc_feature 1..20: note = Description of Artificial Sequence: Synthetic oligonucleotide
  misc_feature 1..20: note = Target: FXN; (-) strand; PAM type: YTN; PAM sequence: CTG
  source 1..20: mol_type = other DNA
tctcgcaatttcttggtcag

SEQ ID NO: 28085 - DNA, 20 bp, synthetic construct
  misc_feature 1..20: note = Description of Artificial Sequence: Synthetic oligonucleotide
  misc_feature 1..20: note = Target: FXN; (-) strand; PAM type: YTN; PAM sequence: TTC
  source 1..20: mol_type = other DNA
tgtctcgcaatttcttggtc

SEQ ID NO: 28086 - DNA, 20 bp, synthetic construct
  misc_feature 1..20: note = Description of Artificial Sequence: Synthetic oligonucleotide
  misc_feature 1..20: note = Target: FXN; (-) strand; PAM type: YTN; PAM sequence: CTT
  source 1..20: mol_type = other DNA
ctgtctcgcaatttcttggt

SEQ ID NO: 28087 - DNA, 20 bp, synthetic construct
  misc_feature 1..20: note = Description of Artificial Sequence: Synthetic oligonucleotide
  misc_feature 1..20: note = Target: FXN; (-) strand; PAM type: YTN; PAM sequence: TTG
  source 1..20: mol_type = other DNA
cttctgtctcgcaatttctt

SEQ ID NO: 28088 - DNA, 20 bp, synthetic construct
  misc_feature 1..20: note = Description of Artificial Sequence: Synthetic oligonucleotide
  misc_feature 1..20: note = Target: FXN; (-) strand; PAM type: YTN; PAM sequence: CTG
  source 1..20: mol_type = other DNA
caagcattgcttctgtctcg

SEQ ID NO: 28089 - DNA, 20 bp, synthetic construct
  misc_feature 1..20: note = Description of Artificial Sequence: Synthetic oligonucleotide
  misc_feature 1..20: note = Target: FXN; (-) strand; PAM type: YTN; PAM sequence: TTC
  source 1..20: mol_type = other DNA
gcctgcaagcattgcttctg

SEQ ID NO: 28090 - DNA, 20 bp, synthetic construct
  misc_feature 1..20: note = Description of Artificial Sequence: Synthetic oligonucleotide
  misc_feature 1..20: note = Target: FXN; (-) strand; PAM type: YTN; PAM sequence: CTT
  source 1..20: mol_type = other DNA
cgcctgcaagcattgcttct

SEQ ID NO: 28091 - DNA, 20 bp, synthetic construct
  misc_feature 1..20: note = Description of Artificial Sequence: Synthetic oligonucleotide
  misc_feature 1..20: note = Target: FXN; (-) strand; PAM type: YTN; PAM sequence: TTC
  source 1..20: mol_type = other DNA
ttcgcctgcaagcattgctt

SEQ ID NO: 28092 - DNA, 20 bp, synthetic construct
  misc_feature 1..20: note = Description of Artificial Sequence: Synthetic oligonucleotide
  misc_feature 1..20: note = Target: FXN; (-) strand; PAM type: YTN; PAM sequence: CTT
  source 1..20: mol_type = other DNA
cttcgcctgcaagcattgct

SEQ ID NO: 28093 - DNA, 20 bp, synthetic construct
  misc_feature 1..20: note = Description of Artificial Sequence: Synthetic oligonucleotide
  misc_feature 1..20: note = Target: FXN; (-) strand; PAM type: YTN; PAM sequence: TTC
  source 1..20: mol_type = other DNA
ttcttcgcctgcaagcattg

SEQ ID NO: 28094 - DNA, 20 bp, synthetic construct
  misc_feature 1..20: note = Description of Artificial Sequence: Synthetic oligonucleotide
  misc_feature 1..20: note = Target: FXN; (-) strand; PAM type: YTN; PAM sequence: CTT
  source 1..20: mol_type = other DNA
cttcttcgcctgcaagcatt

SEQ ID NO: 28095 - DNA, 20 bp, synthetic construct
  misc_feature 1..20: note = Description of Artificial Sequence: Synthetic oligonucleotide
  misc_feature 1..20: note = Target: FXN; (-) strand; PAM type: YTN; PAM sequence: CTG
  source 1..20: mol_type = other DNA
gccccttcttcttcgcctgc

SEQ ID NO: 28096 - DNA, 20 bp, synthetic construct
  misc_feature 1..20: note = Description of Artificial Sequence: Synthetic oligonucleotide
  misc_feature 1..20: note = Target: FXN; (-) strand; PAM type: YTN; PAM sequence: CTG
  source 1..20: mol_type = other DNA
tgtctggccccttcttcttc

SEQ ID NO: 28097 - DNA, 20 bp, synthetic construct
  misc_feature 1..20: note = Description of Artificial Sequence: Synthetic oligonucleotide
  misc_feature 1..20: note = Target: FXN; (-) strand; PAM type: YTN; PAM sequence: TTA
  source 1..20: mol_type = other DNA
caggcgtgagccactgtgtc

SEQ ID NO: 28098 - DNA, 20 bp, synthetic construct
  misc_feature 1..20: note = Description of Artificial Sequence: Synthetic oligonucleotide
  misc_feature 1..20: note = Target: FXN; (-) strand; PAM type: YTN; PAM sequence: CTG
  source 1..20: mol_type = other DNA
ggattacaggcgtgagccac

SEQ ID NO: 28099 - DNA, 20 bp, synthetic construct
  misc_feature 1..20: note = Description of Artificial Sequence: Synthetic oligonucleotide
  misc_feature 1..20: note = Target: FXN; (-) strand; PAM type: YTN; PAM sequence: CTC
  source 1..20: mol_type = other DNA
ccaaagtgctgggattacag

SEQ ID NO: 28100 - DNA, 20 bp, synthetic construct
  misc_feature 1..20: note = Description of Artificial Sequence: Synthetic oligonucleotide
  misc_feature 1..20: note = Target: FXN; (-) strand; PAM type: YTN; PAM sequence: TTG
  source 1..20: mol_type = other DNA
gcctcccaaagtgctgggat

SEQ ID NO: 28101 - DNA, 20 bp, synthetic construct
  misc_feature 1..20: note = Description of Artificial Sequence: Synthetic oligonucleotide
  misc_feature 1..20: note = Target: FXN; (-) strand; PAM type: YTN; PAM sequence: CTT
  source 1..20: mol_type = other DNA
ggcctcccaaagtgctggga

SEQ ID NO: 28102 - DNA, 20 bp, synthetic construct
  misc_feature 1..20: note = Description of Artificial Sequence: Synthetic oligonucleotide
  misc_feature 1..20: note = Target: FXN; (-) strand; PAM type: YTN; PAM sequence: CTG
  source 1..20: mol_type = other DNA
ccttggcctcccaaagtgct

SEQ ID NO: 28103 - DNA, 20 bp, synthetic construct
  misc_feature 1..20: note = Description of Artificial Sequence: Synthetic oligonucleotide
  misc_feature 1..20: note = Target: FXN; (-) strand; PAM type: YTN; PAM sequence: CTC
  source 1..20: mol_type = other DNA
aagtgatccgcctgccttgg

SEQ ID NO: 28104 - DNA, 20 bp, synthetic construct
  misc_feature 1..20: note = Description of Artificial Sequence: Synthetic oligonucleotide
  misc_feature 1..20: note = Target: FXN; (-) strand; PAM type: YTN; PAM sequence: CTG
  source 1..20: mol_type = other DNA
acctcaagtgatccgcctgc

SEQ ID NO: 28105 - DNA, 20 bp, synthetic construct
  misc_feature 1..20: note = Description of Artificial Sequence: Synthetic oligonucleotide
  misc_feature 1..20: note = Target: FXN; (-) strand; PAM type: YTN; PAM sequence: CTC
  source 1..20: mol_type = other DNA
ctgacctcaagtgatccgcc

SEQ ID NO: 28106 - DNA, 20 bp, synthetic construct
  misc_feature 1..20: note = Description of Artificial Sequence: Synthetic oligonucleotide
  misc_feature 1..20: note = Target: FXN; (-) strand; PAM type: YTN; PAM sequence: CTC
  source 1..20: mol_type = other DNA
aaactcctgacctcaagtga

SEQ ID NO: 28107 - DNA, 20 bp, synthetic construct
  misc_feature 1..20: note = Description of Artificial Sequence: Synthetic oligonucleotide
  misc_feature 1..20: note = Target: FXN; (-) strand; PAM type: YTN; PAM sequence: CTG
  source 1..20: mol_type = other DNA
gtctcaaactcctgacctca

SEQ ID NO: 28108 - DNA, 20 bp, synthetic construct
  misc_feature 1..20: note = Description of Artificial Sequence: Synthetic oligonucleotide
  misc_feature 1..20: note = Target: FXN; (-) strand; PAM type: YTN; PAM sequence: TTG
  source 1..20: mol_type = other DNA
cccaggctggtctcaaactc

SEQ ID NO: 28109 - DNA, 20 bp, synthetic construct
  misc_feature 1..20: note = Description of Artificial Sequence: Synthetic oligonucleotide
  misc_feature 1..20: note = Target: FXN; (-) strand; PAM type: YTN; PAM sequence: CTA
  source 1..20: mol_type = other DNA
tgttgcccaggctggtctca

SEQ ID NO: 28110 - DNA, 20 bp, synthetic construct
  misc_feature 1..20: note = Description of Artificial Sequence: Synthetic oligonucleotide
  misc_feature 1..20: note = Target: FXN; (-) strand; PAM type: YTN; PAM sequence: TTC
  source 1..20: mol_type = other DNA
actatgttgcccaggctggt

SEQ ID NO: 28111 - DNA, 20 bp, synthetic construct
  misc_feature 1..20: note = Description of Artificial Sequence: Synthetic oligonucleotide
  misc_feature 1..20: note = Target: FXN; (-) strand; PAM type: YTN; PAM sequence: TTT
  source 1..20: mol_type = other DNA
cactatgttgcccaggctgg

SEQ ID NO: 28112 - DNA, 20 bp, synthetic construct
  misc_feature 1..20: note = Description of Artificial Sequence: Synthetic oligonucleotide
  misc_feature 1..20: note = Target: FXN; (-) strand; PAM type: YTN; PAM sequence: TTA
  source 1..20: mol_type = other DNA
gtagagacagggtttcacta

SEQ ID NO: 28113 - DNA, 20 bp, synthetic construct
  misc_feature 1..20: note = Description of Artificial Sequence: Synthetic oligonucleotide
  misc_feature 1..20: note = Target: FXN; (-) strand; PAM type: YTN; PAM sequence: TTT
  source 1..20: mol_type = other DNA
agtagagacagggtttcact

SEQ ID NO: 28114 - DNA, 20 bp, synthetic construct
  misc_feature 1..20: note = Description of Artificial Sequence: Synthetic oligonucleotide
  misc_feature 1..20: note = Target: FXN; (-) strand; PAM type: YTN; PAM sequence: TTT
  source 1..20: mol_type = other DNA
tagtagagacagggtttcac

SEQ ID NO: 28115 - DNA, 20 bp, synthetic construct
  misc_feature 1..20: note = Description of Artificial Sequence: Synthetic oligonucleotide
  misc_feature 1..20: note = Target: FXN; (-) strand; PAM type: YTN; PAM sequence: TTT
  source 1..20: mol_type = other DNA
ttagtagagacagggtttca

SEQ ID NO: 28116 - DNA, 20 bp, synthetic construct
  misc_feature 1..20: note = Description of Artificial Sequence: Synthetic oligonucleotide
  misc_feature 1..20: note = Target: FXN; (-) strand; PAM type: YTN; PAM sequence: TTG
  source 1..20: mol_type = other DNA
tatttttagtagagacaggg

SEQ ID NO: 28117 - DNA, 20 bp, synthetic construct
  misc_feature 1..20: note = Description of Artificial Sequence: Synthetic oligonucleotide
  misc_feature 1..20: note = Target: FXN; (-) strand; PAM type: YTN; PAM sequence: TTT
  source 1..20: mol_type = other DNA
gtatttttagtagagacagg

SEQ ID NO: 28118 - DNA, 20 bp, synthetic construct
  misc_feature 1..20: note = Description of Artificial Sequence: Synthetic oligonucleotide
  misc_feature 1..20: note = Target: FXN; (-) strand; PAM type: YTN; PAM sequence: TTT
  source 1..20: mol_type = other DNA
tgtatttttagtagagacag

SEQ ID NO: 28119 - DNA, 20 bp, synthetic construct
  misc_feature 1..20: note = Description of Artificial Sequence: Synthetic oligonucleotide
  misc_feature 1..20: note = Target: FXN; (-) strand; PAM type: YTN; PAM sequence: TTT
  source 1..20: mol_type = other DNA
ttgtatttttagtagagaca

SEQ ID NO: 28120 - DNA, 20 bp, synthetic construct
  misc_feature 1..20: note = Description of Artificial Sequence: Synthetic oligonucleotide
  misc_feature 1..20: note = Target: FXN; (-) strand; PAM type: YTN; PAM sequence: TTT
  source 1..20: mol_type = other DNA
tttgtatttttagtagagac

SEQ ID NO: 28121 - DNA, 20 bp, synthetic construct
  misc_feature 1..20: note = Description of Artificial Sequence: Synthetic oligonucleotide
  misc_feature 1..20: note = Target: FXN; (-) strand; PAM type: YTN; PAM sequence: CTG
  source 1..20: mol_type = other DNA
gcgaattttttgtattttta

SEQ ID NO: 28122 - DNA, 20 bp, synthetic construct
  misc_feature 1..20: note = Description of Artificial Sequence: Synthetic oligonucleotide
  misc_feature 1..20: note = Target: FXN; (-) strand; PAM type: YTN; PAM sequence: CTG
  source 1..20: mol_type = other DNA
ccaccatgcctggcgaattt

SEQ ID NO: 28123 - DNA, 20 bp, synthetic construct
  misc_feature 1..20: note = Description of Artificial Sequence: Synthetic oligonucleotide
  misc_feature 1..20: note = Target: FXN; (-) strand; PAM type: YTN; PAM sequence: TTA
  source 1..20: mol_type = other DNA
caggtgcctgccaccatgcc

SEQ ID NO: 28124 - DNA, 20 bp, synthetic construct
  misc_feature 1..20: note = Description of Artificial Sequence: Synthetic oligonucleotide
  misc_feature 1..20: note = Target: FXN; (-) strand; PAM type: YTN; PAM sequence: CTG
  source 1..20: mol_type = other DNA
ggattacaggtgcctgccac

SEQ ID NO: 28125 - DNA, 20 bp, synthetic construct
  misc_feature 1..20: note = Description of Artificial Sequence: Synthetic oligonucleotide
  misc_feature 1..20: note = Target: FXN; (-) strand; PAM type: YTN; PAM sequence: CTC
  source 1..20: mol_type = other DNA
ccaagcagctgggattacag

SEQ ID NO: 28126 - DNA, 20 bp, synthetic construct
  misc_feature 1..20: note = Description of Artificial Sequence: Synthetic oligonucleotide
  misc_feature 1..20: note = Target: FXN; (-) strand; PAM type: YTN; PAM sequence: CTC
  source 1..20: mol_type = other DNA
agtctcccaagcagctggga

SEQ ID NO: 28127 - DNA, 20 bp, synthetic construct
  misc_feature 1..20: note = Description of Artificial Sequence: Synthetic oligonucleotide
  misc_feature 1..20: note = Target: FXN; (-) strand; PAM type: YTN; PAM sequence: CTG
  source 1..20: mol_type = other DNA
tctcagtctcccaagcagct

SEQ ID NO: 28128 - DNA, 20 bp, synthetic construct
  misc_feature 1..20: note = Description of Artificial Sequence: Synthetic oligonucleotide
  misc_feature 1..20: note = Target: FXN; (-) strand; PAM type: YTN; PAM sequence: CTC
  source 1..20: mol_type = other DNA
ctgtctcagtctcccaagca

SEQ ID NO: 28129 - DNA, 20 bp, synthetic construct
  misc_feature 1..20: note = Description of Artificial Sequence: Synthetic oligonucleotide
  misc_feature 1..20: note = Target: FXN; (-) strand; PAM type: YTN; PAM sequence: TTC
  source 1..20: mol_type = other DNA
tcctgtctcagtctcccaag

SEQ ID NO: 28130 - DNA, 20 bp, synthetic construct
  misc_feature 1..20: note = Description of Artificial Sequence: Synthetic oligonucleotide
  misc_feature 1..20: note = Target: FXN; (-) strand; PAM type: YTN; PAM sequence: TTC
  source 1..20: mol_type = other DNA
aagcaattctcctgtctcag

SEQ ID NO: 28131 - DNA, 20 bp, synthetic construct
  misc_feature 1..20: note = Description of Artificial Sequence: Synthetic oligonucleotide
  misc_feature 1..20: note = Target: FXN; (-) strand; PAM type: YTN; PAM sequence: CTG
  source 1..20: mol_type = other DNA
ggttcaagcaattctcctgt

SEQ ID NO: 28132 - DNA, 20 bp, synthetic construct
  misc_feature 1..20: note = Description of Artificial Sequence: Synthetic oligonucleotide
  misc_feature 1..20: note = Target: FXN; (-) strand; PAM type: YTN; PAM sequence: CTC
  source 1..20: mol_type = other DNA
ctgggttcaagcaattctcc

SEQ ID NO: 28133 - DNA, 20 bp, synthetic construct
  misc_feature 1..20: note = Description of Artificial Sequence: Synthetic oligonucleotide
  misc_feature 1..20: note = Target: FXN; (-) strand; PAM type: YTN; PAM sequence: TTC
  source 1..20: mol_type = other DNA
gcctcctgggttcaagcaat

SEQ ID NO: 28134 - DNA, 20 bp, synthetic construct
  misc_feature 1..20: note = Description of Artificial Sequence: Synthetic oligonucleotide
  misc_feature 1..20: note = Target: FXN; (-) strand; PAM type: YTN; PAM sequence: CTT
  source 1..20: mol_type = other DNA
cgcctcctgggttcaagcaa

SEQ ID NO: 28135 - DNA, 20 bp, synthetic construct
  misc_feature 1..20: note = Description of Artificial Sequence: Synthetic oligonucleotide
  misc_feature 1..20: note = Target: FXN; (-) strand; PAM type: YTN; PAM sequence: TTA
  source 1..20: mol_type = other DNA
caaccttcgcctcctgggtt

SEQ ID NO: 28136 - DNA, 20 bp, synthetic construct
  misc_feature 1..20: note = Description of Artificial Sequence: Synthetic oligonucleotide
  misc_feature 1..20: note = Target: FXN; (-) strand; PAM type: YTN; PAM sequence: TTC
  source 1..20: mol_type = other DNA
gttacaaccttcgcctcctg

SEQ ID NO: 28137 - DNA, 20 bp, synthetic construct
  misc_feature 1..20: note = Description of Artificial Sequence: Synthetic oligonucleotide
  misc_feature 1..20: note = Target: FXN; (-) strand; PAM type: YTN; PAM sequence: TTC
  source 1..20: mol_type = other DNA
agttcgttacaaccttcgcc

SEQ ID NO: 28138 - DNA, 20 bp, synthetic construct
  misc_feature 1..20: note = Description of Artificial Sequence: Synthetic oligonucleotide
  misc_feature 1..20: note = Target: FXN; (-) strand; PAM type: YTN; PAM sequence: TTT
  source 1..20: mol_type = other DNA
cagttcgttacaaccttcgc

SEQ ID NO: 28139 - DNA, 20 bp, synthetic construct
  misc_feature 1..20: note = Description of Artificial Sequence: Synthetic oligonucleotide
  misc_feature 1..20: note = Target: FXN; (-) strand; PAM type: YTN; PAM sequence: CTG
  source 1..20: mol_type = other DNA
tggcacgatttcagttcgtt

SEQ ID NO: 28140 - DNA, 20 bp, synthetic construct
  misc_feature 1..20: note = Description of Artificial Sequence: Synthetic oligonucleotide
  misc_feature 1..20: note = Target: FXN; (-) strand; PAM type: YTN; PAM sequence: CTG
  source 1..20: mol_type = other DNA
tcgcccaggatggagtgctg

SEQ ID NO: 28141 - DNA, 20 bp, synthetic construct
  misc_feature 1..20: note = Description of Artificial Sequence: Synthetic oligonucleotide
  misc_feature 1..20: note = Target: FXN; (-) strand; PAM type: YTN; PAM sequence: CTC
  source 1..20: mol_type = other DNA
tgtcgcccaggatggagtgc

SEQ ID NO: 28142 - DNA, 20 bp, synthetic construct
  misc_feature 1..20: note = Description of Artificial Sequence: Synthetic oligonucleotide
  misc_feature 1..20: note = Target: FXN; (-) strand; PAM type: YTN; PAM sequence: CTC
  source 1..20: mol_type = other DNA
actctgtcgcccaggatgga

SEQ ID NO: 28143 - DNA, 20 bp, synthetic construct
  misc_feature 1..20: note = Description of Artificial Sequence: Synthetic oligonucleotide
  misc_feature 1..20: note = Target: FXN; (-) strand; PAM type: YTN; PAM sequence: TTG
  source 1..20: mol_type = other DNA
agacagtctcactctgtcgc

SEQ ID NO: 28144 - DNA, 20 bp, synthetic construct
  misc_feature 1..20: note = Description of Artificial Sequence: Synthetic oligonucleotide
  misc_feature 1..20: note = Target: FXN; (-) strand; PAM type: YTN; PAM sequence: TTT
  source 1..20: mol_type = other DNA
gagacagtctcactctgtcg

SEQ ID NO: 28145 - DNA, 20 bp, synthetic construct
  misc_feature 1..20: note = Description of Artificial Sequence: Synthetic oligonucleotide
  misc_feature 1..20: note = Target: FXN; (-) strand; PAM type: YTN; PAM sequence: TTT
  source 1..20: mol_type = other DNA
tgagacagtctcactctgtc

SEQ ID NO: 28146 - DNA, 20 bp, synthetic construct
  misc_feature 1..20: note = Description of Artificial Sequence: Synthetic oligonucleotide
  misc_feature 1..20: note = Target: FXN; (-) strand; PAM type: YTN; PAM sequence: TTT
  source 1..20: mol_type = other DNA
ttgagacagtctcactctgt

SEQ ID NO: 28147 - DNA, 20 bp, synthetic construct
  misc_feature 1..20: note = Description of Artificial Sequence: Synthetic oligonucleotide
  misc_feature 1..20: note = Target: FXN; (-) strand; PAM type: YTN; PAM sequence: TTT
  source 1..20: mol_type = other DNA
tttgagacagtctcactctg

SEQ ID NO: 28148 - DNA, 20 bp, synthetic construct
  misc_feature 1..20: note = Description of Artificial Sequence: Synthetic oligonucleotide
  misc_feature 1..20: note = Target: FXN; (-) strand; PAM type: YTN; PAM sequence: TTT
  source 1..20: mol_type = other DNA
ttttgagacagtctcactct

SEQ ID NO: 28149 - DNA, 20 bp, synthetic construct
  misc_feature 1..20: note = Description of Artificial Sequence: Synthetic oligonucleotide
  misc_feature 1..20: note = Target: FXN; (-) strand; PAM type: YTN; PAM sequence: CTT
  source 1..20: mol_type = other DNA
tttttgagacagtctcactc

SEQ ID NO: 28150 - DNA, 20 bp, synthetic construct
  misc_feature 1..20: note = Description of Artificial Sequence: Synthetic oligonucleotide
  misc_feature 1..20: note = Target: FXN; (-) strand; PAM type: YTN; PAM sequence: CTC
  source 1..20: mol_type = other DNA
ctttttttgagacagtctca

SEQ ID NO: 28151 - DNA, 20 bp, synthetic construct
  misc_feature 1..20: note = Description of Artificial Sequence: Synthetic oligonucleotide
  misc_feature 1..20: note = Target: FXN; (-) strand; PAM type: YTN; PAM sequence: CTC
  source 1..20: mol_type = other DNA
ctcctttttttgagacagtc

SEQ ID NO: 28152 - DNA, 20 bp, synthetic construct
  misc_feature 1..20: note = Description of Artificial Sequence: Synthetic oligonucleotide
  misc_feature 1..20: note = Target: FXN; (-) strand; PAM type: YTN; PAM sequence: TTC
  source 1..20: mol_type = other DNA
tcctcctttttttgagacag

SEQ ID NO: 28153 - DNA, 20 bp, synthetic construct
  misc_feature 1..20: note = Description of Artificial Sequence: Synthetic oligonucleotide
  misc_feature 1..20: note = Target: FXN; (-) strand; PAM type: YTN; PAM sequence: CTT
  source 1..20: mol_type = other DNA
ctcctcctttttttgagaca

SEQ ID NO: 28154 - DNA, 20 bp, synthetic construct
  misc_feature 1..20: note = Description of Artificial Sequence: Synthetic oligonucleotide
  misc_feature 1..20: note = Target: FXN; (-) strand; PAM type: YTN; PAM sequence: TTC
  source 1..20: mol_type = other DNA
ttctcctcctttttttgaga

SEQ ID NO: 28155 - DNA, 20 bp, synthetic construct
  misc_feature 1..20: note = Description of Artificial Sequence: Synthetic oligonucleotide
  misc_feature 1..20: note = Target: FXN; (-) strand; PAM type: YTN; PAM sequence: CTT
  source 1..20: mol_type = other DNA
cttctcctcctttttttgag

SEQ ID NO: 28156 - DNA, 20 bp, synthetic construct
  misc_feature 1..20: note = Description of Artificial Sequence: Synthetic oligonucleotide
  misc_feature 1..20: note = Target: FXN; (-) strand; PAM type: YTN; PAM sequence: TTC
  source 1..20: mol_type = other DNA
cttcttctcctccttttttt

SEQ ID NO: 28157 - DNA, 20 bp, synthetic construct
  misc_feature 1..20: note = Description of Artificial Sequence: Synthetic oligonucleotide
  misc_feature 1..20: note = Target: FXN; (-) strand; PAM type: YTN; PAM sequence: TTT
  source 1..20: mol_type = other DNA
ccttcttctcctcctttttt

SEQ ID NO: 28158 - DNA, 20 bp, synthetic construct
  misc_feature 1..20: note = Description of Artificial Sequence: Synthetic oligonucleotide
  misc_feature 1..20: note = Target: FXN; (-) strand; PAM type: YTN; PAM sequence: CTT
  source 1..20: mol_type = other DNA
tccttcttctcctccttttt

SEQ ID NO: 28159 - DNA, 20 bp, synthetic construct
  misc_feature 1..20: note = Description of Artificial Sequence: Synthetic oligonucleotide
  misc_feature 1..20: note = Target: FXN; (-) strand; PAM type: YTN; PAM sequence: TTG
  source 1..20: mol_type = other DNA
gcctttccttcttctcctcc

SEQ ID NO: 28160 - DNA, 20 bp, synthetic construct
  misc_feature 1..20: note = Description of Artificial Sequence: Synthetic oligonucleotide
  misc_feature 1..20: note = Target: FXN; (-) strand; PAM type: YTN; PAM sequence: CTT
  source 1..20: mol_type = other DNA
ggcctttccttcttctcctc

SEQ ID NO: 28161 - DNA, 20 bp, synthetic construct
  misc_feature 1..20: note = Description of Artificial Sequence: Synthetic oligonucleotide
  misc_feature 1..20: note = Target: FXN; (-) strand; PAM type: YTN; PAM sequence: CTG
  source 1..20: mol_type = other DNA
ccttggcctttccttcttct

SEQ ID NO: 28162 - DNA, 20 bp, synthetic construct
  misc_feature 1..20: note = Description of Artificial Sequence: Synthetic oligonucleotide
  misc_feature 1..20: note = Target: FXN; (-) strand; PAM type: YTN; PAM sequence: TTC
  source 1..20: mol_type = other DNA
ctgccttggcctttccttct

SEQ ID NO: 28163 - DNA, 20 bp, synthetic construct
  misc_feature 1..20: note = Description of Artificial Sequence: Synthetic oligonucleotide
  misc_feature 1..20: note = Target: FXN; (-) strand; PAM type: YTN; PAM sequence: TTC
  source 1..20: mol_type = other DNA
attcctgccttggcctttcc

SEQ ID NO: 28164 - DNA, 20 bp, synthetic construct
  misc_feature 1..20: note = Description of Artificial Sequence: Synthetic oligonucleotide
  misc_feature 1..20: note = Target: FXN; (-) strand; PAM type: YTN; PAM sequence: TTT
  source 1..20: mol_type = other DNA
cattcctgccttggcctttc

SEQ ID NO: 28165 - DNA, 20 bp, synthetic construct
  misc_feature 1..20: note = Description of Artificial Sequence: Synthetic oligonucleotide
  misc_feature 1..20: note = Target: FXN; (-) strand; PAM type: YTN; PAM sequence: CTG
  source 1..20: mol_type = other DNA
tttcattcctgccttggcct

SEQ ID NO: 28166 - DNA, 20 bp, synthetic construct
  misc_feature 1..20: note = Description of Artificial Sequence: Synthetic oligonucleotide
  misc_feature 1..20: note = Target: FXN; (-) strand; PAM type: YTN; PAM sequence: TTC
  source 1..20: mol_type = other DNA
atggcctgtttcattcctgc

SEQ ID NO: 28167 - DNA, 20 bp, synthetic construct
  misc_feature 1..20: note = Description of Artificial Sequence: Synthetic oligonucleotide
  misc_feature 1..20: note = Target: FXN; (-) strand; PAM type: YTN; PAM sequence: CTC
  source 1..20: mol_type = other DNA
caacattcatggcctgtttc

SEQ ID NO: 28168 - DNA, 20 bp, synthetic construct
  misc_feature 1..20: note = Description of Artificial Sequence: Synthetic oligonucleotide
  misc_feature 1..20: note = Target: FXN; (-) strand; PAM type: YTN; PAM sequence: TTC
  source 1..20: mol_type = other DNA
actccaacattcatggcctg

SEQ ID NO: 28169 - DNA, 20 bp, synthetic construct
  misc_feature 1..20: note = Description of Artificial Sequence: Synthetic oligonucleotide
  misc_feature 1..20: note = Target: FXN; (-) strand; PAM type: YTN; PAM sequence: CTT
  source 1..20: mol_type = other DNA
cactccaacattcatggcct

SEQ ID NO: 28170 - DNA, 20 bp, synthetic construct
  misc_feature 1..20: note = Description of Artificial Sequence: Synthetic oligonucleotide
  misc_feature 1..20: note = Target: FXN; (-) strand; PAM type: YTN; PAM sequence: TTG
  source 1..20: mol_type = other DNA
cttcactccaacattcatgg

SEQ ID NO: 28171 - DNA, 20 bp, synthetic construct
  misc_feature 1..20: note = Description of Artificial Sequence: Synthetic oligonucleotide
  misc_feature 1..20: note = Target: FXN; (-) strand; PAM type: YTN; PAM sequence: TTA
  source 1..20: mol_type = other DNA
gcacgaggaggccagttgct

SEQ ID NO: 28172 - DNA, 20 bp, synthetic construct
  misc_feature 1..20: note = Description of Artificial Sequence: Synthetic oligonucleotide
  misc_feature 1..20: note = Target: FXN; (-) strand; PAM type: YTN; PAM sequence: CTT
  source 1..20: mol_type = other DNA
agcacgaggaggccagttgc

SEQ ID NO: 28173 - DNA, 20 bp, synthetic construct
  misc_feature 1..20: note = Description of Artificial Sequence: Synthetic oligonucleotide
  misc_feature 1..20: note = Target: FXN; (-) strand; PAM type: YTN; PAM sequence: CTC
  source 1..20: mol_type = other DNA
acagtagccgcttagcacga

SEQ ID NO: 28174 - DNA, 20 bp, synthetic construct
  misc_feature 1..20: note = Description of Artificial Sequence: Synthetic oligonucleotide
  misc_feature 1..20: note = Target: FXN; (-) strand; PAM type: YTN; PAM sequence: TTG
  source 1..20: mol_type = other DNA
ggggagtggaaagaactcac

SEQ ID NO: 28175 - DNA, 20 bp, synthetic construct
  misc_feature 1..20: note = Description of Artificial Sequence: Synthetic oligonucleotide
  misc_feature 1..20: note = Target: FXN; (-) strand; PAM type: YTN; PAM sequence: CTT
  source 1..20: mol_type = other DNA
gggggagtggaaagaactca

SEQ ID NO: 28176 - DNA, 20 bp, synthetic construct
  misc_feature 1..20: note = Description of Artificial Sequence: Synthetic oligonucleotide
  misc_feature 1..20: note = Target: FXN; (-) strand; PAM type: YTN; PAM sequence: TTA
  source 1..20: mol_type = other DNA
tgcaatgtcttgggggagtg

SEQ ID NO: 28177 - DNA, 20 bp, synthetic construct
  misc_feature 1..20: note = Description of Artificial Sequence: Synthetic oligonucleotide
  misc_feature 1..20: note = Target: FXN; (-) strand; PAM type: YTN; PAM sequence: TTT
  source 1..20: mol_type = other DNA
atgcaatgtcttgggggagt

SEQ ID NO: 28178 - DNA, 20 bp, synthetic construct
  misc_feature 1..20: note = Description of Artificial Sequence: Synthetic oligonucleotide
  misc_feature 1..20: note = Target: FXN; (-) strand; PAM type: YTN; PAM sequence: TTA
  source 1..20: mol_type = other DNA
tttatgcaatgtcttggggg

SEQ ID NO: 28179 - DNA, 20 bp, synthetic construct
  misc_feature 1..20: note = Description of Artificial Sequence: Synthetic oligonucleotide
  misc_feature 1..20: note = Target: FXN; (-) strand; PAM type: YTN; PAM sequence: TTC
  source 1..20: mol_type = other DNA
agcggggtgagtgtcagaaa

SEQ ID NO: 28180 - DNA, 20 bp, synthetic construct
  misc_feature 1..20: note = Description of Artificial Sequence: Synthetic oligonucleotide
  misc_feature 1..20: note = Target: FXN; (-) strand; PAM type: YTN; PAM sequence: TTG
  source 1..20: mol_type = other DNA
agcagaggcaggacattcag

SEQ ID NO: 28181 - DNA, 20 bp, synthetic construct
  misc_feature 1..20: note = Description of Artificial Sequence: Synthetic oligonucleotide
  misc_feature 1..20: note = Target: FXN; (-) strand; PAM type: YTN; PAM sequence: CTT
  source 1..20: mol_type = other DNA
gagcagaggcaggacattca

SEQ ID NO: 28182 - DNA, 20 bp, synthetic construct
  misc_feature 1..20: note = Description of Artificial Sequence: Synthetic oligonucleotide
  misc_feature 1..20: note = Target: FXN; (-) strand; PAM type: YTN; PAM sequence: CTG
  source 1..20: mol_type = other DNA
ccaagtccccatcataccac

SEQ ID NO: 28183 - DNA, 20 bp, synthetic construct
  misc_feature 1..20: note = Description of Artificial Sequence: Synthetic oligonucleotide
  misc_feature 1..20: note = Target: FXN; (-) strand; PAM type: YTN; PAM sequence: CTC
  source 1..20: mol_type = other DNA
cactgccaagtccccatcat

SEQ ID NO: 28184 - DNA, 20 bp, synthetic construct
  misc_feature 1..20: note = Description of Artificial Sequence: Synthetic oligonucleotide
  misc_feature 1..20: note = Target: FXN; (-) strand; PAM type: YTN; PAM sequence: TTC
  source 1..20: mol_type = other DNA
ccctccactgccaagtcccc

SEQ ID NO: 28185 - DNA, 20 bp, synthetic construct
  misc_feature 1..20: note = Description of Artificial Sequence: Synthetic oligonucleotide
  misc_feature 1..20: note = Target: FXN; (-) strand; PAM type: YTN; PAM sequence: CTG
  source 1..20: mol_type = other DNA
ttcccctccactgccaagtc

SEQ ID NO: 28186 - DNA, 20 bp, synthetic construct
  misc_feature 1..20: note = Description of Artificial Sequence: Synthetic oligonucleotide
  misc_feature 1..20: note = Target: FXN; (-) strand; PAM type: YTN; PAM sequence: TTC
  source 1..20: mol_type = other DNA
cctgttcccctccactgcca

SEQ ID NO: 28187 - DNA, 20 bp, synthetic construct
  misc_feature 1..20: note = Description of Artificial Sequence: Synthetic oligonucleotide
  misc_feature 1..20: note = Target: FXN; (-) strand; PAM type: YTN; PAM sequence: TTT
  source 1..20: mol_type = other DNA
ccctgttcccctccactgcc

SEQ ID NO: 28188 - DNA, 20 bp, synthetic construct
  misc_feature 1..20: note = Description of Artificial Sequence: Synthetic oligonucleotide
  misc_feature 1..20: note = Target: FXN; (-) strand; PAM type: YTN; PAM sequence: CTG
  source 1..20: mol_type = other DNA
gtttccctgttcccctccac

SEQ ID NO: 28189 - DNA, 20 bp, synthetic construct
  misc_feature 1..20: note = Description of Artificial Sequence: Synthetic oligonucleotide
  misc_feature 1..20: note = Target: FXN; (-) strand; PAM type: YTN; PAM sequence: TTG
  source 1..20: mol_type = other DNA
tagccaggaagcggggagac

SEQ ID NO: 28190 - DNA, 20 bp, synthetic construct
  misc_feature 1..20: note = Description of Artificial Sequence: Synthetic oligonucleotide
  misc_feature 1..20: note = Target: FXN; (-) strand; PAM type: YTN; PAM sequence: CTT
  source 1..20: mol_type = other DNA
gtagccaggaagcggggaga

SEQ ID NO: 28191 - DNA, 20 bp, synthetic construct
  misc_feature 1..20: note = Description of Artificial Sequence: Synthetic oligonucleotide
  misc_feature 1..20: note = Target: FXN; (-) strand; PAM type: YTN; PAM sequence: TTC
  source 1..20: mol_type = other DNA
agagggacttgtagccagga

SEQ ID NO: 28192 - DNA, 20 bp, synthetic construct
  misc_feature 1..20: note = Description of Artificial Sequence: Synthetic oligonucleotide
  misc_feature 1..20: note = Target: FXN; (-) strand; PAM type: YTN; PAM sequence: CTT
  source 1..20: mol_type = other DNA
cagagggacttgtagccagg

SEQ ID NO: 28193 - DNA, 20 bp, synthetic construct
  misc_feature 1..20: note = Description of Artificial Sequence: Synthetic oligonucleotide
  misc_feature 1..20: note = Target: FXN; (-) strand; PAM type: YTN; PAM sequence: TTC
  source 1..20: mol_type = other DNA
ttcagagggacttgtagcca

SEQ ID NO: 28194 - DNA, 20 bp, synthetic construct
  misc_feature 1..20: note = Description of Artificial Sequence: Synthetic oligonucleotide
  misc_feature 1..20: note = Target: FXN; (-) strand; PAM type: YTN; PAM sequence: TTT
  source 1..20: mol_type = other DNA
cttcagagggacttgtagcc

SEQ ID NO: 28195 - DNA, 20 bp, synthetic construct
  misc_feature 1..20: note = Description of Artificial Sequence: Synthetic oligonucleotide
  misc_feature 1..20: note = Target: FXN; (-) strand; PAM type: YTN; PAM sequence: TTG
  source 1..20: mol_type = other DNA
gatttcttcagagggacttg

SEQ ID NO: 28196 - DNA, 20 bp, synthetic construct
  misc_feature 1..20: note = Description of Artificial Sequence: Synthetic oligonucleotide
  misc_feature 1..20: note = Target: FXN; (-) strand; PAM type: YTN; PAM sequence: TTT
  source 1..20: mol_type = other DNA
ggatttcttcagagggactt

SEQ ID NO: 28197 - DNA, 20 bp, synthetic construct
  misc_feature 1..20: note = Description of Artificial Sequence: Synthetic oligonucleotide
  misc_feature 1..20: note = Target: FXN; (-) strand; PAM type: YTN; PAM sequence: CTT
  source 1..20: mol_type = other DNA
tggatttcttcagagggact

SEQ ID NO: 28198 - DNA, 20 bp, synthetic construct
  misc_feature 1..20: note = Description of Artificial Sequence: Synthetic oligonucleotide
  misc_feature 1..20: note = Target: FXN; (-) strand; PAM type: YTN; PAM sequence: CTC
  source 1..20: mol_type = other DNA
ctttggatttcttcagaggg

SEQ ID NO: 28199 - DNA, 20 bp, synthetic construct
  misc_feature 1..20: note = Description of Artificial Sequence: Synthetic oligonucleotide
  misc_feature 1..20: note = Target: FXN; (-) strand; PAM type: YTN; PAM sequence: TTA
  source 1..20: mol_type = other DNA
ctcctttggatttcttcaga

SEQ ID NO: 28200 - DNA, 20 bp, synthetic construct
  misc_feature 1..20: note = Description of Artificial Sequence: Synthetic oligonucleotide
  misc_feature 1..20: note = Target: FXN; (-) strand; PAM type: YTN; PAM sequence: TTT
  source 1..20: mol_type = other DNA
actcctttggatttcttcag

SEQ ID NO: 28201 - DNA, 20 bp, synthetic construct
  misc_feature 1..20: note = Description of Artificial Sequence: Synthetic oligonucleotide
  misc_feature 1..20: note = Target: FXN; (-) strand; PAM type: YTN; PAM sequence: CTT
  source 1..20: mol_type = other DNA
tactcctttggatttcttca

SEQ ID NO: 28202 - DNA, 20 bp, synthetic construct
  misc_feature 1..20: note = Description of Artificial Sequence: Synthetic oligonucleotide
  misc_feature 1..20: note = Target: FXN; (-) strand; PAM type: YTN; PAM sequence: CTC
  source 1..20: mol_type = other DNA
tttactcctttggatttctt

SEQ ID NO: 28203 - DNA, 20 bp, synthetic construct
  misc_feature 1..20: note = Description of Artificial Sequence: Synthetic oligonucleotide
  misc_feature 1..20: note = Target: FXN; (-) strand; PAM type: YTN; PAM sequence: CTC
  source 1..20: mol_type = other DNA
caagctctttactcctttgg

SEQ ID NO: 28204 - DNA, 20 bp, synthetic construct
  misc_feature 1..20: note = Description of Artificial Sequence: Synthetic oligonucleotide
  misc_feature 1..20: note = Target: FXN; (-) strand; PAM type: YTN; PAM sequence: CTC
  source 1..20: mol_type = other DNA
tccaagctctttactccttt

SEQ ID NO: 28205 - DNA, 20 bp, synthetic construct
  misc_feature 1..20: note = Description of Artificial Sequence: Synthetic oligonucleotide
  misc_feature 1..20: note = Target: FXN; (-) strand; PAM type: YTN; PAM sequence: CTA
  source 1..20: mol_type = other DNA
ctctccaagctctttactcc

SEQ ID NO: 28206 - DNA, 20 bp, synthetic construct
  misc_feature 1..20: note = Description of Artificial Sequence: Synthetic oligonucleotide
  misc_feature 1..20: note = Target: FXN; (-) strand; PAM type: YTN; PAM sequence: CTA
  source 1..20: mol_type = other DNA
cagaggcctactctccaagc

SEQ ID NO: 28207 - DNA, 20 bp, synthetic construct
  misc_feature 1..20: note = Description of Artificial Sequence: Synthetic oligonucleotide
  misc_feature 1..20: note = Target: FXN; (-) strand; PAM type: YTN; PAM sequence: TTG
  source 1..20: mol_type = other DNA
caccctacagaggcctactc

SEQ ID NO: 28208 - DNA, 20 bp, synthetic construct
  misc_feature 1..20: note = Description of Artificial Sequence: Synthetic oligonucleotide
  misc_feature 1..20: note = Target: FXN; (-) strand; PAM type: YTN; PAM sequence: CTT
  source 1..20: mol_type = other DNA
gcaccctacagaggcctact

SEQ ID NO: 28209 - DNA, 20 bp, synthetic construct
  misc_feature 1..20: note = Description of Artificial Sequence: Synthetic oligonucleotide
  misc_feature 1..20: note = Target: FXN; (-) strand; PAM type: YTN; PAM sequence: CTG
  source 1..20: mol_type = other DNA
tgcccttgcaccctacagag

SEQ ID NO: 28210 - DNA, 20 bp, synthetic construct
  misc_feature 1..20: note = Description of Artificial Sequence: Synthetic oligonucleotide
  misc_feature 1..20: note = Target: FXN; (-) strand; PAM type: YTN; PAM sequence: CTC
  source 1..20: mol_type = other DNA
cagctgtgcccttgcaccct

SEQ ID NO: 28211 - DNA, 20 bp, synthetic construct
  misc_feature 1..20: note = Description of Artificial Sequence: Synthetic oligonucleotide
  misc_feature 1..20: note = Target: FXN; (-) strand; PAM type: YTN; PAM sequence: CTC
  source 1..20: mol_type = other DNA
cgtctccagctgtgcccttg

SEQ ID NO: 28212 - DNA, 20 bp, synthetic construct
  misc_feature 1..20: note = Description of Artificial Sequence: Synthetic oligonucleotide
  misc_feature 1..20: note = Target: FXN; (-) strand; PAM type: YTN; PAM sequence: CTC
  source 1..20: mol_type = other DNA
aggagctccgtctccagctg

SEQ ID NO: 28213 - DNA, 20 bp, synthetic construct
  misc_feature 1..20: note = Description of Artificial Sequence: Synthetic oligonucleotide
  misc_feature 1..20: note = Target: FXN; (-) strand; PAM type: YTN; PAM sequence: CTG
  source 1..20: mol_type = other DNA
cagcctcaggagctccgtct

SEQ ID NO: 28214 - DNA, 20 bp, synthetic construct
  misc_feature 1..20: note = Description of Artificial Sequence: Synthetic oligonucleotide
  misc_feature 1..20: note = Target: FXN; (-) strand; PAM type: YTN; PAM sequence: TTC
  source 1..20: mol_type = other DNA
aggcagagcgggcagcatca

SEQ ID NO: 28215 - DNA, 20 bp, synthetic construct
  misc_feature 1..20: note = Description of Artificial Sequence: Synthetic oligonucleotide
  misc_feature 1..20: note = Target: FXN; (-) strand; PAM type: YTN; PAM sequence: TTG
  source 1..20: mol_type = other DNA
gtgcagttcaggcagagcgg

SEQ ID NO: 28216 - DNA, 20 bp, synthetic construct
  misc_feature 1..20: note = Description of Artificial Sequence: Synthetic oligonucleotide
  misc_feature 1..20: note = Target: FXN; (-) strand; PAM type: YTN; PAM sequence: TTT
  source 1..20: mol_type = other DNA
ggtgcagttcaggcagagcg

SEQ ID NO: 28217 - DNA, 20 bp, synthetic construct
  misc_feature 1..20: note = Description of Artificial Sequence: Synthetic oligonucleotide
  misc_feature 1..20: note = Target: FXN; (-) strand; PAM type: YTN; PAM sequence: TTT
  source 1..20: mol_type = other DNA
tggtgcagttcaggcagagc

SEQ ID NO: 28218 - DNA, 20 bp, synthetic construct
  misc_feature 1..20: note = Description of Artificial Sequence: Synthetic oligonucleotide
  misc_feature 1..20: note = Target: FXN; (-) strand; PAM type: YTN; PAM sequence: TTT
  source 1..20: mol_type = other DNA
ttggtgcagttcaggcagag

SEQ ID NO: 28219 - DNA, 20 bp, synthetic construct
  misc_feature 1..20: note = Description of Artificial Sequence: Synthetic oligonucleotide
  misc_feature 1..20: note = Target: FXN; (-) strand; PAM type: YTN; PAM sequence: CTC
  source 1..20: mol_type = other DNA
atcacgtttttggtgcagtt

SEQ ID NO: 28220 - DNA, 20 bp, synthetic construct
  misc_feature 1..20: note = Description of Artificial Sequence: Synthetic oligonucleotide
  misc_feature 1..20: note = Target: FXN; (-) strand; PAM type: YTN; PAM sequence: CTA
  source 1..20: mol_type = other DNA
tggcctcatcacgtttttgg

SEQ ID NO: 28221 - DNA, 20 bp, synthetic construct
  misc_feature 1..20: note = Description of Artificial Sequence: Synthetic oligonucleotide
  misc_feature 1..20: note = Target: FXN; (-) strand; PAM type: YTN; PAM sequence: CTC
  source 1..20: mol_type = other DNA
ccgctatggcctcatcacgt

SEQ ID NO: 28222 - DNA, 20 bp, synthetic construct
  misc_feature 1..20: note = Description of Artificial Sequence: Synthetic oligonucleotide
  misc_feature 1..20: note = Target: FXN; (-) strand; PAM type: YTN; PAM sequence: CTC
  source 1..20: mol_type = other DNA
cgtggactcccgctatggcc

SEQ ID NO: 28223 - DNA, 20 bp, synthetic construct
  misc_feature 1..20: note = Description of Artificial Sequence: Synthetic oligonucleotide
  misc_feature 1..20: note = Target: FXN; (-) strand; PAM type: YTN; PAM sequence: CTC
  source 1..20: mol_type = other DNA
ctccgtggactcccgctatg

SEQ ID NO: 28224 - DNA, 20 bp, synthetic construct
  misc_feature 1..20: note = Description of Artificial Sequence: Synthetic oligonucleotide
  misc_feature 1..20: note = Target: FXN; (-) strand; PAM type: YTN; PAM sequence: CTA
  source 1..20: mol_type = other DNA
gaggtcgggcagtaggcatc

SEQ ID NO: 28225 - DNA, 20 bp, synthetic construct
  misc_feature 1..20: note = Description of Artificial Sequence: Synthetic oligonucleotide
  misc_feature 1..20: note = Target: FXN; (-) strand; PAM type: YTN; PAM sequence: CTG
  source 1..20: mol_type = other DNA
ctagaggtcgggcagtaggc

SEQ ID NO: 28226 - DNA, 20 bp, synthetic construct
  misc_feature 1..20: note = Description of Artificial Sequence: Synthetic oligonucleotide
  misc_feature 1..20: note = Target: FXN; (-) strand; PAM type: YTN; PAM sequence: CTC
  source 1..20: mol_type = other DNA
tgctagaggtcgggcagtag

SEQ ID NO: 28227 - DNA, 20 bp, synthetic construct
  misc_feature 1..20: note = Description of Artificial Sequence: Synthetic oligonucleotide
  misc_feature 1..20: note = Target: FXN; (-) strand; PAM type: YTN; PAM sequence: TTA
  source 1..20: mol_type = other DNA
gtctctgctagaggtcgggc

SEQ ID NO: 28228 - DNA, 20 bp, synthetic construct
  misc_feature 1..20: note = Description of Artificial Sequence: Synthetic oligonucleotide
  misc_feature 1..20: note = Target: FXN; (-) strand; PAM type: YTN; PAM sequence: CTT
  source 1..20: mol_type = other DNA
agtctctgctagaggtcggg

SEQ ID NO: 28229 - DNA, 20 bp, synthetic construct
  misc_feature 1..20: note = Description of Artificial Sequence: Synthetic oligonucleotide
  misc_feature 1..20: note = Target: FXN; (-) strand; PAM type: YTN; PAM sequence: TTG
  source 1..20: mol_type = other DNA
cttagtctctgctagaggtc

SEQ ID NO: 28230 - DNA, 20 bp, synthetic construct
  misc_feature 1..20: note = Description of Artificial Sequence: Synthetic oligonucleotide
  misc_feature 1..20: note = Target: FXN; (-) strand; PAM type: YTN; PAM sequence: CTT
  source 1..20: mol_type = other DNA
gcttagtctctgctagaggt

SEQ ID NO: 28231 - DNA, 20 bp, synthetic construct
  misc_feature 1..20: note = Description of Artificial Sequence: Synthetic oligonucleotide
  misc_feature 1..20: note = Target: FXN; (-) strand; PAM type: YTN; PAM sequence: TTC
  source 1..20: mol_type = other DNA
atgcaccttgcttagtctct

SEQ ID NO: 28232 - DNA, 20 bp, synthetic construct
  misc_feature 1..20: note = Description of Artificial Sequence: Synthetic oligonucleotide
  misc_feature 1..20: note = Target: FXN; (-) strand; PAM type: YTN; PAM sequence: TTT
  source 1..20: mol_type = other DNA
catgcaccttgcttagtctc

SEQ ID NO: 28233 - DNA, 20 bp, synthetic construct
  misc_feature 1..20: note = Description of Artificial Sequence: Synthetic oligonucleotide
  misc_feature 1..20: note = Target: FXN; (-) strand; PAM type: YTN; PAM sequence: TTT
  source 1..20: mol_type = other DNA
tcatgcaccttgcttagtct

SEQ ID NO: 28234 - DNA, 20 bp, synthetic construct
  misc_feature 1..20: note = Description of Artificial Sequence: Synthetic oligonucleotide
  misc_feature 1..20: note = Target: FXN; (-) strand; PAM type: YTN; PAM sequence: TTC
  source 1..20: mol_type = other DNA
aagttttcatgcaccttgct

SEQ ID NO: 28235 - DNA, 20 bp, synthetic construct
  misc_feature 1..20: note = Description of Artificial Sequence: Synthetic oligonucleotide
  misc_feature 1..20: note = Target: FXN; (-) strand; PAM type: YTN; PAM sequence: TTC
  source 1..20: mol_type = other DNA
atgtagtggtcatgggtgtg

SEQ ID NO: 28236 - DNA, 20 bp, synthetic construct
  misc_feature 1..20: note = Description of Artificial Sequence: Synthetic oligonucleotide
  misc_feature 1..20: note = Target: FXN; (-) strand; PAM type: YTN; PAM sequence: CTT
  source 1..20: mol_type = other DNA
catgtagtggtcatgggtgt

SEQ ID NO: 28237 - DNA, 20 bp, synthetic construct
  misc_feature 1..20: note = Description of Artificial Sequence: Synthetic oligonucleotide
  misc_feature 1..20: note = Target: FXN; (-) strand; PAM type: YTN; PAM sequence: TTG
  source 1..20: mol_type = other DNA
ggccatcttcatgtagtggt

SEQ ID NO: 28238 - DNA, 20 bp, synthetic construct
  misc_feature 1..20: note = Description of Artificial Sequence: Synthetic oligonucleotide
  misc_feature 1..20: note = Target: FXN; (-) strand; PAM type: YTN; PAM sequence: TTT
  source 1..20: mol_type = other DNA
gggccatcttcatgtagtgg

SEQ ID NO: 28239 - DNA, 20 bp, synthetic construct
  misc_feature 1..20: note = Description of Artificial Sequence: Synthetic oligonucleotide
  misc_feature 1..20: note = Target: FXN; (-) strand; PAM type: YTN; PAM sequence: TTT
  source 1..20: mol_type = other DNA
tgggccatcttcatgtagtg

SEQ ID NO: 28240 - DNA, 20 bp, synthetic construct
  misc_feature 1..20: note = Description of Artificial Sequence: Synthetic oligonucleotide
  misc_feature 1..20: note = Target: FXN; (-) strand; PAM type: YTN; PAM sequence: CTG
  source 1..20: mol_type = other DNA
ggccaggttttgggccatct

SEQ ID NO: 28241 - DNA, 20 bp, synthetic construct
  misc_feature 1..20: note = Description of Artificial Sequence: Synthetic oligonucleotide
  misc_feature 1..20: note = Target: FXN; (-) strand; PAM type: YTN; PAM sequence: TTC
  source 1..20: mol_type = other DNA
ctgggccaggttttgggcca

SEQ ID NO: 28242 - DNA, 20 bp, synthetic construct
  misc_feature 1..20: note = Description of Artificial Sequence: Synthetic oligonucleotide
  misc_feature 1..20: note = Target: FXN; (-) strand; PAM type: YTN; PAM sequence: TTC
  source 1..20: mol_type = other DNA
aattcctgggccaggttttg

SEQ ID NO: 28243 - DNA, 20 bp, synthetic construct
  misc_feature 1..20: note = Description of Artificial Sequence: Synthetic oligonucleotide
  misc_feature 1..20: note = Target: FXN; (-) strand; PAM type: YTN; PAM sequence: CTT
  source 1..20: mol_type = other DNA
caattcctgggccaggtttt

SEQ ID NO: 28244 - DNA, 20 bp, synthetic construct
  misc_feature 1..20: note = Description of Artificial Sequence: Synthetic oligonucleotide
  misc_feature 1..20: note = Target: FXN; (-) strand; PAM type: YTN; PAM sequence: TTC
  source 1..20: mol_type = other DNA
ttcaattcctgggccaggtt

SEQ ID NO: 28245 - DNA, 20 bp, synthetic construct
  misc_feature 1..20: note = Description of Artificial Sequence: Synthetic oligonucleotide
  misc_feature 1..20: note = Target: FXN; (-) strand; PAM type: YTN; PAM sequence: TTT
  source 1..20: mol_type = other DNA
cttcaattcctgggccaggt

SEQ ID NO: 28246 - DNA, 20 bp, synthetic construct
  misc_feature 1..20: note = Description of Artificial Sequence: Synthetic oligonucleotide
  misc_feature 1..20: note = Target: FXN; (-) strand; PAM type: YTN; PAM sequence: CTT
  source 1..20: mol_type = other DNA
tcttcaattcctgggccagg

SEQ ID NO: 28247 - DNA, 20 bp, synthetic construct
  misc_feature 1..20: note = Description of Artificial Sequence: Synthetic oligonucleotide
  misc_feature 1..20: note = Target: FXN; (-) strand; PAM type: YTN; PAM sequence: TTG
  source 1..20: mol_type = other DNA
gaagagtctttcttcaattc

SEQ ID NO: 28248 - DNA, 20 bp, synthetic construct
  misc_feature 1..20: note = Description of Artificial Sequence: Synthetic oligonucleotide
  misc_feature 1..20: note = Target: FXN; (-) strand; PAM type: YTN; PAM sequence: TTA
  source 1..20: mol_type = other DNA
cagcaaattggaagagtctt

SEQ ID NO: 28249 - DNA, 20 bp, synthetic construct
  misc_feature 1..20: note = Description of Artificial Sequence: Synthetic oligonucleotide
  misc_feature 1..20: note = Target: FXN; (-) strand; PAM type: YTN; PAM sequence: CTT
  source 1..20: mol_type = other DNA
acagcaaattggaagagtct

SEQ ID NO: 28250 - DNA, 20 bp, synthetic construct
  misc_feature 1..20: note = Description of Artificial Sequence: Synthetic oligonucleotide
  misc_feature 1..20: note = Target: FXN; (-) strand; PAM type: YTN; PAM sequence: TTC
  source 1..20: mol_type = other DNA
ttacagcaaattggaagagt

SEQ ID NO: 28251 - DNA, 20 bp, synthetic construct
  misc_feature 1..20: note = Description of Artificial Sequence: Synthetic oligonucleotide
  misc_feature 1..20: note = Target: FXN; (-) strand; PAM type: YTN; PAM sequence: TTT
  source 1..20: mol_type = other DNA
cttacagcaaattggaagag

SEQ ID NO: 28252 - DNA, 20 bp, synthetic construct
  misc_feature 1..20: note = Description of Artificial Sequence: Synthetic oligonucleotide
  misc_feature 1..20: note = Target: FXN; (-) strand; PAM type: YTN; PAM sequence: TTT
  source 1..20: mol_type = other DNA
tcttacagcaaattggaaga

SEQ ID NO: 28253 - DNA, 20 bp, synthetic construct
  misc_feature 1..20: note = Description of Artificial Sequence: Synthetic oligonucleotide
  misc_feature 1..20: note = Target: FXN; (-) strand; PAM type: YTN; PAM sequence: CTG
  source 1..20: mol_type = other DNA
ggccattttcttacagcaaa

SEQ ID NO: 28254 - DNA, 20 bp, synthetic construct
  misc_feature 1..20: note = Description of Artificial Sequence: Synthetic oligonucleotide
  misc_feature 1..20: note = Target: FXN; (-) strand; PAM type: YTN; PAM sequence: TTG
  source 1..20: mol_type = other DNA
ccccctgggccattttctta

SEQ ID NO: 28255 - DNA, 20 bp, synthetic construct
  misc_feature 1..20: note = Description of Artificial Sequence: Synthetic oligonucleotide
  misc_feature 1..20: note = Target: FXN; (-) strand; PAM type: YTN; PAM sequence: CTT
  source 1..20: mol_type = other DNA
gccccctgggccattttctt

SEQ ID NO: 28256 - DNA, 20 bp, synthetic construct
  misc_feature 1..20: note = Description of Artificial Sequence: Synthetic oligonucleotide
  misc_feature 1..20: note = Target: FXN; (-) strand; PAM type: YTN; PAM sequence: CTA
  source 1..20: mol_type = other DNA
ccgtgcttgccccctgggcc

SEQ ID NO: 28257 - DNA, 20 bp, synthetic construct
  misc_feature 1..20: note = Description of Artificial Sequence: Synthetic oligonucleotide
  misc_feature 1..20: note = Target: FXN; (-) strand; PAM type: YTN; PAM sequence: TTA
  source 1..20: mol_type = other DNA
caggtgtgagctaccgtgct

SEQ ID NO: 28258 - DNA, 20 bp, synthetic construct
  misc_feature 1..20: note = Description of Artificial Sequence: Synthetic oligonucleotide
  misc_feature 1..20: note = Target: FXN; (-) strand; PAM type: YTN; PAM sequence: CTA
  source 1..20: mol_type = other DNA
ggattacaggtgtgagctac

SEQ ID NO: 28259 - DNA, 20 bp, synthetic construct
  misc_feature 1..20: note = Description of Artificial Sequence: Synthetic oligonucleotide
  misc_feature 1..20: note = Target: FXN; (-) strand; PAM type: YTN; PAM sequence: TTC
  source 1..20: mol_type = other DNA
ccaaagtgctaggattacag

SEQ ID NO: 28260 - DNA, 20 bp, synthetic construct
  misc_feature 1..20: note = Description of Artificial Sequence: Synthetic oligonucleotide
  misc_feature 1..20: note = Target: FXN; (-) strand; PAM type: YTN; PAM sequence: CTT
  source 1..20: mol_type = other DNA
cccaaagtgctaggattaca

SEQ ID NO: 28261 - DNA, 20 bp, synthetic construct
  misc_feature 1..20: note = Description of Artificial Sequence: Synthetic oligonucleotide
  misc_feature 1..20: note = Target: FXN; (-) strand; PAM type: YTN; PAM sequence: CTG
  source 1..20: mol_type = other DNA
cgtcagcttcccaaagtgct

SEQ ID NO: 28262 - DNA, 20 bp, synthetic construct
  misc_feature 1..20: note = Description of Artificial Sequence: Synthetic oligonucleotide
  misc_feature 1..20: note = Target: FXN; (-) strand; PAM type: YTN; PAM sequence: CTG
  source 1..20: mol_type = other DNA
cctgcgtcagcttcccaaag

SEQ ID NO: 28263 - DNA, 20 bp, synthetic construct
  misc_feature 1..20: note = Description of Artificial Sequence: Synthetic oligonucleotide
  misc_feature 1..20: note = Target: FXN; (-) strand; PAM type: YTN; PAM sequence: CTC
  source 1..20: mol_type = other DNA
aagccatctgcctgcgtcag

SEQ ID NO: 28264 - DNA, 20 bp, synthetic construct
  misc_feature 1..20: note = Description of Artificial Sequence: Synthetic oligonucleotide
  misc_feature 1..20: note = Target: FXN; (-) strand; PAM type: YTN; PAM sequence: CTG
  source 1..20: mol_type = other DNA
agctcaagccatctgcctgc

SEQ ID NO: 28265 - DNA, 20 bp, synthetic construct
  misc_feature 1..20: note = Description of Artificial Sequence: Synthetic oligonucleotide
  misc_feature 1..20: note = Target: FXN; (-) strand; PAM type: YTN; PAM sequence: CTC
  source 1..20: mol_type = other DNA
ctgagctcaagccatctgcc

SEQ ID NO: 28266 - DNA, 20 bp, synthetic construct
  misc_feature 1..20: note = Description of Artificial Sequence: Synthetic oligonucleotide
  misc_feature 1..20: note = Target: FXN; (-) strand; PAM type: YTN; PAM sequence: CTG
  source 1..20: mol_type = other DNA
gaactcctgagctcaagcca

SEQ ID NO: 28267 - DNA, 20 bp, synthetic construct
  misc_feature 1..20: note = Description of Artificial Sequence: Synthetic oligonucleotide
  misc_feature 1..20: note = Target: FXN; (-) strand; PAM type: YTN; PAM sequence: CTG
  source 1..20: mol_type = other DNA
gtctggaactcctgagctca

SEQ ID NO: 28268 - DNA, 20 bp, synthetic construct
  misc_feature 1..20: note = Description of Artificial Sequence: Synthetic oligonucleotide
  misc_feature 1..20: note = Target: FXN; (-) strand; PAM type: YTN; PAM sequence: TTG
  source 1..20: mol_type = other DNA
cccaggctggtctggaactc

SEQ ID NO: 28269 - DNA, 20 bp, synthetic construct
  misc_feature 1..20: note = Description of Artificial Sequence: Synthetic oligonucleotide
  misc_feature 1..20: note = Target: FXN; (-) strand; PAM type: YTN; PAM sequence: TTC
  source 1..20: mol_type = other DNA
accatgttgcccaggctggt

SEQ ID NO: 28270 - DNA, 20 bp, synthetic construct
  misc_feature 1..20: note = Description of Artificial Sequence: Synthetic oligonucleotide
  misc_feature 1..20: note = Target: FXN; (-) strand; PAM type: YTN; PAM sequence: TTT
  source 1..20: mol_type = other DNA
caccatgttgcccaggctgg

SEQ ID NO: 28271 - DNA, 20 bp, synthetic construct
  misc_feature 1..20: note = Description of Artificial Sequence: Synthetic oligonucleotide
  misc_feature 1..20: note = Target: FXN; (-) strand; PAM type: YTN; PAM sequence: TTG
  source 1..20: mol_type = other DNA
gtagagacggggtttcacca

SEQ ID NO: 28272 - DNA, 20 bp, synthetic construct
  misc_feature 1..20: note = Description of Artificial Sequence: Synthetic oligonucleotide
  misc_feature 1..20: note = Target: FXN; (-) strand; PAM type: YTN; PAM sequence: TTT
  source 1..20: mol_type = other DNA
ggtagagacggggtttcacc

SEQ ID NO: 28273 - DNA, 20 bp, synthetic construct
  misc_feature 1..20: note = Description of Artificial Sequence: Synthetic oligonucleotide
  misc_feature 1..20: note = Target: FXN; (-) strand; PAM type: YTN; PAM sequence: TTT
  source 1..20: mol_type = other DNA
tggtagagacggggtttcac

SEQ ID NO: 28274 - DNA, 20 bp, synthetic construct
  misc_feature 1..20: note = Description of Artificial Sequence: Synthetic oligonucleotide
  misc_feature 1..20: note = Target: FXN; (-) strand; PAM type: YTN; PAM sequence: TTT
  source 1..20: mol_type = other DNA
ttggtagagacggggtttca

SEQ ID NO: 28275 - DNA, 20 bp, synthetic construct
  misc_feature 1..20: note = Description of Artificial Sequence: Synthetic oligonucleotide
  misc_feature 1..20: note = Target: FXN; (-) strand; PAM type: YTN; PAM sequence: TTG
  source 1..20: mol_type = other DNA
tatttttggtagagacgggg

SEQ ID NO: 28276 - DNA, 20 bp, synthetic construct
  misc_feature 1..20: note = Description of Artificial Sequence: Synthetic oligonucleotide
  misc_feature 1..20: note = Target: FXN; (-) strand; PAM type: YTN; PAM sequence: TTT
  source 1..20: mol_type = other DNA
gtatttttggtagagacggg

SEQ ID NO: 28277 - DNA, 20 bp, synthetic construct
  misc_feature 1..20: note = Description of Artificial Sequence: Synthetic oligonucleotide
  misc_feature 1..20: note = Target: FXN; (-) strand; PAM type: YTN; PAM sequence: TTT
  source 1..20: mol_type = other DNA
tgtatttttggtagagacgg

SEQ ID NO: 28278 - DNA, 20 bp, synthetic construct
  misc_feature 1..20: note = Description of Artificial Sequence: Synthetic oligonucleotide
  misc_feature 1..20: note = Target: FXN; (-) strand; PAM type: YTN; PAM sequence: TTT
  source 1..20: mol_type = other DNA
ttgtatttttggtagagacg

SEQ ID NO: 28279 - DNA, 20 bp, synthetic construct
  misc_feature 1..20: note = Description of Artificial Sequence: Synthetic oligonucleotide
  misc_feature 1..20: note = Target: FXN; (-) strand; PAM type: YTN; PAM sequence: CTA
  source 1..20: mol_type = other DNA
atttttgtatttttggtaga

SEQ ID NO: 28280 - DNA, 20 bp, synthetic construct
  misc_feature 1..20: note = Description of Artificial Sequence: Synthetic oligonucleotide
  misc_feature 1..20: note = Target: FXN; (-) strand; PAM type: YTN; PAM sequence: CTG
  source 1..20: mol_type = other DNA
ggaccacaggcatgcatcac

SEQ ID NO: 28281 - DNA, 20 bp, synthetic construct
  misc_feature 1..20: note = Description of Artificial Sequence: Synthetic oligonucleotide
  misc_feature 1..20: note = Target: FXN; (-) strand; PAM type: YTN; PAM sequence: CTG
  source 1..20: mol_type = other DNA
agtagctgggaccacaggca

SEQ ID NO: 28282 - DNA, 20 bp, synthetic construct
  misc_feature 1..20: note = Description of Artificial Sequence: Synthetic oligonucleotide
  misc_feature 1..20: note = Target: FXN; (-) strand; PAM type: YTN; PAM sequence: CTC
  source 1..20: mol_type = other DNA
ctgagtagctgggaccacag

SEQ ID NO: 28283 - DNA, 20 bp, synthetic construct
  misc_feature 1..20: note = Description of Artificial Sequence: Synthetic oligonucleotide
  misc_feature 1..20: note = Target: FXN; (-) strand; PAM type: YTN; PAM sequence: CTC
  source 1..20: mol_type = other DNA
agcctcctgagtagctggga

SEQ ID NO: 28284 - DNA, 20 bp, synthetic construct
  misc_feature 1..20: note = Description of Artificial Sequence: Synthetic oligonucleotide
  misc_feature 1..20: note = Target: FXN; (-) strand; PAM type: YTN; PAM sequence: TTC
  source 1..20: mol_type = other DNA
cacctcagcctcctgagtag

SEQ ID NO: 28285 - DNA, 20 bp, synthetic construct
  misc_feature 1..20: note = Description of Artificial Sequence: Synthetic oligonucleotide
  misc_feature 1..20: note = Target: FXN; (-) strand; PAM type: YTN; PAM sequence: CTT
  source 1..20: mol_type = other DNA
ccacctcagcctcctgagta

SEQ ID NO: 28286 - DNA, 20 bp, synthetic construct
  misc_feature 1..20: note = Description of Artificial Sequence: Synthetic oligonucleotide
  misc_feature 1..20: note = Target: FXN; (-) strand; PAM type: YTN; PAM sequence: CTC
  source 1..20: mol_type = other DNA
aggcaatccttccacctcag

SEQ ID NO: 28287 - DNA, 20 bp, synthetic construct
  misc_feature 1..20: note = Description of Artificial Sequence: Synthetic oligonucleotide
  misc_feature 1..20: note = Target: FXN; (-) strand; PAM type: YTN; PAM sequence: CTG
  source 1..20: mol_type = other DNA
ccccacagactcaggcaatc

SEQ ID NO: 28288 - DNA, 20 bp, synthetic construct
  misc_feature 1..20: note = Description of Artificial Sequence: Synthetic oligonucleotide
  misc_feature 1..20: note = Target: FXN; (-) strand; PAM type: YTN; PAM sequence: CTC
  source 1..20: mol_type = other DNA
tgccccacagactcaggcaa

SEQ ID NO: 28289 - DNA, 20 bp, synthetic construct
  misc_feature 1..20: note = Description of Artificial Sequence: Synthetic oligonucleotide
  misc_feature 1..20: note = Target: FXN; (-) strand; PAM type: YTN; PAM sequence: CTG
  source 1..20: mol_type = other DNA
caacctctgccccacagact

SEQ ID NO: 28290 - DNA, 20 bp, synthetic construct
  misc_feature 1..20: note = Description of Artificial Sequence: Synthetic oligonucleotide
  misc_feature 1..20: note = Target: FXN; (-) strand; PAM type: YTN; PAM sequence: CTC
  source 1..20: mol_type = other DNA
actgcaacctctgccccaca

SEQ ID NO: 28291 - DNA, 20 bp, synthetic construct
  misc_feature 1..20: note = Description of Artificial Sequence: Synthetic oligonucleotide
  misc_feature 1..20: note = Target: FXN; (-) strand; PAM type: YTN; PAM sequence: CTC
  source 1..20: mol_type = other DNA
agctcactgcaacctctgcc

SEQ ID NO: 28292 - DNA, 20 bp, synthetic construct
  misc_feature 1..20: note = Description of Artificial Sequence: Synthetic oligonucleotide
  misc_feature 1..20: note = Target: FXN; (-) strand; PAM type: YTN; PAM sequence: CTG
  source 1..20: mol_type = other DNA
gagtgcagtggtgtgatctc

SEQ ID NO: 28293 - DNA, 20 bp, synthetic construct
  misc_feature 1..20: note = Description of Artificial Sequence: Synthetic oligonucleotide
  misc_feature 1..20: note = Target: FXN; (-) strand; PAM type: YTN; PAM sequence: CTG
  source 1..20: mol_type = other DNA
tgtcacccaggctggagtgc

SEQ ID NO: 28294 - DNA, 20 bp, synthetic construct
  misc_feature 1..20: note = Description of Artificial Sequence: Synthetic oligonucleotide
  misc_feature 1..20: note = Target: FXN; (-) strand; PAM type: YTN; PAM sequence: CTC
  source 1..20: mol_type = other DNA
actgtgtcacccaggctgga

SEQ ID NO: 28295 - DNA, 20 bp, synthetic construct
  misc_feature 1..20: note = Description of Artificial Sequence: Synthetic oligonucleotide
  misc_feature 1..20: note = Target: FXN; (-) strand; PAM type: YTN; PAM sequence: TTG
  source 1..20: mol_type = other DNA
agatggggtctcactgtgtc

SEQ ID NO: 28296 - DNA, 20 bp, synthetic construct
  misc_feature 1..20: note = Description of Artificial Sequence: Synthetic oligonucleotide
  misc_feature 1..20: note = Target: FXN; (-) strand; PAM type: YTN; PAM sequence: TTT
  source 1..20: mol_type = other DNA
gagatggggtctcactgtgt

SEQ ID NO: 28297 - DNA, 20 bp, synthetic construct
  misc_feature 1..20: note = Description of Artificial Sequence: Synthetic oligonucleotide
  misc_feature 1..20: note = Target: FXN; (-) strand; PAM type: YTN; PAM sequence: TTT
  source 1..20: mol_type = other DNA
tgagatggggtctcactgtg

SEQ ID NO: 28298 - DNA, 20 bp, synthetic construct
  misc_feature 1..20: note = Description of Artificial Sequence: Synthetic oligonucleotide
  misc_feature 1..20: note = Target: FXN; (-) strand; PAM type: YTN; PAM sequence: TTT
  source 1..20: mol_type = other DNA
ttgagatggggtctcactgt

SEQ ID NO: 28299 - DNA, 20 bp, synthetic construct
  misc_feature 1..20: note = Description of Artificial Sequence: Synthetic oligonucleotide
  misc_feature 1..20: note = Target: FXN; (-) strand; PAM type: YTN; PAM sequence: TTT
  source 1..20: mol_type = other DNA
tttgagatggggtctcactg

SEQ ID NO: 28300 - DNA, 20 bp, synthetic construct
  misc_feature 1..20: note = Description of Artificial Sequence: Synthetic oligonucleotide
  misc_feature 1..20: note = Target: FXN; (-) strand; PAM type: YTN; PAM sequence: TTT
  source 1..20: mol_type = other DNA
ttttgagatggggtctcact

SEQ ID NO: 28301 - DNA, 20 bp, synthetic construct
  misc_feature 1..20: note = Description of Artificial Sequence: Synthetic oligonucleotide
  misc_feature 1..20: note = Target: FXN; (-) strand; PAM type: YTN; PAM sequence: TTT
  source 1..20: mol_type = other DNA
tttttgagatggggtctcac

SEQ ID NO: 28302 - DNA, 20 bp, synthetic construct
  misc_feature 1..20: note = Description of Artificial Sequence: Synthetic oligonucleotide
  misc_feature 1..20: note = Target: FXN; (-) strand; PAM type: YTN; PAM sequence: TTT
  source 1..20: mol_type = other DNA
ttttttgagatggggtctca

SEQ ID NO: 28303 - DNA, 20 bp, synthetic construct
  misc_feature 1..20: note = Description of Artificial Sequence: Synthetic oligonucleotide
  misc_feature 1..20: note = Target: FXN; (-) strand; PAM type: YTN; PAM sequence: TTT
  source 1..20: mol_type = other DNA
tttttttgagatggggtctc

SEQ ID NO: 28304 - DNA, 20 bp, synthetic construct
  misc_feature 1..20: note = Description of Artificial Sequence: Synthetic oligonucleotide
  misc_feature 1..20: note = Target: FXN; (-) strand; PAM type: YTN; PAM sequence: TTT
  source 1..20: mol_type = other DNA
ttttttttgagatggggtct

SEQ ID NO: 28305 - DNA, 20 bp, synthetic construct
  misc_feature 1..20: note = Description of Artificial Sequence: Synthetic oligonucleotide
  misc_feature 1..20: note = Target: FXN; (-) strand; PAM type: YTN; PAM sequence: TTT
  source 1..20: mol_type = other DNA
tttttttttgagatggggtc

SEQ ID NO: 28306 - DNA, 20 bp, synthetic construct
  misc_feature 1..20: note = Description of Artificial Sequence: Synthetic oligonucleotide
  misc_feature 1..20: note = Target: FXN; (-) strand; PAM type: YTN; PAM sequence: TTT
  source 1..20: mol_type = other DNA
ttttttttttgagatggggt

SEQ ID NO: 28307 - DNA, 20 bp, synthetic construct
  misc_feature 1..20: note = Description of Artificial Sequence: Synthetic oligonucleotide
  misc_feature 1..20: note = Target: FXN; (-) strand; PAM type: YTN; PAM sequence: TTT
  source 1..20: mol_type = other DNA
tttttttttttgagatgggg

SEQ ID NO: 28308 - DNA, 20 bp, synthetic construct
  misc_feature 1..20: note = Description of Artificial Sequence: Synthetic oligonucleotide
  misc_feature 1..20: note = Target: FXN; (-) strand; PAM type: YTN; PAM sequence: CTT
  source 1..20: mol_type = other DNA
ttttttttttttgagatggg

SEQ ID NO: 28309 - DNA, 20 bp, synthetic construct
  misc_feature 1..20: note = Description of Artificial Sequence: Synthetic oligonucleotide
  misc_feature 1..20: note = Target: FXN; (-) strand; PAM type: YTN; PAM sequence: TTC
  source 1..20: mol_type = other DNA
ttttttttttttttgagatg

SEQ ID NO: 28310 - DNA, 20 bp, synthetic construct
  misc_feature 1..20: note = Description of Artificial Sequence: Synthetic oligonucleotide
  misc_feature 1..20: note = Target: FXN; (-) strand; PAM type: YTN; PAM sequence: TTT
  source 1..20: mol_type = other DNA
cttttttttttttttgagat

SEQ ID NO: 28311 - DNA, 20 bp, synthetic construct
  misc_feature 1..20: note = Description of Artificial Sequence: Synthetic oligonucleotide
  misc_feature 1..20: note = Target: FXN; (-) strand; PAM type: YTN; PAM sequence: CTT
  source 1..20: mol_type = other DNA
tcttttttttttttttgaga

SEQ ID NO: 28312 - DNA, 20 bp, synthetic construct
  misc_feature 1..20: note = Description of Artificial Sequence: Synthetic oligonucleotide
  misc_feature 1..20: note = Target: FXN; (-) strand; PAM type: YTN; PAM sequence: TTC
  source 1..20: mol_type = other DNA
tttcttttttttttttttga

SEQ ID NO: 28313 - DNA, 20 bp, synthetic construct
  misc_feature 1..20: note = Description of Artificial Sequence: Synthetic oligonucleotide
  misc_feature 1..20: note = Target: FXN; (-) strand; PAM type: YTN; PAM sequence: TTT
  source 1..20: mol_type = other DNA
ctttcttttttttttttttg

SEQ ID NO: 28314 - DNA, 20 bp, synthetic construct
  misc_feature 1..20: note = Description of Artificial Sequence: Synthetic oligonucleotide
  misc_feature 1..20: note = Target: FXN; (-) strand; PAM type: YTN; PAM sequence: TTT
  source 1..20: mol_type = other DNA
tctttctttttttttttttt

SEQ ID NO: 28315 - DNA, 20 bp, synthetic construct
  misc_feature 1..20: note = Description of Artificial Sequence: Synthetic oligonucleotide
  misc_feature 1..20: note = Target: FXN; (-) strand; PAM type: YTN; PAM sequence: CTG
  source 1..20: mol_type = other DNA
ggccgttttctttctttttt

SEQ ID NO: 28316 - DNA, 20 bp, synthetic construct
  misc_feature 1..20: note = Description of Artificial Sequence: Synthetic oligonucleotide
  misc_feature 1..20: note = Target: FXN; (-) strand; PAM type: YTN; PAM sequence: TTC
  source 1..20: mol_type = other DNA
ctgggccgttttctttcttt

SEQ ID NO: 28317 - DNA, 20 bp, synthetic construct
  misc_feature 1..20: note = Description of Artificial Sequence: Synthetic oligonucleotide
  misc_feature 1..20: note = Target: FXN; (-) strand; PAM type: YTN; PAM sequence: CTT
  source 1..20: mol_type = other DNA
cctgggccgttttctttctt

SEQ ID NO: 28318 - DNA, 20 bp, synthetic construct
  misc_feature 1..20: note = Description of Artificial Sequence: Synthetic oligonucleotide
  misc_feature 1..20: note = Target: FXN; (-) strand; PAM type: YTN; PAM sequence: CTC
  source 1..20: mol_type = other DNA
cagccttcctgggccgtttt

SEQ ID NO: 28319 - DNA, 20 bp, synthetic construct
  misc_feature 1..20: note = Description of Artificial Sequence: Synthetic oligonucleotide
  misc_feature 1..20: note = Target: FXN; (-) strand; PAM type: YTN; PAM sequence: CTC
  source 1..20: mol_type = other DNA
aatggacacggcggccctcc

SEQ ID NO: 28320 - DNA, 20 bp, synthetic construct
  misc_feature 1..20: note = Description of Artificial Sequence: Synthetic oligonucleotide
  misc_feature 1..20: note = Target: FXN; (-) strand; PAM type: YTN; PAM sequence: CTC
  source 1..20: mol_type = other DNA
tcaatggacacggcggccct

SEQ ID NO: 28321 - DNA, 20 bp, synthetic construct
  misc_feature 1..20: note = Description of Artificial Sequence: Synthetic oligonucleotide
  misc_feature 1..20: note = Target: FXN; (-) strand; PAM type: YTN; PAM sequence: CTC
  source 1..20: mol_type = other DNA
tctcaatggacacggcggcc

SEQ ID NO: 28322 - DNA, 20 bp, synthetic construct
  misc_feature 1..20: note = Description of Artificial Sequence: Synthetic oligonucleotide
  misc_feature 1..20: note = Target: FXN; (-) strand; PAM type: YTN; PAM sequence: CTG
  source 1..20: mol_type = other DNA
gagcactctctcaatggaca

SEQ ID NO: 28323 - DNA, 20 bp, synthetic construct
  misc_feature 1..20: note = Description of Artificial Sequence: Synthetic oligonucleotide
  misc_feature 1..20: note = Target: FXN; (-) strand; PAM type: YTN; PAM sequence: TTG
  source 1..20: mol_type = other DNA
gagtgcctggagcactctct

SEQ ID NO: 28324 - DNA, 20 bp, synthetic construct
  misc_feature 1..20: note = Description of Artificial Sequence: Synthetic oligonucleotide
  misc_feature 1..20: note = Target: FXN; (-) strand; PAM type: YTN; PAM sequence: TTT
  source 1..20: mol_type = other DNA
ggagtgcctggagcactctc

SEQ ID NO: 28325 - DNA, 20 bp, synthetic construct
  misc_feature 1..20: note = Description of Artificial Sequence: Synthetic oligonucleotide
  misc_feature 1..20: note = Target: FXN; (-) strand; PAM type: YTN; PAM sequence: TTT
  source 1..20: mol_type = other DNA
tggagtgcctggagcactct

SEQ ID NO: 28326 - DNA, 20 bp, synthetic construct
  misc_feature 1..20: note = Description of Artificial Sequence: Synthetic oligonucleotide
  misc_feature 1..20: note = Target: FXN; (-) strand; PAM type: YTN; PAM sequence: TTT
  source 1..20: mol_type = other DNA
ttggagtgcctggagcactc

SEQ ID NO: 28327 - DNA, 20 bp, synthetic construct
  misc_feature 1..20: note = Description of Artificial Sequence: Synthetic oligonucleotide
  misc_feature 1..20: note = Target: FXN; (-) strand; PAM type: YTN; PAM sequence: CTT
  source 1..20: mol_type = other DNA
tttggagtgcctggagcact

SEQ ID NO: 28328 - DNA, 20 bp, synthetic construct
  misc_feature 1..20: note = Description of Artificial Sequence: Synthetic oligonucleotide
  misc_feature 1..20: note = Target: FXN; (-) strand; PAM type: YTN; PAM sequence: TTC
  source 1..20: mol_type = other DNA
tttttggagtgcctggagca

SEQ ID NO: 28329 - DNA, 20 bp, synthetic construct
  misc_feature 1..20: note = Description of Artificial Sequence: Synthetic oligonucleotide
  misc_feature 1..20: note = Target: FXN; (-) strand; PAM type: YTN; PAM sequence: TTT
  source 1..20: mol_type = other DNA
ctttttggagtgcctggagc

SEQ ID NO: 28330 - DNA, 20 bp, synthetic construct
  misc_feature 1..20: note = Description of Artificial Sequence: Synthetic oligonucleotide
  misc_feature 1..20: note = Target: FXN; (-) strand; PAM type: YTN; PAM sequence: TTT
  source 1..20: mol_type = other DNA
tctttttggagtgcctggag

SEQ ID NO: 28331 - DNA, 20 bp, synthetic construct
  misc_feature 1..20: note = Description of Artificial Sequence: Synthetic oligonucleotide
  misc_feature 1..20: note = Target: FXN; (-) strand; PAM type: YTN; PAM sequence: TTG
  source 1..20: mol_type = other DNA
tggtcattttctttttggag

SEQ ID NO: 28332 - DNA, 20 bp, synthetic construct
  misc_feature 1..20: note = Description of Artificial Sequence: Synthetic oligonucleotide
  misc_feature 1..20: note = Target: FXN; (-) strand; PAM type: YTN; PAM sequence: TTC
  source 1..20: mol_type = other DNA
ccattgtggtcattttcttt

SEQ ID NO: 28333 - DNA, 20 bp, synthetic construct
  misc_feature 1..20: note = Description of Artificial Sequence: Synthetic oligonucleotide
  misc_feature 1..20: note = Target: FXN; (-) strand; PAM type: YTN; PAM sequence: CTT
  source 1..20: mol_type = other DNA
cccattgtggtcattttctt

SEQ ID NO: 28334 - DNA, 20 bp, synthetic construct
  misc_feature 1..20: note = Description of Artificial Sequence: Synthetic oligonucleotide
  misc_feature 1..20: note = Target: FXN; (-) strand; PAM type: YTN; PAM sequence: TTC
  source 1..20: mol_type = other DNA
ttcccattgtggtcattttc

SEQ ID NO: 28335 - DNA, 20 bp, synthetic construct
  misc_feature 1..20: note = Description of Artificial Sequence: Synthetic oligonucleotide
  misc_feature 1..20: note = Target: FXN; (-) strand; PAM type: YTN; PAM sequence: TTT
  source 1..20: mol_type = other DNA
cttcccattgtggtcatttt

SEQ ID NO: 28336 - DNA, 20 bp, synthetic construct
  misc_feature 1..20: note = Description of Artificial Sequence: Synthetic oligonucleotide
  misc_feature 1..20: note = Target: FXN; (-) strand; PAM type: YTN; PAM sequence: CTG
  source 1..20: mol_type = other DNA
gtttcttcccattgtggtca

SEQ ID NO: 28337 - DNA, 20 bp, synthetic construct
  misc_feature 1..20: note = Description of Artificial Sequence: Synthetic oligonucleotide
  misc_feature 1..20: note = Target: FXN; (-) strand; PAM type: YTN; PAM sequence: CTC
  source 1..20: mol_type = other DNA
atggtcagctggtttcttcc

SEQ ID NO: 28338 - DNA, 20 bp, synthetic construct
  misc_feature 1..20: note = Description of Artificial Sequence: Synthetic oligonucleotide
  misc_feature 1..20: note = Target: FXN; (-) strand; PAM type: YTN; PAM sequence: TTG
  source 1..20: mol_type = other DNA
gtctcatggtcagctggttt

SEQ ID NO: 28339 - DNA, 20 bp, synthetic construct
  misc_feature 1..20: note = Description of Artificial Sequence: Synthetic oligonucleotide
  misc_feature 1..20: note = Target: FXN; (-) strand; PAM type: YTN; PAM sequence: CTT
  source 1..20: mol_type = other DNA
ggtctcatggtcagctggtt

SEQ ID NO: 28340 - DNA, 20 bp, synthetic construct
  misc_feature 1..20: note = Description of Artificial Sequence: Synthetic oligonucleotide
  misc_feature 1..20: note = Target: FXN; (-) strand; PAM type: YTN; PAM sequence: TTG
  source 1..20: mol_type = other DNA
gaacttggtctcatggtcag

SEQ ID NO: 28341 - DNA, 20 bp, synthetic construct
  misc_feature 1..20: note = Description of Artificial Sequence: Synthetic oligonucleotide
  misc_feature 1..20: note = Target: FXN; (-) strand; PAM type: YTN; PAM sequence: TTG
  source 1..20: mol_type = other DNA
taaaaggttggaacttggtc

SEQ ID NO: 28342 - DNA, 20 bp, synthetic construct
  misc_feature 1..20: note = Description of Artificial Sequence: Synthetic oligonucleotide
  misc_feature 1..20: note = Target: FXN; (-) strand; PAM type: YTN; PAM sequence: CTT
  source 1..20: mol_type = other DNA
gtaaaaggttggaacttggt

SEQ ID NO: 28343 - DNA, 20 bp, synthetic construct
  misc_feature 1..20: note = Description of Artificial Sequence: Synthetic oligonucleotide
  misc_feature 1..20: note = Target: FXN; (-) strand; PAM type: YTN; PAM sequence: CTG
  source 1..20: mol_type = other DNA
tgggcggggcgccaggagcc

SEQ ID NO: 28344 - DNA, 20 bp, synthetic construct
  misc_feature 1..20: note = Description of Artificial Sequence: Synthetic oligonucleotide
  misc_feature 1..20: note = Target: FXN; (-) strand; PAM type: YTN; PAM sequence: CTG
  source 1..20: mol_type = other DNA
tcagctgtgggcggggcgcc

SEQ ID NO: 28345 - DNA, 20 bp, synthetic construct
  misc_feature 1..20: note = Description of Artificial Sequence: Synthetic oligonucleotide
  misc_feature 1..20: note = Target: FXN; (-) strand; PAM type: YTN; PAM sequence: CTG
  source 1..20: mol_type = other DNA
agcccctgtcagctgtgggc

SEQ ID NO: 28346 - DNA, 20 bp, synthetic construct
  misc_feature 1..20: note = Description of Artificial Sequence: Synthetic oligonucleotide
  misc_feature 1..20: note = Target: FXN; (-) strand; PAM type: YTN; PAM sequence: TTC
  source 1..20: mol_type = other DNA
tgagcccctgtcagctgtgg

SEQ ID NO: 28347 - DNA, 20 bp, synthetic construct
  misc_feature 1..20: note = Description of Artificial Sequence: Synthetic oligonucleotide
  misc_feature 1..20: note = Target: FXN; (-) strand; PAM type: YTN; PAM sequence: CTT
  source 1..20: mol_type = other DNA
ctgagcccctgtcagctgtg

SEQ ID NO: 28348 - DNA, 20 bp, synthetic construct
  misc_feature 1..20: note = Description of Artificial Sequence: Synthetic oligonucleotide
  misc_feature 1..20: note = Target: FXN; (-) strand; PAM type: YTN; PAM sequence: CTA
  source 1..20: mol_type = other DNA
gcacttctgagcccctgtca

SEQ ID NO: 28349 - DNA, 20 bp, synthetic construct
  misc_feature 1..20: note = Description of Artificial Sequence: Synthetic oligonucleotide
  misc_feature 1..20: note = Target: FXN; (-) strand; PAM type: YTN; PAM sequence: CTG
  source 1..20: mol_type = other DNA
gtggcccatggtccccctag

SEQ ID NO: 28350 - DNA, 20 bp, synthetic construct
  misc_feature 1..20: note = Description of Artificial Sequence: Synthetic oligonucleotide
  misc_feature 1..20: note = Target: FXN; (-) strand; PAM type: YTN; PAM sequence: CTG
  source 1..20: mol_type = other DNA
gtggccctggtggcccatgg

SEQ ID NO: 28351 - DNA, 20 bp, synthetic construct
  misc_feature 1..20: note = Description of Artificial Sequence: Synthetic oligonucleotide
  misc_feature 1..20: note = Target: FXN; (-) strand; PAM type: YTN; PAM sequence: CTC
  source 1..20: mol_type = other DNA
ctggtggccctggtggccca

SEQ ID NO: 28352 - DNA, 20 bp, synthetic construct
  misc_feature 1..20: note = Description of Artificial Sequence: Synthetic oligonucleotide
  misc_feature 1..20: note = Target: FXN; (-) strand; PAM type: YTN; PAM sequence: CTC
  source 1..20: mol_type = other DNA
cctcctggtggccctggtgg

SEQ ID NO: 28353 - DNA, 20 bp, synthetic construct
  misc_feature 1..20: note = Description of Artificial Sequence: Synthetic oligonucleotide
  misc_feature 1..20: note = Target: FXN; (-) strand; PAM type: YTN; PAM sequence: CTG
  source 1..20: mol_type = other DNA
cctccctcctggtggccctg

SEQ ID NO: 28354 - DNA, 20 bp, synthetic construct
  misc_feature 1..20: note = Description of Artificial Sequence: Synthetic oligonucleotide
  misc_feature 1..20: note = Target: FXN; (-) strand; PAM type: YTN; PAM sequence: TTA
  source 1..20: mol_type = other DNA
cctgcctccctcctggtggc

SEQ ID NO: 28355 - DNA, 20 bp, synthetic construct
  misc_feature 1..20: note = Description of Artificial Sequence: Synthetic oligonucleotide
  misc_feature 1..20: note = Target: FXN; (-) strand; PAM type: YTN; PAM sequence: CTC
  source 1..20: mol_type = other DNA
gcatcgttacctgcctccct

SEQ ID NO: 28356 - DNA, 20 bp, synthetic construct
  misc_feature 1..20: note = Description of Artificial Sequence: Synthetic oligonucleotide
  misc_feature 1..20: note = Target: FXN; (-) strand; PAM type: YTN; PAM sequence: CTG
  source 1..20: mol_type = other DNA
catccaagccctcgcatcgt

SEQ ID NO: 28357 - DNA, 20 bp, synthetic construct
  misc_feature 1..20: note = Description of Artificial Sequence: Synthetic oligonucleotide
  misc_feature 1..20: note = Target: FXN; (-) strand; PAM type: YTN; PAM sequence: TTC
  source 1..20: mol_type = other DNA
tgcatccaagccctcgcatc

SEQ ID NO: 28358 - DNA, 20 bp, synthetic construct
  misc_feature 1..20: note = Description of Artificial Sequence: Synthetic oligonucleotide
  misc_feature 1..20: note = Target: FXN; (-) strand; PAM type: YTN; PAM sequence: CTG
  source 1..20: mol_type = other DNA
gtgttctgcatccaagccct

SEQ ID NO: 28359 - DNA, 20 bp, synthetic construct
  misc_feature 1..20: note = Description of Artificial Sequence: Synthetic oligonucleotide
  misc_feature 1..20: note = Target: FXN; (-) strand; PAM type: YTN; PAM sequence: TTC
  source 1..20: mol_type = other DNA
aggacccaggtacagggaaa

SEQ ID NO: 28360 - DNA, 20 bp, synthetic construct
  misc_feature 1..20: note = Description of Artificial Sequence: Synthetic oligonucleotide
  misc_feature 1..20: note = Target: FXN; (-) strand; PAM type: YTN; PAM sequence: CTG
  source 1..20: mol_type = other DNA
ggcattcaggacccaggtac

SEQ ID NO: 28361 - DNA, 20 bp, synthetic construct
  misc_feature 1..20: note = Description of Artificial Sequence: Synthetic oligonucleotide
  misc_feature 1..20: note = Target: FXN; (-) strand; PAM type: YTN; PAM sequence: CTC
  source 1..20: mol_type = other DNA
tgggcattcaggacccaggt

SEQ ID NO: 28362 - DNA, 20 bp, synthetic construct
  misc_feature 1..20: note = Description of Artificial Sequence: Synthetic oligonucleotide
  misc_feature 1..20: note = Target: FXN; (-) strand; PAM type: YTN; PAM sequence: CTG
  source 1..20: mol_type = other DNA
agcctctgggcattcaggac

SEQ ID NO: 28363 - DNA, 20 bp, synthetic construct
  misc_feature 1..20: note = Description of Artificial Sequence: Synthetic oligonucleotide
  misc_feature 1..20: note = Target: FXN; (-) strand; PAM type: YTN; PAM sequence: TTC
  source 1..20: mol_type = other DNA
cctgagcctctgggcattca

SEQ ID NO: 28364 - DNA, 20 bp, synthetic construct
  misc_feature 1..20: note = Description of Artificial Sequence: Synthetic oligonucleotide
  misc_feature 1..20: note = Target: FXN; (-) strand; PAM type: YTN; PAM sequence: TTT
  source 1..20: mol_type = other DNA
ccctgagcctctgggcattc

SEQ ID NO: 28365 - DNA, 20 bp, synthetic construct
  misc_feature 1..20: note = Description of Artificial Sequence: Synthetic oligonucleotide
  misc_feature 1..20: note = Target: FXN; (-) strand; PAM type: YTN; PAM sequence: CTG
  source 1..20: mol_type = other DNA
gtgtttccctgagcctctgg

SEQ ID NO: 28366 - DNA, 20 bp, synthetic construct
  misc_feature 1..20: note = Description of Artificial Sequence: Synthetic oligonucleotide
  misc_feature 1..20: note = Target: FXN; (-) strand; PAM type: YTN; PAM sequence: CTG
  source 1..20: mol_type = other DNA
gctggtgtttccctgagcct

SEQ ID NO: 28367 - DNA, 20 bp, synthetic construct
  misc_feature 1..20: note = Description of Artificial Sequence: Synthetic oligonucleotide
  misc_feature 1..20: note = Target: FXN; (-) strand; PAM type: YTN; PAM sequence: TTA
  source 1..20: mol_type = other DNA
aaggcagcagcactggctgg

SEQ ID NO: 28368 - DNA, 20 bp, synthetic construct
  misc_feature 1..20: note = Description of Artificial Sequence: Synthetic oligonucleotide
  misc_feature 1..20: note = Target: FXN; (-) strand; PAM type: YTN; PAM sequence: TTT
  source 1..20: mol_type = other DNA
aaaggcagcagcactggctg

SEQ ID NO: 28369 - DNA, 20 bp, synthetic construct
  misc_feature 1..20: note = Description of Artificial Sequence: Synthetic oligonucleotide
  misc_feature 1..20: note = Target: FXN; (-) strand; PAM type: YTN; PAM sequence: CTT
  source 1..20: mol_type = other DNA
taaaggcagcagcactggct

SEQ ID NO: 28370 - DNA, 20 bp, synthetic construct
  misc_feature 1..20: note = Description of Artificial Sequence: Synthetic oligonucleotide
  misc_feature 1..20: note = Target: FXN; (-) strand; PAM type: YTN; PAM sequence: TTA
  source 1..20: mol_type = other DNA
acaagagatcagtcaaaagt

SEQ ID NO: 28371 - DNA, 20 bp, synthetic construct
  misc_feature 1..20: note = Description of Artificial Sequence: Synthetic oligonucleotide
  misc_feature 1..20: note = Target: FXN; (-) strand; PAM type: YTN; PAM sequence: CTA
  source 1..20: mol_type = other DNA
aattaacaagagatcagtca

SEQ ID NO: 28372 - DNA, 20 bp, synthetic construct
  misc_feature 1..20: note = Description of Artificial Sequence: Synthetic oligonucleotide
  misc_feature 1..20: note = Target: FXN; (-) strand; PAM type: YTN; PAM sequence: TTG
  source 1..20: mol_type = other DNA
ctaaattaacaagagatcag

SEQ ID NO: 28373 - DNA, 20 bp, synthetic construct
  misc_feature 1..20: note = Description of Artificial Sequence: Synthetic oligonucleotide
  misc_feature 1..20: note = Target: FXN; (-) strand; PAM type: YTN; PAM sequence: CTG
  source 1..20: mol_type = other DNA
cagcatcaaccaataacagt

SEQ ID NO: 28374 - DNA, 20 bp, synthetic construct
  misc_feature 1..20: note = Description of Artificial Sequence: Synthetic oligonucleotide
  misc_feature 1..20: note = Target: FXN; (-) strand; PAM type: YTN; PAM sequence: TTC
  source 1..20: mol_type = other DNA
aataagagcaactgcagcat

SEQ ID NO: 28375 - DNA, 20 bp, synthetic construct
  misc_feature 1..20: note = Description of Artificial Sequence: Synthetic oligonucleotide
  misc_feature 1..20: note = Target: FXN; (-) strand; PAM type: YTN; PAM sequence: CTT
  source 1..20: mol_type = other DNA
caataagagcaactgcagca

SEQ ID NO: 28376 - DNA, 20 bp, synthetic construct
  misc_feature 1..20: note = Description of Artificial Sequence: Synthetic oligonucleotide
  misc_feature 1..20: note = Target: FXN; (-) strand; PAM type: YTN; PAM sequence: CTA
  source 1..20: mol_type = other DNA
tcaatcaaacttcaataaga

SEQ ID NO: 28377 - DNA, 20 bp, synthetic construct
  misc_feature 1..20: note = Description of Artificial Sequence: Synthetic oligonucleotide
  misc_feature 1..20: note = Target: FXN; (-) strand; PAM type: YTN; PAM sequence: CTA
  source 1..20: mol_type = other DNA
atgctatcaatcaaacttca

SEQ ID NO: 28378 - DNA, 20 bp, synthetic construct
  misc_feature 1..20: note = Description of Artificial Sequence: Synthetic oligonucleotide
  misc_feature 1..20: note = Target: FXN; (-) strand; PAM type: YTN; PAM sequence: TTA
  source 1..20: mol_type = other DNA
ccatcctaatgctatcaatc

SEQ ID NO: 28379 - DNA, 20 bp, synthetic construct
  misc_feature 1..20: note = Description of Artificial Sequence: Synthetic oligonucleotide
  misc_feature 1..20: note = Target: FXN; (-) strand; PAM type: YTN; PAM sequence: CTT
  source 1..20: mol_type = other DNA
accatcctaatgctatcaat

SEQ ID NO: 28380 - DNA, 20 bp, synthetic construct
  misc_feature 1..20: note = Description of Artificial Sequence: Synthetic oligonucleotide
  misc_feature 1..20: note = Target: FXN; (-) strand; PAM type: YTN; PAM sequence: TTG
  source 1..20: mol_type = other DNA
aaaaatagtgccttaccatc

SEQ ID NO: 28381 - DNA, 20 bp, synthetic construct
  misc_feature 1..20: note = Description of Artificial Sequence: Synthetic oligonucleotide
  misc_feature 1..20: note = Target: FXN; (-) strand; PAM type: YTN; PAM sequence: TTT
  source 1..20: mol_type = other DNA
gaaaaatagtgccttaccat

SEQ ID NO: 28382 - DNA, 20 bp, synthetic construct
  misc_feature 1..20: note = Description of Artificial Sequence: Synthetic oligonucleotide
  misc_feature 1..20: note = Target: FXN; (-) strand; PAM type: YTN; PAM sequence: TTA
  source 1..20: mol_type = other DNA
tttgaaaaatagtgccttac

SEQ ID NO: 28383 - DNA, 20 bp, synthetic construct
  misc_feature 1..20: note = Description of Artificial Sequence: Synthetic oligonucleotide
  misc_feature 1..20: note = Target: FXN; (-) strand; PAM type: YTN; PAM sequence: TTT
  source 1..20: mol_type = other DNA
atttgaaaaatagtgcctta

SEQ ID NO: 28384 - DNA, 20 bp, synthetic construct
  misc_feature 1..20: note = Description of Artificial Sequence: Synthetic oligonucleotide
  misc_feature 1..20: note = Target: FXN; (-) strand; PAM type: YTN; PAM sequence: CTT
  source 1..20: mol_type = other DNA
tatttgaaaaatagtgcctt

SEQ ID NO: 28385 - DNA, 20 bp, synthetic construct
  misc_feature 1..20: note = Description of Artificial Sequence: Synthetic oligonucleotide
  misc_feature 1..20: note = Target: FXN; (-) strand; PAM type: YTN; PAM sequence: TTA
  source 1..20: mol_type = other DNA
aacaacctttatttgaaaaa

SEQ ID NO: 28386 - DNA, 20 bp, synthetic construct
  misc_feature 1..20: note = Description of Artificial Sequence: Synthetic oligonucleotide
  misc_feature 1..20: note = Target: FXN; (-) strand; PAM type: YTN; PAM sequence: TTA
  source 1..20: mol_type = other DNA
tattaaacaacctttatttg

SEQ ID NO: 28387 - DNA, 20 bp, synthetic construct
  misc_feature 1..20: note = Description of Artificial Sequence: Synthetic oligonucleotide
  misc_feature 1..20: note = Target: FXN; (-) strand; PAM type: YTN; PAM sequence: TTT
  source 1..20: mol_type = other DNA
atattaaacaacctttattt

SEQ ID NO: 28388 - DNA, 20 bp, synthetic construct
  misc_feature 1..20: note = Description of Artificial Sequence: Synthetic oligonucleotide
  misc_feature 1..20: note = Target: FXN; (-) strand; PAM type: YTN; PAM sequence: TTT
  source 1..20: mol_type = other DNA
tatattaaacaacctttatt

SEQ ID NO: 28389 - DNA, 20 bp, synthetic construct
  misc_feature 1..20: note = Description of Artificial Sequence: Synthetic oligonucleotide
  misc_feature 1..20: note = Target: FXN; (-) strand; PAM type: YTN; PAM sequence: TTT
  source 1..20: mol_type = other DNA
ttatattaaacaacctttat

SEQ ID NO: 28390 - DNA, 20 bp, synthetic construct
  misc_feature 1..20: note = Description of Artificial Sequence: Synthetic oligonucleotide
  misc_feature 1..20: note = Target: FXN; (-) strand; PAM type: YTN; PAM sequence: TTT
  source 1..20: mol_type = other DNA
tttatattaaacaaccttta

SEQ ID NO: 28391 - DNA, 20 bp, synthetic construct
  misc_feature 1..20: note = Description of Artificial Sequence: Synthetic oligonucleotide
  misc_feature 1..20: note = Target: FXN; (-) strand; PAM type: YTN; PAM sequence: TTT
  source 1..20: mol_type = other DNA
ttttatattaaacaaccttt

SEQ ID NO: 28392 - DNA, 20 bp, synthetic construct
  misc_feature 1..20: note = Description of Artificial Sequence: Synthetic oligonucleotide
  misc_feature 1..20: note = Target: FXN; (-) strand; PAM type: YTN; PAM sequence: TTT
  source 1..20: mol_type = other DNA
tttttatattaaacaacctt

SEQ ID NO: 28393 - DNA, 20 bp, synthetic construct
  misc_feature 1..20: note = Description of Artificial Sequence: Synthetic oligonucleotide
  misc_feature 1..20: note = Target: FXN; (-) strand; PAM type: YTN; PAM sequence: CTG
  source 1..20: mol_type = other DNA
agagaaaaaaaaacaaaatt

SEQ ID NO: 28394 - DNA, 20 bp, synthetic construct
  misc_feature 1..20: note = Description of Artificial Sequence: Synthetic oligonucleotide
  misc_feature 1..20: note = Target: FXN; (-) strand; PAM type: YTN; PAM sequence: TTG
  source 1..20: mol_type = other DNA
aaccaatgtgaaaggctgag

SEQ ID NO: 28395 - DNA, 20 bp, synthetic construct
  misc_feature 1..20: note = Description of Artificial Sequence: Synthetic oligonucleotide
  misc_feature 1..20: note = Target: FXN; (-) strand; PAM type: YTN; PAM sequence: TTT
  source 1..20: mol_type = other DNA
gaaccaatgtgaaaggctga

SEQ ID NO: 28396 - DNA, 20 bp, synthetic construct
  misc_feature 1..20: note = Description of Artificial Sequence: Synthetic oligonucleotide
  misc_feature 1..20: note = Target: FXN; (-) strand; PAM type: YTN; PAM sequence: TTT
  source 1..20: mol_type = other DNA
tgaaccaatgtgaaaggctg

SEQ ID NO: 28397 - DNA, 20 bp, synthetic construct
  misc_feature 1..20: note = Description of Artificial Sequence: Synthetic oligonucleotide
  misc_feature 1..20: note = Target: FXN; (-) strand; PAM type: YTN; PAM sequence: TTA
  source 1..20: mol_type = other DNA
agaaaaaaaaaacaaaacaa

SEQ ID NO: 28398 - DNA, 20 bp, synthetic construct
  misc_feature 1..20: note = Description of Artificial Sequence: Synthetic oligonucleotide
  misc_feature 1..20: note = Target: FXN; (-) strand; PAM type: YTN; PAM sequence: TTA
  source 1..20: mol_type = other DNA
aaaataaataaaattaagaa

SEQ ID NO: 28399 - DNA, 20 bp, synthetic construct
  misc_feature 1..20: note = Description of Artificial Sequence: Synthetic oligonucleotide
  misc_feature 1..20: note = Target: FXN; (-) strand; PAM type: YTN; PAM sequence: TTA
  source 1..20: mol_type = other DNA
attaaaaataaataaaatta

SEQ ID NO: 28400 - DNA, 20 bp, synthetic construct
  misc_feature 1..20: note = Description of Artificial Sequence: Synthetic oligonucleotide
  misc_feature 1..20: note = Target: FXN; (-) strand; PAM type: YTN; PAM sequence: TTT
  source 1..20: mol_type = other DNA
aattaaaaataaataaaatt

SEQ ID NO: 28401 - DNA, 20 bp, synthetic construct
  misc_feature 1..20: note = Description of Artificial Sequence: Synthetic oligonucleotide
  misc_feature 1..20: note = Target: FXN; (-) strand; PAM type: YTN; PAM sequence: TTT
  source 1..20: mol_type = other DNA
taattaaaaataaataaaat

SEQ ID NO: 28402 - DNA, 20 bp, synthetic construct
  misc_feature 1..20: note = Description of Artificial Sequence: Synthetic oligonucleotide
  misc_feature 1..20: note = Target: FXN; (-) strand; PAM type: YTN; PAM sequence: TTT
  source 1..20: mol_type = other DNA
ttaattaaaaataaataaaa

SEQ ID NO: 28403 - DNA, 20 bp, synthetic construct
  misc_feature 1..20: note = Description of Artificial Sequence: Synthetic oligonucleotide
  misc_feature 1..20: note = Target: FXN; (-) strand; PAM type: YTN; PAM sequence: TTA
  source 1..20: mol_type = other DNA
tttttaattaaaaataaata

SEQ ID NO: 28404 - DNA, 20 bp, synthetic construct
  misc_feature 1..20: note = Description of Artificial Sequence: Synthetic oligonucleotide
  misc_feature 1..20: note = Target: FXN; (-) strand; PAM type: YTN; PAM sequence: TTG
  source 1..20: mol_type = other DNA
acaaaaaaaattatttttaa

SEQ ID NO: 28405 - DNA, 20 bp, synthetic construct
  misc_feature 1..20: note = Description of Artificial Sequence: Synthetic oligonucleotide
  misc_feature 1..20: note = Target: FXN; (-) strand; PAM type: YTN; PAM sequence: CTA
  source 1..20: mol_type = other DNA
ggcaacaaagtgagacccca

SEQ ID NO: 28406 - DNA, 20 bp, synthetic construct
  misc_feature 1..20: note = Description of Artificial Sequence: Synthetic oligonucleotide
  misc_feature 1..20: note = Target: FXN; (-) strand; PAM type: YTN; PAM sequence: TTC
  source 1..20: mol_type = other DNA
agaccaacctaggcaacaaa

SEQ ID NO: 28407 - DNA, 20 bp, synthetic construct
  misc_feature 1..20: note = Description of Artificial Sequence: Synthetic oligonucleotide
  misc_feature 1..20: note = Target: FXN; (-) strand; PAM type: YTN; PAM sequence: TTT
  source 1..20: mol_type = other DNA
cagaccaacctaggcaacaa

SEQ ID NO: 28408 - DNA, 20 bp, synthetic construct
  misc_feature 1..20: note = Description of Artificial Sequence: Synthetic oligonucleotide
  misc_feature 1..20: note = Target: FXN; (-) strand; PAM type: YTN; PAM sequence: TTG
  source 1..20: mol_type = other DNA
aagccacgagtttcagacca

SEQ ID NO: 28409 - DNA, 20 bp, synthetic construct
  misc_feature 1..20: note = Description of Artificial Sequence: Synthetic oligonucleotide
  misc_feature 1..20: note = Target: FXN; (-) strand; PAM type: YTN; PAM sequence: CTT
  source 1..20: mol_type = other DNA
gaagccacgagtttcagacc

SEQ ID NO: 28410 - DNA, 20 bp, synthetic construct
  misc_feature 1..20: note = Description of Artificial Sequence: Synthetic oligonucleotide
  misc_feature 1..20: note = Target: FXN; (-) strand; PAM type: YTN; PAM sequence: TTG
  source 1..20: mol_type = other DNA
cttgaagccacgagtttcag

SEQ ID NO: 28411 - DNA, 20 bp, synthetic construct
  misc_feature 1..20: note = Description of Artificial Sequence: Synthetic oligonucleotide
  misc_feature 1..20: note = Target: FXN; (-) strand; PAM type: YTN; PAM sequence: CTG
  source 1..20: mol_type = other DNA
atgtgggaggattgcttgaa

SEQ ID NO: 28412 - DNA, 20 bp, synthetic construct
  misc_feature 1..20: note = Description of Artificial Sequence: Synthetic oligonucleotide
  misc_feature 1..20: note = Target: FXN; (-) strand; PAM type: YTN; PAM sequence: TTG
  source 1..20: mol_type = other DNA
ggaggctgatgtgggaggat

SEQ ID NO: 28413 - DNA, 20 bp, synthetic construct
  misc_feature 1..20: note = Description of Artificial Sequence: Synthetic oligonucleotide
  misc_feature 1..20: note = Target: FXN; (-) strand; PAM type: YTN; PAM sequence: TTT
  source 1..20: mol_type = other DNA
gggaggctgatgtgggagga

SEQ ID NO: 28414 - DNA, 20 bp, synthetic construct
  misc_feature 1..20: note = Description of Artificial Sequence: Synthetic oligonucleotide
  misc_feature 1..20: note = Target: FXN; (-) strand; PAM type: YTN; PAM sequence: CTT
  source 1..20: mol_type = other DNA
tgggaggctgatgtgggagg

SEQ ID NO: 28415 - DNA, 20 bp, synthetic construct
  misc_feature 1..20: note = Description of Artificial Sequence: Synthetic oligonucleotide
  misc_feature 1..20: note = Target: FXN; (-) strand; PAM type: YTN; PAM sequence: CTC
  source 1..20: mol_type = other DNA
acacccataaccccagcact

SEQ ID NO: 28416 - DNA, 20 bp, synthetic construct
  misc_feature 1..20: note = Description of Artificial Sequence: Synthetic oligonucleotide
  misc_feature 1..20: note = Target: FXN; (-) strand; PAM type: YTN; PAM sequence: CTG
  source 1..20: mol_type = other DNA
cagtggctcacacccataac

SEQ ID NO: 28417 - DNA, 20 bp, synthetic construct
  misc_feature 1..20: note = Description of Artificial Sequence: Synthetic oligonucleotide
  misc_feature 1..20: note = Target: FXN; (-) strand; PAM type: YTN; PAM sequence: CTG
  source 1..20: mol_type = other DNA
ctgcagtggctcacacccat

SEQ ID NO: 28418 - DNA, 20 bp, synthetic construct
  misc_feature 1..20: note = Description of Artificial Sequence: Synthetic oligonucleotide
  misc_feature 1..20: note = Target: FXN; (-) strand; PAM type: YTN; PAM sequence: TTA
  source 1..20: mol_type = other DNA
aaaaaaacaaacaaacaaaa

SEQ ID NO: 28419 - DNA, 20 bp, synthetic construct
  misc_feature 1..20: note = Description of Artificial Sequence: Synthetic oligonucleotide
  misc_feature 1..20: note = Target: FXN; (-) strand; PAM type: YTN; PAM sequence: TTG
  source 1..20: mol_type = other DNA
tcaaattaaaaaaaacaaac

SEQ ID NO: 28420 - DNA, 20 bp, synthetic construct
  misc_feature 1..20: note = Description of Artificial Sequence: Synthetic oligonucleotide
  misc_feature 1..20: note = Target: FXN; (-) strand; PAM type: YTN; PAM sequence: CTT
  source 1..20: mol_type = other DNA
gtcaaattaaaaaaaacaaa

SEQ ID NO: 28421 - DNA, 20 bp, synthetic construct
  misc_feature 1..20: note = Description of Artificial Sequence: Synthetic oligonucleotide
  misc_feature 1..20: note = Target: FXN; (-) strand; PAM type: YTN; PAM sequence: CTG
  source 1..20: mol_type = other DNA
aaaacttgtcaaattaaaaa

SEQ ID NO: 28422 - DNA, 20 bp, synthetic construct
  misc_feature 1..20: note = Description of Artificial Sequence: Synthetic oligonucleotide
  misc_feature 1..20: note = Target: FXN; (-) strand; PAM type: YTN; PAM sequence: TTC
  source 1..20: mol_type = other DNA
acaggacctgaaaacttgtc

SEQ ID NO: 28423 - DNA, 20 bp, synthetic construct
  misc_feature 1..20: note = Description of Artificial Sequence: Synthetic oligonucleotide
  misc_feature 1..20: note = Target: FXN; (-) strand; PAM type: YTN; PAM sequence: TTT
  source 1..20: mol_type = other DNA
cacaggacctgaaaacttgt

SEQ ID NO: 28424 - DNA, 20 bp, synthetic construct
  misc_feature 1..20: note = Description of Artificial Sequence: Synthetic oligonucleotide
  misc_feature 1..20: note = Target: FXN; (-) strand; PAM type: YTN; PAM sequence: CTG
  source 1..20: mol_type = other DNA
atttcacaggacctgaaaac

SEQ ID NO: 28425 - DNA, 20 bp, synthetic construct
  misc_feature 1..20: note = Description of Artificial Sequence: Synthetic oligonucleotide
  misc_feature 1..20: note = Target: FXN; (-) strand; PAM type: YTN; PAM sequence: CTG
  source 1..20: mol_type = other DNA
ctgatttcacaggacctgaa

SEQ ID NO: 28426 - DNA, 20 bp, synthetic construct
  misc_feature 1..20: note = Description of Artificial Sequence: Synthetic oligonucleotide
  misc_feature 1..20: note = Target: FXN; (-) strand; PAM type: YTN; PAM sequence: CTC
  source 1..20: mol_type = other DNA
agggtgcgcaaggtgggagg

SEQ ID NO: 28427 - DNA, 20 bp, synthetic construct
  misc_feature 1..20: note = Description of Artificial Sequence: Synthetic oligonucleotide
  misc_feature 1..20: note = Target: FXN; (-) strand; PAM type: YTN; PAM sequence: CTC
  source 1..20: mol_type = other DNA
ctcagggtgcgcaaggtggg

SEQ ID NO: 28428 - DNA, 20 bp, synthetic construct
  misc_feature 1..20: note = Description of Artificial Sequence: Synthetic oligonucleotide
  misc_feature 1..20: note = Target: FXN; (-) strand; PAM type: YTN; PAM sequence: CTG
  source 1..20: mol_type = other DNA
caacctcctcagggtgcgca

SEQ ID NO: 28429 - DNA, 20 bp, synthetic construct
  misc_feature 1..20: note = Description of Artificial Sequence: Synthetic oligonucleotide
  misc_feature 1..20: note = Target: FXN; (-) strand; PAM type: YTN; PAM sequence: TTC
  source 1..20: mol_type = other DNA
tgcaacctcctcagggtgcg

SEQ ID NO: 28430 - DNA, 20 bp, synthetic construct
  misc_feature 1..20: note = Description of Artificial Sequence: Synthetic oligonucleotide
  misc_feature 1..20: note = Target: FXN; (-) strand; PAM type: YTN; PAM sequence: TTA
  source 1..20: mol_type = other DNA
ttctgcaacctcctcagggt

SEQ ID NO: 28431 - DNA, 20 bp, synthetic construct
  misc_feature 1..20: note = Description of Artificial Sequence: Synthetic oligonucleotide
  misc_feature 1..20: note = Target: FXN; (-) strand; PAM type: YTN; PAM sequence: TTT
  source 1..20: mol_type = other DNA
attctgcaacctcctcaggg

SEQ ID NO: 28432 - DNA, 20 bp, synthetic construct
  misc_feature 1..20: note = Description of Artificial Sequence: Synthetic oligonucleotide
  misc_feature 1..20: note = Target: FXN; (-) strand; PAM type: YTN; PAM sequence: CTT
  source 1..20: mol_type = other DNA
tattctgcaacctcctcagg

SEQ ID NO: 28433 - DNA, 20 bp, synthetic construct
  misc_feature 1..20: note = Description of Artificial Sequence: Synthetic oligonucleotide
  misc_feature 1..20: note = Target: FXN; (-) strand; PAM type: YTN; PAM sequence: CTC
  source 1..20: mol_type = other DNA
ctttattctgcaacctcctc

SEQ ID NO: 28434 - DNA, 20 bp, synthetic construct
  misc_feature 1..20: note = Description of Artificial Sequence: Synthetic oligonucleotide
  misc_feature 1..20: note = Target: FXN; (-) strand; PAM type: YTN; PAM sequence: TTC
  source 1..20: mol_type = other DNA
tcctttattctgcaacctcc

SEQ ID NO: 28435 - DNA, 20 bp, synthetic construct
  misc_feature 1..20: note = Description of Artificial Sequence: Synthetic oligonucleotide
  misc_feature 1..20: note = Target: FXN; (-) strand; PAM type: YTN; PAM sequence: CTA
  source 1..20: mol_type = other DNA
gaattctcctttattctgca

SEQ ID NO: 28436 - DNA, 20 bp, synthetic construct
  misc_feature 1..20: note = Description of Artificial Sequence: Synthetic oligonucleotide
  misc_feature 1..20: note = Target: FXN; (-) strand; PAM type: YTN; PAM sequence: CTG
  source 1..20: mol_type = other DNA
atgcccacgtgtccctagaa

SEQ ID NO: 28437 - DNA, 20 bp, synthetic construct
  misc_feature 1..20: note = Description of Artificial Sequence: Synthetic oligonucleotide
  misc_feature 1..20: note = Target: FXN; (-) strand; PAM type: YTN; PAM sequence: CTG
  source 1..20: mol_type = other DNA
agcacaggcactgatgccca

SEQ ID NO: 28438 - DNA, 20 bp, synthetic construct
  misc_feature 1..20: note = Description of Artificial Sequence: Synthetic oligonucleotide
  misc_feature 1..20: note = Target: FXN; (-) strand; PAM type: YTN; PAM sequence: CTC
  source 1..20: mol_type = other DNA
tgagcacaggcactgatgcc

SEQ ID NO: 28439 - DNA, 20 bp, synthetic construct
  misc_feature 1..20: note = Description of Artificial Sequence: Synthetic oligonucleotide
  misc_feature 1..20: note = Target: FXN; (-) strand; PAM type: YTN; PAM sequence: CTG
  source 1..20: mol_type = other DNA
aggtgctctgagcacaggca

SEQ ID NO: 28440 - DNA, 20 bp, synthetic construct
  misc_feature 1..20: note = Description of Artificial Sequence: Synthetic oligonucleotide
  misc_feature 1..20: note = Target: FXN; (-) strand; PAM type: YTN; PAM sequence: CTG
  source 1..20: mol_type = other DNA
cctgaggtgctctgagcaca

SEQ ID NO: 28441 - DNA, 20 bp, synthetic construct
  misc_feature 1..20: note = Description of Artificial Sequence: Synthetic oligonucleotide
  misc_feature 1..20: note = Target: FXN; (-) strand; PAM type: YTN; PAM sequence: CTC
  source 1..20: mol_type = other DNA
cacactgcctgaggtgctct

SEQ ID NO: 28442 - DNA, 20 bp, synthetic construct
  misc_feature 1..20: note = Description of Artificial Sequence: Synthetic oligonucleotide
  misc_feature 1..20: note = Target: FXN; (-) strand; PAM type: YTN; PAM sequence: CTA
  source 1..20: mol_type = other DNA
gacccctccacactgcctga

SEQ ID NO: 28443 - DNA, 20 bp, synthetic construct
  misc_feature 1..20: note = Description of Artificial Sequence: Synthetic oligonucleotide
  misc_feature 1..20: note = Target: FXN; (-) strand; PAM type: YTN; PAM sequence: CTC
  source 1..20: mol_type = other DNA
tagacccctccacactgcct

SEQ ID NO: 28444 - DNA, 20 bp, synthetic construct
  misc_feature 1..20: note = Description of Artificial Sequence: Synthetic oligonucleotide
  misc_feature 1..20: note = Target: FXN; (-) strand; PAM type: YTN; PAM sequence: CTG
  source 1..20: mol_type = other DNA
agtaacctctagacccctcc

SEQ ID NO: 28445 - DNA, 20 bp, synthetic construct
  misc_feature 1..20: note = Description of Artificial Sequence: Synthetic oligonucleotide
  misc_feature 1..20: note = Target: FXN; (-) strand; PAM type: YTN; PAM sequence: TTG
  source 1..20: mol_type = other DNA
ccaggcagagcctgagtaac

SEQ ID NO: 28446 - DNA, 20 bp, synthetic construct
  misc_feature 1..20: note = Description of Artificial Sequence: Synthetic oligonucleotide
  misc_feature 1..20: note = Target: FXN; (-) strand; PAM type: YTN; PAM sequence: CTA
  source 1..20: mol_type = other DNA
tcgggttgccaggcagagcc

SEQ ID NO: 28447 - DNA, 20 bp, synthetic construct
  misc_feature 1..20: note = Description of Artificial Sequence: Synthetic oligonucleotide
  misc_feature 1..20: note = Target: FXN; (-) strand; PAM type: YTN; PAM sequence: CTG
  source 1..20: mol_type = other DNA
ctatcgggttgccaggcaga

SEQ ID NO: 28448 - DNA, 20 bp, synthetic construct
  misc_feature 1..20: note = Description of Artificial Sequence: Synthetic oligonucleotide
  misc_feature 1..20: note = Target: FXN; (-) strand; PAM type: YTN; PAM sequence: CTG
  source 1..20: mol_type = other DNA
atactgctatcgggttgcca

SEQ ID NO: 28449 - DNA, 20 bp, synthetic construct
  misc_feature 1..20: note = Description of Artificial Sequence: Synthetic oligonucleotide
  misc_feature 1..20: note = Target: FXN; (-) strand; PAM type: YTN; PAM sequence: CTC
  source 1..20: mol_type = other DNA
tgatactgctatcgggttgc

SEQ ID NO: 28450 - DNA, 20 bp, synthetic construct
  misc_feature 1..20: note = Description of Artificial Sequence: Synthetic oligonucleotide
  misc_feature 1..20: note = Target: FXN; (-) strand; PAM type: YTN; PAM sequence: CTA
  source 1..20: mol_type = other DNA
tactctgatactgctatcgg

SEQ ID NO: 28451 - DNA, 20 bp, synthetic construct
  misc_feature 1..20: note = Description of Artificial Sequence: Synthetic oligonucleotide
  misc_feature 1..20: note = Target: FXN; (-) strand; PAM type: YTN; PAM sequence: TTG
  source 1..20: mol_type = other DNA
gccctatactctgatactgc

SEQ ID NO: 28452 - DNA, 20 bp, synthetic construct
  misc_feature 1..20: note = Description of Artificial Sequence: Synthetic oligonucleotide
  misc_feature 1..20: note = Target: FXN; (-) strand; PAM type: YTN; PAM sequence: CTT
  source 1..20: mol_type = other DNA
ggccctatactctgatactg

SEQ ID NO: 28453 - DNA, 20 bp, synthetic construct
  misc_feature 1..20: note = Description of Artificial Sequence: Synthetic oligonucleotide
  misc_feature 1..20: note = Target: FXN; (-) strand; PAM type: YTN; PAM sequence: CTA
  source 1..20: mol_type = other DNA
ataaaccacaccaagcccaa

SEQ ID NO: 28454 - DNA, 20 bp, synthetic construct
  misc_feature 1..20: note = Description of Artificial Sequence: Synthetic oligonucleotide
  misc_feature 1..20: note = Target: FXN; (-) strand; PAM type: YTN; PAM sequence: TTC
  source 1..20: mol_type = other DNA
ccagtatggagataaaaatg

SEQ ID NO: 28455 - DNA, 20 bp, synthetic construct
  misc_feature 1..20: note = Description of Artificial Sequence: Synthetic oligonucleotide
  misc_feature 1..20: note = Target: FXN; (-) strand; PAM type: YTN; PAM sequence: CTG
  source 1..20: mol_type = other DNA
ttcccagtatggagataaaa

SEQ ID NO: 28456 - DNA, 20 bp, synthetic construct
  misc_feature 1..20: note = Description of Artificial Sequence: Synthetic oligonucleotide
  misc_feature 1..20: note = Target: FXN; (-) strand; PAM type: YTN; PAM sequence: TTG
  source 1..20: mol_type = other DNA
aacctgttcccagtatggag

SEQ ID NO: 28457 - DNA, 20 bp, synthetic construct
  misc_feature 1..20: note = Description of Artificial Sequence: Synthetic oligonucleotide
  misc_feature 1..20: note = Target: FXN; (-) strand; PAM type: YTN; PAM sequence: CTT
  source 1..20: mol_type = other DNA
gaacctgttcccagtatgga

SEQ ID NO: 28458 - DNA, 20 bp, synthetic construct
  misc_feature 1..20: note = Description of Artificial Sequence: Synthetic oligonucleotide
  misc_feature 1..20: note = Target: FXN; (-) strand; PAM type: YTN; PAM sequence: CTG
  source 1..20: mol_type = other DNA
gggcttgaacctgttcccag

SEQ ID NO: 28459 - DNA, 20 bp, synthetic construct
  misc_feature 1..20: note = Description of Artificial Sequence: Synthetic oligonucleotide
  misc_feature 1..20: note = Target: FXN; (-) strand; PAM type: YTN; PAM sequence: TTA
  source 1..20: mol_type = other DNA
tcaaccaaatgctggggctt

SEQ ID NO: 28460 - DNA, 20 bp, synthetic construct
  misc_feature 1..20: note = Description of Artificial Sequence: Synthetic oligonucleotide
  misc_feature 1..20: note = Target: FXN; (-) strand; PAM type: YTN; PAM sequence: CTG
  source 1..20: mol_type = other DNA
cattatcaaccaaatgctgg

SEQ ID NO: 28461 - DNA, 20 bp, synthetic construct
  misc_feature 1..20: note = Description of Artificial Sequence: Synthetic oligonucleotide
  misc_feature 1..20: note = Target: FXN; (-) strand; PAM type: YTN; PAM sequence: TTC
  source 1..20: mol_type = other DNA
ctgcattatcaaccaaatgc

SEQ ID NO: 28462 - DNA, 20 bp, synthetic construct
  misc_feature 1..20: note = Description of Artificial Sequence: Synthetic oligonucleotide
  misc_feature 1..20: note = Target: FXN; (-) strand; PAM type: YTN; PAM sequence: TTG
  source 1..20: mol_type = other DNA
ggcaataaaagtatcaagga

SEQ ID NO: 28463 - DNA, 20 bp, synthetic construct
  misc_feature 1..20: note = Description of Artificial Sequence: Synthetic oligonucleotide
  misc_feature 1..20: note = Target: FXN; (-) strand; PAM type: YTN; PAM sequence: CTT
  source 1..20: mol_type = other DNA
gggcaataaaagtatcaagg

SEQ ID NO: 28464 - DNA, 20 bp, synthetic construct
  misc_feature 1..20: note = Description of Artificial Sequence: Synthetic oligonucleotide
  misc_feature 1..20: note = Target: FXN; (-) strand; PAM type: YTN; PAM sequence: CTA
  source 1..20: mol_type = other DNA
ggatgaggtcaccaggaagg

SEQ ID NO: 28465 - DNA, 20 bp, synthetic construct
  misc_feature 1..20: note = Description of Artificial Sequence: Synthetic oligonucleotide
  misc_feature 1..20: note = Target: FXN; (-) strand; PAM type: YTN; PAM sequence: CTG
  source 1..20: mol_type = other DNA
aggctaggatgaggtcacca

SEQ ID NO: 28466 - DNA, 20 bp, synthetic construct
  misc_feature 1..20: note = Description of Artificial Sequence: Synthetic oligonucleotide
  misc_feature 1..20: note = Target: FXN; (-) strand; PAM type: YTN; PAM sequence: TTC
  source 1..20: mol_type = other DNA
caaagactgaggctaggatg

SEQ ID NO: 28467 - DNA, 20 bp, synthetic construct
  misc_feature 1..20: note = Description of Artificial Sequence: Synthetic oligonucleotide
  misc_feature 1..20: note = Target: FXN; (-) strand; PAM type: YTN; PAM sequence: TTT
  source 1..20: mol_type = other DNA
ccaaagactgaggctaggat

SEQ ID NO: 28468 - DNA, 20 bp, synthetic construct
  misc_feature 1..20: note = Description of Artificial Sequence: Synthetic oligonucleotide
  misc_feature 1..20: note = Target: FXN; (-) strand; PAM type: YTN; PAM sequence: TTT
  source 1..20: mol_type = other DNA
tccaaagactgaggctagga

SEQ ID NO: 28469 - DNA, 20 bp, synthetic construct
  misc_feature 1..20: note = Description of Artificial Sequence: Synthetic oligonucleotide
  misc_feature 1..20: note = Target: FXN; (-) strand; PAM type: YTN; PAM sequence: CTT
  source 1..20: mol_type = other DNA
ttccaaagactgaggctagg

SEQ ID NO: 28470 - DNA, 20 bp, synthetic construct
  misc_feature 1..20: note = Description of Artificial Sequence: Synthetic oligonucleotide
  misc_feature 1..20: note = Target: FXN; (-) strand; PAM type: YTN; PAM sequence: CTC
  source 1..20: mol_type = other DNA
aaggagggcttttccaaaga

SEQ ID NO: 28471 - DNA, 20 bp, synthetic construct
  misc_feature 1..20: note = Description of Artificial Sequence: Synthetic oligonucleotide
  misc_feature 1..20: note = Target: FXN; (-) strand; PAM type: YTN; PAM sequence: CTG
  source 1..20: mol_type = other DNA
agcactcaaggagggctttt

SEQ ID NO: 28472 - DNA, 20 bp, synthetic construct
  misc_feature 1..20: note = Description of Artificial Sequence: Synthetic oligonucleotide
  misc_feature 1..20: note = Target: FXN; (-) strand; PAM type: YTN; PAM sequence: CTG
  source 1..20: mol_type = other DNA
cctgagcactcaaggagggc

SEQ ID NO: 28473 - DNA, 20 bp, synthetic construct
  misc_feature 1..20: note = Description of Artificial Sequence: Synthetic oligonucleotide
  misc_feature 1..20: note = Target: FXN; (-) strand; PAM type: YTN; PAM sequence: CTG
  source 1..20: mol_type = other DNA
agtctgcctgagcactcaag

SEQ ID NO: 28474 - DNA, 20 bp, synthetic construct
  misc_feature 1..20: note = Description of Artificial Sequence: Synthetic oligonucleotide
  misc_feature 1..20: note = Target: FXN; (-) strand; PAM type: YTN; PAM sequence: CTG
  source 1..20: mol_type = other DNA
atggaggtaagaacagagtg

SEQ ID NO: 28475 - DNA, 20 bp, synthetic construct
  misc_feature 1..20: note = Description of Artificial Sequence: Synthetic oligonucleotide
  misc_feature 1..20: note = Target: FXN; (-) strand; PAM type: YTN; PAM sequence: CTA
  source 1..20: mol_type = other DNA
gtgcatgtggcaccctgatg

SEQ ID NO: 28476 - DNA, 20 bp, synthetic construct
  misc_feature 1..20: note = Description of Artificial Sequence: Synthetic oligonucleotide
  misc_feature 1..20: note = Target: FXN; (-) strand; PAM type: YTN; PAM sequence: TTG
  source 1..20: mol_type = other DNA
gccacggcagcagataacac

SEQ ID NO: 28477 - DNA, 20 bp, synthetic construct
  misc_feature 1..20: note = Description of Artificial Sequence: Synthetic oligonucleotide
  misc_feature 1..20: note = Target: FXN; (-) strand; PAM type: YTN; PAM sequence: CTC
  source 1..20: mol_type = other DNA
atggatgattggccacggca

SEQ ID NO: 28478 - DNA, 20 bp, synthetic construct
  misc_feature 1..20: note = Description of Artificial Sequence: Synthetic oligonucleotide
  misc_feature 1..20: note = Target: FXN; (-) strand; PAM type: YTN; PAM sequence: CTC
  source 1..20: mol_type = other DNA
atggcctcatggatgattgg

SEQ ID NO: 28479 - DNA, 20 bp, synthetic construct
  misc_feature 1..20: note = Description of Artificial Sequence: Synthetic oligonucleotide
  misc_feature 1..20: note = Target: FXN; (-) strand; PAM type: YTN; PAM sequence: TTC
  source 1..20: mol_type = other DNA
ctcatggcctcatggatgat

SEQ ID NO: 28480 - DNA, 20 bp, synthetic construct
  misc_feature 1..20: note = Description of Artificial Sequence: Synthetic oligonucleotide
  misc_feature 1..20: note = Target: FXN; (-) strand; PAM type: YTN; PAM sequence: CTT
  source 1..20: mol_type = other DNA
cctcatggcctcatggatga

SEQ ID NO: 28481 - DNA, 20 bp, synthetic construct
  misc_feature 1..20: note = Description of Artificial Sequence: Synthetic oligonucleotide
  misc_feature 1..20: note = Target: FXN; (-) strand; PAM type: YTN; PAM sequence: TTC
  source 1..20: mol_type = other DNA
cacttcctcatggcctcatg

SEQ ID NO: 28482 - DNA, 20 bp, synthetic construct
  misc_feature 1..20: note = Description of Artificial Sequence: Synthetic oligonucleotide
  misc_feature 1..20: note = Target: FXN; (-) strand; PAM type: YTN; PAM sequence: TTA
  source 1..20: mol_type = other DNA
taccagatgtacattccact

SEQ ID NO: 28483 - DNA, 20 bp, synthetic construct
  misc_feature 1..20: note = Description of Artificial Sequence: Synthetic oligonucleotide
  misc_feature 1..20: note = Target: FXN; (-) strand; PAM type: YTN; PAM sequence: CTT
  source 1..20: mol_type = other DNA
ataccagatgtacattccac

SEQ ID NO: 28484 - DNA, 20 bp, synthetic construct
  misc_feature 1..20: note = Description of Artificial Sequence: Synthetic oligonucleotide
  misc_feature 1..20: note = Target: FXN; (-) strand; PAM type: YTN; PAM sequence: TTC
  source 1..20: mol_type = other DNA
ttataccagatgtacattcc

SEQ ID NO: 28485 - DNA, 20 bp, synthetic construct
  misc_feature 1..20: note = Description of Artificial Sequence: Synthetic oligonucleotide
  misc_feature 1..20: note = Target: FXN; (-) strand; PAM type: YTN; PAM sequence: CTT
  source 1..20: mol_type = other DNA
cttataccagatgtacattc

SEQ ID NO: 28486 - DNA, 20 bp, synthetic construct
  misc_feature 1..20: note = Description of Artificial Sequence: Synthetic oligonucleotide
  misc_feature 1..20: note = Target: FXN; (-) strand; PAM type: YTN; PAM sequence: CTG
  source 1..20: mol_type = other DNA
ccatgtcttcttataccaga

SEQ ID NO: 28487 - DNA, 20 bp, synthetic construct
  misc_feature 1..20: note = Description of Artificial Sequence: Synthetic oligonucleotide
  misc_feature 1..20: note = Target: FXN; (-) strand; PAM type: YTN; PAM sequence: TTC
  source 1..20: mol_type = other DNA
tgccatgtcttcttatacca

SEQ ID NO: 28488 - DNA, 20 bp, synthetic construct
  misc_feature 1..20: note = Description of Artificial Sequence: Synthetic oligonucleotide
  misc_feature 1..20: note = Target: FXN; (-) strand; PAM type: YTN; PAM sequence: CTT
  source 1..20: mol_type = other DNA
ctgccatgtcttcttatacc

SEQ ID NO: 28489 - DNA, 20 bp, synthetic construct
  misc_feature 1..20: note = Description of Artificial Sequence: Synthetic oligonucleotide
  misc_feature 1..20: note = Target: FXN; (-) strand; PAM type: YTN; PAM sequence: CTG
  source 1..20: mol_type = other DNA
gcttctgccatgtcttctta

SEQ ID NO: 28490 - DNA, 20 bp, synthetic construct
  misc_feature 1..20: note = Description of Artificial Sequence: Synthetic oligonucleotide
  misc_feature 1..20: note = Target: FXN; (-) strand; PAM type: YTN; PAM sequence: TTC
  source 1..20: mol_type = other DNA
gtgtggacagatcggaggct

SEQ ID NO: 28491 - DNA, 20 bp, synthetic construct
  misc_feature 1..20: note = Description of Artificial Sequence: Synthetic oligonucleotide
  misc_feature 1..20: note = Target: FXN; (-) strand; PAM type: YTN; PAM sequence: CTG
  source 1..20: mol_type = other DNA
tattcgtgtggacagatcgg

SEQ ID NO: 28492 - DNA, 20 bp, synthetic construct
  misc_feature 1..20: note = Description of Artificial Sequence: Synthetic oligonucleotide
  misc_feature 1..20: note = Target: FXN; (-) strand; PAM type: YTN; PAM sequence: TTG
  source 1..20: mol_type = other DNA
ggaatgctgtattcgtgtgg

SEQ ID NO: 28493 - DNA, 20 bp, synthetic construct
  misc_feature 1..20: note = Description of Artificial Sequence: Synthetic oligonucleotide
  misc_feature 1..20: note = Target: FXN; (-) strand; PAM type: YTN; PAM sequence: TTT
  source 1..20: mol_type = other DNA
gggaatgctgtattcgtgtg

SEQ ID NO: 28494 - DNA, 20 bp, synthetic construct
  misc_feature 1..20: note = Description of Artificial Sequence: Synthetic oligonucleotide
  misc_feature 1..20: note = Target: FXN; (-) strand; PAM type: YTN; PAM sequence: CTT
  source 1..20: mol_type = other DNA
tgggaatgctgtattcgtgt

SEQ ID NO: 28495 - DNA, 20 bp, synthetic construct
  misc_feature 1..20: note = Description of Artificial Sequence: Synthetic oligonucleotide
  misc_feature 1..20: note = Target: FXN; (-) strand; PAM type: YTN; PAM sequence: TTG
  source 1..20: mol_type = other DNA
ctttgggaatgctgtattcg

SEQ ID NO: 28496 - DNA, 20 bp, synthetic construct
  misc_feature 1..20: note = Description of Artificial Sequence: Synthetic oligonucleotide
  misc_feature 1..20: note = Target: FXN; (-) strand; PAM type: YTN; PAM sequence: CTC
  source 1..20: mol_type = other DNA
atccagtgaataatggcaca

SEQ ID NO: 28497 - DNA, 20 bp, synthetic construct
  misc_feature 1..20: note = Description of Artificial Sequence: Synthetic oligonucleotide
  misc_feature 1..20: note = Target: FXN; (-) strand; PAM type: YTN; PAM sequence: CTC
  source 1..20: mol_type = other DNA
aagctcatccagtgaataat

SEQ ID NO: 28498 - DNA, 20 bp, synthetic construct
  misc_feature 1..20: note = Description of Artificial Sequence: Synthetic oligonucleotide
  misc_feature 1..20: note = Target: FXN; (-) strand; PAM type: YTN; PAM sequence: TTC
  source 1..20: mol_type = other DNA
atccacctcaagctcatcca

SEQ ID NO: 28499 - DNA, 20 bp, synthetic construct
  misc_feature 1..20: note = Description of Artificial Sequence: Synthetic oligonucleotide
  misc_feature 1..20: note = Target: FXN; (-) strand; PAM type: YTN; PAM sequence: CTA
  source 1..20: mol_type = other DNA
gttcatccacctcaagctca

SEQ ID NO: 28500 - DNA, 20 bp, synthetic construct
  misc_feature 1..20: note = Description of Artificial Sequence: Synthetic oligonucleotide
  misc_feature 1..20: note = Target: FXN; (-) strand; PAM type: YTN; PAM sequence: CTG
  source 1..20: mol_type = other DNA
gtgggctagttcatccacct

SEQ ID NO: 28501 - DNA, 20 bp, synthetic construct
  misc_feature 1..20: note = Description of Artificial Sequence: Synthetic oligonucleotide
  misc_feature 1..20: note = Target: FXN; (-) strand; PAM type: YTN; PAM sequence: TTG
  source 1..20: mol_type = other DNA
agagcctggtgggctagttc

SEQ ID NO: 28502 - DNA, 20 bp, synthetic construct
  misc_feature 1..20: note = Description of Artificial Sequence: Synthetic oligonucleotide
  misc_feature 1..20: note = Target: FXN; (-) strand; PAM type: YTN; PAM sequence: TTC
  source 1..20: mol_type = other DNA
atgacattgagagcctggtg

SEQ ID NO: 28503 - DNA, 20 bp, synthetic construct
  misc_feature 1..20: note = Description of Artificial Sequence: Synthetic oligonucleotide
  misc_feature 1..20: note = Target: FXN; (-) strand; PAM type: YTN; PAM sequence: TTA
  source 1..20: mol_type = other DNA
aattcatgacattgagagcc

SEQ ID NO: 28504 - DNA, 20 bp, synthetic construct
  misc_feature 1..20: note = Description of Artificial Sequence: Synthetic oligonucleotide
  misc_feature 1..20: note = Target: FXN; (-) strand; PAM type: YTN; PAM sequence: TTC
  source 1..20: mol_type = other DNA
agtgttaaattcatgacatt

SEQ ID NO: 28505 - DNA, 20 bp, synthetic construct
  misc_feature 1..20: note = Description of Artificial Sequence: Synthetic oligonucleotide
  misc_feature 1..20: note = Target: FXN; (-) strand; PAM type: YTN; PAM sequence: TTA
  source 1..20: mol_type = other DNA
attcagtgttaaattcatga

SEQ ID NO: 28506 - DNA, 20 bp, synthetic construct
  misc_feature 1..20: note = Description of Artificial Sequence: Synthetic oligonucleotide
  misc_feature 1..20: note = Target: FXN; (-) strand; PAM type: YTN; PAM sequence: CTT
  source 1..20: mol_type = other DNA
aattcagtgttaaattcatg

SEQ ID NO: 28507 - DNA, 20 bp, synthetic construct
  misc_feature 1..20: note = Description of Artificial Sequence: Synthetic oligonucleotide
  misc_feature 1..20: note = Target: FXN; (-) strand; PAM type: YTN; PAM sequence: TTC
  source 1..20: mol_type = other DNA
ttaattcagtgttaaattca

SEQ ID NO: 28508 - DNA, 20 bp, synthetic construct
  misc_feature 1..20: note = Description of Artificial Sequence: Synthetic oligonucleotide
  misc_feature 1..20: note = Target: FXN; (-) strand; PAM type: YTN; PAM sequence: TTT
  source 1..20: mol_type = other DNA
cttaattcagtgttaaattc

SEQ ID NO: 28509 - DNA, 20 bp, synthetic construct
  misc_feature 1..20: note = Description of Artificial Sequence: Synthetic oligonucleotide
  misc_feature 1..20: note = Target: FXN; (-) strand; PAM type: YTN; PAM sequence: TTT
  source 1..20: mol_type = other DNA
tcttaattcagtgttaaatt

SEQ ID NO: 28510 - DNA, 20 bp, synthetic construct
  misc_feature 1..20: note = Description of Artificial Sequence: Synthetic oligonucleotide
  misc_feature 1..20: note = Target: FXN; (-) strand; PAM type: YTN; PAM sequence: TTT
  source 1..20: mol_type = other DNA
ttcttaattcagtgttaaat

SEQ ID NO: 28511 - DNA, 20 bp, synthetic construct
  misc_feature 1..20: note = Description of Artificial Sequence: Synthetic oligonucleotide
  misc_feature 1..20: note = Target: FXN; (-) strand; PAM type: YTN; PAM sequence: TTA
  source 1..20: mol_type = other DNA
aaacatatttttcttaattc

SEQ ID NO: 28512 - DNA, 20 bp, synthetic construct
  misc_feature 1..20: note = Description of Artificial Sequence: Synthetic oligonucleotide
  misc_feature 1..20: note = Target: FXN; (-) strand; PAM type: YTN; PAM sequence: TTT
  source 1..20: mol_type = other DNA
aaaacatatttttcttaatt

SEQ ID NO: 28513 - DNA, 20 bp, synthetic construct
  misc_feature 1..20: note = Description of Artificial Sequence: Synthetic oligonucleotide
  misc_feature 1..20: note = Target: FXN; (-) strand; PAM type: YTN; PAM sequence: TTT
  source 1..20: mol_type = other DNA
taaaacatatttttcttaat

SEQ ID NO: 28514 - DNA, 20 bp, synthetic construct
  misc_feature 1..20: note = Description of Artificial Sequence: Synthetic oligonucleotide
  misc_feature 1..20: note = Target: FXN; (-) strand; PAM type: YTN; PAM sequence: TTT
  source 1..20: mol_type = other DNA
ttaaaacatatttttcttaa

SEQ ID NO: 28515 - DNA, 20 bp, synthetic construct
  misc_feature 1..20: note = Description of Artificial Sequence: Synthetic oligonucleotide
  misc_feature 1..20: note = Target: FXN; (-) strand; PAM type: YTN; PAM sequence: TTA
  source 1..20: mol_type = other DNA
tttttaaaacatatttttct

SEQ ID NO: 28516 - DNA, 20 bp, synthetic construct
  misc_feature 1..20: note = Description of Artificial Sequence: Synthetic oligonucleotide
  misc_feature 1..20: note = Target: FXN; (-) strand; PAM type: YTN; PAM sequence: CTA
  source 1..20: mol_type = other DNA
ttatttttaaaacatatttt

SEQ ID NO: 28517 - DNA, 20 bp, synthetic construct
  misc_feature 1..20: note = Description of Artificial Sequence: Synthetic oligonucleotide
  misc_feature 1..20: note = Target: FXN; (-) strand; PAM type: YTN; PAM sequence: CTA
  source 1..20: mol_type = other DNA
aactattatttttaaaacat

SEQ ID NO: 28518 - DNA, 20 bp, synthetic construct
  misc_feature 1..20: note = Description of Artificial Sequence: Synthetic oligonucleotide
  misc_feature 1..20: note = Target: FXN; (-) strand; PAM type: YTN; PAM sequence: CTA
  source 1..20: mol_type = other DNA
gcaccccagcaatcacctaa

SEQ ID NO: 28519 - DNA, 20 bp, synthetic construct
  misc_feature 1..20: note = Description of Artificial Sequence: Synthetic oligonucleotide
  misc_feature 1..20: note = Target: FXN; (-) strand; PAM type: YTN; PAM sequence: CTC
  source 1..20: mol_type = other DNA
ctagcaccccagcaatcacc

SEQ ID NO: 28520 - DNA, 20 bp, synthetic construct
  misc_feature 1..20: note = Description of Artificial Sequence: Synthetic oligonucleotide
  misc_feature 1..20: note = Target: FXN; (-) strand; PAM type: YTN; PAM sequence: CTC
  source 1..20: mol_type = other DNA
tcctagcaccccagcaatca

SEQ ID NO: 28521 - DNA, 20 bp, synthetic construct
  misc_feature 1..20: note = Description of Artificial Sequence: Synthetic oligonucleotide
  misc_feature 1..20: note = Target: FXN; (-) strand; PAM type: YTN; PAM sequence: TTC
  source 1..20: mol_type = other DNA
ctctcctagcaccccagcaa

SEQ ID NO: 28522 - DNA, 20 bp, synthetic construct
  misc_feature 1..20: note = Description of Artificial Sequence: Synthetic oligonucleotide
  misc_feature 1..20: note = Target: FXN; (-) strand; PAM type: YTN; PAM sequence: CTT
  source 1..20: mol_type = other DNA
cctctcctagcaccccagca

SEQ ID NO: 28523 - DNA, 20 bp, synthetic construct
  misc_feature 1..20: note = Description of Artificial Sequence: Synthetic oligonucleotide
  misc_feature 1..20: note = Target: FXN; (-) strand; PAM type: YTN; PAM sequence: TTC
  source 1..20: mol_type = other DNA
cttcctctcctagcacccca

SEQ ID NO: 28524 - DNA, 20 bp, synthetic construct
  misc_feature 1..20: note = Description of Artificial Sequence: Synthetic oligonucleotide
  misc_feature 1..20: note = Target: FXN; (-) strand; PAM type: YTN; PAM sequence: TTC
  source 1..20: mol_type = other DNA
cccattccttcctctcctag

SEQ ID NO: 28525 - DNA, 20 bp, synthetic construct
  misc_feature 1..20: note = Description of Artificial Sequence: Synthetic oligonucleotide
  misc_feature 1..20: note = Target: FXN; (-) strand; PAM type: YTN; PAM sequence: TTA
  source 1..20: mol_type = other DNA
ttccccattccttcctctcc

SEQ ID NO: 28526 - DNA, 20 bp, synthetic construct
  misc_feature 1..20: note = Description of Artificial Sequence: Synthetic oligonucleotide
  misc_feature 1..20: note = Target: FXN; (-) strand; PAM type: YTN; PAM sequence: TTA
  source 1..20: mol_type = other DNA
aacagttattccccattcct

SEQ ID NO: 28527 - DNA, 20 bp, synthetic construct
  misc_feature 1..20: note = Description of Artificial Sequence: Synthetic oligonucleotide
  misc_feature 1..20: note = Target: FXN; (-) strand; PAM type: YTN; PAM sequence: CTA
  source 1..20: mol_type = other DNA
tacccattaaacagttattc

SEQ ID NO: 28528 - DNA, 20 bp, synthetic construct
  misc_feature 1..20: note = Description of Artificial Sequence: Synthetic oligonucleotide
  misc_feature 1..20: note = Target: FXN; (-) strand; PAM type: YTN; PAM sequence: TTG
  source 1..20: mol_type = other DNA
aatcagatgtggaacccaca

SEQ ID NO: 28529 - DNA, 20 bp, synthetic construct
  misc_feature 1..20: note = Description of Artificial Sequence: Synthetic oligonucleotide
  misc_feature 1..20: note = Target: FXN; (-) strand; PAM type: YTN; PAM sequence: TTG
  source 1..20: mol_type = other DNA
gttgaatcagatgtggaacc

SEQ ID NO: 28530 - DNA, 20 bp, synthetic construct
  misc_feature 1..20: note = Description of Artificial Sequence: Synthetic oligonucleotide
  misc_feature 1..20: note = Target: FXN; (-) strand; PAM type: YTN; PAM sequence: TTG
  source 1..20: mol_type = other DNA
atccacggttggttgaatca

SEQ ID NO: 28531 - DNA, 20 bp, synthetic construct
  misc_feature 1..20: note = Description of Artificial Sequence: Synthetic oligonucleotide
  misc_feature 1..20: note = Target: FXN; (-) strand; PAM type: YTN; PAM sequence: TTT
  source 1..20: mol_type = other DNA
gatccacggttggttgaatc

SEQ ID NO: 28532 - DNA, 20 bp, synthetic construct
  misc_feature 1..20: note = Description of Artificial Sequence: Synthetic oligonucleotide
  misc_feature 1..20: note = Target: FXN; (-) strand; PAM type: YTN; PAM sequence: TTT
  source 1..20: mol_type = other DNA
tgatccacggttggttgaat

SEQ ID NO: 28533 - DNA, 20 bp, synthetic construct
  misc_feature 1..20: note = Description of Artificial Sequence: Synthetic oligonucleotide
  misc_feature 1..20: note = Target: FXN; (-) strand; PAM type: YTN; PAM sequence: TTC
  source 1..20: mol_type = other DNA
aaatattttgatccacggtt

SEQ ID NO: 28534 - DNA, 20 bp, synthetic construct
  misc_feature 1..20: note = Description of Artificial Sequence: Synthetic oligonucleotide
  misc_feature 1..20: note = Target: FXN; (-) strand; PAM type: YTN; PAM sequence: TTT
  source 1..20: mol_type = other DNA
caaatattttgatccacggt

SEQ ID NO: 28535 - DNA, 20 bp, synthetic construct
  misc_feature 1..20: note = Description of Artificial Sequence: Synthetic oligonucleotide
  misc_feature 1..20: note = Target: FXN; (-) strand; PAM type: YTN; PAM sequence: TTT
  source 1..20: mol_type = other DNA
tcaaatattttgatccacgg

SEQ ID NO: 28536 - DNA, 20 bp, synthetic construct
  misc_feature 1..20: note = Description of Artificial Sequence: Synthetic oligonucleotide
  misc_feature 1..20: note = Target: FXN; (-) strand; PAM type: YTN; PAM sequence: TTA
  source 1..20: mol_type = other DNA
ttttcaaatattttgatcca

SEQ ID NO: 28537 - DNA, 20 bp, synthetic construct
  misc_feature 1..20: note = Description of Artificial Sequence: Synthetic oligonucleotide
  misc_feature 1..20: note = Target: FXN; (-) strand; PAM type: YTN; PAM sequence: TTT
  source 1..20: mol_type = other DNA
attttcaaatattttgatcc

SEQ ID NO: 28538 - DNA, 20 bp, synthetic construct
  misc_feature 1..20: note = Description of Artificial Sequence: Synthetic oligonucleotide
  misc_feature 1..20: note = Target: FXN; (-) strand; PAM type: YTN; PAM sequence: TTT
  source 1..20: mol_type = other DNA
tattttcaaatattttgatc

SEQ ID NO: 28539 - DNA, 20 bp, synthetic construct
  misc_feature 1..20: note = Description of Artificial Sequence: Synthetic oligonucleotide
  misc_feature 1..20: note = Target: FXN; (-) strand; PAM type: YTN; PAM sequence: TTT
  source 1..20: mol_type = other DNA
ttattttcaaatattttgat

SEQ ID NO: 28540 - DNA, 20 bp, synthetic construct
  misc_feature 1..20: note = Description of Artificial Sequence: Synthetic oligonucleotide
  misc_feature 1..20: note = Target: FXN; (-) strand; PAM type: YTN; PAM sequence: TTT
  source 1..20: mol_type = other DNA
tttattttcaaatattttga

SEQ ID NO: 28541 - DNA, 20 bp, synthetic construct
  misc_feature 1..20: note = Description of Artificial Sequence: Synthetic oligonucleotide
  misc_feature 1..20: note = Target: FXN; (-) strand; PAM type: YTN; PAM sequence: TTG
  source 1..20: mol_type = other DNA
ttttttattttcaaatattt

SEQ ID NO: 28542 - DNA, 20 bp, synthetic construct
  misc_feature 1..20: note = Description of Artificial Sequence: Synthetic oligonucleotide
  misc_feature 1..20: note = Target: FXN; (-) strand; PAM type: YTN; PAM sequence: TTT
  source 1..20: mol_type = other DNA
gttttttattttcaaatatt

SEQ ID NO: 28543 - DNA, 20 bp, synthetic construct
  misc_feature 1..20: note = Description of Artificial Sequence: Synthetic oligonucleotide
  misc_feature 1..20: note = Target: FXN; (-) strand; PAM type: YTN; PAM sequence: TTT
  source 1..20: mol_type = other DNA
tgttttttattttcaaatat

SEQ ID NO: 28544 - DNA, 20 bp, synthetic construct
  misc_feature 1..20: note = Description of Artificial Sequence: Synthetic oligonucleotide
  misc_feature 1..20: note = Target: FXN; (-) strand; PAM type: YTN; PAM sequence: TTG
  source 1..20: mol_type = other DNA
ttttgttttttattttcaaa

SEQ ID NO: 28545 - DNA, 20 bp, synthetic construct
  misc_feature 1..20: note = Description of Artificial Sequence: Synthetic oligonucleotide
  misc_feature 1..20: note = Target: FXN; (-) strand; PAM type: YTN; PAM sequence: TTT
  source 1..20: mol_type = other DNA
gttttgttttttattttcaa

SEQ ID NO: 28546 - DNA, 20 bp, synthetic construct
  misc_feature 1..20: note = Description of Artificial Sequence: Synthetic oligonucleotide
  misc_feature 1..20: note = Target: FXN; (-) strand; PAM type: YTN; PAM sequence: TTT
  source 1..20: mol_type = other DNA
tgttttgttttttattttca

SEQ ID NO: 28547 - DNA, 20 bp, synthetic construct
  misc_feature 1..20: note = Description of Artificial Sequence: Synthetic oligonucleotide
  misc_feature 1..20: note = Target: FXN; (-) strand; PAM type: YTN; PAM sequence: TTT
  source 1..20: mol_type = other DNA
ttgttttgttttttattttc

SEQ ID NO: 28548 - DNA, 20 bp, synthetic construct
  misc_feature 1..20: note = Description of Artificial Sequence: Synthetic oligonucleotide
  misc_feature 1..20: note = Target: FXN; (-) strand; PAM type: YTN; PAM sequence: TTG
  source 1..20: mol_type = other DNA
tatcatttttgttttgtttt

SEQ ID NO: 28549 - DNA, 20 bp, synthetic construct
  misc_feature 1..20: note = Description of Artificial Sequence: Synthetic oligonucleotide
  misc_feature 1..20: note = Target: FXN; (-) strand; PAM type: YTN; PAM sequence: TTT
  source 1..20: mol_type = other DNA
gtatcatttttgttttgttt

SEQ ID NO: 28550 - DNA, 20 bp, synthetic construct
  misc_feature 1..20: note = Description of Artificial Sequence: Synthetic oligonucleotide
  misc_feature 1..20: note = Target: FXN; (-) strand; PAM type: YTN; PAM sequence: TTA
  source 1..20: mol_type = other DNA
tttgtatcatttttgttttg

SEQ ID NO: 28551 - DNA, 20 bp, synthetic construct
  misc_feature 1..20: note = Description of Artificial Sequence: Synthetic oligonucleotide
  misc_feature 1..20: note = Target: FXN; (-) strand; PAM type: YTN; PAM sequence: TTT
  source 1..20: mol_type = other DNA
atttgtatcatttttgtttt

SEQ ID NO: 28552 - DNA, 20 bp, synthetic construct
  misc_feature 1..20: note = Description of Artificial Sequence: Synthetic oligonucleotide
  misc_feature 1..20: note = Target: FXN; (-) strand; PAM type: YTN; PAM sequence: TTT
  source 1..20: mol_type = other DNA
tatttgtatcatttttgttt

SEQ ID NO: 28553 - DNA, 20 bp, synthetic construct
  misc_feature 1..20: note = Description of Artificial Sequence: Synthetic oligonucleotide
  misc_feature 1..20: note = Target: FXN; (-) strand; PAM type: YTN; PAM sequence: TTT
  source 1..20: mol_type = other DNA
ttatttgtatcatttttgtt

SEQ ID NO: 28554 - DNA, 20 bp, synthetic construct
  misc_feature 1..20: note = Description of Artificial Sequence: Synthetic oligonucleotide
  misc_feature 1..20: note = Target: FXN; (-) strand; PAM type: YTN; PAM sequence: TTG
  source 1..20: mol_type = other DNA
gtttttatttgtatcatttt

SEQ ID NO: 28555 - DNA, 20 bp, synthetic construct
  misc_feature 1..20: note = Description of Artificial Sequence: Synthetic oligonucleotide
  misc_feature 1..20: note = Target: FXN; (-) strand; PAM type: YTN; PAM sequence: TTA
  source 1..20: mol_type = other DNA
tattggtttttatttgtatc

SEQ ID NO: 28556 - DNA, 20 bp, synthetic construct
  misc_feature 1..20: note = Description of Artificial Sequence: Synthetic oligonucleotide
  misc_feature 1..20: note = Target: FXN; (-) strand; PAM type: YTN; PAM sequence: TTG
  source 1..20: mol_type = other DNA
ttatattggtttttatttgt

SEQ ID NO: 28557 - DNA, 20 bp, synthetic construct
  misc_feature 1..20: note = Description of Artificial Sequence: Synthetic oligonucleotide
  misc_feature 1..20: note = Target: FXN; (-) strand; PAM type: YTN; PAM sequence: TTA
  source 1..20: mol_type = other DNA
atagttgttatattggtttt

SEQ ID NO: 28558 - DNA, 20 bp, synthetic construct
  misc_feature 1..20: note = Description of Artificial Sequence: Synthetic oligonucleotide
  misc_feature 1..20: note = Target: FXN; (-) strand; PAM type: YTN; PAM sequence: CTG
  source 1..20: mol_type = other DNA
ttaatagttgttatattggt

SEQ ID NO: 28559 - DNA, 20 bp, synthetic construct
  misc_feature 1..20: note = Description of Artificial Sequence: Synthetic oligonucleotide
  misc_feature 1..20: note = Target: FXN; (-) strand; PAM type: YTN; PAM sequence: CTA
  source 1..20: mol_type = other DNA
gtacaatgtaaatgctgtta

SEQ ID NO: 28560 - DNA, 20 bp, synthetic construct
  misc_feature 1..20: note = Description of Artificial Sequence: Synthetic oligonucleotide
  misc_feature 1..20: note = Target: FXN; (-) strand; PAM type: YTN; PAM sequence: TTA
  source 1..20: mol_type = other DNA
taatgcctagtacaatgtaa

SEQ ID NO: 28561 - DNA, 20 bp, synthetic construct
  misc_feature 1..20: note = Description of Artificial Sequence: Synthetic oligonucleotide
  misc_feature 1..20: note = Target: FXN; (-) strand; PAM type: YTN; PAM sequence: CTT
  source 1..20: mol_type = other DNA
ataatgcctagtacaatgta

SEQ ID NO: 28562 - DNA, 20 bp, synthetic construct
  misc_feature 1..20: note = Description of Artificial Sequence: Synthetic oligonucleotide
  misc_feature 1..20: note = Target: FXN; (-) strand; PAM type: YTN; PAM sequence: TTA
  source 1..20: mol_type = other DNA
cttataatgcctagtacaat

SEQ ID NO: 28563 - DNA, 20 bp, synthetic construct
  misc_feature 1..20: note = Description of Artificial Sequence: Synthetic oligonucleotide
  misc_feature 1..20: note = Target: FXN; (-) strand; PAM type: YTN; PAM sequence: CTC
  source 1..20: mol_type = other DNA
cagattacttataatgccta

SEQ ID NO: 28564 - DNA, 20 bp, synthetic construct
  misc_feature 1..20: note = Description of Artificial Sequence: Synthetic oligonucleotide
  misc_feature 1..20: note = Target: FXN; (-) strand; PAM type: YTN; PAM sequence: TTA
  source 1..20: mol_type = other DNA
agtcatctccagattactta

SEQ ID NO: 28565 - DNA, 20 bp, synthetic construct
  misc_feature 1..20: note = Description of Artificial Sequence: Synthetic oligonucleotide
  misc_feature 1..20: note = Target: FXN; (-) strand; PAM type: YTN; PAM sequence: TTT
  source 1..20: mol_type = other DNA
aagtcatctccagattactt

SEQ ID NO: 28566 - DNA, 20 bp, synthetic construct
  misc_feature 1..20: note = Description of Artificial Sequence: Synthetic oligonucleotide
  misc_feature 1..20: note = Target: FXN; (-) strand; PAM type: YTN; PAM sequence: CTT
  source 1..20: mol_type = other DNA
taagtcatctccagattact

SEQ ID NO: 28567 - DNA, 20 bp, synthetic construct
  misc_feature 1..20: note = Description of Artificial Sequence: Synthetic oligonucleotide
  misc_feature 1..20: note = Target: FXN; (-) strand; PAM type: YTN; PAM sequence: CTG
  source 1..20: mol_type = other DNA
tatgctttaagtcatctcca

SEQ ID NO: 28568 - DNA, 20 bp, synthetic construct
  misc_feature 1..20: note = Description of Artificial Sequence: Synthetic oligonucleotide
  misc_feature 1..20: note = Target: FXN; (-) strand; PAM type: YTN; PAM sequence: TTC
  source 1..20: mol_type = other DNA
tgtatgctttaagtcatctc

SEQ ID NO: 28569 - DNA, 20 bp, synthetic construct
  misc_feature 1..20: note = Description of Artificial Sequence: Synthetic oligonucleotide
  misc_feature 1..20: note = Target: FXN; (-) strand; PAM type: YTN; PAM sequence: CTT
  source 1..20: mol_type = other DNA
ctgtatgctttaagtcatct

SEQ ID NO: 28570 - DNA, 20 bp, synthetic construct
  misc_feature 1..20: note = Description of Artificial Sequence: Synthetic oligonucleotide
  misc_feature 1..20: note = Target: FXN; (-) strand; PAM type: YTN; PAM sequence: CTA
  source 1..20: mol_type = other DNA
ggcacatccttctgtatgct

SEQ ID NO: 28571 - DNA, 20 bp, synthetic construct
  misc_feature 1..20: note = Description of Artificial Sequence: Synthetic oligonucleotide
  misc_feature 1..20: note = Target: FXN; (-) strand; PAM type: YTN; PAM sequence: CTA
  source 1..20: mol_type = other DNA
acctaggcacatccttctgt

SEQ ID NO: 28572 - DNA, 20 bp, synthetic construct
  misc_feature 1..20: note = Description of Artificial Sequence: Synthetic oligonucleotide
  misc_feature 1..20: note = Target: FXN; (-) strand; PAM type: YTN; PAM sequence: CTG
  source 1..20: mol_type = other DNA
atatgaaatggtacgataca

SEQ ID NO: 28573 - DNA, 20 bp, synthetic construct
  misc_feature 1..20: note = Description of Artificial Sequence: Synthetic oligonucleotide
  misc_feature 1..20: note = Target: FXN; (-) strand; PAM type: YTN; PAM sequence: CTC
  source 1..20: mol_type = other DNA
aagtccctgatatgaaatgg

SEQ ID NO: 28574 - DNA, 20 bp, synthetic construct
  misc_feature 1..20: note = Description of Artificial Sequence: Synthetic oligonucleotide
  misc_feature 1..20: note = Target: FXN; (-) strand; PAM type: YTN; PAM sequence: CTG
  source 1..20: mol_type = other DNA
cagataccaaaatccgtggg

SEQ ID NO: 28575 - DNA, 20 bp, synthetic construct
  misc_feature 1..20: note = Description of Artificial Sequence: Synthetic oligonucleotide
  misc_feature 1..20: note = Target: FXN; (-) strand; PAM type: YTN; PAM sequence: TTC
  source 1..20: mol_type = other DNA
caggatctgcagataccaaa

SEQ ID NO: 28576 - DNA, 20 bp, synthetic construct
  misc_feature 1..20: note = Description of Artificial Sequence: Synthetic oligonucleotide
  misc_feature 1..20: note = Target: FXN; (-) strand; PAM type: YTN; PAM sequence: TTG
  source 1..20: mol_type = other DNA
gtatccatagggaaggggtt

SEQ ID NO: 28577 - DNA, 20 bp, synthetic construct
  misc_feature 1..20: note = Description of Artificial Sequence: Synthetic oligonucleotide
  misc_feature 1..20: note = Target: FXN; (-) strand; PAM type: YTN; PAM sequence: CTT
  source 1..20: mol_type = other DNA
ggtatccatagggaaggggt

SEQ ID NO: 28578 - DNA, 20 bp, synthetic construct
  misc_feature 1..20: note = Description of Artificial Sequence: Synthetic oligonucleotide
  misc_feature 1..20: note = Target: FXN; (-) strand; PAM type: YTN; PAM sequence: TTC
  source 1..20: mol_type = other DNA
cttggtatccatagggaagg

SEQ ID NO: 28579 - DNA, 20 bp, synthetic construct
  misc_feature 1..20: note = Description of Artificial Sequence: Synthetic oligonucleotide
  misc_feature 1..20: note = Target: FXN; (-) strand; PAM type: YTN; PAM sequence: TTG
  source 1..20: mol_type = other DNA
ttccttggtatccataggga

SEQ ID NO: 28580 - DNA, 20 bp, synthetic construct
  misc_feature 1..20: note = Description of Artificial Sequence: Synthetic oligonucleotide
  misc_feature 1..20: note = Target: FXN; (-) strand; PAM type: YTN; PAM sequence: CTG
  source 1..20: mol_type = other DNA
ttgttccttggtatccatag

SEQ ID NO: 28581 - DNA, 20 bp, synthetic construct
  misc_feature 1..20: note = Description of Artificial Sequence: Synthetic oligonucleotide
  misc_feature 1..20: note = Target: FXN; (-) strand; PAM type: YTN; PAM sequence: CTG
  source 1..20: mol_type = other DNA
catcaccccaaaaggagacc

SEQ ID NO: 28582 - DNA, 20 bp, synthetic construct
  misc_feature 1..20: note = Description of Artificial Sequence: Synthetic oligonucleotide
  misc_feature 1..20: note = Target: FXN; (-) strand; PAM type: YTN; PAM sequence: TTC
  source 1..20: mol_type = other DNA
aaaacatctgcatcacccca

SEQ ID NO: 28583 - DNA, 20 bp, synthetic construct
  misc_feature 1..20: note = Description of Artificial Sequence: Synthetic oligonucleotide
  misc_feature 1..20: note = Target: FXN; (-) strand; PAM type: YTN; PAM sequence: CTT
  source 1..20: mol_type = other DNA
caaaacatctgcatcacccc

SEQ ID NO: 28584 - DNA, 20 bp, synthetic construct
  misc_feature 1..20: note = Description of Artificial Sequence: Synthetic oligonucleotide
  misc_feature 1..20: note = Target: FXN; (-) strand; PAM type: YTN; PAM sequence: CTA
  source 1..20: mol_type = other DNA
gcttcaaaacatctgcatca

SEQ ID NO: 28585 - DNA, 20 bp, synthetic construct
  misc_feature 1..20: note = Description of Artificial Sequence: Synthetic oligonucleotide
  misc_feature 1..20: note = Target: FXN; (-) strand; PAM type: YTN; PAM sequence: CTG
  source 1..20: mol_type = other DNA
cctagcttcaaaacatctgc

SEQ ID NO: 28586 - DNA, 20 bp, synthetic construct
  misc_feature 1..20: note = Description of Artificial Sequence: Synthetic oligonucleotide
  misc_feature 1..20: note = Target: FXN; (-) strand; PAM type: YTN; PAM sequence: CTC
  source 1..20: mol_type = other DNA
tgcctagcttcaaaacatct

SEQ ID NO: 28587 - DNA, 20 bp, synthetic construct
  misc_feature 1..20: note = Description of Artificial Sequence: Synthetic oligonucleotide
  misc_feature 1..20: note = Target: FXN; (-) strand; PAM type: YTN; PAM sequence: CTA
  source 1..20: mol_type = other DNA
cctctgcctagcttcaaaac

SEQ ID NO: 28588 - DNA, 20 bp, synthetic construct
  misc_feature 1..20: note = Description of Artificial Sequence: Synthetic oligonucleotide
  misc_feature 1..20: note = Target: FXN; (-) strand; PAM type: YTN; PAM sequence: TTG
  source 1..20: mol_type = other DNA
tgcaaccactacctctgcct

SEQ ID NO: 28589 - DNA, 20 bp, synthetic construct
  misc_feature 1..20: note = Description of Artificial Sequence: Synthetic oligonucleotide
  misc_feature 1..20: note = Target: FXN; (-) strand; PAM type: YTN; PAM sequence: TTA
  source 1..20: mol_type = other DNA
caatgttgtgcaaccactac

SEQ ID NO: 28590 - DNA, 20 bp, synthetic construct
  misc_feature 1..20: note = Description of Artificial Sequence: Synthetic oligonucleotide
  misc_feature 1..20: note = Target: FXN; (-) strand; PAM type: YTN; PAM sequence: TTT
  source 1..20: mol_type = other DNA
acaatgttgtgcaaccacta

SEQ ID NO: 28591 - DNA, 20 bp, synthetic construct
  misc_feature 1..20: note = Description of Artificial Sequence: Synthetic oligonucleotide
  misc_feature 1..20: note = Target: FXN; (-) strand; PAM type: YTN; PAM sequence: TTA
  source 1..20: mol_type = other DNA
gtacatttacaatgttgtgc

SEQ ID NO: 28592 - DNA, 20 bp, synthetic construct
  misc_feature 1..20: note = Description of Artificial Sequence: Synthetic oligonucleotide
  misc_feature 1..20: note = Target: FXN; (-) strand; PAM type: YTN; PAM sequence: TTT
  source 1..20: mol_type = other DNA
agtacatttacaatgttgtg

SEQ ID NO: 28593 - DNA, 20 bp, synthetic construct
  misc_feature 1..20: note = Description of Artificial Sequence: Synthetic oligonucleotide
  misc_feature 1..20: note = Target: FXN; (-) strand; PAM type: YTN; PAM sequence: TTG
  source 1..20: mol_type = other DNA
gtggcatttagtacatttac

SEQ ID NO: 28594 - DNA, 20 bp, synthetic construct
  misc_feature 1..20: note = Description of Artificial Sequence: Synthetic oligonucleotide
  misc_feature 1..20: note = Target: FXN; (-) strand; PAM type: YTN; PAM sequence: TTT
  source 1..20: mol_type = other DNA
ggtggcatttagtacattta

SEQ ID NO: 28595 - DNA, 20 bp, synthetic construct
  misc_feature 1..20: note = Description of Artificial Sequence: Synthetic oligonucleotide
  misc_feature 1..20: note = Target: FXN; (-) strand; PAM type: YTN; PAM sequence: TTA
  source 1..20: mol_type = other DNA
aaaatgaataatttggtggc

SEQ ID NO: 28596 - DNA, 20 bp, synthetic construct
  misc_feature 1..20: note = Description of Artificial Sequence: Synthetic oligonucleotide
  misc_feature 1..20: note = Target: FXN; (-) strand; PAM type: YTN; PAM sequence: TTT
  source 1..20: mol_type = other DNA
aaaaatgaataatttggtgg

SEQ ID NO: 28597 - DNA, 20 bp, synthetic construct
  misc_feature 1..20: note = Description of Artificial Sequence: Synthetic oligonucleotide
  misc_feature 1..20: note = Target: FXN; (-) strand; PAM type: YTN; PAM sequence: TTA
  source 1..20: mol_type = other DNA
accatttaaaaatgaataat

SEQ ID NO: 28598 - DNA, 20 bp, synthetic construct
  misc_feature 1..20: note = Description of Artificial Sequence: Synthetic oligonucleotide
  misc_feature 1..20: note = Target: FXN; (-) strand; PAM type: YTN; PAM sequence: TTC
  source 1..20: mol_type = other DNA
acataacacattaaccattt

SEQ ID NO: 28599 - DNA, 20 bp, synthetic construct
  misc_feature 1..20: note = Description of Artificial Sequence: Synthetic oligonucleotide
  misc_feature 1..20: note = Target: FXN; (-) strand; PAM type: YTN; PAM sequence: TTA
  source 1..20: mol_type = other DNA
aggtgaaattcacataacac

SEQ ID NO: 28600 - DNA, 20 bp, synthetic construct
  misc_feature 1..20: note = Description of Artificial Sequence: Synthetic oligonucleotide
  misc_feature 1..20: note = Target: FXN; (-) strand; PAM type: YTN; PAM sequence: TTG
  source 1..20: mol_type = other DNA
ttaaggtgaaattcacataa

SEQ ID NO: 28601 - DNA, 20 bp, synthetic construct
  misc_feature 1..20: note = Description of Artificial Sequence: Synthetic oligonucleotide
  misc_feature 1..20: note = Target: FXN; (-) strand; PAM type: YTN; PAM sequence: TTA
  source 1..20: mol_type = other DNA
gttgttaaggtgaaattcac

SEQ ID NO: 28602 - DNA, 20 bp, synthetic construct
  misc_feature 1..20: note = Description of Artificial Sequence: Synthetic oligonucleotide
  misc_feature 1..20: note = Target: FXN; (-) strand; PAM type: YTN; PAM sequence: TTA
  source 1..20: mol_type = other DNA
ttagttgttaaggtgaaatt

SEQ ID NO: 28603 - DNA, 20 bp, synthetic construct
  misc_feature 1..20: note = Description of Artificial Sequence: Synthetic oligonucleotide
  misc_feature 1..20: note = Target: FXN; (-) strand; PAM type: YTN; PAM sequence: CTA
  source 1..20: mol_type = other DNA
taatattattagttgttaag

SEQ ID NO: 28604 - DNA, 20 bp, synthetic construct
  misc_feature 1..20: note = Description of Artificial Sequence: Synthetic oligonucleotide
  misc_feature 1..20: note = Target: FXN; (-) strand; PAM type: YTN; PAM sequence: TTA
  source 1..20: mol_type = other DNA
cctataatattattagttgt

SEQ ID NO: 28605 - DNA, 20 bp, synthetic construct
  misc_feature 1..20: note = Description of Artificial Sequence: Synthetic oligonucleotide
  misc_feature 1..20: note = Target: FXN; (-) strand; PAM type: YTN; PAM sequence: CTT
  source 1..20: mol_type = other DNA
acctataatattattagttg

SEQ ID NO: 28606 - DNA, 20 bp, synthetic construct
  misc_feature 1..20: note = Description of Artificial Sequence: Synthetic oligonucleotide
  misc_feature 1..20: note = Target: FXN; (-) strand; PAM type: YTN; PAM sequence: TTG
  source 1..20: mol_type = other DNA
tgccttacctataatattat

SEQ ID NO: 28607 - DNA, 20 bp, synthetic construct
  misc_feature 1..20: note = Description of Artificial Sequence: Synthetic oligonucleotide
  misc_feature 1..20: note = Target: FXN; (-) strand; PAM type: YTN; PAM sequence: CTT
  source 1..20: mol_type = other DNA
gtgccttacctataatatta

SEQ ID NO: 28608 - DNA, 20 bp, synthetic construct
  misc_feature 1..20: note = Description of Artificial Sequence: Synthetic oligonucleotide
  misc_feature 1..20: note = Target: FXN; (-) strand; PAM type: YTN; PAM sequence: CTA
  source 1..20: mol_type = other DNA
cagatgtaacttgtgcctta

SEQ ID NO: 28609 - DNA, 20 bp, synthetic construct
  misc_feature 1..20: note = Description of Artificial Sequence: Synthetic oligonucleotide
  misc_feature 1..20: note = Target: FXN; (-) strand; PAM type: YTN; PAM sequence: TTG
  source 1..20: mol_type = other DNA
tgctacagatgtaacttgtg

SEQ ID NO: 28610 - DNA, 20 bp, synthetic construct
  misc_feature 1..20: note = Description of Artificial Sequence: Synthetic oligonucleotide
  misc_feature 1..20: note = Target: FXN; (-) strand; PAM type: YTN; PAM sequence: TTT
  source 1..20: mol_type = other DNA
gtgctacagatgtaacttgt

SEQ ID NO: 28611 - DNA, 20 bp, synthetic construct
  misc_feature 1..20: note = Description of Artificial Sequence: Synthetic oligonucleotide
  misc_feature 1..20: note = Target: FXN; (-) strand; PAM type: YTN; PAM sequence: TTT
  source 1..20: mol_type = other DNA
tgtgctacagatgtaacttg

SEQ ID NO: 28612 - DNA, 20 bp, synthetic construct
  misc_feature 1..20: note = Description of Artificial Sequence: Synthetic oligonucleotide
  misc_feature 1..20: note = Target: FXN; (-) strand; PAM type: YTN; PAM sequence: TTT
  source 1..20: mol_type = other DNA
ttgtgctacagatgtaactt

SEQ ID NO: 28613 - DNA, 20 bp, synthetic construct
  misc_feature 1..20: note = Description of Artificial Sequence: Synthetic oligonucleotide
  misc_feature 1..20: note = Target: FXN; (-) strand; PAM type: YTN; PAM sequence: TTA
  source 1..20: mol_type = other DNA
gggccatttttgtgctacag

SEQ ID NO: 28614 - DNA, 20 bp, synthetic construct
  misc_feature 1..20: note = Description of Artificial Sequence: Synthetic oligonucleotide
  misc_feature 1..20: note = Target: FXN; (-) strand; PAM type: YTN; PAM sequence: TTA
  source 1..20: mol_type = other DNA
aaaattagggccatttttgt

SEQ ID NO: 28615 - DNA, 20 bp, synthetic construct
  misc_feature 1..20: note = Description of Artificial Sequence: Synthetic oligonucleotide
  misc_feature 1..20: note = Target: FXN; (-) strand; PAM type: YTN; PAM sequence: TTT
  source 1..20: mol_type = other DNA
aaaaattagggccatttttg

SEQ ID NO: 28616 - DNA, 20 bp, synthetic construct
  misc_feature 1..20: note = Description of Artificial Sequence: Synthetic oligonucleotide
  misc_feature 1..20: note = Target: FXN; (-) strand; PAM type: YTN; PAM sequence: TTT
  source 1..20: mol_type = other DNA
taaaaattagggccattttt

SEQ ID NO: 28617 - DNA, 20 bp, synthetic construct
  misc_feature 1..20: note = Description of Artificial Sequence: Synthetic oligonucleotide
  misc_feature 1..20: note = Target: FXN; (-) strand; PAM type: YTN; PAM sequence: CTG
  source 1..20: mol_type = other DNA
gagcagtgttttaaaaatta

SEQ ID NO: 28618 - DNA, 20 bp, synthetic construct
  misc_feature 1..20: note = Description of Artificial Sequence: Synthetic oligonucleotide
  misc_feature 1..20: note = Target: FXN; (-) strand; PAM type: YTN; PAM sequence: CTA
  source 1..20: mol_type = other DNA
tgctggagcagtgttttaaa

SEQ ID NO: 28619 - DNA, 20 bp, synthetic construct
  misc_feature 1..20: note = Description of Artificial Sequence: Synthetic oligonucleotide
  misc_feature 1..20: note = Target: FXN; (-) strand; PAM type: YTN; PAM sequence: CTG
  source 1..20: mol_type = other DNA
ctatgctggagcagtgtttt

SEQ ID NO: 28620 - DNA, 20 bp, synthetic construct
  misc_feature 1..20: note = Description of Artificial Sequence: Synthetic oligonucleotide
  misc_feature 1..20: note = Target: FXN; (-) strand; PAM type: YTN; PAM sequence: CTC
  source 1..20: mol_type = other DNA
acatgtgatacctgctatgc

SEQ ID NO: 28621 - DNA, 20 bp, synthetic construct
  misc_feature 1..20: note = Description of Artificial Sequence: Synthetic oligonucleotide
  misc_feature 1..20: note = Target: FXN; (-) strand; PAM type: YTN; PAM sequence: CTA
  source 1..20: mol_type = other DNA
cctcacatgtgatacctgct

SEQ ID NO: 28622 - DNA, 20 bp, synthetic construct
  misc_feature 1..20: note = Description of Artificial Sequence: Synthetic oligonucleotide
  misc_feature 1..20: note = Target: FXN; (-) strand; PAM type: YTN; PAM sequence: TTG
  source 1..20: mol_type = other DNA
ctacctcacatgtgatacct

SEQ ID NO: 28623 - DNA, 20 bp, synthetic construct
  misc_feature 1..20: note = Description of Artificial Sequence: Synthetic oligonucleotide
  misc_feature 1..20: note = Target: FXN; (-) strand; PAM type: YTN; PAM sequence: TTT
  source 1..20: mol_type = other DNA
gctacctcacatgtgatacc

SEQ ID NO: 28624 - DNA, 20 bp, synthetic construct
  misc_feature 1..20: note = Description of Artificial Sequence: Synthetic oligonucleotide
  misc_feature 1..20: note = Target: FXN; (-) strand; PAM type: YTN; PAM sequence: TTT
  source 1..20: mol_type = other DNA
tgctacctcacatgtgatac

SEQ ID NO: 28625 - DNA, 20 bp, synthetic construct
  misc_feature 1..20: note = Description of Artificial Sequence: Synthetic oligonucleotide
  misc_feature 1..20: note = Target: FXN; (-) strand; PAM type: YTN; PAM sequence: CTT
  source 1..20: mol_type = other DNA
ttgctacctcacatgtgata

SEQ ID NO: 28626 - DNA, 20 bp, synthetic construct
  misc_feature 1..20: note = Description of Artificial Sequence: Synthetic oligonucleotide
  misc_feature 1..20: note = Target: FXN; (-) strand; PAM type: YTN; PAM sequence: CTC
  source 1..20: mol_type = other DNA
cagcttttgctacctcacat

SEQ ID NO: 28627 - DNA, 20 bp, synthetic construct
  misc_feature 1..20: note = Description of Artificial Sequence: Synthetic oligonucleotide
  misc_feature 1..20: note = Target: FXN; (-) strand; PAM type: YTN; PAM sequence: TTG
  source 1..20: mol_type = other DNA
atctccagcttttgctacct

SEQ ID NO: 28628 - DNA, 20 bp, synthetic construct
  misc_feature 1..20: note = Description of Artificial Sequence: Synthetic oligonucleotide
  misc_feature 1..20: note = Target: FXN; (-) strand; PAM type: YTN; PAM sequence: TTT
  source 1..20: mol_type = other DNA
gatctccagcttttgctacc

SEQ ID NO: 28629 - DNA, 20 bp, synthetic construct
  misc_feature 1..20: note = Description of Artificial Sequence: Synthetic oligonucleotide
  misc_feature 1..20: note = Target: FXN; (-) strand; PAM type: YTN; PAM sequence: CTT
  source 1..20: mol_type = other DNA
tgatctccagcttttgctac

SEQ ID NO: 28630 - DNA, 20 bp, synthetic construct
  misc_feature 1..20: note = Description of Artificial Sequence: Synthetic oligonucleotide
  misc_feature 1..20: note = Target: FXN; (-) strand; PAM type: YTN; PAM sequence: CTC
  source 1..20: mol_type = other DNA
caggtatcacactttgatct

SEQ ID NO: 28631 - DNA, 20 bp, synthetic construct
  misc_feature 1..20: note = Description of Artificial Sequence: Synthetic oligonucleotide
  misc_feature 1..20: note = Target: FXN; (-) strand; PAM type: YTN; PAM sequence: CTG
  source 1..20: mol_type = other DNA
ataagtctccaggtatcaca

SEQ ID NO: 28632 - DNA, 20 bp, synthetic construct
  misc_feature 1..20: note = Description of Artificial Sequence: Synthetic oligonucleotide
  misc_feature 1..20: note = Target: FXN; (-) strand; PAM type: YTN; PAM sequence: TTA
  source 1..20: mol_type = other DNA
ctgataagtctccaggtatc

SEQ ID NO: 28633 - DNA, 20 bp, synthetic construct
  misc_feature 1..20: note = Description of Artificial Sequence: Synthetic oligonucleotide
  misc_feature 1..20: note = Target: FXN; (-) strand; PAM type: YTN; PAM sequence: CTT
  source 1..20: mol_type = other DNA
actgataagtctccaggtat

SEQ ID NO: 28634 - DNA, 20 bp, synthetic construct
  misc_feature 1..20: note = Description of Artificial Sequence: Synthetic oligonucleotide
  misc_feature 1..20: note = Target: FXN; (-) strand; PAM type: YTN; PAM sequence: TTG
  source 1..20: mol_type = other DNA
acccttactgataagtctcc

SEQ ID NO: 28635 - DNA, 20 bp, synthetic construct
  misc_feature 1..20: note = Description of Artificial Sequence: Synthetic oligonucleotide
  misc_feature 1..20: note = Target: FXN; (-) strand; PAM type: YTN; PAM sequence: TTT
  source 1..20: mol_type = other DNA
gacccttactgataagtctc

SEQ ID NO: 28636 - DNA, 20 bp, synthetic construct
  misc_feature 1..20: note = Description of Artificial Sequence: Synthetic oligonucleotide
  misc_feature 1..20: note = Target: FXN; (-) strand; PAM type: YTN; PAM sequence: CTG
  source 1..20: mol_type = other DNA
aaaaaacatttgacccttac

SEQ ID NO: 28637 - DNA, 20 bp, synthetic construct
  misc_feature 1..20: note = Description of Artificial Sequence: Synthetic oligonucleotide
  misc_feature 1..20: note = Target: FXN; (-) strand; PAM type: YTN; PAM sequence: CTC
  source 1..20: mol_type = other DNA
aaaacctgaaaaaacatttg

SEQ ID NO: 28638 - DNA, 20 bp, synthetic construct
  misc_feature 1..20: note = Description of Artificial Sequence: Synthetic oligonucleotide
  misc_feature 1..20: note = Target: FXN; (-) strand; PAM type: YTN; PAM sequence: TTC
  source 1..20: mol_type = other DNA
tcaaaacctgaaaaaacatt

SEQ ID NO: 28639 - DNA, 20 bp, synthetic construct
  misc_feature 1..20: note = Description of Artificial Sequence: Synthetic oligonucleotide
  misc_feature 1..20: note = Target: FXN; (-) strand; PAM type: YTN; PAM sequence: TTC
  source 1..20: mol_type = other DNA
caagaatgattctcaaaacc

SEQ ID NO: 28640 - DNA, 20 bp, synthetic construct
  misc_feature 1..20: note = Description of Artificial Sequence: Synthetic oligonucleotide
  misc_feature 1..20: note = Target: FXN; (-) strand; PAM type: YTN; PAM sequence: CTG
  source 1..20: mol_type = other DNA
gaacaattccaagaatgatt

SEQ ID NO: 28641 - DNA, 20 bp, synthetic construct
  misc_feature 1..20: note = Description of Artificial Sequence: Synthetic oligonucleotide
  misc_feature 1..20: note = Target: FXN; (-) strand; PAM type: YTN; PAM sequence: TTC
  source 1..20: mol_type = other DNA
tggaacaattccaagaatga

SEQ ID NO: 28642 - DNA, 20 bp, synthetic construct
  misc_feature 1..20: note = Description of Artificial Sequence: Synthetic oligonucleotide
  misc_feature 1..20: note = Target: FXN; (-) strand; PAM type: YTN; PAM sequence: CTT
  source 1..20: mol_type = other DNA
ctggaacaattccaagaatg

SEQ ID NO: 28643 - DNA, 20 bp, synthetic construct
  misc_feature 1..20: note = Description of Artificial Sequence: Synthetic oligonucleotide
  misc_feature 1..20: note = Target: FXN; (-) strand; PAM type: YTN; PAM sequence: TTA
  source 1..20: mol_type = other DNA
tacgatatatcttctggaac

SEQ ID NO: 28644 - DNA, 20 bp, synthetic construct
  misc_feature 1..20: note = Description of Artificial Sequence: Synthetic oligonucleotide
  misc_feature 1..20: note = Target: FXN; (-) strand; PAM type: YTN; PAM sequence: CTA
  source 1..20: mol_type = other DNA
agaagagttatacgatatat

SEQ ID NO: 28645 - DNA, 20 bp, synthetic construct
  misc_feature 1..20: note = Description of Artificial Sequence: Synthetic oligonucleotide
  misc_feature 1..20: note = Target: FXN; (-) strand; PAM type: YTN; PAM sequence: TTA
  source 1..20: mol_type = other DNA
gcatctaagaagagttatac

SEQ ID NO: 28646 - DNA, 20 bp, synthetic construct
  misc_feature 1..20: note = Description of Artificial Sequence: Synthetic oligonucleotide
  misc_feature 1..20: note = Target: FXN; (-) strand; PAM type: YTN; PAM sequence: CTT
  source 1..20: mol_type = other DNA
agcatctaagaagagttata

SEQ ID NO: 28647 - DNA, 20 bp, synthetic construct
  misc_feature 1..20: note = Description of Artificial Sequence: Synthetic oligonucleotide
  misc_feature 1..20: note = Target: FXN; (-) strand; PAM type: YTN; PAM sequence: TTA
  source 1..20: mol_type = other DNA
tcttagcatctaagaagagt

SEQ ID NO: 28648 - DNA, 20 bp, synthetic construct
  misc_feature 1..20: note = Description of Artificial Sequence: Synthetic oligonucleotide
  misc_feature 1..20: note = Target: FXN; (-) strand; PAM type: YTN; PAM sequence: CTT
  source 1..20: mol_type = other DNA
atcttagcatctaagaagag

SEQ ID NO: 28649 - DNA, 20 bp, synthetic construct
  misc_feature 1..20: note = Description of Artificial Sequence: Synthetic oligonucleotide
  misc_feature 1..20: note = Target: FXN; (-) strand; PAM type: YTN; PAM sequence: TTC
  source 1..20: mol_type = other DNA
ttatcttagcatctaagaag

SEQ ID NO: 28650 - DNA, 20 bp, synthetic construct
  misc_feature 1..20: note = Description of Artificial Sequence: Synthetic oligonucleotide
  misc_feature 1..20: note = Target: FXN; (-) strand; PAM type: YTN; PAM sequence: CTT
  source 1..20: mol_type = other DNA
cttatcttagcatctaagaa

SEQ ID NO: 28651 - DNA, 20 bp, synthetic construct
  misc_feature 1..20: note = Description of Artificial Sequence: Synthetic oligonucleotide
  misc_feature 1..20: note = Target: FXN; (-) strand; PAM type: YTN; PAM sequence: CTG
  source 1..20: mol_type = other DNA
ccttcttatcttagcatcta

SEQ ID NO: 28652 - DNA, 20 bp, synthetic construct
  misc_feature 1..20: note = Description of Artificial Sequence: Synthetic oligonucleotide
  misc_feature 1..20: note = Target: FXN; (-) strand; PAM type: YTN; PAM sequence: CTA
  source 1..20: mol_type = other DNA
gtgtatatctgccttcttat

SEQ ID NO: 28653 - DNA, 20 bp, synthetic construct
  misc_feature 1..20: note = Description of Artificial Sequence: Synthetic oligonucleotide
  misc_feature 1..20: note = Target: FXN; (-) strand; PAM type: YTN; PAM sequence: CTA
  source 1..20: mol_type = other DNA
gaaaataacacaaaatgagc

SEQ ID NO: 28654 - DNA, 20 bp, synthetic construct
  misc_feature 1..20: note = Description of Artificial Sequence: Synthetic oligonucleotide
  misc_feature 1..20: note = Target: FXN; (-) strand; PAM type: YTN; PAM sequence: CTC
  source 1..20: mol_type = other DNA
tagaaaataacacaaaatga

SEQ ID NO: 28655 - DNA, 20 bp, synthetic construct
  misc_feature 1..20: note = Description of Artificial Sequence: Synthetic oligonucleotide
  misc_feature 1..20: note = Target: FXN; (-) strand; PAM type: YTN; PAM sequence: CTG
  source 1..20: mol_type = other DNA
gagtaaagctctagaaaata

SEQ ID NO: 28656 - DNA, 20 bp, synthetic construct
  misc_feature 1..20: note = Description of Artificial Sequence: Synthetic oligonucleotide
  misc_feature 1..20: note = Target: FXN; (-) strand; PAM type: YTN; PAM sequence: TTG
  source 1..20: mol_type = other DNA
actggagtaaagctctagaa

SEQ ID NO: 28657 - DNA, 20 bp, synthetic construct
  misc_feature 1..20: note = Description of Artificial Sequence: Synthetic oligonucleotide
  misc_feature 1..20: note = Target: FXN; (-) strand; PAM type: YTN; PAM sequence: CTG
  source 1..20: mol_type = other DNA
cccccaagaaattgactgga

SEQ ID NO: 28658 - DNA, 20 bp, synthetic construct
  misc_feature 1..20: note = Description of Artificial Sequence: Synthetic oligonucleotide
  misc_feature 1..20: note = Target: FXN; (-) strand; PAM type: YTN; PAM sequence: TTC
  source 1..20: mol_type = other DNA
cacaaatgctgcccccaaga

SEQ ID NO: 28659 - DNA, 20 bp, synthetic construct
  misc_feature 1..20: note = Description of Artificial Sequence: Synthetic oligonucleotide
  misc_feature 1..20: note = Target: FXN; (-) strand; PAM type: YTN; PAM sequence: CTG
  source 1..20: mol_type = other DNA
attccacaaatgctgccccc

SEQ ID NO: 28660 - DNA, 20 bp, synthetic construct
  misc_feature 1..20: note = Description of Artificial Sequence: Synthetic oligonucleotide
  misc_feature 1..20: note = Target: FXN; (-) strand; PAM type: YTN; PAM sequence: TTC
  source 1..20: mol_type = other DNA
agatgaaccactgattccac

SEQ ID NO: 28661 - DNA, 20 bp, synthetic construct
  misc_feature 1..20: note = Description of Artificial Sequence: Synthetic oligonucleotide
  misc_feature 1..20: note = Target: FXN; (-) strand; PAM type: YTN; PAM sequence: CTT
  source 1..20: mol_type = other DNA
cagatgaaccactgattcca

SEQ ID NO: 28662 - DNA, 20 bp, synthetic construct
  misc_feature 1..20: note = Description of Artificial Sequence: Synthetic oligonucleotide
  misc_feature 1..20: note = Target: FXN; (-) strand; PAM type: YTN; PAM sequence: TTC
  source 1..20: mol_type = other DNA
cacagcacagcccttcagat

SEQ ID NO: 28663 - DNA, 20 bp, synthetic construct
  misc_feature 1..20: note = Description of Artificial Sequence: Synthetic oligonucleotide
  misc_feature 1..20: note = Target: FXN; (-) strand; PAM type: YTN; PAM sequence: CTG
  source 1..20: mol_type = other DNA
gaagacaaaacaaatgcata

SEQ ID NO: 28664 - DNA, 20 bp, synthetic construct
  misc_feature 1..20: note = Description of Artificial Sequence: Synthetic oligonucleotide
  misc_feature 1..20: note = Target: FXN; (-) strand; PAM type: YTN; PAM sequence: TTA
  source 1..20: mol_type = other DNA
ggtccactggaagacaaaac

SEQ ID NO: 28665 - DNA, 20 bp, synthetic construct
  misc_feature 1..20: note = Description of Artificial Sequence: Synthetic oligonucleotide
  misc_feature 1..20: note = Target: FXN; (-) strand; PAM type: YTN; PAM sequence: CTT
  source 1..20: mol_type = other DNA
aggtccactggaagacaaaa

SEQ ID NO: 28666 - DNA, 20 bp, synthetic construct
  misc_feature 1..20: note = Description of Artificial Sequence: Synthetic oligonucleotide
  misc_feature 1..20: note = Target: FXN; (-) strand; PAM type: YTN; PAM sequence: TTC
  source 1..20: mol_type = other DNA
ccagtccagtcataacgctt

SEQ ID NO: 28667 - DNA, 20 bp, synthetic construct
  misc_feature 1..20: note = Description of Artificial Sequence: Synthetic oligonucleotide
  misc_feature 1..20: note = Target: FXN; (-) strand; PAM type: YTN; PAM sequence: TTT
  source 1..20: mol_type = other DNA
cccagtccagtcataacgct

SEQ ID NO: 28668 - DNA, 20 bp, synthetic construct
  misc_feature 1..20: note = Description of Artificial Sequence: Synthetic oligonucleotide
  misc_feature 1..20: note = Target: FXN; (-) strand; PAM type: YTN; PAM sequence: TTT
  source 1..20: mol_type = other DNA
tcccagtccagtcataacgc

SEQ ID NO: 28669 - DNA, 20 bp, synthetic construct
  misc_feature 1..20: note = Description of Artificial Sequence: Synthetic oligonucleotide
  misc_feature 1..20: note = Target: FXN; (-) strand; PAM type: YTN; PAM sequence: TTT
  source 1..20: mol_type = other DNA
ttcccagtccagtcataacg

SEQ ID NO: 28670 - DNA, 20 bp, synthetic construct
  misc_feature 1..20: note = Description of Artificial Sequence: Synthetic oligonucleotide
  misc_feature 1..20: note = Target: FXN; (-) strand; PAM type: YTN; PAM sequence: CTC
  source 1..20: mol_type = other DNA
atggagggacacgccgtcgt

SEQ ID NO: 28671 - DNA, 20 bp, synthetic construct
  misc_feature 1..20: note = Description of Artificial Sequence: Synthetic oligonucleotide
  misc_feature 1..20: note = Target: FXN; (-) strand; PAM type: YTN; PAM sequence: CTG
  source 1..20: mol_type = other DNA
cggccagcagctcatggagg

SEQ ID NO: 28672 - DNA, 20 bp, synthetic construct
  misc_feature 1..20: note = Description of Artificial Sequence: Synthetic oligonucleotide
  misc_feature 1..20: note = Target: FXN; (-) strand; PAM type: YTN; PAM sequence: CTC
  source 1..20: mol_type = other DNA
tgcggccagcagctcatgga

SEQ ID NO: 28673 - DNA, 20 bp, synthetic construct
  misc_feature 1..20: note = Description of Artificial Sequence: Synthetic oligonucleotide
  misc_feature 1..20: note = Target: FXN; (-) strand; PAM type: YTN; PAM sequence: TTA
  source 1..20: mol_type = other DNA
gtgagctctgcggccagcag

SEQ ID NO: 28674 - DNA, 20 bp, synthetic construct
  misc_feature 1..20: note = Description of Artificial Sequence: Synthetic oligonucleotide
  misc_feature 1..20: note = Target: FXN; (-) strand; PAM type: YTN; PAM sequence: TTT
  source 1..20: mol_type = other DNA
agtgagctctgcggccagca

SEQ ID NO: 28675 - DNA, 20 bp, synthetic construct
  misc_feature 1..20: note = Description of Artificial Sequence: Synthetic oligonucleotide
  misc_feature 1..20: note = Target: FXN; (-) strand; PAM type: YTN; PAM sequence: CTT
  source 1..20: mol_type = other DNA
tagtgagctctgcggccagc

SEQ ID NO: 28676 - DNA, 20 bp, synthetic construct
  misc_feature 1..20: note = Description of Artificial Sequence: Synthetic oligonucleotide
  misc_feature 1..20: note = Target: FXN; (-) strand; PAM type: YTN; PAM sequence: TTA
  source 1..20: mol_type = other DNA
aggctttagtgagctctgcg

SEQ ID NO: 28677 - DNA, 20 bp, synthetic construct
  misc_feature 1..20: note = Description of Artificial Sequence: Synthetic oligonucleotide
  misc_feature 1..20: note = Target: FXN; (-) strand; PAM type: YTN; PAM sequence: TTT
  source 1..20: mol_type = other DNA
aaggctttagtgagctctgc

SEQ ID NO: 28678 - DNA, 20 bp, synthetic construct
  misc_feature 1..20: note = Description of Artificial Sequence: Synthetic oligonucleotide
  misc_feature 1..20: note = Target: FXN; (-) strand; PAM type: YTN; PAM sequence: TTT
  source 1..20: mol_type = other DNA
taaggctttagtgagctctg

SEQ ID NO: 28679 - DNA, 20 bp, synthetic construct
  misc_feature 1..20: note = Description of Artificial Sequence: Synthetic oligonucleotide
  misc_feature 1..20: note = Target: FXN; (-) strand; PAM type: YTN; PAM sequence: TTT
  source 1..20: mol_type = other DNA
ttaaggctttagtgagctct

SEQ ID NO: 28680 - DNA, 20 bp, synthetic construct
  misc_feature 1..20: note = Description of Artificial Sequence: Synthetic oligonucleotide
  misc_feature 1..20: note = Target: FXN; (-) strand; PAM type: YTN; PAM sequence: TTG
  source 1..20: mol_type = other DNA
gtttttaaggctttagtgag

SEQ ID NO: 28681 - DNA, 20 bp, synthetic construct
  misc_feature 1..20: note = Description of Artificial Sequence: Synthetic oligonucleotide
  misc_feature 1..20: note = Target: FXN; (-) strand; PAM type: YTN; PAM sequence: TTT
  source 1..20: mol_type = other DNA
ggtttttaaggctttagtga

SEQ ID NO: 28682 - DNA, 20 bp, synthetic construct
  misc_feature 1..20: note = Description of Artificial Sequence: Synthetic oligonucleotide
  misc_feature 1..20: note = Target: FXN; (-) strand; PAM type: YTN; PAM sequence: TTC
  source 1..20: mol_type = other DNA
cggaataggccaaggaagac

SEQ ID NO: 28683 - DNA, 20 bp, synthetic construct
  misc_feature 1..20: note = Description of Artificial Sequence: Synthetic oligonucleotide
  misc_feature 1..20: note = Target: FXN; (-) strand; PAM type: YTN; PAM sequence: TTT
  source 1..20: mol_type = other DNA
ccggaataggccaaggaaga

SEQ ID NO: 28684 - DNA, 20 bp, synthetic construct
  misc_feature 1..20: note = Description of Artificial Sequence: Synthetic oligonucleotide
  misc_feature 1..20: note = Target: FXN; (-) strand; PAM type: YTN; PAM sequence: TTT
  source 1..20: mol_type = other DNA
tccggaataggccaaggaag

SEQ ID NO: 28685 - DNA, 20 bp, synthetic construct
  misc_feature 1..20: note = Description of Artificial Sequence: Synthetic oligonucleotide
  misc_feature 1..20: note = Target: FXN; (-) strand; PAM type: YTN; PAM sequence: CTT
  source 1..20: mol_type = other DNA
ttccggaataggccaaggaa

SEQ ID NO: 28686 - DNA, 20 bp, synthetic construct
  misc_feature 1..20: note = Description of Artificial Sequence: Synthetic oligonucleotide
  misc_feature 1..20: note = Target: FXN; (-) strand; PAM type: YTN; PAM sequence: CTG
  source 1..20: mol_type = other DNA
ggcatcaagcatcttttccg

SEQ ID NO: 28687 - DNA, 20 bp, synthetic construct
  misc_feature 1..20: note = Description of Artificial Sequence: Synthetic oligonucleotide
  misc_feature 1..20: note = Target: FXN; (-) strand; PAM type: YTN; PAM sequence: TTA
  source 1..20: mol_type = other DNA
aaacggggctgggcatcaag

SEQ ID NO: 28688 - DNA, 20 bp, synthetic construct
  misc_feature 1..20: note = Description of Artificial Sequence: Synthetic oligonucleotide
  misc_feature 1..20: note = Target: FXN; (-) strand; PAM type: YTN; PAM sequence: CTT
  source 1..20: mol_type = other DNA
aaaacggggctgggcatcaa

SEQ ID NO: 28689 - DNA, 20 bp, synthetic construct
  misc_feature 1..20: note = Description of Artificial Sequence: Synthetic oligonucleotide
  misc_feature 1..20: note = Target: FXN; (-) strand; PAM type: YTN; PAM sequence: TTA
  source 1..20: mol_type = other DNA
atgtccttaaaacggggctg

SEQ ID NO: 28690 - DNA, 20 bp, synthetic construct
  misc_feature 1..20: note = Description of Artificial Sequence: Synthetic oligonucleotide
  misc_feature 1..20: note = Target: FXN; (-) strand; PAM type: YTN; PAM sequence: TTT
  source 1..20: mol_type = other DNA
aatgtccttaaaacggggct

SEQ ID NO: 28691 - DNA, 20 bp, synthetic construct
  misc_feature 1..20: note = Description of Artificial Sequence: Synthetic oligonucleotide
  misc_feature 1..20: note = Target: FXN; (-) strand; PAM type: YTN; PAM sequence: TTT
  source 1..20: mol_type = other DNA
taatgtccttaaaacggggc

SEQ ID NO: 28692 - DNA, 20 bp, synthetic construct
  misc_feature 1..20: note = Description of Artificial Sequence: Synthetic oligonucleotide
  misc_feature 1..20: note = Target: FXN; (-) strand; PAM type: YTN; PAM sequence: CTT
  source 1..20: mol_type = other DNA
ttaatgtccttaaaacgggg

SEQ ID NO: 28693 - DNA, 20 bp, synthetic construct
  misc_feature 1..20: note = Description of Artificial Sequence: Synthetic oligonucleotide
  misc_feature 1..20: note = Target: FXN; (-) strand; PAM type: YTN; PAM sequence: CTG
  source 1..20: mol_type = other DNA
atagcttttaatgtccttaa

SEQ ID NO: 28694 - DNA, 20 bp, synthetic construct
  misc_feature 1..20: note = Description of Artificial Sequence: Synthetic oligonucleotide
  misc_feature 1..20: note = Target: FXN; (-) strand; PAM type: YTN; PAM sequence: TTG
  source 1..20: mol_type = other DNA
gcctgatagcttttaatgtc

SEQ ID NO: 28695 - DNA, 20 bp, synthetic construct
  misc_feature 1..20: note = Description of Artificial Sequence: Synthetic oligonucleotide
  misc_feature 1..20: note = Target: FXN; (-) strand; PAM type: YTN; PAM sequence: CTT
  source 1..20: mol_type = other DNA
ggcctgatagcttttaatgt

SEQ ID NO: 28696 - DNA, 20 bp, synthetic construct
  misc_feature 1..20: note = Description of Artificial Sequence: Synthetic oligonucleotide
  misc_feature 1..20: note = Target: FXN; (-) strand; PAM type: YTN; PAM sequence: CTG
  source 1..20: mol_type = other DNA
gggtcttggcctgatagctt

SEQ ID NO: 28697 - DNA, 20 bp, synthetic construct
  misc_feature 1..20: note = Description of Artificial Sequence: Synthetic oligonucleotide
  misc_feature 1..20: note = Target: FXN; (-) strand; PAM type: YTN; PAM sequence: CTG
  source 1..20: mol_type = other DNA
cataatgaagctggggtctt

SEQ ID NO: 28698 - DNA, 20 bp, synthetic construct
  misc_feature 1..20: note = Description of Artificial Sequence: Synthetic oligonucleotide
  misc_feature 1..20: note = Target: FXN; (-) strand; PAM type: YTN; PAM sequence: CTC
  source 1..20: mol_type = other DNA
agctgcataatgaagctggg

SEQ ID NO: 28699 - DNA, 20 bp, synthetic construct
  misc_feature 1..20: note = Description of Artificial Sequence: Synthetic oligonucleotide
  misc_feature 1..20: note = Target: FXN; (-) strand; PAM type: YTN; PAM sequence: CTC
  source 1..20: mol_type = other DNA
aaaagcaggaataaaaaaaa

SEQ ID NO: 28700 - DNA, 20 bp, synthetic construct
  misc_feature 1..20: note = Description of Artificial Sequence: Synthetic oligonucleotide
  misc_feature 1..20: note = Target: FXN; (-) strand; PAM type: YTN; PAM sequence: CTG
  source 1..20: mol_type = other DNA
tcctcaaaagcaggaataaa

SEQ ID NO: 28701 - DNA, 20 bp, synthetic construct
  misc_feature 1..20: note = Description of Artificial Sequence: Synthetic oligonucleotide
  misc_feature 1..20: note = Target: FXN; (-) strand; PAM type: YTN; PAM sequence: CTG
  source 1..20: mol_type = other DNA
tgacacatagcccaactgtc

SEQ ID NO: 28702 - DNA, 20 bp, synthetic construct
  misc_feature 1..20: note = Description of Artificial Sequence: Synthetic oligonucleotide
  misc_feature 1..20: note = Target: FXN; (-) strand; PAM type: YTN; PAM sequence: CTA
  source 1..20: mol_type = other DNA
cagagctgtgacacatagcc

SEQ ID NO: 28703 - DNA, 20 bp, synthetic construct
  misc_feature 1..20: note = Description of Artificial Sequence: Synthetic oligonucleotide
  misc_feature 1..20: note = Target: FXN; (-) strand; PAM type: YTN; PAM sequence: TTC
  source 1..20: mol_type = other DNA
tacagagctgtgacacatag

SEQ ID NO: 28704 - DNA, 20 bp, synthetic construct
  misc_feature 1..20: note = Description of Artificial Sequence: Synthetic oligonucleotide
  misc_feature 1..20: note = Target: FXN; (-) strand; PAM type: YTN; PAM sequence: TTT
  source 1..20: mol_type = other DNA
ctacagagctgtgacacata

SEQ ID NO: 28705 - DNA, 20 bp, synthetic construct
  misc_feature 1..20: note = Description of Artificial Sequence: Synthetic oligonucleotide
  misc_feature 1..20: note = Target: FXN; (-) strand; PAM type: YTN; PAM sequence: CTT
  source 1..20: mol_type = other DNA
tctacagagctgtgacacat

SEQ ID NO: 28706 - DNA, 20 bp, synthetic construct
  misc_feature 1..20: note = Description of Artificial Sequence: Synthetic oligonucleotide
  misc_feature 1..20: note = Target: FXN; (-) strand; PAM type: YTN; PAM sequence: TTC
  source 1..20: mol_type = other DNA
tttctacagagctgtgacac

SEQ ID NO: 28707 - DNA, 20 bp, synthetic construct
  misc_feature 1..20: note = Description of Artificial Sequence: Synthetic oligonucleotide
  misc_feature 1..20: note = Target: FXN; (-) strand; PAM type: YTN; PAM sequence: TTG
  source 1..20: mol_type = other DNA
ggggcaaggtaggaggcaac

SEQ ID NO: 28708 - DNA, 20 bp, synthetic construct
  misc_feature 1..20: note = Description of Artificial Sequence: Synthetic oligonucleotide
  misc_feature 1..20: note = Target: FXN; (-) strand; PAM type: YTN; PAM sequence: CTT
  source 1..20: mol_type = other DNA
gggggcaaggtaggaggcaa

SEQ ID NO: 28709 - DNA, 20 bp, synthetic construct
  misc_feature 1..20: note = Description of Artificial Sequence: Synthetic oligonucleotide
  misc_feature 1..20: note = Target: FXN; (-) strand; PAM type: YTN; PAM sequence: TTA
  source 1..20: mol_type = other DNA
aaaatcagaacttgggggca

SEQ ID NO: 28710 - DNA, 20 bp, synthetic construct
  misc_feature 1..20: note = Description of Artificial Sequence: Synthetic oligonucleotide
  misc_feature 1..20: note = Target: FXN; (-) strand; PAM type: YTN; PAM sequence: TTC
  source 1..20: mol_type = other DNA
catagaaattaaaaatcaga

SEQ ID NO: 28711 - DNA, 20 bp, synthetic construct
  misc_feature 1..20: note = Description of Artificial Sequence: Synthetic oligonucleotide
  misc_feature 1..20: note = Target: FXN; (-) strand; PAM type: YTN; PAM sequence: CTT
  source 1..20: mol_type = other DNA
ccatagaaattaaaaatcag

SEQ ID NO: 28712 - DNA, 20 bp, synthetic construct
  misc_feature 1..20: note = Description of Artificial Sequence: Synthetic oligonucleotide
  misc_feature 1..20: note = Target: FXN; (-) strand; PAM type: YTN; PAM sequence: TTA
  source 1..20: mol_type = other DNA
taaaagataaggggtatcat

SEQ ID NO: 28713 - DNA, 20 bp, synthetic construct
  misc_feature 1..20: note = Description of Artificial Sequence: Synthetic oligonucleotide
  misc_feature 1..20: note = Target: FXN; (-) strand; PAM type: YTN; PAM sequence: TTC
  source 1..20: mol_type = other DNA
aggtataggcataagacatt

SEQ ID NO: 28714 - DNA, 20 bp, synthetic construct
  misc_feature 1..20: note = Description of Artificial Sequence: Synthetic oligonucleotide
  misc_feature 1..20: note = Target: FXN; (-) strand; PAM type: YTN; PAM sequence: TTA
  source 1..20: mol_type = other DNA
tattcaggtataggcataag

SEQ ID NO: 28715 - DNA, 20 bp, synthetic construct
  misc_feature 1..20: note = Description of Artificial Sequence: Synthetic oligonucleotide
  misc_feature 1..20: note = Target: FXN; (-) strand; PAM type: YTN; PAM sequence: TTG
  source 1..20: mol_type = other DNA
ttatattcaggtataggcat

SEQ ID NO: 28716 - DNA, 20 bp, synthetic construct
  misc_feature 1..20: note = Description of Artificial Sequence: Synthetic oligonucleotide
  misc_feature 1..20: note = Target: FXN; (-) strand; PAM type: YTN; PAM sequence: TTA
  source 1..20: mol_type = other DNA
aaggttgttatattcaggta

SEQ ID NO: 28717 - DNA, 20 bp, synthetic construct
  misc_feature 1..20: note = Description of Artificial Sequence: Synthetic oligonucleotide
  misc_feature 1..20: note = Target: FXN; (-) strand; PAM type: YTN; PAM sequence: TTT
  source 1..20: mol_type = other DNA
aaaggttgttatattcaggt

SEQ ID NO: 28718 - DNA, 20 bp, synthetic construct
  misc_feature 1..20: note = Description of Artificial Sequence: Synthetic oligonucleotide
  misc_feature 1..20: note = Target: FXN; (-) strand; PAM type: YTN; PAM sequence: TTT
  source 1..20: mol_type = other DNA
taaaggttgttatattcagg

SEQ ID NO: 28719 - DNA, 20 bp, synthetic construct
  misc_feature 1..20: note = Description of Artificial Sequence: Synthetic oligonucleotide
  misc_feature 1..20: note = Target: FXN; (-) strand; PAM type: YTN; PAM sequence: TTT
  source 1..20: mol_type = other DNA
ttaaaggttgttatattcag

SEQ ID NO: 28720 - DNA, 20 bp, synthetic construct
  misc_feature 1..20: note = Description of Artificial Sequence: Synthetic oligonucleotide
  misc_feature 1..20: note = Target: FXN; (-) strand; PAM type: YTN; PAM sequence: TTT
  source 1..20: mol_type = other DNA
tttaaaggttgttatattca

SEQ ID NO: 28721 - DNA, 20 bp, synthetic construct
  misc_feature 1..20: note = Description of Artificial Sequence: Synthetic oligonucleotide
  misc_feature 1..20: note = Target: FXN; (-) strand; PAM type: YTN; PAM sequence: CTT
  source 1..20: mol_type = other DNA
ttttaaaggttgttatattc

SEQ ID NO: 28722 - DNA, 20 bp, synthetic construct
  misc_feature 1..20: note = Description of Artificial Sequence: Synthetic oligonucleotide
  misc_feature 1..20: note = Target: FXN; (-) strand; PAM type: YTN; PAM sequence: TTG
  source 1..20: mol_type = other DNA
cttttttaaaggttgttata

SEQ ID NO: 28723 - DNA, 20 bp, synthetic construct
  misc_feature 1..20: note = Description of Artificial Sequence: Synthetic oligonucleotide
  misc_feature 1..20: note = Target: FXN; (-) strand; PAM type: YTN; PAM sequence: TTT
  source 1..20: mol_type = other DNA
gcttttttaaaggttgttat

SEQ ID NO: 28724 - DNA, 20 bp, synthetic construct
  misc_feature 1..20: note = Description of Artificial Sequence: Synthetic oligonucleotide
  misc_feature 1..20: note = Target: FXN; (-) strand; PAM type: YTN; PAM sequence: TTT
  source 1..20: mol_type = other DNA
tgcttttttaaaggttgtta

SEQ ID NO: 28725 - DNA, 20 bp, synthetic construct
  misc_feature 1..20: note = Description of Artificial Sequence: Synthetic oligonucleotide
  misc_feature 1..20: note = Target: FXN; (-) strand; PAM type: YTN; PAM sequence: TTA
  source 1..20: mol_type = other DNA
ttttgcttttttaaaggttg

SEQ ID NO: 28726 - DNA, 20 bp, synthetic construct
  misc_feature 1..20: note = Description of Artificial Sequence: Synthetic oligonucleotide
  misc_feature 1..20: note = Target: FXN; (-) strand; PAM type: YTN; PAM sequence: TTA
  source 1..20: mol_type = other DNA
ttattttgcttttttaaagg

SEQ ID NO: 28727 - DNA, 20 bp, synthetic construct
  misc_feature 1..20: note = Description of Artificial Sequence: Synthetic oligonucleotide
  misc_feature 1..20: note = Target: FXN; (-) strand; PAM type: YTN; PAM sequence: CTT
  source 1..20: mol_type = other DNA
attattttgcttttttaaag

SEQ ID NO: 28728 - DNA, 20 bp, synthetic construct
  misc_feature 1..20: note = Description of Artificial Sequence: Synthetic oligonucleotide
  misc_feature 1..20: note = Target: FXN; (-) strand; PAM type: YTN; PAM sequence: TTC
  source 1..20: mol_type = other DNA
ttattattttgcttttttaa

SEQ ID NO: 28729 - DNA, 20 bp, synthetic construct
  misc_feature 1..20: note = Description of Artificial Sequence: Synthetic oligonucleotide
  misc_feature 1..20: note = Target: FXN; (-) strand; PAM type: YTN; PAM sequence: CTT
  source 1..20: mol_type = other DNA
cttattattttgctttttta

SEQ ID NO: 28730 - DNA, 20 bp, synthetic construct
  misc_feature 1..20: note = Description of Artificial Sequence: Synthetic oligonucleotide
  misc_feature 1..20: note = Target: FXN; (-) strand; PAM type: YTN; PAM sequence: TTC
  source 1..20: mol_type = other DNA
cttcttattattttgctttt

SEQ ID NO: 28731 - DNA, 20 bp, synthetic construct
  misc_feature 1..20: note = Description of Artificial Sequence: Synthetic oligonucleotide
  misc_feature 1..20: note = Target: FXN; (-) strand; PAM type: YTN; PAM sequence: TTT
  source 1..20: mol_type = other DNA
ccttcttattattttgcttt

SEQ ID NO: 28732 - DNA, 20 bp, synthetic construct
  misc_feature 1..20: note = Description of Artificial Sequence: Synthetic oligonucleotide
  misc_feature 1..20: note = Target: FXN; (-) strand; PAM type: YTN; PAM sequence: TTT
  source 1..20: mol_type = other DNA
tccttcttattattttgctt

SEQ ID NO: 28733 - DNA, 20 bp, synthetic construct
  misc_feature 1..20: note = Description of Artificial Sequence: Synthetic oligonucleotide
  misc_feature 1..20: note = Target: FXN; (-) strand; PAM type: YTN; PAM sequence: TTT
  source 1..20: mol_type = other DNA
ttccttcttattattttgct

SEQ ID NO: 28734 - DNA, 20 bp, synthetic construct
  misc_feature 1..20: note = Description of Artificial Sequence: Synthetic oligonucleotide
  misc_feature 1..20: note = Target: FXN; (-) strand; PAM type: YTN; PAM sequence: CTG
  source 1..20: mol_type = other DNA
gaatttttccttcttattat

SEQ ID NO: 28735 - DNA, 20 bp, synthetic construct
  misc_feature 1..20: note = Description of Artificial Sequence: Synthetic oligonucleotide
  misc_feature 1..20: note = Target: FXN; (-) strand; PAM type: YTN; PAM sequence: CTC
  source 1..20: mol_type = other DNA
ctggaatttttccttcttat

SEQ ID NO: 28736 - DNA, 20 bp, synthetic construct
  misc_feature 1..20: note = Description of Artificial Sequence: Synthetic oligonucleotide
  misc_feature 1..20: note = Target: FXN; (-) strand; PAM type: YTN; PAM sequence: TTC
  source 1..20: mol_type = other DNA
cctcctggaatttttccttc

SEQ ID NO: 28737 - DNA, 20 bp, synthetic construct
  misc_feature 1..20: note = Description of Artificial Sequence: Synthetic oligonucleotide
  misc_feature 1..20: note = Target: FXN; (-) strand; PAM type: YTN; PAM sequence: TTT
  source 1..20: mol_type = other DNA
ccctcctggaatttttcctt

SEQ ID NO: 28738 - DNA, 20 bp, synthetic construct
  misc_feature 1..20: note = Description of Artificial Sequence: Synthetic oligonucleotide
  misc_feature 1..20: note = Target: FXN; (-) strand; PAM type: YTN; PAM sequence: TTT
  source 1..20: mol_type = other DNA
tccctcctggaatttttcct

SEQ ID NO: 28739 - DNA, 20 bp, synthetic construct
  misc_feature 1..20: note = Description of Artificial Sequence: Synthetic oligonucleotide
  misc_feature 1..20: note = Target: FXN; (-) strand; PAM type: YTN; PAM sequence: TTC
  source 1..20: mol_type = other DNA
attttccctcctggaatttt

SEQ ID NO: 28740 - DNA, 20 bp, synthetic construct
  misc_feature 1..20: note = Description of Artificial Sequence: Synthetic oligonucleotide
  misc_feature 1..20: note = Target: FXN; (-) strand; PAM type: YTN; PAM sequence: TTC
  source 1..20: mol_type = other DNA
aaagaatgaagagtgaagac

SEQ ID NO: 28741 - DNA, 20 bp, synthetic construct
  misc_feature 1..20: note = Description of Artificial Sequence: Synthetic oligonucleotide
  misc_feature 1..20: note = Target: FXN; (-) strand; PAM type: YTN; PAM sequence: CTT
  source 1..20: mol_type = other DNA
caaagaatgaagagtgaaga

SEQ ID NO: 28742 - DNA, 20 bp, synthetic construct
  misc_feature 1..20: note = Description of Artificial Sequence: Synthetic oligonucleotide
  misc_feature 1..20: note = Target: FXN; (-) strand; PAM type: YTN; PAM sequence: TTG
  source 1..20: mol_type = other DNA
cagtaaatccttcaaagaat

SEQ ID NO: 28743 - DNA, 20 bp, synthetic construct
  misc_feature 1..20: note = Description of Artificial Sequence: Synthetic oligonucleotide
  misc_feature 1..20: note = Target: FXN; (-) strand; PAM type: YTN; PAM sequence: CTT
  source 1..20: mol_type = other DNA
gcagtaaatccttcaaagaa

SEQ ID NO: 28744 - DNA, 20 bp, synthetic construct
  misc_feature 1..20: note = Description of Artificial Sequence: Synthetic oligonucleotide
  misc_feature 1..20: note = Target: FXN; (-) strand; PAM type: YTN; PAM sequence: TTC
  source 1..20: mol_type = other DNA
ttgcagtaaatccttcaaag

SEQ ID NO: 28745 - DNA, 20 bp, synthetic construct
  misc_feature 1..20: note = Description of Artificial Sequence: Synthetic oligonucleotide
  misc_feature 1..20: note = Target: FXN; (-) strand; PAM type: YTN; PAM sequence: CTT
  source 1..20: mol_type = other DNA
cttgcagtaaatccttcaaa

SEQ ID NO: 28746 - DNA, 20 bp, synthetic construct
  misc_feature 1..20: note = Description of Artificial Sequence: Synthetic oligonucleotide
  misc_feature 1..20: note = Target: FXN; (-) strand; PAM type: YTN; PAM sequence: TTC
  source 1..20: mol_type = other DNA
atgtacttcttgcagtaaat

SEQ ID NO: 28747 - DNA, 20 bp, synthetic construct
  misc_feature 1..20: note = Description of Artificial Sequence: Synthetic oligonucleotide
  misc_feature 1..20: note = Target: FXN; (-) strand; PAM type: YTN; PAM sequence: CTT
  source 1..20: mol_type = other DNA
catgtacttcttgcagtaaa

SEQ ID NO: 28748 - DNA, 20 bp, synthetic construct
  misc_feature 1..20: note = Description of Artificial Sequence: Synthetic oligonucleotide
  misc_feature 1..20: note = Target: FXN; (-) strand; PAM type: YTN; PAM sequence: CTC
  source 1..20: mol_type = other DNA
ttcatgtacttcttgcagta

SEQ ID NO: 28749 - DNA, 20 bp, synthetic construct
  misc_feature 1..20: note = Description of Artificial Sequence: Synthetic oligonucleotide
  misc_feature 1..20: note = Target: FXN; (-) strand; PAM type: YTN; PAM sequence: CTG
  source 1..20: mol_type = other DNA
ctcttcatgtacttcttgca

SEQ ID NO: 28750 - DNA, 20 bp, synthetic construct
  misc_feature 1..20: note = Description of Artificial Sequence: Synthetic oligonucleotide
  misc_feature 1..20: note = Target: FXN; (-) strand; PAM type: YTN; PAM sequence: TTG
  source 1..20: mol_type = other DNA
accagctgctcttcatgtac

SEQ ID NO: 28751 - DNA, 20 bp, synthetic construct
  misc_feature 1..20: note = Description of Artificial Sequence: Synthetic oligonucleotide
  misc_feature 1..20: note = Target: FXN; (-) strand; PAM type: YTN; PAM sequence: TTG
  source 1..20: mol_type = other DNA
gagatagaacagtgagcagg

SEQ ID NO: 28752 - DNA, 20 bp, synthetic construct
  misc_feature 1..20: note = Description of Artificial Sequence: Synthetic oligonucleotide
  misc_feature 1..20: note = Target: FXN; (-) strand; PAM type: YTN; PAM sequence: TTT
  source 1..20: mol_type = other DNA
ggagatagaacagtgagcag

SEQ ID NO: 28753 - DNA, 20 bp, synthetic construct
  misc_feature 1..20: note = Description of Artificial Sequence: Synthetic oligonucleotide
  misc_feature 1..20: note = Target: FXN; (-) strand; PAM type: YTN; PAM sequence: CTC
  source 1..20: mol_type = other DNA
atttggagatagaacagtga

SEQ ID NO: 28754 - DNA, 20 bp, synthetic construct
  misc_feature 1..20: note = Description of Artificial Sequence: Synthetic oligonucleotide
  misc_feature 1..20: note = Target: FXN; (-) strand; PAM type: YTN; PAM sequence: TTA
  source 1..20: mol_type = other DNA
atgtgtctcatttggagata

SEQ ID NO: 28755 - DNA, 20 bp, synthetic construct
  misc_feature 1..20: note = Description of Artificial Sequence: Synthetic oligonucleotide
  misc_feature 1..20: note = Target: FXN; (-) strand; PAM type: YTN; PAM sequence: TTT
  source 1..20: mol_type = other DNA
aatgtgtctcatttggagat

SEQ ID NO: 28756 - DNA, 20 bp, synthetic construct
  misc_feature 1..20: note = Description of Artificial Sequence: Synthetic oligonucleotide
  misc_feature 1..20: note = Target: FXN; (-) strand; PAM type: YTN; PAM sequence: CTT
  source 1..20: mol_type = other DNA
taatgtgtctcatttggaga

SEQ ID NO: 28757 - DNA, 20 bp, synthetic construct
  misc_feature 1..20: note = Description of Artificial Sequence: Synthetic oligonucleotide
  misc_feature 1..20: note = Target: FXN; (-) strand; PAM type: YTN; PAM sequence: CTA
  source 1..20: mol_type = other DNA
ccctttaatgtgtctcattt

SEQ ID NO: 28758 - DNA, 20 bp, synthetic construct
  misc_feature 1..20: note = Description of Artificial Sequence: Synthetic oligonucleotide
  misc_feature 1..20: note = Target: FXN; (-) strand; PAM type: YTN; PAM sequence: TTG
  source 1..20: mol_type = other DNA
taggctaccctttaatgtgt

SEQ ID NO: 28759 - DNA, 20 bp, synthetic construct
  misc_feature 1..20: note = Description of Artificial Sequence: Synthetic oligonucleotide
  misc_feature 1..20: note = Target: FXN; (-) strand; PAM type: YTN; PAM sequence: TTT
  source 1..20: mol_type = other DNA
gtaggctaccctttaatgtg

SEQ ID NO: 28760 - DNA, 20 bp, synthetic construct
  misc_feature 1..20: note = Description of Artificial Sequence: Synthetic oligonucleotide
  misc_feature 1..20: note = Target: FXN; (-) strand; PAM type: YTN; PAM sequence: CTG
  source 1..20: mol_type = other DNA
aaaacatttgtaggctaccc

SEQ ID NO: 28761 - DNA, 20 bp, synthetic construct
  misc_feature 1..20: note = Description of Artificial Sequence: Synthetic oligonucleotide
  misc_feature 1..20: note = Target: FXN; (-) strand; PAM type: YTN; PAM sequence: TTG
  source 1..20: mol_type = other DNA
aaagaagcctgaaaacattt

SEQ ID NO: 28762 - DNA, 20 bp, synthetic construct
  misc_feature 1..20: note = Description of Artificial Sequence: Synthetic oligonucleotide
  misc_feature 1..20: note = Target: FXN; (-) strand; PAM type: YTN; PAM sequence: TTT
  source 1..20: mol_type = other DNA
gaaagaagcctgaaaacatt

SEQ ID NO: 28763 - DNA, 20 bp, synthetic construct
  misc_feature 1..20: note = Description of Artificial Sequence: Synthetic oligonucleotide
  misc_feature 1..20: note = Target: FXN; (-) strand; PAM type: YTN; PAM sequence: CTT
  source 1..20: mol_type = other DNA
tgaaagaagcctgaaaacat

SEQ ID NO: 28764 - DNA, 20 bp, synthetic construct
  misc_feature 1..20: note = Description of Artificial Sequence: Synthetic oligonucleotide
  misc_feature 1..20: note = Target: FXN; (-) strand; PAM type: YTN; PAM sequence: TTA
  source 1..20: mol_type = other DNA
cactttgaaagaagcctgaa

SEQ ID NO: 28765 - DNA, 20 bp, synthetic construct
  misc_feature 1..20: note = Description of Artificial Sequence: Synthetic oligonucleotide
  misc_feature 1..20: note = Target: FXN; (-) strand; PAM type: YTN; PAM sequence: CTT
  source 1..20: mol_type = other DNA
acactttgaaagaagcctga

SEQ ID NO: 28766 - DNA, 20 bp, synthetic construct
  misc_feature 1..20: note = Description of Artificial Sequence: Synthetic oligonucleotide
  misc_feature 1..20: note = Target: FXN; (-) strand; PAM type: YTN; PAM sequence: CTC
  source 1..20: mol_type = other DNA
agaagtgcttacactttgaa

SEQ ID NO: 28767 - DNA, 20 bp, synthetic construct
  misc_feature 1..20: note = Description of Artificial Sequence: Synthetic oligonucleotide
  misc_feature 1..20: note = Target: FXN; (-) strand; PAM type: YTN; PAM sequence: CTA
  source 1..20: mol_type = other DNA
aagagctcagaagtgcttac

SEQ ID NO: 28768 - DNA, 20 bp, synthetic construct
  misc_feature 1..20: note = Description of Artificial Sequence: Synthetic oligonucleotide
  misc_feature 1..20: note = Target: FXN; (-) strand; PAM type: YTN; PAM sequence: TTC
  source 1..20: mol_type = other DNA
aatgctaaagagctcagaag

SEQ ID NO: 28769 - DNA, 20 bp, synthetic construct
  misc_feature 1..20: note = Description of Artificial Sequence: Synthetic oligonucleotide
  misc_feature 1..20: note = Target: FXN; (-) strand; PAM type: YTN; PAM sequence: CTT
  source 1..20: mol_type = other DNA
caatgctaaagagctcagaa

SEQ ID NO: 28770 - DNA, 20 bp, synthetic construct
  misc_feature 1..20: note = Description of Artificial Sequence: Synthetic oligonucleotide
  misc_feature 1..20: note = Target: FXN; (-) strand; PAM type: YTN; PAM sequence: TTC
  source 1..20: mol_type = other DNA
gacacttcaatgctaaagag

SEQ ID NO: 28771 - DNA, 20 bp, synthetic construct
  misc_feature 1..20: note = Description of Artificial Sequence: Synthetic oligonucleotide
  misc_feature 1..20: note = Target: FXN; (-) strand; PAM type: YTN; PAM sequence: TTT
  source 1..20: mol_type = other DNA
cgacacttcaatgctaaaga

SEQ ID NO: 28772 - DNA, 20 bp, synthetic construct
  misc_feature 1..20: note = Description of Artificial Sequence: Synthetic oligonucleotide
  misc_feature 1..20: note = Target: FXN; (-) strand; PAM type: YTN; PAM sequence: CTT
  source 1..20: mol_type = other DNA
tcgacacttcaatgctaaag

SEQ ID NO: 28773 - DNA, 20 bp, synthetic construct
  misc_feature 1..20: note = Description of Artificial Sequence: Synthetic oligonucleotide
  misc_feature 1..20: note = Target: FXN; (-) strand; PAM type: YTN; PAM sequence: TTG
  source 1..20: mol_type = other DNA
ctttcgacacttcaatgcta

SEQ ID NO: 28774 - DNA, 20 bp, synthetic construct
  misc_feature 1..20: note = Description of Artificial Sequence: Synthetic oligonucleotide
  misc_feature 1..20: note = Target: FXN; (-) strand; PAM type: YTN; PAM sequence: TTC
  source 1..20: mol_type = other DNA
ccgtgtgagttgctttcgac

SEQ ID NO: 28775 - DNA, 20 bp, synthetic construct
  misc_feature 1..20: note = Description of Artificial Sequence: Synthetic oligonucleotide
  misc_feature 1..20: note = Target: FXN; (-) strand; PAM type: YTN; PAM sequence: CTT
  source 1..20: mol_type = other DNA
cccgtgtgagttgctttcga

SEQ ID NO: 28776 - DNA, 20 bp, synthetic construct
  misc_feature 1..20: note = Description of Artificial Sequence: Synthetic oligonucleotide
  misc_feature 1..20: note = Target: FXN; (-) strand; PAM type: YTN; PAM sequence: TTG
  source 1..20: mol_type = other DNA
gcagtcacagagcacaaata

SEQ ID NO: 28777 - DNA, 20 bp, synthetic construct
  misc_feature 1..20: note = Description of Artificial Sequence: Synthetic oligonucleotide
  misc_feature 1..20: note = Target: FXN; (-) strand; PAM type: YTN; PAM sequence: CTT
  source 1..20: mol_type = other DNA
ggcagtcacagagcacaaat

SEQ ID NO: 28778 - DNA, 20 bp, synthetic construct
  misc_feature 1..20: note = Description of Artificial Sequence: Synthetic oligonucleotide
  misc_feature 1..20: note = Target: FXN; (-) strand; PAM type: YTN; PAM sequence: CTG
  source 1..20: mol_type = other DNA
gacaacccagtgcaggccac

SEQ ID NO: 28779 - DNA, 20 bp, synthetic construct
  misc_feature 1..20: note = Description of Artificial Sequence: Synthetic oligonucleotide
  misc_feature 1..20: note = Target: FXN; (-) strand; PAM type: YTN; PAM sequence: CTC
  source 1..20: mol_type = other DNA
cctggacaacccagtgcagg

SEQ ID NO: 28780 - DNA, 20 bp, synthetic construct
  misc_feature 1..20: note = Description of Artificial Sequence: Synthetic oligonucleotide
  misc_feature 1..20: note = Target: FXN; (-) strand; PAM type: YTN; PAM sequence: CTA
  source 1..20: mol_type = other DNA
ggtctccctggacaacccag

SEQ ID NO: 28781 - DNA, 20 bp, synthetic construct
  misc_feature 1..20: note = Description of Artificial Sequence: Synthetic oligonucleotide
  misc_feature 1..20: note = Target: FXN; (-) strand; PAM type: YTN; PAM sequence: TTG
  source 1..20: mol_type = other DNA
aaaaaatatatatacacaca

SEQ ID NO: 28782 - DNA, 20 bp, synthetic construct
  misc_feature 1..20: note = Description of Artificial Sequence: Synthetic oligonucleotide
  misc_feature 1..20: note = Target: FXN; (-) strand; PAM type: YTN; PAM sequence: TTA
  source 1..20: mol_type = other DNA
aattgaaaaaatatatatac

SEQ ID NO: 28783 - DNA, 20 bp, synthetic construct
  misc_feature 1..20: note = Description of Artificial Sequence: Synthetic oligonucleotide
  misc_feature 1..20: note = Target: FXN; (-) strand; PAM type: YTN; PAM sequence: TTT
  source 1..20: mol_type = other DNA
aaattgaaaaaatatatata

SEQ ID NO: 28784 - DNA, 20 bp, synthetic construct
  misc_feature 1..20: note = Description of Artificial Sequence: Synthetic oligonucleotide
  misc_feature 1..20: note = Target: FXN; (-) strand; PAM type: YTN; PAM sequence: CTT
  source 1..20: mol_type = other DNA
taaattgaaaaaatatatat

SEQ ID NO: 28785 - DNA, 20 bp, synthetic construct
  misc_feature 1..20: note = Description of Artificial Sequence: Synthetic oligonucleotide
  misc_feature 1..20: note = Target: FXN; (-) strand; PAM type: YTN; PAM sequence: CTA
  source 1..20: mol_type = other DNA
acctttaaattgaaaaaata

SEQ ID NO: 28786 - DNA, 20 bp, synthetic construct
  misc_feature 1..20: note = Description of Artificial Sequence: Synthetic oligonucleotide
  misc_feature 1..20: note = Target: FXN; (-) strand; PAM type: YTN; PAM sequence: TTC
  source 1..20: mol_type = other DNA
catactaacctttaaattga

SEQ ID NO: 28787 - DNA, 20 bp, synthetic construct
  misc_feature 1..20: note = Description of Artificial Sequence: Synthetic oligonucleotide
  misc_feature 1..20: note = Target: FXN; (-) strand; PAM type: YTN; PAM sequence: CTG
  source 1..20: mol_type = other DNA
attccatactaacctttaaa

SEQ ID NO: 28788 - DNA, 20 bp, synthetic construct
  misc_feature 1..20: note = Description of Artificial Sequence: Synthetic oligonucleotide
  misc_feature 1..20: note = Target: FXN; (-) strand; PAM type: YTN; PAM sequence: TTG
  source 1..20: mol_type = other DNA
tagcagctgattccatacta

SEQ ID NO: 28789 - DNA, 20 bp, synthetic construct
  misc_feature 1..20: note = Description of Artificial Sequence: Synthetic oligonucleotide
  misc_feature 1..20: note = Target: FXN; (-) strand; PAM type: YTN; PAM sequence: CTT
  source 1..20: mol_type = other DNA
gtagcagctgattccatact

SEQ ID NO: 28790 - DNA, 20 bp, synthetic construct
  misc_feature 1..20: note = Description of Artificial Sequence: Synthetic oligonucleotide
  misc_feature 1..20: note = Target: FXN; (-) strand; PAM type: YTN; PAM sequence: TTC
  source 1..20: mol_type = other DNA
ttgtagcagctgattccata

SEQ ID NO: 28791 - DNA, 20 bp, synthetic construct
  misc_feature 1..20: note = Description of Artificial Sequence: Synthetic oligonucleotide
  misc_feature 1..20: note = Target: FXN; (-) strand; PAM type: YTN; PAM sequence: TTG
  source 1..20: mol_type = other DNA
cattcttgtagcagctgatt

SEQ ID NO: 28792 - DNA, 20 bp, synthetic construct
  misc_feature 1..20: note = Description of Artificial Sequence: Synthetic oligonucleotide
  misc_feature 1..20: note = Target: FXN; (-) strand; PAM type: YTN; PAM sequence: TTT
  source 1..20: mol_type = other DNA
gcattcttgtagcagctgat

SEQ ID NO: 28793 - DNA, 20 bp, synthetic construct
  misc_feature 1..20: note = Description of Artificial Sequence: Synthetic oligonucleotide
  misc_feature 1..20: note = Target: FXN; (-) strand; PAM type: YTN; PAM sequence: TTT
  source 1..20: mol_type = other DNA
tgcattcttgtagcagctga

SEQ ID NO: 28794 - DNA, 20 bp, synthetic construct
  misc_feature 1..20: note = Description of Artificial Sequence: Synthetic oligonucleotide
  misc_feature 1..20: note = Target: FXN; (-) strand; PAM type: YTN; PAM sequence: TTT
  source 1..20: mol_type = other DNA
ttgcattcttgtagcagctg

SEQ ID NO: 28795 - DNA, 20 bp, synthetic construct
  misc_feature 1..20: note = Description of Artificial Sequence: Synthetic oligonucleotide
  misc_feature 1..20: note = Target: FXN; (-) strand; PAM type: YTN; PAM sequence: TTT
  source 1..20: mol_type = other DNA
tttgcattcttgtagcagct

SEQ ID NO: 28796 - DNA, 20 bp, synthetic construct
  misc_feature 1..20: note = Description of Artificial Sequence: Synthetic oligonucleotide
  misc_feature 1..20: note = Target: FXN; (-) strand; PAM type: YTN; PAM sequence: TTG
  source 1..20: mol_type = other DNA
gaagattttttgcattcttg

SEQ ID NO: 28797 - DNA, 20 bp, synthetic construct
  misc_feature 1..20: note = Description of Artificial Sequence: Synthetic oligonucleotide
  misc_feature 1..20: note = Target: FXN; (-) strand; PAM type: YTN; PAM sequence: TTT
  source 1..20: mol_type = other DNA
ggaagattttttgcattctt

SEQ ID NO: 28798 - DNA, 20 bp, synthetic construct
  misc_feature 1..20: note = Description of Artificial Sequence: Synthetic oligonucleotide
  misc_feature 1..20: note = Target: FXN; (-) strand; PAM type: YTN; PAM sequence: CTT
  source 1..20: mol_type = other DNA
tggaagattttttgcattct

SEQ ID NO: 28799 - DNA, 20 bp, synthetic construct
  misc_feature 1..20: note = Description of Artificial Sequence: Synthetic oligonucleotide
  misc_feature 1..20: note = Target: FXN; (-) strand; PAM type: YTN; PAM sequence: TTG
  source 1..20: mol_type = other DNA
tctttggaagattttttgca

SEQ ID NO: 28800 - DNA, 20 bp, synthetic construct
  misc_feature 1..20: note = Description of Artificial Sequence: Synthetic oligonucleotide
  misc_feature 1..20: note = Target: FXN; (-) strand; PAM type: YTN; PAM sequence: CTT
  source 1..20: mol_type = other DNA
gtctttggaagattttttgc

SEQ ID NO: 28801 - DNA, 20 bp, synthetic construct
  misc_feature 1..20: note = Description of Artificial Sequence: Synthetic oligonucleotide
  misc_feature 1..20: note = Target: FXN; (-) strand; PAM type: YTN; PAM sequence: TTC
  source 1..20: mol_type = other DNA
ttgtctttggaagatttttt

SEQ ID NO: 28802 - DNA, 20 bp, synthetic construct
  misc_feature 1..20: note = Description of Artificial Sequence: Synthetic oligonucleotide
  misc_feature 1..20: note = Target: FXN; (-) strand; PAM type: YTN; PAM sequence: TTT
  source 1..20: mol_type = other DNA
cttgtctttggaagattttt

SEQ ID NO: 28803 - DNA, 20 bp, synthetic construct
  misc_feature 1..20: note = Description of Artificial Sequence: Synthetic oligonucleotide
  misc_feature 1..20: note = Target: FXN; (-) strand; PAM type: YTN; PAM sequence: TTT
  source 1..20: mol_type = other DNA
tcttgtctttggaagatttt

SEQ ID NO: 28804 - DNA, 20 bp, synthetic construct
  misc_feature 1..20: note = Description of Artificial Sequence: Synthetic oligonucleotide
  misc_feature 1..20: note = Target: FXN; (-) strand; PAM type: YTN; PAM sequence: CTT
  source 1..20: mol_type = other DNA
ttcttgtctttggaagattt

SEQ ID NO: 28805 - DNA, 20 bp, synthetic construct
  misc_feature 1..20: note = Description of Artificial Sequence: Synthetic oligonucleotide
  misc_feature 1..20: note = Target: FXN; (-) strand; PAM type: YTN; PAM sequence: CTC
  source 1..20: mol_type = other DNA
ttttcttgtctttggaagat

SEQ ID NO: 28806 - DNA, 20 bp, synthetic construct
  misc_feature 1..20: note = Description of Artificial Sequence: Synthetic oligonucleotide
  misc_feature 1..20: note = Target: FXN; (-) strand; PAM type: YTN; PAM sequence: TTC
  source 1..20: mol_type = other DNA
ctcttttcttgtctttggaa

SEQ ID NO: 28807 - DNA, 20 bp, synthetic construct
  misc_feature 1..20: note = Description of Artificial Sequence: Synthetic oligonucleotide
  misc_feature 1..20: note = Target: FXN; (-) strand; PAM type: YTN; PAM sequence: TTT
  source 1..20: mol_type = other DNA
cctcttttcttgtctttgga

SEQ ID NO: 28808 - DNA, 20 bp, synthetic construct
  misc_feature 1..20: note = Description of Artificial Sequence: Synthetic oligonucleotide
  misc_feature 1..20: note = Target: FXN; (-) strand; PAM type: YTN; PAM sequence: TTT
  source 1..20: mol_type = other DNA
tcctcttttcttgtctttgg

SEQ ID NO: 28809 - DNA, 20 bp, synthetic construct
  misc_feature 1..20: note = Description of Artificial Sequence: Synthetic oligonucleotide
  misc_feature 1..20: note = Target: FXN; (-) strand; PAM type: YTN; PAM sequence: TTT
  source 1..20: mol_type = other DNA
ttcctcttttcttgtctttg

SEQ ID NO: 28810 - DNA, 20 bp, synthetic construct
  misc_feature 1..20: note = Description of Artificial Sequence: Synthetic oligonucleotide
  misc_feature 1..20: note = Target: FXN; (-) strand; PAM type: YTN; PAM sequence: TTT
  source 1..20: mol_type = other DNA
tttcctcttttcttgtcttt

SEQ ID NO: 28811 - DNA, 20 bp, synthetic construct
  misc_feature 1..20: note = Description of Artificial Sequence: Synthetic oligonucleotide
  misc_feature 1..20: note = Target: FXN; (-) strand; PAM type: YTN; PAM sequence: TTT
  source 1..20: mol_type = other DNA
ttttcctcttttcttgtctt

SEQ ID NO: 28812 - DNA, 20 bp, synthetic construct
  misc_feature 1..20: note = Description of Artificial Sequence: Synthetic oligonucleotide
  misc_feature 1..20: note = Target: FXN; (-) strand; PAM type: YTN; PAM sequence: CTT
  source 1..20: mol_type = other DNA
tttttcctcttttcttgtct

SEQ ID NO: 28813 - DNA, 20 bp, synthetic construct
  misc_feature 1..20: note = Description of Artificial Sequence: Synthetic oligonucleotide
  misc_feature 1..20: note = Target: FXN; (-) strand; PAM type: YTN; PAM sequence: CTC
  source 1..20: mol_type = other DNA
atgaaaacggctttttttcc

SEQ ID NO: 28814 - DNA, 20 bp, synthetic construct
  misc_feature 1..20: note = Description of Artificial Sequence: Synthetic oligonucleotide
  misc_feature 1..20: note = Target: FXN; (-) strand; PAM type: YTN; PAM sequence: CTC
  source 1..20: mol_type = other DNA
agctcatgaaaacggctttt

SEQ ID NO: 28815 - DNA, 20 bp, synthetic construct
  misc_feature 1..20: note = Description of Artificial Sequence: Synthetic oligonucleotide
  misc_feature 1..20: note = Target: FXN; (-) strand; PAM type: YTN; PAM sequence: CTA
  source 1..20: mol_type = other DNA
catcactcagctcatgaaaa

SEQ ID NO: 28816 - DNA, 20 bp, synthetic construct
  misc_feature 1..20: note = Description of Artificial Sequence: Synthetic oligonucleotide
  misc_feature 1..20: note = Target: FXN; (-) strand; PAM type: YTN; PAM sequence: TTA
  source 1..20: mol_type = other DNA
cgctacatcactcagctcat

SEQ ID NO: 28817 - DNA, 20 bp, synthetic construct
  misc_feature 1..20: note = Description of Artificial Sequence: Synthetic oligonucleotide
  misc_feature 1..20: note = Target: FXN; (-) strand; PAM type: YTN; PAM sequence: TTG
  source 1..20: mol_type = other DNA
ttacgctacatcactcagct

SEQ ID NO: 28818 - DNA, 20 bp, synthetic construct
  misc_feature 1..20: note = Description of Artificial Sequence: Synthetic oligonucleotide
  misc_feature 1..20: note = Target: FXN; (-) strand; PAM type: YTN; PAM sequence: TTT
  source 1..20: mol_type = other DNA
gttacgctacatcactcagc

SEQ ID NO: 28819 - DNA, 20 bp, synthetic construct
  misc_feature 1..20: note = Description of Artificial Sequence: Synthetic oligonucleotide
  misc_feature 1..20: note = Target: FXN; (-) strand; PAM type: YTN; PAM sequence: TTG
  source 1..20: mol_type = other DNA
tttgttacgctacatcactc

SEQ ID NO: 28820 - DNA, 20 bp, synthetic construct
  misc_feature 1..20: note = Description of Artificial Sequence: Synthetic oligonucleotide
  misc_feature 1..20: note = Target: FXN; (-) strand; PAM type: YTN; PAM sequence: TTT
  source 1..20: mol_type = other DNA
gtttgttacgctacatcact

SEQ ID NO: 28821 - DNA, 20 bp, synthetic construct
  misc_feature 1..20: note = Description of Artificial Sequence: Synthetic oligonucleotide
  misc_feature 1..20: note = Target: FXN; (-) strand; PAM type: YTN; PAM sequence: TTT
  source 1..20: mol_type = other DNA
tgtttgttacgctacatcac

SEQ ID NO: 28822 - DNA, 20 bp, synthetic construct
  misc_feature 1..20: note = Description of Artificial Sequence: Synthetic oligonucleotide
  misc_feature 1..20: note = Target: FXN; (-) strand; PAM type: YTN; PAM sequence: CTC
  source 1..20: mol_type = other DNA
catgattttgtttgttacgc

SEQ ID NO: 28823 - DNA, 20 bp, synthetic construct
  misc_feature 1..20: note = Description of Artificial Sequence: Synthetic oligonucleotide
  misc_feature 1..20: note = Target: FXN; (-) strand; PAM type: YTN; PAM sequence: CTC
  source 1..20: mol_type = other DNA
agctccatgattttgtttgt

SEQ ID NO: 28824 - DNA, 20 bp, synthetic construct
  misc_feature 1..20: note = Description of Artificial Sequence: Synthetic oligonucleotide
  misc_feature 1..20: note = Target: FXN; (-) strand; PAM type: YTN; PAM sequence: CTC
  source 1..20: mol_type = other DNA
ctcagctccatgattttgtt

SEQ ID NO: 28825 - DNA, 20 bp, synthetic construct
  misc_feature 1..20: note = Description of Artificial Sequence: Synthetic oligonucleotide
  misc_feature 1..20: note = Target: FXN; (-) strand; PAM type: YTN; PAM sequence: TTA
  source 1..20: mol_type = other DNA
caaggcacctcctcagctcc

SEQ ID NO: 28826 - DNA, 20 bp, synthetic construct
  misc_feature 1..20: note = Description of Artificial Sequence: Synthetic oligonucleotide
  misc_feature 1..20: note = Target: FXN; (-) strand; PAM type: YTN; PAM sequence: TTT
  source 1..20: mol_type = other DNA
acaaggcacctcctcagctc

SEQ ID NO: 28827 - DNA, 20 bp, synthetic construct
  misc_feature 1..20: note = Description of Artificial Sequence: Synthetic oligonucleotide
  misc_feature 1..20: note = Target: FXN; (-) strand; PAM type: YTN; PAM sequence: TTC
  source 1..20: mol_type = other DNA
atgtttacaaggcacctcct

SEQ ID NO: 28828 - DNA, 20 bp, synthetic construct
  misc_feature 1..20: note = Description of Artificial Sequence: Synthetic oligonucleotide
  misc_feature 1..20: note = Target: FXN; (-) strand; PAM type: YTN; PAM sequence: CTT
  source 1..20: mol_type = other DNA
catgtttacaaggcacctcc

SEQ ID NO: 28829 - DNA, 20 bp, synthetic construct
  misc_feature 1..20: note = Description of Artificial Sequence: Synthetic oligonucleotide
  misc_feature 1..20: note = Target: FXN; (-) strand; PAM type: YTN; PAM sequence: CTG
  source 1..20: mol_type = other DNA
ccccttcatgtttacaaggc

SEQ ID NO: 28830 - DNA, 20 bp, synthetic construct
  misc_feature 1..20: note = Description of Artificial Sequence: Synthetic oligonucleotide
  misc_feature 1..20: note = Target: FXN; (-) strand; PAM type: YTN; PAM sequence: TTA
  source 1..20: mol_type = other DNA
tctgccccttcatgtttaca

SEQ ID NO: 28831 - DNA, 20 bp, synthetic construct
  misc_feature 1..20: note = Description of Artificial Sequence: Synthetic oligonucleotide
  misc_feature 1..20: note = Target: FXN; (-) strand; PAM type: YTN; PAM sequence: TTT
  source 1..20: mol_type = other DNA
atctgccccttcatgtttac

SEQ ID NO: 28832 - DNA, 20 bp, synthetic construct
  misc_feature 1..20: note = Description of Artificial Sequence: Synthetic oligonucleotide
  misc_feature 1..20: note = Target: FXN; (-) strand; PAM type: YTN; PAM sequence: CTT
  source 1..20: mol_type = other DNA
tatctgccccttcatgttta

SEQ ID NO: 28833 - DNA, 20 bp, synthetic construct
  misc_feature 1..20: note = Description of Artificial Sequence: Synthetic oligonucleotide
  misc_feature 1..20: note = Target: FXN; (-) strand; PAM type: YTN; PAM sequence: TTC
  source 1..20: mol_type = other DNA
ctttatctgccccttcatgt

SEQ ID NO: 28834 - DNA, 20 bp, synthetic construct
  misc_feature 1..20: note = Description of Artificial Sequence: Synthetic oligonucleotide
  misc_feature 1..20: note = Target: FXN; (-) strand; PAM type: YTN; PAM sequence: CTT
  source 1..20: mol_type = other DNA
cctttatctgccccttcatg

SEQ ID NO: 28835 - DNA, 20 bp, synthetic construct
  misc_feature 1..20: note = Description of Artificial Sequence: Synthetic oligonucleotide
  misc_feature 1..20: note = Target: FXN; (-) strand; PAM type: YTN; PAM sequence: CTC
  source 1..20: mol_type = other DNA
cttcctttatctgccccttc

SEQ ID NO: 28836 - DNA, 20 bp, synthetic construct
  misc_feature 1..20: note = Description of Artificial Sequence: Synthetic oligonucleotide
  misc_feature 1..20: note = Target: FXN; (-) strand; PAM type: YTN; PAM sequence: TTA
  source 1..20: mol_type = other DNA
tcaacatgagtatctccttc

SEQ ID NO: 28837 - DNA, 20 bp, synthetic construct
  misc_feature 1..20: note = Description of Artificial Sequence: Synthetic oligonucleotide
  misc_feature 1..20: note = Target: FXN; (-) strand; PAM type: YTN; PAM sequence: TTT
  source 1..20: mol_type = other DNA
atcaacatgagtatctcctt

SEQ ID NO: 28838 - DNA, 20 bp, synthetic construct
  misc_feature 1..20: note = Description of Artificial Sequence: Synthetic oligonucleotide
  misc_feature 1..20: note = Target: FXN; (-) strand; PAM type: YTN; PAM sequence: CTT
  source 1..20: mol_type = other DNA
tatcaacatgagtatctcct

SEQ ID NO: 28839 - DNA, 20 bp, synthetic construct
  misc_feature 1..20: note = Description of Artificial Sequence: Synthetic oligonucleotide
  misc_feature 1..20: note = Target: FXN; (-) strand; PAM type: YTN; PAM sequence: CTC
  source 1..20: mol_type = other DNA
tttatcaacatgagtatctc

SEQ ID NO: 28840 - DNA, 20 bp, synthetic construct
  misc_feature 1..20: note = Description of Artificial Sequence: Synthetic oligonucleotide
  misc_feature 1..20: note = Target: FXN; (-) strand; PAM type: YTN; PAM sequence: CTC
  source 1..20: mol_type = other DNA
tctttatcaacatgagtatc

SEQ ID NO: 28841 - DNA, 20 bp, synthetic construct
  misc_feature 1..20: note = Description of Artificial Sequence: Synthetic oligonucleotide
  misc_feature 1..20: note = Target: FXN; (-) strand; PAM type: YTN; PAM sequence: CTA
  source 1..20: mol_type = other DNA
ggaccagggctctctttatc

SEQ ID NO: 28842 - DNA, 20 bp, synthetic construct
  misc_feature 1..20: note = Description of Artificial Sequence: Synthetic oligonucleotide
  misc_feature 1..20: note = Target: FXN; (-) strand; PAM type: YTN; PAM sequence: CTA
  source 1..20: mol_type = other DNA
tgtctaggaccagggctctc

SEQ ID NO: 28843 - DNA, 20 bp, synthetic construct
  misc_feature 1..20: note = Description of Artificial Sequence: Synthetic oligonucleotide
  misc_feature 1..20: note = Target: FXN; (-) strand; PAM type: YTN; PAM sequence: CTG
  source 1..20: mol_type = other DNA
aactatgtctaggaccaggg

SEQ ID NO: 28844 - DNA, 20 bp, synthetic construct
  misc_feature 1..20: note = Description of Artificial Sequence: Synthetic oligonucleotide
  misc_feature 1..20: note = Target: FXN; (-) strand; PAM type: YTN; PAM sequence: TTG
  source 1..20: mol_type = other DNA
tggctgaactatgtctagga

SEQ ID NO: 28845 - DNA, 20 bp, synthetic construct
  misc_feature 1..20: note = Description of Artificial Sequence: Synthetic oligonucleotide
  misc_feature 1..20: note = Target: FXN; (-) strand; PAM type: YTN; PAM sequence: TTT
  source 1..20: mol_type = other DNA
gtggctgaactatgtctagg

SEQ ID NO: 28846 - DNA, 20 bp, synthetic construct
  misc_feature 1..20: note = Description of Artificial Sequence: Synthetic oligonucleotide
  misc_feature 1..20: note = Target: FXN; (-) strand; PAM type: YTN; PAM sequence: CTT
  source 1..20: mol_type = other DNA
tgtggctgaactatgtctag

SEQ ID NO: 28847 - DNA, 20 bp, synthetic construct
  misc_feature 1..20: note = Description of Artificial Sequence: Synthetic oligonucleotide
  misc_feature 1..20: note = Target: FXN; (-) strand; PAM type: YTN; PAM sequence: CTA
  source 1..20: mol_type = other DNA
ctttgtggctgaactatgtc

SEQ ID NO: 28848 - DNA, 20 bp, synthetic construct
  misc_feature 1..20: note = Description of Artificial Sequence: Synthetic oligonucleotide
  misc_feature 1..20: note = Target: FXN; (-) strand; PAM type: YTN; PAM sequence: TTG
  source 1..20: mol_type = other DNA
tccacaaagggacaactact

SEQ ID NO: 28849 - DNA, 20 bp, synthetic construct
  misc_feature 1..20: note = Description of Artificial Sequence: Synthetic oligonucleotide
  misc_feature 1..20: note = Target: FXN; (-) strand; PAM type: YTN; PAM sequence: CTT
  source 1..20: mol_type = other DNA
gtccacaaagggacaactac

SEQ ID NO: 28850 - DNA, 20 bp, synthetic construct
  misc_feature 1..20: note = Description of Artificial Sequence: Synthetic oligonucleotide
  misc_feature 1..20: note = Target: FXN; (-) strand; PAM type: YTN; PAM sequence: TTG
  source 1..20: mol_type = other DNA
ggaaacttgtccacaaaggg

SEQ ID NO: 28851 - DNA, 20 bp, synthetic construct
  misc_feature 1..20: note = Description of Artificial Sequence: Synthetic oligonucleotide
  misc_feature 1..20: note = Target: FXN; (-) strand; PAM type: YTN; PAM sequence: TTT
  source 1..20: mol_type = other DNA
gggaaacttgtccacaaagg

SEQ ID NO: 28852 - DNA, 20 bp, synthetic construct
  misc_feature 1..20: note = Description of Artificial Sequence: Synthetic oligonucleotide
  misc_feature 1..20: note = Target: FXN; (-) strand; PAM type: YTN; PAM sequence: TTA
  source 1..20: mol_type = other DNA
acagatggggaagcagaggt

SEQ ID NO: 28853 - DNA, 20 bp, synthetic construct
  misc_feature 1..20: note = Description of Artificial Sequence: Synthetic oligonucleotide
  misc_feature 1..20: note = Target: FXN; (-) strand; PAM type: YTN; PAM sequence: TTT
  source 1..20: mol_type = other DNA
aacagatggggaagcagagg

SEQ ID NO: 28854 - DNA, 20 bp, synthetic construct
  misc_feature 1..20: note = Description of Artificial Sequence: Synthetic oligonucleotide
  misc_feature 1..20: note = Target: FXN; (-) strand; PAM type: YTN; PAM sequence: CTC
  source 1..20: mol_type = other DNA
atttaacagatggggaagca

SEQ ID NO: 28855 - DNA, 20 bp, synthetic construct
  misc_feature 1..20: note = Description of Artificial Sequence: Synthetic oligonucleotide
  misc_feature 1..20: note = Target: FXN; (-) strand; PAM type: YTN; PAM sequence: CTC
  source 1..20: mol_type = other DNA
tcatttaacagatggggaag

SEQ ID NO: 28856 - DNA, 20 bp, synthetic construct
  misc_feature 1..20: note = Description of Artificial Sequence: Synthetic oligonucleotide
  misc_feature 1..20: note = Target: FXN; (-) strand; PAM type: YTN; PAM sequence: TTC
  source 1..20: mol_type = other DNA
tctcatttaacagatgggga

SEQ ID NO: 28857 - DNA, 20 bp, synthetic construct
  misc_feature 1..20: note = Description of Artificial Sequence: Synthetic oligonucleotide
  misc_feature 1..20: note = Target: FXN; (-) strand; PAM type: YTN; PAM sequence: CTA
  source 1..20: mol_type = other DNA
ttctctcatttaacagatgg

SEQ ID NO: 28858 - DNA, 20 bp, synthetic construct
  misc_feature 1..20: note = Description of Artificial Sequence: Synthetic oligonucleotide
  misc_feature 1..20: note = Target: FXN; (-) strand; PAM type: YTN; PAM sequence: CTC
  source 1..20: mol_type = other DNA
tattctctcatttaacagat

SEQ ID NO: 28859 - DNA, 20 bp, synthetic construct
  misc_feature 1..20: note = Description of Artificial Sequence: Synthetic oligonucleotide
  misc_feature 1..20: note = Target: FXN; (-) strand; PAM type: YTN; PAM sequence: CTG
  source 1..20: mol_type = other DNA
ggaatcaaccatactctatt

SEQ ID NO: 28860 - DNA, 20 bp, synthetic construct
  misc_feature 1..20: note = Description of Artificial Sequence: Synthetic oligonucleotide
  misc_feature 1..20: note = Target: FXN; (-) strand; PAM type: YTN; PAM sequence: CTG
  source 1..20: mol_type = other DNA
aatgctgggaatcaaccata

SEQ ID NO: 28861 - DNA, 20 bp, synthetic construct
  misc_feature 1..20: note = Description of Artificial Sequence: Synthetic oligonucleotide
  misc_feature 1..20: note = Target: FXN; (-) strand; PAM type: YTN; PAM sequence: TTG
  source 1..20: mol_type = other DNA
acaggaccactgaatgctgg

SEQ ID NO: 28862 - DNA, 20 bp, synthetic construct
  misc_feature 1..20: note = Description of Artificial Sequence: Synthetic oligonucleotide
  misc_feature 1..20: note = Target: FXN; (-) strand; PAM type: YTN; PAM sequence: CTT
  source 1..20: mol_type = other DNA
gacaggaccactgaatgctg

SEQ ID NO: 28863 - DNA, 20 bp, synthetic construct
  misc_feature 1..20: note = Description of Artificial Sequence: Synthetic oligonucleotide
  misc_feature 1..20: note = Target: FXN; (-) strand; PAM type: YTN; PAM sequence: TTG
  source 1..20: mol_type = other DNA
cttgacaggaccactgaatg

SEQ ID NO: 28864 - DNA, 20 bp, synthetic construct
  misc_feature 1..20: note = Description of Artificial Sequence: Synthetic oligonucleotide
  misc_feature 1..20: note = Target: FXN; (-) strand; PAM type: YTN; PAM sequence: TTA
  source 1..20: mol_type = other DNA
ggttgcttgacaggaccact

SEQ ID NO: 28865 - DNA, 20 bp, synthetic construct
  misc_feature 1..20: note = Description of Artificial Sequence: Synthetic oligonucleotide
  misc_feature 1..20: note = Target: FXN; (-) strand; PAM type: YTN; PAM sequence: CTG
  source 1..20: mol_type = other DNA
ttaggttgcttgacaggacc

SEQ ID NO: 28866 - DNA, 20 bp, synthetic construct
  misc_feature 1..20: note = Description of Artificial Sequence: Synthetic oligonucleotide
  misc_feature 1..20: note = Target: FXN; (-) strand; PAM type: YTN; PAM sequence: CTA
  source 1..20: mol_type = other DNA
gcctgttaggttgcttgaca

SEQ ID NO: 28867 - DNA, 20 bp, synthetic construct
  misc_feature 1..20: note = Description of Artificial Sequence: Synthetic oligonucleotide
  misc_feature 1..20: note = Target: FXN; (-) strand; PAM type: YTN; PAM sequence: TTA
  source 1..20: mol_type = other DNA
gaactagcctgttaggttgc

SEQ ID NO: 28868 - DNA, 20 bp, synthetic construct
  misc_feature 1..20: note = Description of Artificial Sequence: Synthetic oligonucleotide
  misc_feature 1..20: note = Target: FXN; (-) strand; PAM type: YTN; PAM sequence: CTA
  source 1..20: mol_type = other DNA
cccaatagggaattagaact

SEQ ID NO: 28869 - DNA, 20 bp, synthetic construct
  misc_feature 1..20: note = Description of Artificial Sequence: Synthetic oligonucleotide
  misc_feature 1..20: note = Target: FXN; (-) strand; PAM type: YTN; PAM sequence: CTC
  source 1..20: mol_type = other DNA
atctacccaatagggaatta

SEQ ID NO: 28870 - DNA, 20 bp, synthetic construct
  misc_feature 1..20: note = Description of Artificial Sequence: Synthetic oligonucleotide
  misc_feature 1..20: note = Target: FXN; (-) strand; PAM type: YTN; PAM sequence: TTG
  source 1..20: mol_type = other DNA
tcatcccctcatctacccaa

SEQ ID NO: 28871 - DNA, 20 bp, synthetic construct
  misc_feature 1..20: note = Description of Artificial Sequence: Synthetic oligonucleotide
  misc_feature 1..20: note = Target: FXN; (-) strand; PAM type: YTN; PAM sequence: TTT
  source 1..20: mol_type = other DNA
gtcatcccctcatctaccca

SEQ ID NO: 28872 - DNA, 20 bp, synthetic construct
  misc_feature 1..20: note = Description of Artificial Sequence: Synthetic oligonucleotide
  misc_feature 1..20: note = Target: FXN; (-) strand; PAM type: YTN; PAM sequence: CTT
  source 1..20: mol_type = other DNA
tgtcatcccctcatctaccc

SEQ ID NO: 28873 - DNA, 20 bp, synthetic construct
  misc_feature 1..20: note = Description of Artificial Sequence: Synthetic oligonucleotide
  misc_feature 1..20: note = Target: FXN; (-) strand; PAM type: YTN; PAM sequence: TTC
  source 1..20: mol_type = other DNA
tttgtcatcccctcatctac

SEQ ID NO: 28874 - DNA, 20 bp, synthetic construct
  misc_feature 1..20: note = Description of Artificial Sequence: Synthetic oligonucleotide
  misc_feature 1..20: note = Target: FXN; (-) strand; PAM type: YTN; PAM sequence: CTG
  source 1..20: mol_type = other DNA
ttctttgtcatcccctcatc

SEQ ID NO: 28875 - DNA, 20 bp, synthetic construct
  misc_feature 1..20: note = Description of Artificial Sequence: Synthetic oligonucleotide
  misc_feature 1..20: note = Target: FXN; (-) strand; PAM type: YTN; PAM sequence: TTA
  source 1..20: mol_type = other DNA
aaaactgttctttgtcatcc

SEQ ID NO: 28876 - DNA, 20 bp, synthetic construct
  misc_feature 1..20: note = Description of Artificial Sequence: Synthetic oligonucleotide
  misc_feature 1..20: note = Target: FXN; (-) strand; PAM type: YTN; PAM sequence: CTT
  source 1..20: mol_type = other DNA
aaaaactgttctttgtcatc

SEQ ID NO: 28877 - DNA, 20 bp, synthetic construct
  misc_feature 1..20: note = Description of Artificial Sequence: Synthetic oligonucleotide
  misc_feature 1..20: note = Target: FXN; (-) strand; PAM type: YTN; PAM sequence: CTA
  source 1..20: mol_type = other DNA
tatagcttaaaaactgttct

SEQ ID NO: 28878 - DNA, 20 bp, synthetic construct
  misc_feature 1..20: note = Description of Artificial Sequence: Synthetic oligonucleotide
  misc_feature 1..20: note = Target: FXN; (-) strand; PAM type: YTN; PAM sequence: TTC
  source 1..20: mol_type = other DNA
ctatatagcttaaaaactgt

SEQ ID NO: 28879 - DNA, 20 bp, synthetic construct
  misc_feature 1..20: note = Description of Artificial Sequence: Synthetic oligonucleotide
  misc_feature 1..20: note = Target: FXN; (-) strand; PAM type: YTN; PAM sequence: TTT
  source 1..20: mol_type = other DNA
cctatatagcttaaaaactg

SEQ ID NO: 28880 - DNA, 20 bp, synthetic construct
  misc_feature 1..20: note = Description of Artificial Sequence: Synthetic oligonucleotide
  misc_feature 1..20: note = Target: FXN; (-) strand; PAM type: YTN; PAM sequence: CTG
  source 1..20: mol_type = other DNA
aaatcacgatagggcaacac

SEQ ID NO: 28881 - DNA, 20 bp, synthetic construct
  misc_feature 1..20: note = Description of Artificial Sequence: Synthetic oligonucleotide
  misc_feature 1..20: note = Target: FXN; (-) strand; PAM type: YTN; PAM sequence: TTC
  source 1..20: mol_type = other DNA
aactgaaatcacgatagggc

SEQ ID NO: 28882 - DNA, 20 bp, synthetic construct
  misc_feature 1..20: note = Description of Artificial Sequence: Synthetic oligonucleotide
  misc_feature 1..20: note = Target: FXN; (-) strand; PAM type: YTN; PAM sequence: TTC
  source 1..20: mol_type = other DNA
acatgaattcaactgaaatc

SEQ ID NO: 28883 - DNA, 20 bp, synthetic construct
  misc_feature 1..20: note = Description of Artificial Sequence: Synthetic oligonucleotide
  misc_feature 1..20: note = Target: FXN; (-) strand; PAM type: YTN; PAM sequence: TTT
  source 1..20: mol_type = other DNA
cacatgaattcaactgaaat

SEQ ID NO: 28884 - DNA, 20 bp, synthetic construct
  misc_feature 1..20: note = Description of Artificial Sequence: Synthetic oligonucleotide
  misc_feature 1..20: note = Target: FXN; (-) strand; PAM type: YTN; PAM sequence: TTT
  source 1..20: mol_type = other DNA
tcacatgaattcaactgaaa

SEQ ID NO: 28885 - DNA, 20 bp, synthetic construct
  misc_feature 1..20: note = Description of Artificial Sequence: Synthetic oligonucleotide
  misc_feature 1..20: note = Target: FXN; (-) strand; PAM type: YTN; PAM sequence: TTA
  source 1..20: mol_type = other DNA
ttttcacatgaattcaactg

SEQ ID NO: 28886 - DNA, 20 bp, synthetic construct
  misc_feature 1..20: note = Description of Artificial Sequence: Synthetic oligonucleotide
  misc_feature 1..20: note = Target: FXN; (-) strand; PAM type: YTN; PAM sequence: CTA
  source 1..20: mol_type = other DNA
ttattttcacatgaattcaa

SEQ ID NO: 28887 - DNA, 20 bp, synthetic construct
  misc_feature 1..20: note = Description of Artificial Sequence: Synthetic oligonucleotide
  misc_feature 1..20: note = Target: FXN; (-) strand; PAM type: YTN; PAM sequence: TTA
  source 1..20: mol_type = other DNA
caggtgtgagccaccgcgcc

SEQ ID NO: 28888 - DNA, 20 bp, synthetic construct
  misc_feature 1..20: note = Description of Artificial Sequence: Synthetic oligonucleotide
  misc_feature 1..20: note = Target: FXN; (-) strand; PAM type: YTN; PAM sequence: CTG
  source 1..20: mol_type = other DNA
ggattacaggtgtgagccac

SEQ ID NO: 28889 - DNA, 20 bp, synthetic construct
  misc_feature 1..20: note = Description of Artificial Sequence: Synthetic oligonucleotide
  misc_feature 1..20: note = Target: FXN; (-) strand; PAM type: YTN; PAM sequence: CTC
  source 1..20: mol_type = other DNA
caaaagtgctgggattacag

SEQ ID NO: 28890 - DNA, 20 bp, synthetic construct
  misc_feature 1..20: note = Description of Artificial Sequence: Synthetic oligonucleotide
  misc_feature 1..20: note = Target: FXN; (-) strand; PAM type: YTN; PAM sequence: TTG
  source 1..20: mol_type = other DNA
gcctccaaaagtgctgggat

SEQ ID NO: 28891 - DNA, 20 bp, synthetic construct
  misc_feature 1..20: note = Description of Artificial Sequence: Synthetic oligonucleotide
  misc_feature 1..20: note = Target: FXN; (-) strand; PAM type: YTN; PAM sequence: CTT
  source 1..20: mol_type = other DNA
ggcctccaaaagtgctggga

SEQ ID NO: 28892 - DNA, 20 bp, synthetic construct
  misc_feature 1..20: note = Description of Artificial Sequence: Synthetic oligonucleotide
  misc_feature 1..20: note = Target: FXN; (-) strand; PAM type: YTN; PAM sequence: CTC
  source 1..20: mol_type = other DNA
aggtgatccacccaccttgg

SEQ ID NO: 28893 - DNA, 20 bp, synthetic construct
  misc_feature 1..20: note = Description of Artificial Sequence: Synthetic oligonucleotide
  misc_feature 1..20: note = Target: FXN; (-) strand; PAM type: YTN; PAM sequence: CTG
  source 1..20: mol_type = other DNA
acctcaggtgatccacccac

SEQ ID NO: 28894 - DNA, 20 bp, synthetic construct
  misc_feature 1..20: note = Description of Artificial Sequence: Synthetic oligonucleotide
  misc_feature 1..20: note = Target: FXN; (-) strand; PAM type: YTN; PAM sequence: CTC
  source 1..20: mol_type = other DNA
ctgacctcaggtgatccacc

SEQ ID NO: 28895 - DNA, 20 bp, synthetic construct
  misc_feature 1..20: note = Description of Artificial Sequence: Synthetic oligonucleotide
  misc_feature 1..20: note = Target: FXN; (-) strand; PAM type: YTN; PAM sequence: TTG
  source 1..20: mol_type = other DNA
aactcctgacctcaggtgat

SEQ ID NO: 28896 - DNA, 20 bp, synthetic construct
  misc_feature 1..20: note = Description of Artificial Sequence: Synthetic oligonucleotide
  misc_feature 1..20: note = Target: FXN; (-) strand; PAM type: YTN; PAM sequence: CTT
  source 1..20: mol_type = other DNA
gaactcctgacctcaggtga

SEQ ID NO: 28897 - DNA, 20 bp, synthetic construct
  misc_feature 1..20: note = Description of Artificial Sequence: Synthetic oligonucleotide
  misc_feature 1..20: note = Target: FXN; (-) strand; PAM type: YTN; PAM sequence: CTG
  source 1..20: mol_type = other DNA
gtcttgaactcctgacctca

SEQ ID NO: 28898 - DNA, 20 bp, synthetic construct
  misc_feature 1..20: note = Description of Artificial Sequence: Synthetic oligonucleotide
  misc_feature 1..20: note = Target: FXN; (-) strand; PAM type: YTN; PAM sequence: TTG
  source 1..20: mol_type = other DNA
gccaggctggtcttgaactc

SEQ ID NO: 28899 - DNA, 20 bp, synthetic construct
  misc_feature 1..20: note = Description of Artificial Sequence: Synthetic oligonucleotide
  misc_feature 1..20: note = Target: FXN; (-) strand; PAM type: YTN; PAM sequence: TTC
  source 1..20: mol_type = other DNA
atcatgttggccaggctggt

SEQ ID NO: 28900 - DNA, 20 bp, synthetic construct
  misc_feature 1..20: note = Description of Artificial Sequence: Synthetic oligonucleotide
  misc_feature 1..20: note = Target: FXN; (-) strand; PAM type: YTN; PAM sequence: TTT
  source 1..20: mol_type = other DNA
catcatgttggccaggctgg

SEQ ID NO: 28901 - DNA, 20 bp, synthetic construct
  misc_feature 1..20: note = Description of Artificial Sequence: Synthetic oligonucleotide
  misc_feature 1..20: note = Target: FXN; (-) strand; PAM type: YTN; PAM sequence: TTA
  source 1..20: mol_type = other DNA
gtagagacggggtttcatca

SEQ ID NO: 28902 - DNA, 20 bp, synthetic construct
  misc_feature 1..20: note = Description of Artificial Sequence: Synthetic oligonucleotide
  misc_feature 1..20: note = Target: FXN; (-) strand; PAM type: YTN; PAM sequence: TTT
  source 1..20: mol_type = other DNA
agtagagacggggtttcatc

SEQ ID NO: 28903 - DNA, 20 bp, synthetic construct
  misc_feature 1..20: note = Description of Artificial Sequence: Synthetic oligonucleotide
  misc_feature 1..20: note = Target: FXN; (-) strand; PAM type: YTN; PAM sequence: TTT
  source 1..20: mol_type = other DNA
tagtagagacggggtttcat

SEQ ID NO: 28904 - DNA, 20 bp, synthetic construct
  misc_feature 1..20: note = Description of Artificial Sequence: Synthetic oligonucleotide
  misc_feature 1..20: note = Target: FXN; (-) strand; PAM type: YTN; PAM sequence: TTT
  source 1..20: mol_type = other DNA
ttagtagagacggggtttca

SEQ ID NO: 28905 - DNA, 20 bp, synthetic construct
  misc_feature 1..20: note = Description of Artificial Sequence: Synthetic oligonucleotide
  misc_feature 1..20: note = Target: FXN; (-) strand; PAM type: YTN; PAM sequence: TTG
  source 1..20: mol_type = other DNA
tatttttagtagagacgggg

SEQ ID NO: 28906 - DNA, 20 bp, synthetic construct
  misc_feature 1..20: note = Description of Artificial Sequence: Synthetic oligonucleotide
  misc_feature 1..20: note = Target: FXN; (-) strand; PAM type: YTN; PAM sequence: TTT
  source 1..20: mol_type = other DNA
gtatttttagtagagacggg

SEQ ID NO: 28907 - DNA, 20 bp, synthetic construct
  misc_feature 1..20: note = Description of Artificial Sequence: Synthetic oligonucleotide
  misc_feature 1..20: note = Target: FXN; (-) strand; PAM type: YTN; PAM sequence: TTT
  source 1..20: mol_type = other DNA
tgtatttttagtagagacgg

SEQ ID NO: 28908 - DNA, 20 bp, synthetic construct
  misc_feature 1..20: note = Description of Artificial Sequence: Synthetic oligonucleotide
  misc_feature 1..20: note = Target: FXN; (-) strand; PAM type: YTN; PAM sequence: TTT
  source 1..20: mol_type = other DNA
ttgtatttttagtagagacg

SEQ ID NO: 28909 - DNA, 20 bp, synthetic construct
  misc_feature 1..20: note = Description of Artificial Sequence: Synthetic oligonucleotide
  misc_feature 1..20: note = Target: FXN; (-) strand; PAM type: YTN; PAM sequence: TTT
  source 1..20: mol_type = other DNA
tttgtatttttagtagagac

SEQ ID NO: 28910 - DNA, 20 bp, synthetic construct
  misc_feature 1..20: note = Description of Artificial Sequence: Synthetic oligonucleotide
  misc_feature 1..20: note = Target: FXN; (-) strand; PAM type: YTN; PAM sequence: CTA
  source 1..20: mol_type = other DNA
attttttgtatttttagtag

SEQ ID NO: 28911 - DNA, 20 bp, synthetic construct
  misc_feature 1..20: note = Description of Artificial Sequence: Synthetic oligonucleotide
  misc_feature 1..20: note = Target: FXN; (-) strand; PAM type: YTN; PAM sequence: CTG
  source 1..20: mol_type = other DNA
ccatcatgcccggctaattt

SEQ ID NO: 28912 - DNA, 20 bp, synthetic construct
  misc_feature 1..20: note = Description of Artificial Sequence: Synthetic oligonucleotide
  misc_feature 1..20: note = Target: FXN; (-) strand; PAM type: YTN; PAM sequence: TTA
  source 1..20: mol_type = other DNA
caggcacctgccatcatgcc

SEQ ID NO: 28913 - DNA, 20 bp, synthetic construct
  misc_feature 1..20: note = Description of Artificial Sequence: Synthetic oligonucleotide
  misc_feature 1..20: note = Target: FXN; (-) strand; PAM type: YTN; PAM sequence: CTG
  source 1..20: mol_type = other DNA
ggattacaggcacctgccat

SEQ ID NO: 28914 - DNA, 20 bp, synthetic construct
  misc_feature 1..20: note = Description of Artificial Sequence: Synthetic oligonucleotide
  misc_feature 1..20: note = Target: FXN; (-) strand; PAM type: YTN; PAM sequence: CTC
  source 1..20: mol_type = other DNA
ccaagtagctgggattacag

SEQ ID NO: 28915 - DNA, 20 bp, synthetic construct
  misc_feature 1..20: note = Description of Artificial Sequence: Synthetic oligonucleotide
  misc_feature 1..20: note = Target: FXN; (-) strand; PAM type: YTN; PAM sequence: TTC
  source 1..20: mol_type = other DNA
agcctcccaagtagctggga

SEQ ID NO: 28916 - DNA, 20 bp, synthetic construct
  misc_feature 1..20: note = Description of Artificial Sequence: Synthetic oligonucleotide
  misc_feature 1..20: note = Target: FXN; (-) strand; PAM type: YTN; PAM sequence: CTT
  source 1..20: mol_type = other DNA
cagcctcccaagtagctggg

SEQ ID NO: 28917 - DNA, 20 bp, synthetic construct
  misc_feature 1..20: note = Description of Artificial Sequence: Synthetic oligonucleotide
  misc_feature 1..20: note = Target: FXN; (-) strand; PAM type: YTN; PAM sequence: TTC
  source 1..20: mol_type = other DNA
cgcttcagcctcccaagtag

SEQ ID NO: 28918 - DNA, 20 bp, synthetic construct
  misc_feature 1..20: note = Description of Artificial Sequence: Synthetic oligonucleotide
  misc_feature 1..20: note = Target: FXN; (-) strand; PAM type: YTN; PAM sequence: CTT
  source 1..20: mol_type = other DNA
ccgcttcagcctcccaagta

SEQ ID NO: 28919 - DNA, 20 bp, synthetic construct
  misc_feature 1..20: note = Description of Artificial Sequence: Synthetic oligonucleotide
  misc_feature 1..20: note = Target: FXN; (-) strand; PAM type: YTN; PAM sequence: TTC
  source 1..20: mol_type = other DNA
ttccgcttcagcctcccaag

SEQ ID NO: 28920 - DNA, 20 bp, synthetic construct
  misc_feature 1..20: note = Description of Artificial Sequence: Synthetic oligonucleotide
  misc_feature 1..20: note = Target: FXN; (-) strand; PAM type: YTN; PAM sequence: TTC
  source 1..20: mol_type = other DNA
aagcgattcttccgcttcag

SEQ ID NO: 28921 - DNA, 20 bp, synthetic construct
  misc_feature 1..20: note = Description of Artificial Sequence: Synthetic oligonucleotide
  misc_feature 1..20: note = Target: FXN; (-) strand; PAM type: YTN; PAM sequence: CTG
  source 1..20: mol_type = other DNA
ggttcaagcgattcttccgc

SEQ ID NO: 28922 - DNA, 20 bp, synthetic construct
  misc_feature 1..20: note = Description of Artificial Sequence: Synthetic oligonucleotide
  misc_feature 1..20: note = Target: FXN; (-) strand; PAM type: YTN; PAM sequence: CTC
  source 1..20: mol_type = other DNA
tgggttcaagcgattcttcc

SEQ ID NO: 28923 - DNA, 20 bp, synthetic construct
  misc_feature 1..20: note = Description of Artificial Sequence: Synthetic oligonucleotide
  misc_feature 1..20: note = Target: FXN; (-) strand; PAM type: YTN; PAM sequence: CTC
  source 1..20: mol_type = other DNA
cacctctgggttcaagcgat

SEQ ID NO: 28924 - DNA, 20 bp, synthetic construct
  misc_feature 1..20: note = Description of Artificial Sequence: Synthetic oligonucleotide
  misc_feature 1..20: note = Target: FXN; (-) strand; PAM type: YTN; PAM sequence: CTG
  source 1..20: mol_type = other DNA
caacctccacctctgggttc

SEQ ID NO: 28925 - DNA, 20 bp, synthetic construct
  misc_feature 1..20: note = Description of Artificial Sequence: Synthetic oligonucleotide
  misc_feature 1..20: note = Target: FXN; (-) strand; PAM type: YTN; PAM sequence: CTC
  source 1..20: mol_type = other DNA
actgcaacctccacctctgg

SEQ ID NO: 28926 - DNA, 20 bp, synthetic construct
  misc_feature 1..20: note = Description of Artificial Sequence: Synthetic oligonucleotide
  misc_feature 1..20: note = Target: FXN; (-) strand; PAM type: YTN; PAM sequence: CTC
  source 1..20: mol_type = other DNA
ggctcactgcaacctccacc

SEQ ID NO: 28927 - DNA, 20 bp, synthetic construct
  misc_feature 1..20: note = Description of Artificial Sequence: Synthetic oligonucleotide
  misc_feature 1..20: note = Target: FXN; (-) strand; PAM type: YTN; PAM sequence: TTA
  source 1..20: mol_type = other DNA
cagtgcaatggcacgatctc

SEQ ID NO: 28928 - DNA, 20 bp, synthetic construct
  misc_feature 1..20: note = Description of Artificial Sequence: Synthetic oligonucleotide
  misc_feature 1..20: note = Target: FXN; (-) strand; PAM type: YTN; PAM sequence: CTC
  source 1..20: mol_type = other DNA
agtcacccaggttacagtgc

SEQ ID NO: 28929 - DNA, 20 bp, synthetic construct
  misc_feature 1..20: note = Description of Artificial Sequence: Synthetic oligonucleotide
  misc_feature 1..20: note = Target: FXN; (-) strand; PAM type: YTN; PAM sequence: TTG
  source 1..20: mol_type = other DNA
ctcagtcacccaggttacag

SEQ ID NO: 28930 - DNA, 20 bp, synthetic construct
  misc_feature 1..20: note = Description of Artificial Sequence: Synthetic oligonucleotide
  misc_feature 1..20: note = Target: FXN; (-) strand; PAM type: YTN; PAM sequence: TTT
  source 1..20: mol_type = other DNA
gctcagtcacccaggttaca

SEQ ID NO: 28931 - DNA, 20 bp, synthetic construct
  misc_feature 1..20: note = Description of Artificial Sequence: Synthetic oligonucleotide
  misc_feature 1..20: note = Target: FXN; (-) strand; PAM type: YTN; PAM sequence: TTT
  source 1..20: mol_type = other DNA
tgctcagtcacccaggttac

SEQ ID NO: 28932 - DNA, 20 bp, synthetic construct
  misc_feature 1..20: note = Description of Artificial Sequence: Synthetic oligonucleotide
  misc_feature 1..20: note = Target: FXN; (-) strand; PAM type: YTN; PAM sequence: TTG
  source 1..20: mol_type = other DNA
agacagagttttgctcagtc

SEQ ID NO: 28933 - DNA, 20 bp, synthetic construct
  misc_feature 1..20: note = Description of Artificial Sequence: Synthetic oligonucleotide
  misc_feature 1..20: note = Target: FXN; (-) strand; PAM type: YTN; PAM sequence: TTT
  source 1..20: mol_type = other DNA
gagacagagttttgctcagt

SEQ ID NO: 28934 - DNA, 20 bp, synthetic construct
  misc_feature 1..20: note = Description of Artificial Sequence: Synthetic oligonucleotide
  misc_feature 1..20: note = Target: FXN; (-) strand; PAM type: YTN; PAM sequence: TTT
  source 1..20: mol_type = other DNA
tgagacagagttttgctcag

SEQ ID NO: 28935 - DNA, 20 bp, synthetic construct
  misc_feature 1..20: note = Description of Artificial Sequence: Synthetic oligonucleotide
  misc_feature 1..20: note = Target: FXN; (-) strand; PAM type: YTN; PAM sequence: TTA
  source 1..20: mol_type = other DNA
ttttgagacagagttttgct

SEQ ID NO: 28936 - DNA, 20 bp, synthetic construct
  misc_feature 1..20: note = Description of Artificial Sequence: Synthetic oligonucleotide
  misc_feature 1..20: note = Target: FXN; (-) strand; PAM type: YTN; PAM sequence: TTA
  source 1..20: mol_type = other DNA
ttattttgagacagagtttt

SEQ ID NO: 28937 - DNA, 20 bp, synthetic construct
  misc_feature 1..20: note = Description of Artificial Sequence: Synthetic oligonucleotide
  misc_feature 1..20: note = Target: FXN; (-) strand; PAM type: YTN; PAM sequence: TTA
  source 1..20: mol_type = other DNA
ttattattttgagacagagt

SEQ ID NO: 28938 - DNA, 20 bp, synthetic construct
  misc_feature 1..20: note = Description of Artificial Sequence: Synthetic oligonucleotide
  misc_feature 1..20: note = Target: FXN; (-) strand; PAM type: YTN; PAM sequence: TTG
  source 1..20: mol_type = other DNA
ttattattattttgagacag

SEQ ID NO: 28939 - DNA, 20 bp, synthetic construct
  misc_feature 1..20: note = Description of Artificial Sequence: Synthetic oligonucleotide
  misc_feature 1..20: note = Target: FXN; (-) strand; PAM type: YTN; PAM sequence: TTA
  source 1..20: mol_type = other DNA
tattgttattattattttga

SEQ ID NO: 28940 - DNA, 20 bp, synthetic construct
  misc_feature 1..20: note = Description of Artificial Sequence: Synthetic oligonucleotide
  misc_feature 1..20: note = Target: FXN; (-) strand; PAM type: YTN; PAM sequence: TTA
  source 1..20: mol_type = other DNA
ttatattgttattattattt

SEQ ID NO: 28941 - DNA, 20 bp, synthetic construct
  misc_feature 1..20: note = Description of Artificial Sequence: Synthetic oligonucleotide
  misc_feature 1..20: note = Target: FXN; (-) strand; PAM type: YTN; PAM sequence: TTA
  source 1..20: mol_type = other DNA
ttattatattgttattatta

SEQ ID NO: 28942 - DNA, 20 bp, synthetic construct
  misc_feature 1..20: note = Description of Artificial Sequence: Synthetic oligonucleotide
  misc_feature 1..20: note = Target: FXN; (-) strand; PAM type: YTN; PAM sequence: TTA
  source 1..20: mol_type = other DNA
ttattattatattgttatta

SEQ ID NO: 28943 - DNA, 20 bp, synthetic construct
  misc_feature 1..20: note = Description of Artificial Sequence: Synthetic oligonucleotide
  misc_feature 1..20: note = Target: FXN; (-) strand; PAM type: YTN; PAM sequence: CTA
  source 1..20: mol_type = other DNA
ttattattattatattgtta

SEQ ID NO: 28944 - DNA, 20 bp, synthetic construct
  misc_feature 1..20: note = Description of Artificial Sequence: Synthetic oligonucleotide
  misc_feature 1..20: note = Target: FXN; (-) strand; PAM type: YTN; PAM sequence: TTA
  source 1..20: mol_type = other DNA
acccagtaagggtacaataa

SEQ ID NO: 28945 - DNA, 20 bp, synthetic construct
  misc_feature 1..20: note = Description of Artificial Sequence: Synthetic oligonucleotide
  misc_feature 1..20: note = Target: FXN; (-) strand; PAM type: YTN; PAM sequence: TTA
  source 1..20: mol_type = other DNA
aaatgaggtaatgtggtata

SEQ ID NO: 28946 - DNA, 20 bp, synthetic construct
  misc_feature 1..20: note = Description of Artificial Sequence: Synthetic oligonucleotide
  misc_feature 1..20: note = Target: FXN; (-) strand; PAM type: YTN; PAM sequence: TTG
  source 1..20: mol_type = other DNA
tataaagtgcaggtcagtaa

SEQ ID NO: 28947 - DNA, 20 bp, synthetic construct
  misc_feature 1..20: note = Description of Artificial Sequence: Synthetic oligonucleotide
  misc_feature 1..20: note = Target: FXN; (-) strand; PAM type: YTN; PAM sequence: TTT
  source 1..20: mol_type = other DNA
gtataaagtgcaggtcagta

SEQ ID NO: 28948 - DNA, 20 bp, synthetic construct
  misc_feature 1..20: note = Description of Artificial Sequence: Synthetic oligonucleotide
  misc_feature 1..20: note = Target: FXN; (-) strand; PAM type: YTN; PAM sequence: CTT
  source 1..20: mol_type = other DNA
tgtataaagtgcaggtcagt

SEQ ID NO: 28949 - DNA, 20 bp, synthetic construct
  misc_feature 1..20: note = Description of Artificial Sequence: Synthetic oligonucleotide
  misc_feature 1..20: note = Target: FXN; (-) strand; PAM type: YTN; PAM sequence: TTG
  source 1..20: mol_type = other DNA
ctttgtataaagtgcaggtc

SEQ ID NO: 28950 - DNA, 20 bp, synthetic construct
  misc_feature 1..20: note = Description of Artificial Sequence: Synthetic oligonucleotide
  misc_feature 1..20: note = Target: FXN; (-) strand; PAM type: YTN; PAM sequence: TTG
  source 1..20: mol_type = other DNA
ttgctttgtataaagtgcag

SEQ ID NO: 28951 - DNA, 20 bp, synthetic construct
  misc_feature 1..20: note = Description of Artificial Sequence: Synthetic oligonucleotide
  misc_feature 1..20: note = Target: FXN; (-) strand; PAM type: YTN; PAM sequence: CTT
  source 1..20: mol_type = other DNA
gttgctttgtataaagtgca

SEQ ID NO: 28952 - DNA, 20 bp, synthetic construct
  misc_feature 1..20: note = Description of Artificial Sequence: Synthetic oligonucleotide
  misc_feature 1..20: note = Target: FXN; (-) strand; PAM type: YTN; PAM sequence: CTG
  source 1..20: mol_type = other DNA
gaggcttgttgctttgtata

SEQ ID NO: 28953 - DNA, 20 bp, synthetic construct
  misc_feature 1..20: note = Description of Artificial Sequence: Synthetic oligonucleotide
  misc_feature 1..20: note = Target: FXN; (-) strand; PAM type: YTN; PAM sequence: TTA
  source 1..20: mol_type = other DNA
atgtcctggaggcttgttgc

SEQ ID NO: 28954 - DNA, 20 bp, synthetic construct
  misc_feature 1..20: note = Description of Artificial Sequence: Synthetic oligonucleotide
  misc_feature 1..20: note = Target: FXN; (-) strand; PAM type: YTN; PAM sequence: TTT
  source 1..20: mol_type = other DNA
aatgtcctggaggcttgttg

SEQ ID NO: 28955 - DNA, 20 bp, synthetic construct
  misc_feature 1..20: note = Description of Artificial Sequence: Synthetic oligonucleotide
  misc_feature 1..20: note = Target: FXN; (-) strand; PAM type: YTN; PAM sequence: TTT
  source 1..20: mol_type = other DNA
taatgtcctggaggcttgtt

SEQ ID NO: 28956 - DNA, 20 bp, synthetic construct
  misc_feature 1..20: note = Description of Artificial Sequence: Synthetic oligonucleotide
  misc_feature 1..20: note = Target: FXN; (-) strand; PAM type: YTN; PAM sequence: TTG
  source 1..20: mol_type = other DNA
catgaattttaatgtcctgg

SEQ ID NO: 28957 - DNA, 20 bp, synthetic construct
  misc_feature 1..20: note = Description of Artificial Sequence: Synthetic oligonucleotide
  misc_feature 1..20: note = Target: FXN; (-) strand; PAM type: YTN; PAM sequence: TTT
  source 1..20: mol_type = other DNA
gcatgaattttaatgtcctg

SEQ ID NO: 28958 - DNA, 20 bp, synthetic construct
  misc_feature 1..20: note = Description of Artificial Sequence: Synthetic oligonucleotide
  misc_feature 1..20: note = Target: FXN; (-) strand; PAM type: YTN; PAM sequence: CTT
  source 1..20: mol_type = other DNA
tgcatgaattttaatgtcct

SEQ ID NO: 28959 - DNA, 20 bp, synthetic construct
  misc_feature 1..20: note = Description of Artificial Sequence: Synthetic oligonucleotide
  misc_feature 1..20: note = Target: FXN; (-) strand; PAM type: YTN; PAM sequence: TTA
  source 1..20: mol_type = other DNA
agtaagaaaataatataaca

SEQ ID NO: 28960 - DNA, 20 bp, synthetic construct
  misc_feature 1..20: note = Description of Artificial Sequence: Synthetic oligonucleotide
  misc_feature 1..20: note = Target: FXN; (-) strand; PAM type: YTN; PAM sequence: TTT
  source 1..20: mol_type = other DNA
aagtaagaaaataatataac

SEQ ID NO: 28961 - DNA, 20 bp, synthetic construct
  misc_feature 1..20: note = Description of Artificial Sequence: Synthetic oligonucleotide
  misc_feature 1..20: note = Target: FXN; (-) strand; PAM type: YTN; PAM sequence: CTT
  source 1..20: mol_type = other DNA
taagtaagaaaataatataa

SEQ ID NO: 28962 - DNA, 20 bp, synthetic construct
  misc_feature 1..20: note = Description of Artificial Sequence: Synthetic oligonucleotide
  misc_feature 1..20: note = Target: FXN; (-) strand; PAM type: YTN; PAM sequence: TTC
  source 1..20: mol_type = other DNA
tttaagtaagaaaataatat

SEQ ID NO: 28963 - DNA, 20 bp, synthetic construct
  misc_feature 1..20: note = Description of Artificial Sequence: Synthetic oligonucleotide
  misc_feature 1..20: note = Target: FXN; (-) strand; PAM type: YTN; PAM sequence: CTT
  source 1..20: mol_type = other DNA
ctttaagtaagaaaataata

SEQ ID NO: 28964 - DNA, 20 bp, synthetic construct
  misc_feature 1..20: note = Description of Artificial Sequence: Synthetic oligonucleotide
  misc_feature 1..20: note = Target: FXN; (-) strand; PAM type: YTN; PAM sequence: CTA
  source 1..20: mol_type = other DNA
ataaatccttctttaagtaa

SEQ ID NO: 28965 - DNA, 20 bp, synthetic construct
  misc_feature 1..20: note = Description of Artificial Sequence: Synthetic oligonucleotide
  misc_feature 1..20: note = Target: FXN; (-) strand; PAM type: YTN; PAM sequence: TTA
  source 1..20: mol_type = other DNA
caggtgcacgccaccatgcc

SEQ ID NO: 28966 - DNA, 20 bp, synthetic construct
  misc_feature 1..20: note = Description of Artificial Sequence: Synthetic oligonucleotide
  misc_feature 1..20: note = Target: FXN; (-) strand; PAM type: YTN; PAM sequence: CTG
  source 1..20: mol_type = other DNA
ggattacaggtgcacgccac

SEQ ID NO: 28967 - DNA, 20 bp, synthetic construct
  misc_feature 1..20: note = Description of Artificial Sequence: Synthetic oligonucleotide
  misc_feature 1..20: note = Target: FXN; (-) strand; PAM type: YTN; PAM sequence: CTG
  source 1..20: mol_type = other DNA
agtacctgggattacaggtg

SEQ ID NO: 28968 - DNA, 20 bp, synthetic construct
  misc_feature 1..20: note = Description of Artificial Sequence: Synthetic oligonucleotide
  misc_feature 1..20: note = Target: FXN; (-) strand; PAM type: YTN; PAM sequence: CTC
  source 1..20: mol_type = other DNA
ctgagtacctgggattacag

SEQ ID NO: 28969 - DNA, 20 bp, synthetic construct
  misc_feature 1..20: note = Description of Artificial Sequence: Synthetic oligonucleotide
  misc_feature 1..20: note = Target: FXN; (-) strand; PAM type: YTN; PAM sequence: CTC
  source 1..20: mol_type = other DNA
agcctcctgagtacctggga

SEQ ID NO: 28970 - DNA, 20 bp, synthetic construct
  misc_feature 1..20: note = Description of Artificial Sequence: Synthetic oligonucleotide
  misc_feature 1..20: note = Target: FXN; (-) strand; PAM type: YTN; PAM sequence: CTC
  source 1..20: mol_type = other DNA
ccgtctcagcctcctgagta

SEQ ID NO: 28971 - DNA, 20 bp, synthetic construct
  misc_feature 1..20: note = Description of Artificial Sequence: Synthetic oligonucleotide
  misc_feature 1..20: note = Target: FXN; (-) strand; PAM type: YTN; PAM sequence: TTC
  source 1..20: mol_type = other DNA
tcccgtctcagcctcctgag

SEQ ID NO: 28972 - DNA, 20 bp, synthetic construct
  misc_feature 1..20: note = Description of Artificial Sequence: Synthetic oligonucleotide
  misc_feature 1..20: note = Target: FXN; (-) strand; PAM type: YTN; PAM sequence: CTG
  source 1..20: mol_type = other DNA
gggtcaagcaattctcccgt

SEQ ID NO: 28973 - DNA, 20 bp, synthetic construct
  misc_feature 1..20: note = Description of Artificial Sequence: Synthetic oligonucleotide
  misc_feature 1..20: note = Target: FXN; (-) strand; PAM type: YTN; PAM sequence: CTC
  source 1..20: mol_type = other DNA
cgcctggggtcaagcaattc

SEQ ID NO: 28974 - DNA, 20 bp, synthetic construct
  misc_feature 1..20: note = Description of Artificial Sequence: Synthetic oligonucleotide
  misc_feature 1..20: note = Target: FXN; (-) strand; PAM type: YTN; PAM sequence: CTC
  source 1..20: mol_type = other DNA
ctccgcctggggtcaagcaa

SEQ ID NO: 28975 - DNA, 20 bp, synthetic construct
  misc_feature 1..20: note = Description of Artificial Sequence: Synthetic oligonucleotide
  misc_feature 1..20: note = Target: FXN; (-) strand; PAM type: YTN; PAM sequence: CTG
  source 1..20: mol_type = other DNA
taacctcctccgcctggggt

SEQ ID NO: 28976 - DNA, 20 bp, synthetic construct
  misc_feature 1..20: note = Description of Artificial Sequence: Synthetic oligonucleotide
  misc_feature 1..20: note = Target: FXN; (-) strand; PAM type: YTN; PAM sequence: CTC
  source 1..20: mol_type = other DNA
actgtaacctcctccgcctg

SEQ ID NO: 28977 - DNA, 20 bp, synthetic construct
  misc_feature 1..20: note = Description of Artificial Sequence: Synthetic oligonucleotide
  misc_feature 1..20: note = Target: FXN; (-) strand; PAM type: YTN; PAM sequence: CTC
  source 1..20: mol_type = other DNA
gactcactgtaacctcctcc

SEQ ID NO: 28978 - DNA, 20 bp, synthetic construct
  misc_feature 1..20: note = Description of Artificial Sequence: Synthetic oligonucleotide
  misc_feature 1..20: note = Target: FXN; (-) strand; PAM type: YTN; PAM sequence: CTC
  source 1..20: mol_type = other DNA
aggtacgatctcgactcact

SEQ ID NO: 28979 - DNA, 20 bp, synthetic construct
  misc_feature 1..20: note = Description of Artificial Sequence: Synthetic oligonucleotide
  misc_feature 1..20: note = Target: FXN; (-) strand; PAM type: YTN; PAM sequence: CTG
  source 1..20: mol_type = other DNA
tcgctcaggtacgatctcga

SEQ ID NO: 28980 - DNA, 20 bp, synthetic construct
  misc_feature 1..20: note = Description of Artificial Sequence: Synthetic oligonucleotide
  misc_feature 1..20: note = Target: FXN; (-) strand; PAM type: YTN; PAM sequence: CTC
  source 1..20: mol_type = other DNA
tgtcgctcaggtacgatctc

SEQ ID NO: 28981 - DNA, 20 bp, synthetic construct
  misc_feature 1..20: note = Description of Artificial Sequence: Synthetic oligonucleotide
  misc_feature 1..20: note = Target: FXN; (-) strand; PAM type: YTN; PAM sequence: CTC
  source 1..20: mol_type = other DNA
gctctgtcgctcaggtacga

SEQ ID NO: 28982 - DNA, 20 bp, synthetic construct
  misc_feature 1..20: note = Description of Artificial Sequence: Synthetic oligonucleotide
  misc_feature 1..20: note = Target: FXN; (-) strand; PAM type: YTN; PAM sequence: TTG
  source 1..20: mol_type = other DNA
agacggagtctcgctctgtc

SEQ ID NO: 28983 - DNA, 20 bp, synthetic construct
  misc_feature 1..20: note = Description of Artificial Sequence: Synthetic oligonucleotide
  misc_feature 1..20: note = Target: FXN; (-) strand; PAM type: YTN; PAM sequence: TTT
  source 1..20: mol_type = other DNA
gagacggagtctcgctctgt

SEQ ID NO: 28984 - DNA, 20 bp, synthetic construct
  misc_feature 1..20: note = Description of Artificial Sequence: Synthetic oligonucleotide
  misc_feature 1..20: note = Target: FXN; (-) strand; PAM type: YTN; PAM sequence: TTT
  source 1..20: mol_type = other DNA
tgagacggagtctcgctctg

SEQ ID NO: 28985 - DNA, 20 bp, synthetic construct
  misc_feature 1..20: note = Description of Artificial Sequence: Synthetic oligonucleotide
  misc_feature 1..20: note = Target: FXN; (-) strand; PAM type: YTN; PAM sequence: TTT
  source 1..20: mol_type = other DNA
ttgagacggagtctcgctct

SEQ ID NO: 28986 - DNA, 20 bp, synthetic construct
  misc_feature 1..20: note = Description of Artificial Sequence: Synthetic oligonucleotide
  misc_feature 1..20: note = Target: FXN; (-) strand; PAM type: YTN; PAM sequence: TTT
  source 1..20: mol_type = other DNA
tttgagacggagtctcgctc

SEQ ID NO: 28987 - DNA, 20 bp, synthetic construct
  misc_feature 1..20: note = Description of Artificial Sequence: Synthetic oligonucleotide
  misc_feature 1..20: note = Target: FXN; (-) strand; PAM type: YTN; PAM sequence: TTT
  source 1..20: mol_type = other DNA
ttttgagacggagtctcgct

SEQ ID NO: 28988 - DNA, 20 bp, synthetic construct
  misc_feature 1..20: note = Description of Artificial Sequence: Synthetic oligonucleotide
  misc_feature 1..20: note = Target: FXN; (-) strand; PAM type: YTN; PAM sequence: TTT
  source 1..20: mol_type = other DNA
tttttgagacggagtctcgc

SEQ ID NO: 28989 - DNA, 20 bp, synthetic construct
  misc_feature 1..20: note = Description of Artificial Sequence: Synthetic oligonucleotide
  misc_feature 1..20: note = Target: FXN; (-) strand; PAM type: YTN; PAM sequence: TTT
  source 1..20: mol_type = other DNA
ttttttgagacggagtctcg

SEQ ID NO: 28990 - DNA, 20 bp, synthetic construct
  misc_feature 1..20: note = Description of Artificial Sequence: Synthetic oligonucleotide
  misc_feature 1..20: note = Target: FXN; (-) strand; PAM type: YTN; PAM sequence: TTT
  source 1..20: mol_type = other DNA
tttttttgagacggagtctc

SEQ ID NO: 28991 - DNA, 20 bp, synthetic construct
  misc_feature 1..20: note = Description of Artificial Sequence: Synthetic oligonucleotide
  misc_feature 1..20: note = Target: FXN; (-) strand; PAM type: YTN; PAM sequence: TTT
  source 1..20: mol_type = other DNA
ttttttttgagacggagtct

SEQ ID NO: 28992 - DNA, 20 bp, synthetic construct
  misc_feature 1..20: note = Description of Artificial Sequence: Synthetic oligonucleotide
  misc_feature 1..20: note = Target: FXN; (-) strand; PAM type: YTN; PAM sequence: TTT
  source 1..20: mol_type = other DNA
tttttttttgagacggagtc

SEQ ID NO: 28993 - DNA, 20 bp, synthetic construct
  misc_feature 1..20: note = Description of Artificial Sequence: Synthetic oligonucleotide
  misc_feature 1..20: note = Target: FXN; (-) strand; PAM type: YTN; PAM sequence: TTT
  source 1..20: mol_type = other DNA
ttttttttttgagacggagt

SEQ ID NO: 28994 - DNA, 20 bp, synthetic construct
  misc_feature 1..20: note = Description of Artificial Sequence: Synthetic oligonucleotide
  misc_feature 1..20: note = Target: FXN; (-) strand; PAM type: YTN; PAM sequence: TTT
  source 1..20: mol_type = other DNA
tttttttttttgagacggag

SEQ ID NO: 28995 - DNA, 20 bp, synthetic construct
  misc_feature 1..20: note = Description of Artificial Sequence: Synthetic oligonucleotide
  misc_feature 1..20: note = Target: FXN; (-) strand; PAM type: YTN; PAM sequence: CTT
  source 1..20: mol_type = other DNA
ttttttttttttgagacgga

SEQ ID NO: 28996 - DNA, 20 bp, synthetic construct
  misc_feature 1..20: note = Description of Artificial Sequence: Synthetic oligonucleotide
  misc_feature 1..20: note = Target: FXN; (-) strand; PAM type: YTN; PAM sequence: CTC
  source 1..20: mol_type = other DNA
cttttttttttttttgagac

SEQ ID NO: 28997 - DNA, 20 bp, synthetic construct
  misc_feature 1..20: note = Description of Artificial Sequence: Synthetic oligonucleotide
  misc_feature 1..20: note = Target: FXN; (-) strand; PAM type: YTN; PAM sequence: TTA
  source 1..20: mol_type = other DNA
ataaaccctccttttttttt

SEQ ID NO: 28998 - DNA, 20 bp, synthetic construct
  misc_feature 1..20: note = Description of Artificial Sequence: Synthetic oligonucleotide
  misc_feature 1..20: note = Target: FXN; (-) strand; PAM type: YTN; PAM sequence: CTC
  source 1..20: mol_type = other DNA
attaataaaccctccttttt

SEQ ID NO: 28999 - DNA, 20 bp, synthetic construct
  misc_feature 1..20: note = Description of Artificial Sequence: Synthetic oligonucleotide
  misc_feature 1..20: note = Target: FXN; (-) strand; PAM type: YTN; PAM sequence: TTC
  source 1..20: mol_type = other DNA
tcattaataaaccctccttt

SEQ ID NO: 29000 - DNA, 20 bp, synthetic construct
  misc_feature 1..20: note = Description of Artificial Sequence: Synthetic oligonucleotide
  misc_feature 1..20: note = Target: FXN; (-) strand; PAM type: YTN; PAM sequence: CTT
  source 1..20: mol_type = other DNA
ctcattaataaaccctcctt

SEQ ID NO: 29001 - DNA, 20 bp, synthetic construct
  misc_feature 1..20: note = Description of Artificial Sequence: Synthetic oligonucleotide
  misc_feature 1..20: note = Target: FXN; (-) strand; PAM type: YTN; PAM sequence: TTA
  source 1..20: mol_type = other DNA
atacaaacttctcattaata

SEQ ID NO: 29002 - DNA, 20 bp, synthetic construct
  misc_feature 1..20: note = Description of Artificial Sequence: Synthetic oligonucleotide
  misc_feature 1..20: note = Target: FXN; (-) strand; PAM type: YTN; PAM sequence: CTA
  source 1..20: mol_type = other DNA
catattaatacaaacttctc

SEQ ID NO: 29003 - DNA, 20 bp, synthetic construct
  misc_feature 1..20: note = Description of Artificial Sequence: Synthetic oligonucleotide
  misc_feature 1..20: note = Target: FXN; (-) strand; PAM type: YTN; PAM sequence: TTG
  source 1..20: mol_type = other DNA
ctacatattaatacaaactt

SEQ ID NO: 29004 - DNA, 20 bp, synthetic construct
  misc_feature 1..20: note = Description of Artificial Sequence: Synthetic oligonucleotide
  misc_feature 1..20: note = Target: FXN; (-) strand; PAM type: YTN; PAM sequence: TTT
  source 1..20: mol_type = other DNA
gctacatattaatacaaact

SEQ ID NO: 29005 - DNA, 20 bp, synthetic construct
  misc_feature 1..20: note = Description of Artificial Sequence: Synthetic oligonucleotide
  misc_feature 1..20: note = Target: FXN; (-) strand; PAM type: YTN; PAM sequence: CTT
  source 1..20: mol_type = other DNA
tgctacatattaatacaaac

SEQ ID NO: 29006 - DNA, 20 bp, synthetic construct
  misc_feature 1..20: note = Description of Artificial Sequence: Synthetic oligonucleotide
  misc_feature 1..20: note = Target: FXN; (-) strand; PAM type: YTN; PAM sequence: TTG
  source 1..20: mol_type = other DNA
gaaaagcctttgctacatat

SEQ ID NO: 29007 - DNA, 20 bp, synthetic construct
  misc_feature 1..20: note = Description of Artificial Sequence: Synthetic oligonucleotide
  misc_feature 1..20: note = Target: FXN; (-) strand; PAM type: YTN; PAM sequence: TTC
  source 1..20: mol_type = other DNA
acccattggaaaagcctttg

SEQ ID NO: 29008 - DNA, 20 bp, synthetic construct
  misc_feature 1..20: note = Description of Artificial Sequence: Synthetic oligonucleotide
  misc_feature 1..20: note = Target: FXN; (-) strand; PAM type: YTN; PAM sequence: TTA
  source 1..20: mol_type = other DNA
ttcacccattggaaaagcct

SEQ ID NO: 29009 - DNA, 20 bp, synthetic construct
  misc_feature 1..20: note = Description of Artificial Sequence: Synthetic oligonucleotide
  misc_feature 1..20: note = Target: FXN; (-) strand; PAM type: YTN; PAM sequence: TTT
  source 1..20: mol_type = other DNA
attcacccattggaaaagcc

SEQ ID NO: 29010 - DNA, 20 bp, synthetic construct
  misc_feature 1..20: note = Description of Artificial Sequence: Synthetic oligonucleotide
  misc_feature 1..20: note = Target: FXN; (-) strand; PAM type: YTN; PAM sequence: TTT
  source 1..20: mol_type = other DNA
tattcacccattggaaaagc

SEQ ID NO: 29011 - DNA, 20 bp, synthetic construct
  misc_feature 1..20: note = Description of Artificial Sequence: Synthetic oligonucleotide
  misc_feature 1..20: note = Target: FXN; (-) strand; PAM type: YTN; PAM sequence: TTT
  source 1..20: mol_type = other DNA
ttattcacccattggaaaag

SEQ ID NO: 29012 - DNA, 20 bp, synthetic construct
  misc_feature 1..20: note = Description of Artificial Sequence: Synthetic oligonucleotide
  misc_feature 1..20: note = Target: FXN; (-) strand; PAM type: YTN; PAM sequence: TTA
  source 1..20: mol_type = other DNA
atggaatgtgtttttattca

SEQ ID NO: 29013 - DNA, 20 bp, synthetic construct
  misc_feature 1..20: note = Description of Artificial Sequence: Synthetic oligonucleotide
  misc_feature 1..20: note = Target: FXN; (-) strand; PAM type: YTN; PAM sequence: CTT
  source 1..20: mol_type = other DNA
aatggaatgtgtttttattc

SEQ ID NO: 29014 - DNA, 20 bp, synthetic construct
  misc_feature 1..20: note = Description of Artificial Sequence: Synthetic oligonucleotide
  misc_feature 1..20: note = Target: FXN; (-) strand; PAM type: YTN; PAM sequence: TTG
  source 1..20: mol_type = other DNA
acttaatggaatgtgttttt

SEQ ID NO: 29015 - DNA, 20 bp, synthetic construct
  misc_feature 1..20: note = Description of Artificial Sequence: Synthetic oligonucleotide
  misc_feature 1..20: note = Target: FXN; (-) strand; PAM type: YTN; PAM sequence: CTT
  source 1..20: mol_type = other DNA
gacttaatggaatgtgtttt

SEQ ID NO: 29016 - DNA, 20 bp, synthetic construct
  misc_feature 1..20: note = Description of Artificial Sequence: Synthetic oligonucleotide
  misc_feature 1..20: note = Target: FXN; (-) strand; PAM type: YTN; PAM sequence: CTC
  source 1..20: mol_type = other DNA
ccagcttgacttaatggaat

SEQ ID NO: 29017 - DNA, 20 bp, synthetic construct
  misc_feature 1..20: note = Description of Artificial Sequence: Synthetic oligonucleotide
  misc_feature 1..20: note = Target: FXN; (-) strand; PAM type: YTN; PAM sequence: CTG
  source 1..20: mol_type = other DNA
ctcccagcttgacttaatgg

SEQ ID NO: 29018 - DNA, 20 bp, synthetic construct
  misc_feature 1..20: note = Description of Artificial Sequence: Synthetic oligonucleotide
  misc_feature 1..20: note = Target: FXN; (-) strand; PAM type: YTN; PAM sequence: CTA
  source 1..20: mol_type = other DNA
taggtatatgccactgctcc

SEQ ID NO: 29019 - DNA, 20 bp, synthetic construct
  misc_feature 1..20: note = Description of Artificial Sequence: Synthetic oligonucleotide
  misc_feature 1..20: note = Target: FXN; (-) strand; PAM type: YTN; PAM sequence: CTG
  source 1..20: mol_type = other DNA
ggactataggtatatgccac

SEQ ID NO: 29020 - DNA, 20 bp, synthetic construct
  misc_feature 1..20: note = Description of Artificial Sequence: Synthetic oligonucleotide
  misc_feature 1..20: note = Target: FXN; (-) strand; PAM type: YTN; PAM sequence: CTG
  source 1..20: mol_type = other DNA
tgcagctgggactataggta

SEQ ID NO: 29021 - DNA, 20 bp, synthetic construct
  misc_feature 1..20: note = Description of Artificial Sequence: Synthetic oligonucleotide
  misc_feature 1..20: note = Target: FXN; (-) strand; PAM type: YTN; PAM sequence: CTC
  source 1..20: mol_type = other DNA
ctgtgcagctgggactatag

SEQ ID NO: 29022 - DNA, 20 bp, synthetic construct
  misc_feature 1..20: note = Description of Artificial Sequence: Synthetic oligonucleotide
  misc_feature 1..20: note = Target: FXN; (-) strand; PAM type: YTN; PAM sequence: CTC
  source 1..20: mol_type = other DNA
agcctcctgtgcagctggga

SEQ ID NO: 29023 - DNA, 20 bp, synthetic construct
  misc_feature 1..20: note = Description of Artificial Sequence: Synthetic oligonucleotide
  misc_feature 1..20: note = Target: FXN; (-) strand; PAM type: YTN; PAM sequence: CTG
  source 1..20: mol_type = other DNA
tctcagcctcctgtgcagct

SEQ ID NO: 29024 - DNA, 20 bp, synthetic construct
  misc_feature 1..20: note = Description of Artificial Sequence: Synthetic oligonucleotide
  misc_feature 1..20: note = Target: FXN; (-) strand; PAM type: YTN; PAM sequence: CTC
  source 1..20: mol_type = other DNA
ctgtctcagcctcctgtgca

SEQ ID NO: 29025 - DNA, 20 bp, synthetic construct
  misc_feature 1..20: note = Description of Artificial Sequence: Synthetic oligonucleotide
  misc_feature 1..20: note = Target: FXN; (-) strand; PAM type: YTN; PAM sequence: TTC
  source 1..20: mol_type = other DNA
aagcaatcctcctgtctcag

SEQ ID NO: 29026 - DNA, 20 bp, synthetic construct
  misc_feature 1..20: note = Description of Artificial Sequence: Synthetic oligonucleotide
  misc_feature 1..20: note = Target: FXN; (-) strand; PAM type: YTN; PAM sequence: CTT
  source 1..20: mol_type = other DNA
caagcaatcctcctgtctca

SEQ ID NO: 29027 - DNA, 20 bp, synthetic construct
  misc_feature 1..20: note = Description of Artificial Sequence: Synthetic oligonucleotide
  misc_feature 1..20: note = Target: FXN; (-) strand; PAM type: YTN; PAM sequence: CTG
  source 1..20: mol_type = other DNA
gcttcaagcaatcctcctgt

SEQ ID NO: 29028 - DNA, 20 bp, synthetic construct
  misc_feature 1..20: note = Description of Artificial Sequence: Synthetic oligonucleotide
  misc_feature 1..20: note = Target: FXN; (-) strand; PAM type: YTN; PAM sequence: TTC
  source 1..20: mol_type = other DNA
ctggcttcaagcaatcctcc

SEQ ID NO: 29029 - DNA, 20 bp, synthetic construct
  misc_feature 1..20: note = Description of Artificial Sequence: Synthetic oligonucleotide
  misc_feature 1..20: note = Target: FXN; (-) strand; PAM type: YTN; PAM sequence: CTC
  source 1..20: mol_type = other DNA
caattcctggcttcaagcaa

SEQ ID NO: 29030 - DNA, 20 bp, synthetic construct
  misc_feature 1..20: note = Description of Artificial Sequence: Synthetic oligonucleotide
  misc_feature 1..20: note = Target: FXN; (-) strand; PAM type: YTN; PAM sequence: CTG
  source 1..20: mol_type = other DNA
atctccaattcctggcttca

SEQ ID NO: 29031 - DNA, 20 bp, synthetic construct
  misc_feature 1..20: note = Description of Artificial Sequence: Synthetic oligonucleotide
  misc_feature 1..20: note = Target: FXN; (-) strand; PAM type: YTN; PAM sequence: TTG
  source 1..20: mol_type = other DNA
cccaggctgatctccaattc

SEQ ID NO: 29032 - DNA, 20 bp, synthetic construct
  misc_feature 1..20: note = Description of Artificial Sequence: Synthetic oligonucleotide
  misc_feature 1..20: note = Target: FXN; (-) strand; PAM type: YTN; PAM sequence: CTG
  source 1..20: mol_type = other DNA
tgttgcccaggctgatctcc

SEQ ID NO: 29033 - DNA, 20 bp, synthetic construct
  misc_feature 1..20: note = Description of Artificial Sequence: Synthetic oligonucleotide
  misc_feature 1..20: note = Target: FXN; (-) strand; PAM type: YTN; PAM sequence: TTG
  source 1..20: mol_type = other DNA
ctgtgttgcccaggctgatc

SEQ ID NO: 29034 - DNA, 20 bp, synthetic construct
  misc_feature 1..20: note = Description of Artificial Sequence: Synthetic oligonucleotide
  misc_feature 1..20: note = Target: FXN; (-) strand; PAM type: YTN; PAM sequence: CTT
  source 1..20: mol_type = other DNA
gctgtgttgcccaggctgat

SEQ ID NO: 29035 - DNA, 20 bp, synthetic construct
  misc_feature 1..20: note = Description of Artificial Sequence: Synthetic oligonucleotide
  misc_feature 1..20: note = Target: FXN; (-) strand; PAM type: YTN; PAM sequence: TTA
  source 1..20: mol_type = other DNA
agagataggatcttgctgtg

SEQ ID NO: 29036 - DNA, 20 bp, synthetic construct
  misc_feature 1..20: note = Description of Artificial Sequence: Synthetic oligonucleotide
  misc_feature 1..20: note = Target: FXN; (-) strand; PAM type: YTN; PAM sequence: TTT
  source 1..20: mol_type = other DNA
aagagataggatcttgctgt

SEQ ID NO: 29037 - DNA, 20 bp, synthetic construct
  misc_feature 1..20: note = Description of Artificial Sequence: Synthetic oligonucleotide
  misc_feature 1..20: note = Target: FXN; (-) strand; PAM type: YTN; PAM sequence: TTT
  source 1..20: mol_type = other DNA
taagagataggatcttgctg

SEQ ID NO: 29038 - DNA, 20 bp, synthetic construct
  misc_feature 1..20: note = Description of Artificial Sequence: Synthetic oligonucleotide
  misc_feature 1..20: note = Target: FXN; (-) strand; PAM type: YTN; PAM sequence: TTT
  source 1..20: mol_type = other DNA
ttaagagataggatcttgct

SEQ ID NO: 29039 - DNA, 20 bp, synthetic construct
  misc_feature 1..20: note = Description of Artificial Sequence: Synthetic oligonucleotide
  misc_feature 1..20: note = Target: FXN; (-) strand; PAM type: YTN; PAM sequence: TTT
  source 1..20: mol_type = other DNA
tttaagagataggatcttgc

SEQ ID NO: 29040 - DNA, 20 bp, synthetic construct
  misc_feature 1..20: note = Description of Artificial Sequence: Synthetic oligonucleotide
  misc_feature 1..20: note = Target: FXN; (-) strand; PAM type: YTN; PAM sequence: TTT
  source 1..20: mol_type = other DNA
ttttaagagataggatcttg

SEQ ID NO: 29041 - DNA, 20 bp, synthetic construct
  misc_feature 1..20: note = Description of Artificial Sequence: Synthetic oligonucleotide
  misc_feature 1..20: note = Target: FXN; (-) strand; PAM type: YTN; PAM sequence: CTT
  source 1..20: mol_type = other DNA
tttttaagagataggatctt

SEQ ID NO: 29042 - DNA, 20 bp, synthetic construct
  misc_feature 1..20: note = Description of Artificial Sequence: Synthetic oligonucleotide
  misc_feature 1..20: note = Target: FXN; (-) strand; PAM type: YTN; PAM sequence: TTC
  source 1..20: mol_type = other DNA
tttttttaagagataggatc

SEQ ID NO: 29043 - DNA, 20 bp, synthetic construct
  misc_feature 1..20: note = Description of Artificial Sequence: Synthetic oligonucleotide
  misc_feature 1..20: note = Target: FXN; (-) strand; PAM type: YTN; PAM sequence: TTT
  source 1..20: mol_type = other DNA
ctttttttaagagataggat

SEQ ID NO: 29044 - DNA, 20 bp, synthetic construct
  misc_feature 1..20: note = Description of Artificial Sequence: Synthetic oligonucleotide
  misc_feature 1..20: note = Target: FXN; (-) strand; PAM type: YTN; PAM sequence: TTT
  source 1..20: mol_type = other DNA
tctttttttaagagatagga

SEQ ID NO: 29045 - DNA, 20 bp, synthetic construct
  misc_feature 1..20: note = Description of Artificial Sequence: Synthetic oligonucleotide
  misc_feature 1..20: note = Target: FXN; (-) strand; PAM type: YTN; PAM sequence: TTT
  source 1..20: mol_type = other DNA
ttctttttttaagagatagg

SEQ ID NO: 29046 - DNA, 20 bp, synthetic construct
  misc_feature 1..20: note = Description of Artificial Sequence: Synthetic oligonucleotide
  misc_feature 1..20: note = Target: FXN; (-) strand; PAM type: YTN; PAM sequence: TTT
  source 1..20: mol_type = other DNA
tttctttttttaagagatag

SEQ ID NO: 29047 - DNA, 20 bp, synthetic construct
  misc_feature 1..20: note = Description of Artificial Sequence: Synthetic oligonucleotide
  misc_feature 1..20: note = Target: FXN; (-) strand; PAM type: YTN; PAM sequence: TTT
  source 1..20: mol_type = other DNA
ttttctttttttaagagata

SEQ ID NO: 29048 - DNA, 20 bp, synthetic construct
  misc_feature 1..20: note = Description of Artificial Sequence: Synthetic oligonucleotide
  misc_feature 1..20: note = Target: FXN; (-) strand; PAM type: YTN; PAM sequence: TTT
  source 1..20: mol_type = other DNA
tttttctttttttaagagat

SEQ ID NO: 29049 - DNA, 20 bp, synthetic construct
  misc_feature 1..20: note = Description of Artificial Sequence: Synthetic oligonucleotide
  misc_feature 1..20: note = Target: FXN; (-) strand; PAM type: YTN; PAM sequence: TTT
  source 1..20: mol_type = other DNA
ttttttctttttttaagaga

SEQ ID NO: 29050 - DNA, 20 bp, synthetic construct
  misc_feature 1..20: note = Description of Artificial Sequence: Synthetic oligonucleotide
  misc_feature 1..20: note = Target: FXN; (-) strand; PAM type: YTN; PAM sequence: TTA
  source 1..20: mol_type = other DNA
ataggtttttttttcttttt

SEQ ID NO: 29051 - DNA, 20 bp, synthetic construct
  misc_feature 1..20: note = Description of Artificial Sequence: Synthetic oligonucleotide
  misc_feature 1..20: note = Target: FXN; (-) strand; PAM type: YTN; PAM sequence: TTA
  source 1..20: mol_type = other DNA
ttaataggtttttttttctt

SEQ ID NO: 29052 - DNA, 20 bp, synthetic construct
  misc_feature 1..20: note = Description of Artificial Sequence: Synthetic oligonucleotide
  misc_feature 1..20: note = Target: FXN; (-) strand; PAM type: YTN; PAM sequence: TTA
  source 1..20: mol_type = other DNA
ttattaataggttttttttt

SEQ ID NO: 29053 - DNA, 20 bp, synthetic construct
  misc_feature 1..20: note = Description of Artificial Sequence: Synthetic oligonucleotide
  misc_feature 1..20: note = Target: FXN; (-) strand; PAM type: YTN; PAM sequence: TTT
  source 1..20: mol_type = other DNA
attattaataggtttttttt

SEQ ID NO: 29054 - DNA, 20 bp, synthetic construct
  misc_feature 1..20: note = Description of Artificial Sequence: Synthetic oligonucleotide
  misc_feature 1..20: note = Target: FXN; (-) strand; PAM type: YTN; PAM sequence: TTT
  source 1..20: mol_type = other DNA
tattattaataggttttttt

SEQ ID NO: 29055 - DNA, 20 bp, synthetic construct
  misc_feature 1..20: note = Description of Artificial Sequence: Synthetic oligonucleotide
  misc_feature 1..20: note = Target: FXN; (-) strand; PAM type: YTN; PAM sequence: CTG
  source 1..20: mol_type = other DNA
ttttattattaataggtttt

SEQ ID NO: 29056 - DNA, 20 bp, synthetic construct
  misc_feature 1..20: note = Description of Artificial Sequence: Synthetic oligonucleotide
  misc_feature 1..20: note = Target: FXN; (-) strand; PAM type: YTN; PAM sequence: TTA
  source 1..20: mol_type = other DNA
tactgttttattattaatag

SEQ ID NO: 29057 - DNA, 20 bp, synthetic construct
  misc_feature 1..20: note = Description of Artificial Sequence: Synthetic oligonucleotide
  misc_feature 1..20: note = Target: FXN; (-) strand; PAM type: YTN; PAM sequence: TTT
  source 1..20: mol_type = other DNA
atactgttttattattaata

SEQ ID NO: 29058 - DNA, 20 bp, synthetic construct
  misc_feature 1..20: note = Description of Artificial Sequence: Synthetic oligonucleotide
  misc_feature 1..20: note = Target: FXN; (-) strand; PAM type: YTN; PAM sequence: TTG
  source 1..20: mol_type = other DNA
tttatactgttttattatta

SEQ ID NO: 29059 - DNA, 20 bp, synthetic construct
  misc_feature 1..20: note = Description of Artificial Sequence: Synthetic oligonucleotide
  misc_feature 1..20: note = Target: FXN; (-) strand; PAM type: YTN; PAM sequence: TTT
  source 1..20: mol_type = other DNA
gtttatactgttttattatt

SEQ ID NO: 29060 - DNA, 20 bp, synthetic construct
  misc_feature 1..20: note = Description of Artificial Sequence: Synthetic oligonucleotide
  misc_feature 1..20: note = Target: FXN; (-) strand; PAM type: YTN; PAM sequence: TTT
  source 1..20: mol_type = other DNA
tgtttatactgttttattat

SEQ ID NO: 29061 - DNA, 20 bp, synthetic construct
  misc_feature 1..20: note = Description of Artificial Sequence: Synthetic oligonucleotide
  misc_feature 1..20: note = Target: FXN; (-) strand; PAM type: YTN; PAM sequence: CTT
  source 1..20: mol_type = other DNA
ttgtttatactgttttatta

SEQ ID NO: 29062 - DNA, 20 bp, synthetic construct
  misc_feature 1..20: note = Description of Artificial Sequence: Synthetic oligonucleotide
  misc_feature 1..20: note = Target: FXN; (-) strand; PAM type: YTN; PAM sequence: TTA
  source 1..20: mol_type = other DNA
gcttttgtttatactgtttt

SEQ ID NO: 29063 - DNA, 20 bp, synthetic construct
  misc_feature 1..20: note = Description of Artificial Sequence: Synthetic oligonucleotide
  misc_feature 1..20: note = Target: FXN; (-) strand; PAM type: YTN; PAM sequence: TTT
  source 1..20: mol_type = other DNA
agcttttgtttatactgttt

SEQ ID NO: 29064 - DNA, 20 bp, synthetic construct
  misc_feature 1..20: note = Description of Artificial Sequence: Synthetic oligonucleotide
  misc_feature 1..20: note = Target: FXN; (-) strand; PAM type: YTN; PAM sequence: CTA
  source 1..20: mol_type = other DNA
tttagcttttgtttatactg

SEQ ID NO: 29065 - DNA, 20 bp, synthetic construct
  misc_feature 1..20: note = Description of Artificial Sequence: Synthetic oligonucleotide
  misc_feature 1..20: note = Target: FXN; (-) strand; PAM type: YTN; PAM sequence: TTA
  source 1..20: mol_type = other DNA
cctatttagcttttgtttat

SEQ ID NO: 29066 - DNA, 20 bp, synthetic construct
  misc_feature 1..20: note = Description of Artificial Sequence: Synthetic oligonucleotide
  misc_feature 1..20: note = Target: FXN; (-) strand; PAM type: YTN; PAM sequence: TTT
  source 1..20: mol_type = other DNA
acctatttagcttttgttta

SEQ ID NO: 29067 - DNA, 20 bp, synthetic construct
  misc_feature 1..20: note = Description of Artificial Sequence: Synthetic oligonucleotide
  misc_feature 1..20: note = Target: FXN; (-) strand; PAM type: YTN; PAM sequence: TTT
  source 1..20: mol_type = other DNA
tacctatttagcttttgttt

SEQ ID NO: 29068 - DNA, 20 bp, synthetic construct
  misc_feature 1..20: note = Description of Artificial Sequence: Synthetic oligonucleotide
  misc_feature 1..20: note = Target: FXN; (-) strand; PAM type: YTN; PAM sequence: TTC
  source 1..20: mol_type = other DNA
agaaaaaatattttacctat

SEQ ID NO: 29069 - DNA, 20 bp, synthetic construct
  misc_feature 1..20: note = Description of Artificial Sequence: Synthetic oligonucleotide
  misc_feature 1..20: note = Target: FXN; (-) strand; PAM type: YTN; PAM sequence: TTT
  source 1..20: mol_type = other DNA
cagaaaaaatattttaccta

SEQ ID NO: 29070 - DNA, 20 bp, synthetic construct
  misc_feature 1..20: note = Description of Artificial Sequence: Synthetic oligonucleotide
  misc_feature 1..20: note = Target: FXN; (-) strand; PAM type: YTN; PAM sequence: TTA
  source 1..20: mol_type = other DNA
tttcagaaaaaatattttac

SEQ ID NO: 29071 - DNA, 20 bp, synthetic construct
  misc_feature 1..20: note = Description of Artificial Sequence: Synthetic oligonucleotide
  misc_feature 1..20: note = Target: FXN; (-) strand; PAM type: YTN; PAM sequence: TTT
  source 1..20: mol_type = other DNA
atttcagaaaaaatatttta

SEQ ID NO: 29072 - DNA, 20 bp, synthetic construct
  misc_feature 1..20: note = Description of Artificial Sequence: Synthetic oligonucleotide
  misc_feature 1..20: note = Target: FXN; (-) strand; PAM type: YTN; PAM sequence: TTT
  source 1..20: mol_type = other DNA
tatttcagaaaaaatatttt

SEQ ID NO: 29073 - DNA, 20 bp, synthetic construct
  misc_feature 1..20: note = Description of Artificial Sequence: Synthetic oligonucleotide
  misc_feature 1..20: note = Target: FXN; (-) strand; PAM type: YTN; PAM sequence: CTC
  source 1..20: mol_type = other DNA
aaaaaataattttatttcag

SEQ ID NO: 29074 - DNA, 20 bp, synthetic construct
  misc_feature 1..20: note = Description of Artificial Sequence: Synthetic oligonucleotide
  misc_feature 1..20: note = Target: FXN; (-) strand; PAM type: YTN; PAM sequence: TTC
  source 1..20: mol_type = other DNA
catcagactcaaaaaataat

SEQ ID NO: 29075 - DNA, 20 bp, synthetic construct
  misc_feature 1..20: note = Description of Artificial Sequence: Synthetic oligonucleotide
  misc_feature 1..20: note = Target: FXN; (-) strand; PAM type: YTN; PAM sequence: TTT
  source 1..20: mol_type = other DNA
ccatcagactcaaaaaataa

SEQ ID NO: 29076 - DNA, 20 bp, synthetic construct
  misc_feature 1..20: note = Description of Artificial Sequence: Synthetic oligonucleotide
  misc_feature 1..20: note = Target: FXN; (-) strand; PAM type: YTN; PAM sequence: TTA
  source 1..20: mol_type = other DNA
aacatttccatcagactcaa

SEQ ID NO: 29077 - DNA, 20 bp, synthetic construct
  misc_feature 1..20: note = Description of Artificial Sequence: Synthetic oligonucleotide
  misc_feature 1..20: note = Target: FXN; (-) strand; PAM type: YTN; PAM sequence: CTT
  source 1..20: mol_type = other DNA
aaacatttccatcagactca

SEQ ID NO: 29078 - DNA, 20 bp, synthetic construct
  misc_feature 1..20: note = Description of Artificial Sequence: Synthetic oligonucleotide
  misc_feature 1..20: note = Target: FXN; (-) strand; PAM type: YTN; PAM sequence: CTG
  source 1..20: mol_type = other DNA
cacttaaacatttccatcag

SEQ ID NO: 29079 - DNA, 20 bp, synthetic construct
  misc_feature 1..20: note = Description of Artificial Sequence: Synthetic oligonucleotide
  misc_feature 1..20: note = Target: FXN; (-) strand; PAM type: YTN; PAM sequence: CTA
  source 1..20: mol_type = other DNA
ctgcacttaaacatttccat

SEQ ID NO: 29080 - DNA, 20 bp, synthetic construct
  misc_feature 1..20: note = Description of Artificial Sequence: Synthetic oligonucleotide
  misc_feature 1..20: note = Target: FXN; (-) strand; PAM type: YTN; PAM sequence: CTG
  source 1..20: mol_type = other DNA
gcctactgcacttaaacatt

SEQ ID NO: 29081 - DNA, 20 bp, synthetic construct
  misc_feature 1..20: note = Description of Artificial Sequence: Synthetic oligonucleotide
  misc_feature 1..20: note = Target: FXN; (-) strand; PAM type: YTN; PAM sequence: CTG
  source 1..20: mol_type = other DNA
gcactggcctactgcactta

SEQ ID NO: 29082 - DNA, 20 bp, synthetic construct
  misc_feature 1..20: note = Description of Artificial Sequence: Synthetic oligonucleotide
  misc_feature 1..20: note = Target: FXN; (-) strand; PAM type: YTN; PAM sequence: CTC
  source 1..20: mol_type = other DNA
actggcactggcctactgca

SEQ ID NO: 29083 - DNA, 20 bp, synthetic construct
  misc_feature 1..20: note = Description of Artificial Sequence: Synthetic oligonucleotide
  misc_feature 1..20: note = Target: FXN; (-) strand; PAM type: YTN; PAM sequence: TTC
  source 1..20: mol_type = other DNA
tcactggcactggcctactg

SEQ ID NO: 29084 - DNA, 20 bp, synthetic construct
  misc_feature 1..20: note = Description of Artificial Sequence: Synthetic oligonucleotide
  misc_feature 1..20: note = Target: FXN; (-) strand; PAM type: YTN; PAM sequence: TTT
  source 1..20: mol_type = other DNA
ctcactggcactggcctact

SEQ ID NO: 29085 - DNA, 20 bp, synthetic construct
  misc_feature 1..20: note = Description of Artificial Sequence: Synthetic oligonucleotide
  misc_feature 1..20: note = Target: FXN; (-) strand; PAM type: YTN; PAM sequence: TTT
  source 1..20: mol_type = other DNA
tctcactggcactggcctac

SEQ ID NO: 29086 - DNA, 20 bp, synthetic construct
  misc_feature 1..20: note = Description of Artificial Sequence: Synthetic oligonucleotide
  misc_feature 1..20: note = Target: FXN; (-) strand; PAM type: YTN; PAM sequence: TTA
  source 1..20: mol_type = other DNA
ttttctcactggcactggcc

SEQ ID NO: 29087 - DNA, 20 bp, synthetic construct
  misc_feature 1..20: note = Description of Artificial Sequence: Synthetic oligonucleotide
  misc_feature 1..20: note = Target: FXN; (-) strand; PAM type: YTN; PAM sequence: TTT
  source 1..20: mol_type = other DNA
attttctcactggcactggc

SEQ ID NO: 29088 - DNA, 20 bp, synthetic construct
  misc_feature 1..20: note = Description of Artificial Sequence: Synthetic oligonucleotide
  misc_feature 1..20: note = Target: FXN; (-) strand; PAM type: YTN; PAM sequence: TTA
  source 1..20: mol_type = other DNA
tttattttctcactggcact

SEQ ID NO: 29089 - DNA, 20 bp, synthetic construct
  misc_feature 1..20: note = Description of Artificial Sequence: Synthetic oligonucleotide
  misc_feature 1..20: note = Target: FXN; (-) strand; PAM type: YTN; PAM sequence: TTC
  source 1..20: mol_type = other DNA
agtagaagcaagatgcaaac

SEQ ID NO: 29090 - DNA, 20 bp, synthetic construct
  misc_feature 1..20: note = Description of Artificial Sequence: Synthetic oligonucleotide
  misc_feature 1..20: note = Target: FXN; (-) strand; PAM type: YTN; PAM sequence: TTT
  source 1..20: mol_type = other DNA
cagtagaagcaagatgcaaa

SEQ ID NO: 29091 - DNA, 20 bp, synthetic construct
  misc_feature 1..20: note = Description of Artificial Sequence: Synthetic oligonucleotide
  misc_feature 1..20: note = Target: FXN; (-) strand; PAM type: YTN; PAM sequence: CTT
  source 1..20: mol_type = other DNA
tcagtagaagcaagatgcaa

SEQ ID NO: 29092 - DNA, 20 bp, synthetic construct
  misc_feature 1..20: note = Description of Artificial Sequence: Synthetic oligonucleotide
  misc_feature 1..20: note = Target: FXN; (-) strand; PAM type: YTN; PAM sequence: CTG
  source 1..20: mol_type = other DNA
aaactttcagtagaagcaag

SEQ ID NO: 29093 - DNA, 20 bp, synthetic construct
  misc_feature 1..20: note = Description of Artificial Sequence: Synthetic oligonucleotide
  misc_feature 1..20: note = Target: FXN; (-) strand; PAM type: YTN; PAM sequence: CTA
  source 1..20: mol_type = other DNA
agtaagtggggtgcactgaa

SEQ ID NO: 29094 - DNA, 20 bp, synthetic construct
  misc_feature 1..20: note = Description of Artificial Sequence: Synthetic oligonucleotide
  misc_feature 1..20: note = Target: FXN; (-) strand; PAM type: YTN; PAM sequence: TTC
  source 1..20: mol_type = other DNA
taagtaagtggggtgcactg

SEQ ID NO: 29095 - DNA, 20 bp, synthetic construct
  misc_feature 1..20: note = Description of Artificial Sequence: Synthetic oligonucleotide
  misc_feature 1..20: note = Target: FXN; (-) strand; PAM type: YTN; PAM sequence: CTG
  source 1..20: mol_type = other DNA
tgtcccagataaaggagtac

SEQ ID NO: 29096 - DNA, 20 bp, synthetic construct
  misc_feature 1..20: note = Description of Artificial Sequence: Synthetic oligonucleotide
  misc_feature 1..20: note = Target: FXN; (-) strand; PAM type: YTN; PAM sequence: TTG
  source 1..20: mol_type = other DNA
tgctgtgtcccagataaagg

SEQ ID NO: 29097 - DNA, 20 bp, synthetic construct
  misc_feature 1..20: note = Description of Artificial Sequence: Synthetic oligonucleotide
  misc_feature 1..20: note = Target: FXN; (-) strand; PAM type: YTN; PAM sequence: TTT
  source 1..20: mol_type = other DNA
gtgctgtgtcccagataaag

SEQ ID NO: 29098 - DNA, 20 bp, synthetic construct
  misc_feature 1..20: note = Description of Artificial Sequence: Synthetic oligonucleotide
  misc_feature 1..20: note = Target: FXN; (-) strand; PAM type: YTN; PAM sequence: TTT
  source 1..20: mol_type = other DNA
tgtgctgtgtcccagataaa

SEQ ID NO: 29099 - DNA, 20 bp, synthetic construct
  misc_feature 1..20: note = Description of Artificial Sequence: Synthetic oligonucleotide
  misc_feature 1..20: note = Target: FXN; (-) strand; PAM type: YTN; PAM sequence: CTT
  source 1..20: mol_type = other DNA
ttgtgctgtgtcccagataa

SEQ ID NO: 29100 - DNA, 20 bp, synthetic construct
  misc_feature 1..20: note = Description of Artificial Sequence: Synthetic oligonucleotide
  misc_feature 1..20: note = Target: FXN; (-) strand; PAM type: YTN; PAM sequence: CTC
  source 1..20: mol_type = other DNA
ttttgtgctgtgtcccagat

SEQ ID NO: 29101 - DNA, 20 bp, synthetic construct
  misc_feature 1..20: note = Description of Artificial Sequence: Synthetic oligonucleotide
  misc_feature 1..20: note = Target: FXN; (-) strand; PAM type: YTN; PAM sequence: CTG
  source 1..20: mol_type = other DNA
catacctcttttgtgctgtg

SEQ ID NO: 29102 - DNA, 20 bp, synthetic construct
  misc_feature 1..20: note = Description of Artificial Sequence: Synthetic oligonucleotide
  misc_feature 1..20: note = Target: FXN; (-) strand; PAM type: YTN; PAM sequence: TTC
  source 1..20: mol_type = other DNA
atgtcagagcagccccactg

SEQ ID NO: 29103 - DNA, 20 bp, synthetic construct
  misc_feature 1..20: note = Description of Artificial Sequence: Synthetic oligonucleotide
  misc_feature 1..20: note = Target: FXN; (-) strand; PAM type: YTN; PAM sequence: TTT
  source 1..20: mol_type = other DNA
catgtcagagcagccccact

SEQ ID NO: 29104 - DNA, 20 bp, synthetic construct
  misc_feature 1..20: note = Description of Artificial Sequence: Synthetic oligonucleotide
  misc_feature 1..20: note = Target: FXN; (-) strand; PAM type: YTN; PAM sequence: CTT
  source 1..20: mol_type = other DNA
tcatgtcagagcagccccac

SEQ ID NO: 29105 - DNA, 20 bp, synthetic construct
  misc_feature 1..20: note = Description of Artificial Sequence: Synthetic oligonucleotide
  misc_feature 1..20: note = Target: FXN; (-) strand; PAM type: YTN; PAM sequence: TTC
  source 1..20: mol_type = other DNA
cactttcatgtcagagcagc

SEQ ID NO: 29106 - DNA, 20 bp, synthetic construct
  misc_feature 1..20: note = Description of Artificial Sequence: Synthetic oligonucleotide
  misc_feature 1..20: note = Target: FXN; (-) strand; PAM type: YTN; PAM sequence: CTT
  source 1..20: mol_type = other DNA
ccactttcatgtcagagcag

SEQ ID NO: 29107 - DNA, 20 bp, synthetic construct
  misc_feature 1..20: note = Description of Artificial Sequence: Synthetic oligonucleotide
  misc_feature 1..20: note = Target: FXN; (-) strand; PAM type: YTN; PAM sequence: TTA
  source 1..20: mol_type = other DNA
acttccactttcatgtcaga

SEQ ID NO: 29108 - DNA, 20 bp, synthetic construct
  misc_feature 1..20: note = Description of Artificial Sequence: Synthetic oligonucleotide
  misc_feature 1..20: note = Target: FXN; (-) strand; PAM type: YTN; PAM sequence: CTT
  source 1..20: mol_type = other DNA
aacttccactttcatgtcag

SEQ ID NO: 29109 - DNA, 20 bp, synthetic construct
  misc_feature 1..20: note = Description of Artificial Sequence: Synthetic oligonucleotide
  misc_feature 1..20: note = Target: FXN; (-) strand; PAM type: YTN; PAM sequence: TTC
  source 1..20: mol_type = other DNA
cttaacttccactttcatgt

SEQ ID NO: 29110 - DNA, 20 bp, synthetic construct
  misc_feature 1..20: note = Description of Artificial Sequence: Synthetic oligonucleotide
  misc_feature 1..20: note = Target: FXN; (-) strand; PAM type: YTN; PAM sequence: CTG
  source 1..20: mol_type = other DNA
gcccacaaggaccccataag

SEQ ID NO: 29111 - DNA, 20 bp, synthetic construct
  misc_feature 1..20: note = Description of Artificial Sequence: Synthetic oligonucleotide
  misc_feature 1..20: note = Target: FXN; (-) strand; PAM type: YTN; PAM sequence: CTG
  source 1..20: mol_type = other DNA
aagggctggcccacaaggac

SEQ ID NO: 29112 - DNA, 20 bp, synthetic construct
  misc_feature 1..20: note = Description of Artificial Sequence: Synthetic oligonucleotide
  misc_feature 1..20: note = Target: FXN; (-) strand; PAM type: YTN; PAM sequence: CTA
  source 1..20: mol_type = other DNA
tatgtaaaatgaaagtaaaa

SEQ ID NO: 29113 - DNA, 20 bp, synthetic construct
  misc_feature 1..20: note = Description of Artificial Sequence: Synthetic oligonucleotide
  misc_feature 1..20: note = Target: FXN; (-) strand; PAM type: YTN; PAM sequence: TTA
  source 1..20: mol_type = other DNA
gagctatatgtaaaatgaaa

SEQ ID NO: 29114 - DNA, 20 bp, synthetic construct
  misc_feature 1..20: note = Description of Artificial Sequence: Synthetic oligonucleotide
  misc_feature 1..20: note = Target: FXN; (-) strand; PAM type: YTN; PAM sequence: TTG
  source 1..20: mol_type = other DNA
ggaacgagataatcaaacca

SEQ ID NO: 29115 - DNA, 20 bp, synthetic construct
  misc_feature 1..20: note = Description of Artificial Sequence: Synthetic oligonucleotide
  misc_feature 1..20: note = Target: FXN; (-) strand; PAM type: YTN; PAM sequence: CTT
  source 1..20: mol_type = other DNA
gggaacgagataatcaaacc

SEQ ID NO: 29116 - DNA, 20 bp, synthetic construct
  misc_feature 1..20: note = Description of Artificial Sequence: Synthetic oligonucleotide
  misc_feature 1..20: note = Target: FXN; (-) strand; PAM type: YTN; PAM sequence: CTG
  source 1..20: mol_type = other DNA
ccttgggaacgagataatca

SEQ ID NO: 29117 - DNA, 20 bp, synthetic construct
  misc_feature 1..20: note = Description of Artificial Sequence: Synthetic oligonucleotide
  misc_feature 1..20: note = Target: FXN; (-) strand; PAM type: YTN; PAM sequence: CTC
  source 1..20: mol_type = other DNA
ccactgccttgggaacgaga

SEQ ID NO: 29118 - DNA, 20 bp, synthetic construct
  misc_feature 1..20: note = Description of Artificial Sequence: Synthetic oligonucleotide
  misc_feature 1..20: note = Target: FXN; (-) strand; PAM type: YTN; PAM sequence: TTA
  source 1..20: mol_type = other DNA
aatggggatctcccactgcc

SEQ ID NO: 29119 - DNA, 20 bp, synthetic construct
  misc_feature 1..20: note = Description of Artificial Sequence: Synthetic oligonucleotide
  misc_feature 1..20: note = Target: FXN; (-) strand; PAM type: YTN; PAM sequence: CTT
  source 1..20: mol_type = other DNA
aaatggggatctcccactgc

SEQ ID NO: 29120 - DNA, 20 bp, synthetic construct
  misc_feature 1..20: note = Description of Artificial Sequence: Synthetic oligonucleotide
  misc_feature 1..20: note = Target: FXN; (-) strand; PAM type: YTN; PAM sequence: TTC
  source 1..20: mol_type = other DNA
cttaaatggggatctcccac

SEQ ID NO: 29121 - DNA, 20 bp, synthetic construct
  misc_feature 1..20: note = Description of Artificial Sequence: Synthetic oligonucleotide
  misc_feature 1..20: note = Target: FXN; (-) strand; PAM type: YTN; PAM sequence: TTT
  source 1..20: mol_type = other DNA
ccttaaatggggatctccca

SEQ ID NO: 29122 - DNA, 20 bp, synthetic construct
  misc_feature 1..20: note = Description of Artificial Sequence: Synthetic oligonucleotide
  misc_feature 1..20: note = Target: FXN; (-) strand; PAM type: YTN; PAM sequence: CTT
  source 1..20: mol_type = other DNA
tccttaaatggggatctccc

SEQ ID NO: 29123 - DNA, 20 bp, synthetic construct
  misc_feature 1..20: note = Description of Artificial Sequence: Synthetic oligonucleotide
  misc_feature 1..20: note = Target: FXN; (-) strand; PAM type: YTN; PAM sequence: TTC
  source 1..20: mol_type = other DNA
tttccttaaatggggatctc

SEQ ID NO: 29124 - DNA, 20 bp, synthetic construct
  misc_feature 1..20: note = Description of Artificial Sequence: Synthetic oligonucleotide
  misc_feature 1..20: note = Target: FXN; (-) strand; PAM type: YTN; PAM sequence: TTT
  source 1..20: mol_type = other DNA
ctttccttaaatggggatct

SEQ ID NO: 29125 - DNA, 20 bp, synthetic construct
  misc_feature 1..20: note = Description of Artificial Sequence: Synthetic oligonucleotide
  misc_feature 1..20: note = Target: FXN; (-) strand; PAM type: YTN; PAM sequence: TTT
  source 1..20: mol_type = other DNA
tctttccttaaatggggatc

SEQ ID NO: 29126 - DNA, 20 bp, synthetic construct
  misc_feature 1..20: note = Description of Artificial Sequence: Synthetic oligonucleotide
  misc_feature 1..20: note = Target: FXN; (-) strand; PAM type: YTN; PAM sequence: CTT
  source 1..20: mol_type = other DNA
ttctttccttaaatggggat

SEQ ID NO: 29127 - DNA, 20 bp, synthetic construct
  misc_feature 1..20: note = Description of Artificial Sequence: Synthetic oligonucleotide
  misc_feature 1..20: note = Target: FXN; (-) strand; PAM type: YTN; PAM sequence: CTG
  source 1..20: mol_type = other DNA
tgccaggccccttttctttc

SEQ ID NO: 29128 - DNA, 20 bp, synthetic construct
  misc_feature 1..20: note = Description of Artificial Sequence: Synthetic oligonucleotide
  misc_feature 1..20: note = Target: FXN; (-) strand; PAM type: YTN; PAM sequence: TTA
  source 1..20: mol_type = other DNA
caggcatgagccactgtgcc

SEQ ID NO: 29129 - DNA, 20 bp, synthetic construct
  misc_feature 1..20: note = Description of Artificial Sequence: Synthetic oligonucleotide
  misc_feature 1..20: note = Target: FXN; (-) strand; PAM type: YTN; PAM sequence: CTG
  source 1..20: mol_type = other DNA
ggattacaggcatgagccac

SEQ ID NO: 29130 - DNA, 20 bp, synthetic construct
  misc_feature 1..20: note = Description of Artificial Sequence: Synthetic oligonucleotide
  misc_feature 1..20: note = Target: FXN; (-) strand; PAM type: YTN; PAM sequence: CTC
  source 1..20: mol_type = other DNA
ccaaagtgctgggattacag

SEQ ID NO: 29131 - DNA, 20 bp, synthetic construct
  misc_feature 1..20: note = Description of Artificial Sequence: Synthetic oligonucleotide
  misc_feature 1..20: note = Target: FXN; (-) strand; PAM type: YTN; PAM sequence: CTC
  source 1..20: mol_type = other DNA
agcctcccaaagtgctggga

SEQ ID NO: 29132 - DNA, 20 bp, synthetic construct
  misc_feature 1..20: note = Description of Artificial Sequence: Synthetic oligonucleotide
  misc_feature 1..20: note = Target: FXN; (-) strand; PAM type: YTN; PAM sequence: TTG
  source 1..20: mol_type = other DNA
cctcagcctcccaaagtgct

SEQ ID NO: 29133 - DNA, 20 bp, synthetic construct
  misc_feature 1..20: note = Description of Artificial Sequence: Synthetic oligonucleotide
  misc_feature 1..20: note = Target: FXN; (-) strand; PAM type: YTN; PAM sequence: CTT
  source 1..20: mol_type = other DNA
gcctcagcctcccaaagtgc

SEQ ID NO: 29134 - DNA, 20 bp, synthetic construct
  misc_feature 1..20: note = Description of Artificial Sequence: Synthetic oligonucleotide
  misc_feature 1..20: note = Target: FXN; (-) strand; PAM type: YTN; PAM sequence: CTC
  source 1..20: mol_type = other DNA
aggtgatacacttgcctcag

SEQ ID NO: 29135 - DNA, 20 bp, synthetic construct
  misc_feature 1..20: note = Description of Artificial Sequence: Synthetic oligonucleotide
  misc_feature 1..20: note = Target: FXN; (-) strand; PAM type: YTN; PAM sequence: CTG
  source 1..20: mol_type = other DNA
acctcaggtgatacacttgc

SEQ ID NO: 29136 - DNA, 20 bp, synthetic construct
  misc_feature 1..20: note = Description of Artificial Sequence: Synthetic oligonucleotide
  misc_feature 1..20: note = Target: FXN; (-) strand; PAM type: YTN; PAM sequence: CTC
  source 1..20: mol_type = other DNA
ctgacctcaggtgatacact

SEQ ID NO: 29137 - DNA, 20 bp, synthetic construct
  misc_feature 1..20: note = Description of Artificial Sequence: Synthetic oligonucleotide
  misc_feature 1..20: note = Target: FXN; (-) strand; PAM type: YTN; PAM sequence: TTG
  source 1..20: mol_type = other DNA
aactcctgacctcaggtgat

SEQ ID NO: 29138 - DNA, 20 bp, synthetic construct
  misc_feature 1..20: note = Description of Artificial Sequence: Synthetic oligonucleotide
  misc_feature 1..20: note = Target: FXN; (-) strand; PAM type: YTN; PAM sequence: CTT
  source 1..20: mol_type = other DNA
gaactcctgacctcaggtga

SEQ ID NO: 29139 - DNA, 20 bp, synthetic construct
  misc_feature 1..20: note = Description of Artificial Sequence: Synthetic oligonucleotide
  misc_feature 1..20: note = Target: FXN; (-) strand; PAM type: YTN; PAM sequence: CTG
  source 1..20: mol_type = other DNA
gtcttgaactcctgacctca

SEQ ID NO: 29140 - DNA, 20 bp, synthetic construct
  misc_feature 1..20: note = Description of Artificial Sequence: Synthetic oligonucleotide
  misc_feature 1..20: note = Target: FXN; (-) strand; PAM type: YTN; PAM sequence: TTG
  source 1..20: mol_type = other DNA
gccaggctggtcttgaactc

SEQ ID NO: 29141 - DNA, 20 bp, synthetic construct
  misc_feature 1..20: note = Description of Artificial Sequence: Synthetic oligonucleotide
  misc_feature 1..20: note = Target: FXN; (-) strand; PAM type: YTN; PAM sequence: TTG
  source 1..20: mol_type = other DNA
ccatgttggccaggctggtc

SEQ ID NO: 29142 - DNA, 20 bp, synthetic construct
  misc_feature 1..20: note = Description of Artificial Sequence: Synthetic oligonucleotide
  misc_feature 1..20: note = Target: FXN; (-) strand; PAM type: YTN; PAM sequence: TTT
  source 1..20: mol_type = other DNA
gccatgttggccaggctggt

SEQ ID NO: 29143 - DNA, 20 bp, synthetic construct
  misc_feature 1..20: note = Description of Artificial Sequence: Synthetic oligonucleotide
  misc_feature 1..20: note = Target: FXN; (-) strand; PAM type: YTN; PAM sequence: TTT
  source 1..20: mol_type = other DNA
tgccatgttggccaggctgg

SEQ ID NO: 29144 - DNA, 20 bp, synthetic construct
  misc_feature 1..20: note = Description of Artificial Sequence: Synthetic oligonucleotide
  misc_feature 1..20: note = Target: FXN; (-) strand; PAM type: YTN; PAM sequence: TTA
  source 1..20: mol_type = other DNA
gtagagacgggattttgcca

SEQ ID NO: 29145 - DNA, 20 bp, synthetic construct
  misc_feature 1..20: note = Description of Artificial Sequence: Synthetic oligonucleotide
  misc_feature 1..20: note = Target: FXN; (-) strand; PAM type: YTN; PAM sequence: TTT
  source 1..20: mol_type = other DNA
agtagagacgggattttgcc

SEQ ID NO: 29146 - DNA, 20 bp, synthetic construct
  misc_feature 1..20: note = Description of Artificial Sequence: Synthetic oligonucleotide
  misc_feature 1..20: note = Target: FXN; (-) strand; PAM type: YTN; PAM sequence: TTT
  source 1..20: mol_type = other DNA
tagtagagacgggattttgc

SEQ ID NO: 29147 - DNA, 20 bp, synthetic construct
  misc_feature 1..20: note = Description of Artificial Sequence: Synthetic oligonucleotide
  misc_feature 1..20: note = Target: FXN; (-) strand; PAM type: YTN; PAM sequence: TTT
  source 1..20: mol_type = other DNA
ttagtagagacgggattttg

SEQ ID NO: 29148 - DNA, 20 bp, synthetic construct
  misc_feature 1..20: note = Description of Artificial Sequence: Synthetic oligonucleotide
  misc_feature 1..20: note = Target: FXN; (-) strand; PAM type: YTN; PAM sequence: TTA
  source 1..20: mol_type = other DNA
atatttttagtagagacggg

SEQ ID NO: 29149 - DNA, 20 bp, synthetic construct
  misc_feature 1..20: note = Description of Artificial Sequence: Synthetic oligonucleotide
  misc_feature 1..20: note = Target: FXN; (-) strand; PAM type: YTN; PAM sequence: TTT
  source 1..20: mol_type = other DNA
aatatttttagtagagacgg

SEQ ID NO: 29150 - DNA, 20 bp, synthetic construct
  misc_feature 1..20: note = Description of Artificial Sequence: Synthetic oligonucleotide
  misc_feature 1..20: note = Target: FXN; (-) strand; PAM type: YTN; PAM sequence: TTT
  source 1..20: mol_type = other DNA
taatatttttagtagagacg

SEQ ID NO: 29151 - DNA, 20 bp, synthetic construct
  misc_feature 1..20: note = Description of Artificial Sequence: Synthetic oligonucleotide
  misc_feature 1..20: note = Target: FXN; (-) strand; PAM type: YTN; PAM sequence: TTT
  source 1..20: mol_type = other DNA
ttaatatttttagtagagac

SEQ ID NO: 29152 - DNA, 20 bp, synthetic construct
  misc_feature 1..20: note = Description of Artificial Sequence: Synthetic oligonucleotide
  misc_feature 1..20: note = Target: FXN; (-) strand; PAM type: YTN; PAM sequence: TTT
  source 1..20: mol_type = other DNA
tttaatatttttagtagaga

SEQ ID NO: 29153 - DNA, 20 bp, synthetic construct
  misc_feature 1..20: note = Description of Artificial Sequence: Synthetic oligonucleotide
  misc_feature 1..20: note = Target: FXN; (-) strand; PAM type: YTN; PAM sequence: TTA
  source 1..20: mol_type = other DNA
taggcacgaaccaccacgcc

SEQ ID NO: 29154 - DNA, 20 bp, synthetic construct
  misc_feature 1..20: note = Description of Artificial Sequence: Synthetic oligonucleotide
  misc_feature 1..20: note = Target: FXN; (-) strand; PAM type: YTN; PAM sequence: CTG
  source 1..20: mol_type = other DNA
aaattataggcacgaaccac

SEQ ID NO: 29155 - DNA, 20 bp, synthetic construct
  misc_feature 1..20: note = Description of Artificial Sequence: Synthetic oligonucleotide
  misc_feature 1..20: note = Target: FXN; (-) strand; PAM type: YTN; PAM sequence: CTG
  source 1..20: mol_type = other DNA
agtagctgaaattataggca

SEQ ID NO: 29156 - DNA, 20 bp, synthetic construct
  misc_feature 1..20: note = Description of Artificial Sequence: Synthetic oligonucleotide
  misc_feature 1..20: note = Target: FXN; (-) strand; PAM type: YTN; PAM sequence: CTC
  source 1..20: mol_type = other DNA
ctgagtagctgaaattatag

SEQ ID NO: 29157 - DNA, 20 bp, synthetic construct
  misc_feature 1..20: note = Description of Artificial Sequence: Synthetic oligonucleotide
  misc_feature 1..20: note = Target: FXN; (-) strand; PAM type: YTN; PAM sequence: CTC
  source 1..20: mol_type = other DNA
agcctcctgagtagctgaaa

SEQ ID NO: 29158 - DNA, 20 bp, synthetic construct
  misc_feature 1..20: note = Description of Artificial Sequence: Synthetic oligonucleotide
  misc_feature 1..20: note = Target: FXN; (-) strand; PAM type: YTN; PAM sequence: CTG
  source 1..20: mol_type = other DNA
cctcagcctcctgagtagct

SEQ ID NO: 29159 - DNA, 20 bp, synthetic construct
  misc_feature 1..20: note = Description of Artificial Sequence: Synthetic oligonucleotide
  misc_feature 1..20: note = Target: FXN; (-) strand; PAM type: YTN; PAM sequence: CTC
  source 1..20: mol_type = other DNA
ctgcctcagcctcctgagta

SEQ ID NO: 29160 - DNA, 20 bp, synthetic construct
  misc_feature 1..20: note = Description of Artificial Sequence: Synthetic oligonucleotide
  misc_feature 1..20: note = Target: FXN; (-) strand; PAM type: YTN; PAM sequence: TTC
  source 1..20: mol_type = other DNA
tcctgcctcagcctcctgag

SEQ ID NO: 29161 - DNA, 20 bp, synthetic construct
  misc_feature 1..20: note = Description of Artificial Sequence: Synthetic oligonucleotide
  misc_feature 1..20: note = Target: FXN; (-) strand; PAM type: YTN; PAM sequence: TTA
  source 1..20: mol_type = other DNA
cagcgattctcctgcctcag

SEQ ID NO: 29162 - DNA, 20 bp, synthetic construct
  misc_feature 1..20: note = Description of Artificial Sequence: Synthetic oligonucleotide
  misc_feature 1..20: note = Target: FXN; (-) strand; PAM type: YTN; PAM sequence: CTC
  source 1..20: mol_type = other DNA
caccccccaggttacagcga

SEQ ID NO: 29163 - DNA, 20 bp, synthetic construct
  misc_feature 1..20: note = Description of Artificial Sequence: Synthetic oligonucleotide
  misc_feature 1..20: note = Target: FXN; (-) strand; PAM type: YTN; PAM sequence: CTG
  source 1..20: mol_type = other DNA
caacctccaccccccaggtt

SEQ ID NO: 29164 - DNA, 20 bp, synthetic construct
  misc_feature 1..20: note = Description of Artificial Sequence: Synthetic oligonucleotide
  misc_feature 1..20: note = Target: FXN; (-) strand; PAM type: YTN; PAM sequence: CTC
  source 1..20: mol_type = other DNA
actgcaacctccacccccca

SEQ ID NO: 29165 - DNA, 20 bp, synthetic construct
  misc_feature 1..20: note = Description of Artificial Sequence: Synthetic oligonucleotide
  misc_feature 1..20: note = Target: FXN; (-) strand; PAM type: YTN; PAM sequence: CTC
  source 1..20: mol_type = other DNA
gtctcactgcaacctccacc

SEQ ID NO: 29166 - DNA, 20 bp, synthetic construct
  misc_feature 1..20: note = Description of Artificial Sequence: Synthetic oligonucleotide
  misc_feature 1..20: note = Target: FXN; (-) strand; PAM type: YTN; PAM sequence: CTG
  source 1..20: mol_type = other DNA
gagtgaagtggcatgatctc

SEQ ID NO: 29167 - DNA, 20 bp, synthetic construct
  misc_feature 1..20: note = Description of Artificial Sequence: Synthetic oligonucleotide
  misc_feature 1..20: note = Target: FXN; (-) strand; PAM type: YTN; PAM sequence: TTG
  source 1..20: mol_type = other DNA
gccaggctggagtgaagtgg

SEQ ID NO: 29168 - DNA, 20 bp, synthetic construct
  misc_feature 1..20: note = Description of Artificial Sequence: Synthetic oligonucleotide
  misc_feature 1..20: note = Target: FXN; (-) strand; PAM type: YTN; PAM sequence: CTG
  source 1..20: mol_type = other DNA
ttggccaggctggagtgaag

SEQ ID NO: 29169 - DNA, 20 bp, synthetic construct
  misc_feature 1..20: note = Description of Artificial Sequence: Synthetic oligonucleotide
  misc_feature 1..20: note = Target: FXN; (-) strand; PAM type: YTN; PAM sequence: CTC
  source 1..20: mol_type = other DNA
tgttggccaggctggagtga

SEQ ID NO: 29170 - DNA, 20 bp, synthetic construct
  misc_feature 1..20: note = Description of Artificial Sequence: Synthetic oligonucleotide
  misc_feature 1..20: note = Target: FXN; (-) strand; PAM type: YTN; PAM sequence: TTG
  source 1..20: mol_type = other DNA
agacggagtatggctctgtt

SEQ ID NO: 29171 - DNA, 20 bp, synthetic construct
  misc_feature 1..20: note = Description of Artificial Sequence: Synthetic oligonucleotide
  misc_feature 1..20: note = Target: FXN; (-) strand; PAM type: YTN; PAM sequence: TTT
  source 1..20: mol_type = other DNA
gagacggagtatggctctgt

SEQ ID NO: 29172 - DNA, 20 bp, synthetic construct
  misc_feature 1..20: note = Description of Artificial Sequence: Synthetic oligonucleotide
  misc_feature 1..20: note = Target: FXN; (-) strand; PAM type: YTN; PAM sequence: TTA
  source 1..20: mol_type = other DNA
tttgagacggagtatggctc

SEQ ID NO: 29173 - DNA, 20 bp, synthetic construct
  misc_feature 1..20: note = Description of Artificial Sequence: Synthetic oligonucleotide
  misc_feature 1..20: note = Target: FXN; (-) strand; PAM type: YTN; PAM sequence: TTT
  source 1..20: mol_type = other DNA
atttgagacggagtatggct

SEQ ID NO: 29174 - DNA, 20 bp, synthetic construct
  misc_feature 1..20: note = Description of Artificial Sequence: Synthetic oligonucleotide
  misc_feature 1..20: note = Target: FXN; (-) strand; PAM type: YTN; PAM sequence: TTA
  source 1..20: mol_type = other DNA
tttatttgagacggagtatg

SEQ ID NO: 29175 - DNA, 20 bp, synthetic construct
  misc_feature 1..20: note = Description of Artificial Sequence: Synthetic oligonucleotide
  misc_feature 1..20: note = Target: FXN; (-) strand; PAM type: YTN; PAM sequence: TTT
  source 1..20: mol_type = other DNA
atttatttgagacggagtat

SEQ ID NO: 29176 - DNA, 20 bp, synthetic construct
  misc_feature 1..20: note = Description of Artificial Sequence: Synthetic oligonucleotide
  misc_feature 1..20: note = Target: FXN; (-) strand; PAM type: YTN; PAM sequence: TTA
  source 1..20: mol_type = other DNA
tttatttatttgagacggag

SEQ ID NO: 29177 - DNA, 20 bp, synthetic construct
  misc_feature 1..20: note = Description of Artificial Sequence: Synthetic oligonucleotide
  misc_feature 1..20: note = Target: FXN; (-) strand; PAM type: YTN; PAM sequence: TTT
  source 1..20: mol_type = other DNA
atttatttatttgagacgga

SEQ ID NO: 29178 - DNA, 20 bp, synthetic construct
  misc_feature 1..20: note = Description of Artificial Sequence: Synthetic oligonucleotide
  misc_feature 1..20: note = Target: FXN; (-) strand; PAM type: YTN; PAM sequence: TTA
  source 1..20: mol_type = other DNA
tttatttatttatttgagac

SEQ ID NO: 29179 - DNA, 20 bp, synthetic construct
  misc_feature 1..20: note = Description of Artificial Sequence: Synthetic oligonucleotide
  misc_feature 1..20: note = Target: FXN; (-) strand; PAM type: YTN; PAM sequence: TTT
  source 1..20: mol_type = other DNA
atttatttatttatttgaga

SEQ ID NO: 29180 - DNA, 20 bp, synthetic construct
  misc_feature 1..20: note = Description of Artificial Sequence: Synthetic oligonucleotide
  misc_feature 1..20: note = Target: FXN; (-) strand; PAM type: YTN; PAM sequence: TTA
  source 1..20: mol_type = other DNA
tttatttatttatttatttg

SEQ ID NO: 29181 - DNA, 20 bp, synthetic construct
  misc_feature 1..20: note = Description of Artificial Sequence: Synthetic oligonucleotide
  misc_feature 1..20: note = Target: FXN; (-) strand; PAM type: YTN; PAM sequence: TTT
  source 1..20: mol_type = other DNA
atttatttatttatttattt

SEQ ID NO: 29182 - DNA, 20 bp, synthetic construct
  misc_feature 1..20: note = Description of Artificial Sequence: Synthetic oligonucleotide
  misc_feature 1..20: note = Target: FXN; (-) strand; PAM type: YTN; PAM sequence: CTT
  source 1..20: mol_type = other DNA
tatttatttatttatttatt

SEQ ID NO: 29183 - DNA, 20 bp, synthetic construct
  misc_feature 1..20: note = Description of Artificial Sequence: Synthetic oligonucleotide
  misc_feature 1..20: note = Target: FXN; (-) strand; PAM type: YTN; PAM sequence: TTG
  source 1..20: mol_type = other DNA
aagtccctttatttatttat

SEQ ID NO: 29184 - DNA, 20 bp, synthetic construct
  misc_feature 1..20: note = Description of Artificial Sequence: Synthetic oligonucleotide
  misc_feature 1..20: note = Target: FXN; (-) strand; PAM type: YTN; PAM sequence: TTT
  source 1..20: mol_type = other DNA
gaagtccctttatttattta

SEQ ID NO: 29185 - DNA, 20 bp, synthetic construct
  misc_feature 1..20: note = Description of Artificial Sequence: Synthetic oligonucleotide
  misc_feature 1..20: note = Target: FXN; (-) strand; PAM type: YTN; PAM sequence: TTC
  source 1..20: mol_type = other DNA
atgtgtttgaagtcccttta

SEQ ID NO: 29186 - DNA, 20 bp, synthetic construct
  misc_feature 1..20: note = Description of Artificial Sequence: Synthetic oligonucleotide
  misc_feature 1..20: note = Target: FXN; (-) strand; PAM type: YTN; PAM sequence: CTG
  source 1..20: mol_type = other DNA
ttcatgtgtttgaagtccct

SEQ ID NO: 29187 - DNA, 20 bp, synthetic construct
  misc_feature 1..20: note = Description of Artificial Sequence: Synthetic oligonucleotide
  misc_feature 1..20: note = Target: FXN; (-) strand; PAM type: YTN; PAM sequence: CTG
  source 1..20: mol_type = other DNA
ctgttcatgtgtttgaagtc

SEQ ID NO: 29188 - DNA, 20 bp, synthetic construct
  misc_feature 1..20: note = Description of Artificial Sequence: Synthetic oligonucleotide
  misc_feature 1..20: note = Target: FXN; (-) strand; PAM type: YTN; PAM sequence: CTG
  source 1..20: mol_type = other DNA
gctgctgttcatgtgtttga

SEQ ID NO: 29189 - DNA, 20 bp, synthetic construct
  misc_feature 1..20: note = Description of Artificial Sequence: Synthetic oligonucleotide
  misc_feature 1..20: note = Target: FXN; (-) strand; PAM type: YTN; PAM sequence: TTC
  source 1..20: mol_type = other DNA
ccctggctgctgttcatgtg

SEQ ID NO: 29190 - DNA, 20 bp, synthetic construct
  misc_feature 1..20: note = Description of Artificial Sequence: Synthetic oligonucleotide
  misc_feature 1..20: note = Target: FXN; (-) strand; PAM type: YTN; PAM sequence: CTT
  source 1..20: mol_type = other DNA
cccctggctgctgttcatgt

SEQ ID NO: 29191 - DNA, 20 bp, synthetic construct
  misc_feature 1..20: note = Description of Artificial Sequence: Synthetic oligonucleotide
  misc_feature 1..20: note = Target: FXN; (-) strand; PAM type: YTN; PAM sequence: TTC
  source 1..20: mol_type = other DNA
ttcccctggctgctgttcat

SEQ ID NO: 29192 - DNA, 20 bp, synthetic construct
  misc_feature 1..20: note = Description of Artificial Sequence: Synthetic oligonucleotide
  misc_feature 1..20: note = Target: FXN; (-) strand; PAM type: YTN; PAM sequence: TTG
  source 1..20: mol_type = other DNA
attcttcccctggctgctgt

SEQ ID NO: 29193 - DNA, 20 bp, synthetic construct
  misc_feature 1..20: note = Description of Artificial Sequence: Synthetic oligonucleotide
  misc_feature 1..20: note = Target: FXN; (-) strand; PAM type: YTN; PAM sequence: TTT
  source 1..20: mol_type = other DNA
gattcttcccctggctgctg

SEQ ID NO: 29194 - DNA, 20 bp, synthetic construct
  misc_feature 1..20: note = Description of Artificial Sequence: Synthetic oligonucleotide
  misc_feature 1..20: note = Target: FXN; (-) strand; PAM type: YTN; PAM sequence: TTT
  source 1..20: mol_type = other DNA
tgattcttcccctggctgct

SEQ ID NO: 29195 - DNA, 20 bp, synthetic construct
  misc_feature 1..20: note = Description of Artificial Sequence: Synthetic oligonucleotide
  misc_feature 1..20: note = Target: FXN; (-) strand; PAM type: YTN; PAM sequence: TTG
  source 1..20: mol_type = other DNA
acagaatatgattttgattc

SEQ ID NO: 29196 - DNA, 20 bp, synthetic construct
  misc_feature 1..20: note = Description of Artificial Sequence: Synthetic oligonucleotide
  misc_feature 1..20: note = Target: FXN; (-) strand; PAM type: YTN; PAM sequence: CTT
  source 1..20: mol_type = other DNA
gacagaatatgattttgatt

SEQ ID NO: 29197 - DNA, 20 bp, synthetic construct
  misc_feature 1..20: note = Description of Artificial Sequence: Synthetic oligonucleotide
  misc_feature 1..20: note = Target: FXN; (-) strand; PAM type: YTN; PAM sequence: TTG
  source 1..20: mol_type = other DNA
cttgacagaatatgattttg

SEQ ID NO: 29198 - DNA, 20 bp, synthetic construct
  misc_feature 1..20: note = Description of Artificial Sequence: Synthetic oligonucleotide
  misc_feature 1..20: note = Target: FXN; (-) strand; PAM type: YTN; PAM sequence: TTT
  source 1..20: mol_type = other DNA
gcttgacagaatatgatttt

SEQ ID NO: 29199 - DNA, 20 bp, synthetic construct
  misc_feature 1..20: note = Description of Artificial Sequence: Synthetic oligonucleotide
  misc_feature 1..20: note = Target: FXN; (-) strand; PAM type: YTN; PAM sequence: TTC
  source 1..20: mol_type = other DNA
cagtttgcttgacagaatat

SEQ ID NO: 29200 - DNA, 20 bp, synthetic construct
  misc_feature 1..20: note = Description of Artificial Sequence: Synthetic oligonucleotide
  misc_feature 1..20: note = Target: FXN; (-) strand; PAM type: YTN; PAM sequence: TTT
  source 1..20: mol_type = other DNA
ccagtttgcttgacagaata

SEQ ID NO: 29201 - DNA, 20 bp, synthetic construct
  misc_feature 1..20: note = Description of Artificial Sequence: Synthetic oligonucleotide
  misc_feature 1..20: note = Target: FXN; (-) strand; PAM type: YTN; PAM sequence: TTT
  source 1..20: mol_type = other DNA
tccagtttgcttgacagaat

SEQ ID NO: 29202 - DNA, 20 bp, synthetic construct
  misc_feature 1..20: note = Description of Artificial Sequence: Synthetic oligonucleotide
  misc_feature 1..20: note = Target: FXN; (-) strand; PAM type: YTN; PAM sequence: CTT
  source 1..20: mol_type = other DNA
ttccagtttgcttgacagaa

SEQ ID NO: 29203 - DNA, 20 bp, synthetic construct
  misc_feature 1..20: note = Description of Artificial Sequence: Synthetic oligonucleotide
  misc_feature 1..20: note = Target: FXN; (-) strand; PAM type: YTN; PAM sequence: TTG
  source 1..20: mol_type = other DNA
gtacacacagtggtactttt

SEQ ID NO: 29204 - DNA, 20 bp, synthetic construct
  misc_feature 1..20: note = Description of Artificial Sequence: Synthetic oligonucleotide
  misc_feature 1..20: note = Target: FXN; (-) strand; PAM type: YTN; PAM sequence: CTA
  source 1..20: mol_type = other DNA
ttggtacacacagtggtact

SEQ ID NO: 29205 - DNA, 20 bp, synthetic construct
  misc_feature 1..20: note = Description of Artificial Sequence: Synthetic oligonucleotide
  misc_feature 1..20: note = Target: FXN; (-) strand; PAM type: YTN; PAM sequence: CTG
  source 1..20: mol_type = other DNA
tggtggggaggctattggta

SEQ ID NO: 29206 - DNA, 20 bp, synthetic construct
  misc_feature 1..20: note = Description of Artificial Sequence: Synthetic oligonucleotide
  misc_feature 1..20: note = Target: FXN; (-) strand; PAM type: YTN; PAM sequence: CTC
  source 1..20: mol_type = other DNA
ccagggtctgtggtggggag

SEQ ID NO: 29207 - DNA, 20 bp, synthetic construct
  misc_feature 1..20: note = Description of Artificial Sequence: Synthetic oligonucleotide
  misc_feature 1..20: note = Target: FXN; (-) strand; PAM type: YTN; PAM sequence: CTG
  source 1..20: mol_type = other DNA
gaccacaccataaatgaggc

SEQ ID NO: 29208 - DNA, 20 bp, synthetic construct
  misc_feature 1..20: note = Description of Artificial Sequence: Synthetic oligonucleotide
  misc_feature 1..20: note = Target: FXN; (-) strand; PAM type: YTN; PAM sequence: TTC
  source 1..20: mol_type = other DNA
acatggatgactggaccaca

SEQ ID NO: 29209 - DNA, 20 bp, synthetic construct
  misc_feature 1..20: note = Description of Artificial Sequence: Synthetic oligonucleotide
  misc_feature 1..20: note = Target: FXN; (-) strand; PAM type: YTN; PAM sequence: CTT
  source 1..20: mol_type = other DNA
cacatggatgactggaccac

SEQ ID NO: 29210 - DNA, 20 bp, synthetic construct
  misc_feature 1..20: note = Description of Artificial Sequence: Synthetic oligonucleotide
  misc_feature 1..20: note = Target: FXN; (-) strand; PAM type: YTN; PAM sequence: CTC
  source 1..20: mol_type = other DNA
atccttcacatggatgactg

SEQ ID NO: 29211 - DNA, 20 bp, synthetic construct
  misc_feature 1..20: note = Description of Artificial Sequence: Synthetic oligonucleotide
  misc_feature 1..20: note = Target: FXN; (-) strand; PAM type: YTN; PAM sequence: CTG
  source 1..20: mol_type = other DNA
gaaactcatccttcacatgg

SEQ ID NO: 29212 - DNA, 20 bp, synthetic construct
  misc_feature 1..20: note = Description of Artificial Sequence: Synthetic oligonucleotide
  misc_feature 1..20: note = Target: FXN; (-) strand; PAM type: YTN; PAM sequence: TTC
  source 1..20: mol_type = other DNA
ctggaaactcatccttcaca

SEQ ID NO: 29213 - DNA, 20 bp, synthetic construct
  misc_feature 1..20: note = Description of Artificial Sequence: Synthetic oligonucleotide
  misc_feature 1..20: note = Target: FXN; (-) strand; PAM type: YTN; PAM sequence: TTT
  source 1..20: mol_type = other DNA
cctggaaactcatccttcac

SEQ ID NO: 29214 - DNA, 20 bp, synthetic construct
  misc_feature 1..20: note = Description of Artificial Sequence: Synthetic oligonucleotide
  misc_feature 1..20: note = Target: FXN; (-) strand; PAM type: YTN; PAM sequence: TTT
  source 1..20: mol_type = other DNA
tcctggaaactcatccttca

SEQ ID NO: 29215 - DNA, 20 bp, synthetic construct
  misc_feature 1..20: note = Description of Artificial Sequence: Synthetic oligonucleotide
  misc_feature 1..20: note = Target: FXN; (-) strand; PAM type: YTN; PAM sequence: CTT
  source 1..20: mol_type = other DNA
ttcctggaaactcatccttc

SEQ ID NO: 29216 - DNA, 20 bp, synthetic construct
  misc_feature 1..20: note = Description of Artificial Sequence: Synthetic oligonucleotide
  misc_feature 1..20: note = Target: FXN; (-) strand; PAM type: YTN; PAM sequence: TTA
  source 1..20: mol_type = other DNA
ataaccttttcctggaaact

SEQ ID NO: 29217 - DNA, 20 bp, synthetic construct
  misc_feature 1..20: note = Description of Artificial Sequence: Synthetic oligonucleotide
  misc_feature 1..20: note = Target: FXN; (-) strand; PAM type: YTN; PAM sequence: TTT
  source 1..20: mol_type = other DNA
aataaccttttcctggaaac

SEQ ID NO: 29218 - DNA, 20 bp, synthetic construct
  misc_feature 1..20: note = Description of Artificial Sequence: Synthetic oligonucleotide
  misc_feature 1..20: note = Target: FXN; (-) strand; PAM type: YTN; PAM sequence: TTA
  source 1..20: mol_type = other DNA
cagtgaatatttaataacct

SEQ ID NO: 29219 - DNA, 20 bp, synthetic construct
  misc_feature 1..20: note = Description of Artificial Sequence: Synthetic oligonucleotide
  misc_feature 1..20: note = Target: FXN; (-) strand; PAM type: YTN; PAM sequence: CTC
  source 1..20: mol_type = other DNA
cagtatgttacagtgaatat

SEQ ID NO: 29220 - DNA, 20 bp, synthetic construct
  misc_feature 1..20: note = Description of Artificial Sequence: Synthetic oligonucleotide
  misc_feature 1..20: note = Target: FXN; (-) strand; PAM type: YTN; PAM sequence: CTC
  source 1..20: mol_type = other DNA
ctccagtatgttacagtgaa

SEQ ID NO: 29221 - DNA, 20 bp, synthetic construct
  misc_feature 1..20: note = Description of Artificial Sequence: Synthetic oligonucleotide
  misc_feature 1..20: note = Target: FXN; (-) strand; PAM type: YTN; PAM sequence: CTC
  source 1..20: mol_type = other DNA
acctcctccagtatgttaca

SEQ ID NO: 29222 - DNA, 20 bp, synthetic construct
  misc_feature 1..20: note = Description of Artificial Sequence: Synthetic oligonucleotide
  misc_feature 1..20: note = Target: FXN; (-) strand; PAM type: YTN; PAM sequence: TTC
  source 1..20: mol_type = other DNA
ctcacctcctccagtatgtt

SEQ ID NO: 29223 - DNA, 20 bp, synthetic construct
  misc_feature 1..20: note = Description of Artificial Sequence: Synthetic oligonucleotide
  misc_feature 1..20: note = Target: FXN; (-) strand; PAM type: YTN; PAM sequence: TTA
  source 1..20: mol_type = other DNA
tgcaattcctcacctcctcc

SEQ ID NO: 29224 - DNA, 20 bp, synthetic construct
  misc_feature 1..20: note = Description of Artificial Sequence: Synthetic oligonucleotide
  misc_feature 1..20: note = Target: FXN; (-) strand; PAM type: YTN; PAM sequence: TTG
  source 1..20: mol_type = other DNA
tattatgcaattcctcacct

SEQ ID NO: 29225 - DNA, 20 bp, synthetic construct
  misc_feature 1..20: note = Description of Artificial Sequence: Synthetic oligonucleotide
  misc_feature 1..20: note = Target: FXN; (-) strand; PAM type: YTN; PAM sequence: CTA
  source 1..20: mol_type = other DNA
agattgtattatgcaattcc

SEQ ID NO: 29226 - DNA, 20 bp, synthetic construct
  misc_feature 1..20: note = Description of Artificial Sequence: Synthetic oligonucleotide
  misc_feature 1..20: note = Target: FXN; (-) strand; PAM type: YTN; PAM sequence: TTC
  source 1..20: mol_type = other DNA
taagattgtattatgcaatt

SEQ ID NO: 29227 - DNA, 20 bp, synthetic construct
  misc_feature 1..20: note = Description of Artificial Sequence: Synthetic oligonucleotide
  misc_feature 1..20: note = Target: FXN; (-) strand; PAM type: YTN; PAM sequence: TTT
  source 1..20: mol_type = other DNA
ctaagattgtattatgcaat

SEQ ID NO: 29228 - DNA, 20 bp, synthetic construct
  misc_feature 1..20: note = Description of Artificial Sequence: Synthetic oligonucleotide
  misc_feature 1..20: note = Target: FXN; (-) strand; PAM type: YTN; PAM sequence: TTT
  source 1..20: mol_type = other DNA
tctaagattgtattatgcaa

SEQ ID NO: 29229 - DNA, 20 bp, synthetic construct
  misc_feature 1..20: note = Description of Artificial Sequence: Synthetic oligonucleotide
  misc_feature 1..20: note = Target: FXN; (-) strand; PAM type: YTN; PAM sequence: CTC
  source 1..20: mol_type = other DNA
aaaaaatagaaaggggaaaa

SEQ ID NO: 29230 - DNA, 20 bp, synthetic construct
  misc_feature 1..20: note = Description of Artificial Sequence: Synthetic oligonucleotide
  misc_feature 1..20: note = Target: FXN; (-) strand; PAM type: YTN; PAM sequence: CTG
  source 1..20: mol_type = other DNA
tctcaaaaaatagaaagggg

SEQ ID NO: 29231 - DNA, 20 bp, synthetic construct
  misc_feature 1..20: note = Description of Artificial Sequence: Synthetic oligonucleotide
  misc_feature 1..20: note = Target: FXN; (-) strand; PAM type: YTN; PAM sequence: CTG
  source 1..20: mol_type = other DNA
agtgccaaagtgagatcctg

SEQ ID NO: 29232 - DNA, 20 bp, synthetic construct
  misc_feature 1..20: note = Description of Artificial Sequence: Synthetic oligonucleotide
  misc_feature 1..20: note = Target: FXN; (-) strand; PAM type: YTN; PAM sequence: CTC
  source 1..20: mol_type = other DNA
cagcctgagtgccaaagtga

SEQ ID NO: 29233 - DNA, 20 bp, synthetic construct
  misc_feature 1..20: note = Description of Artificial Sequence: Synthetic oligonucleotide
  misc_feature 1..20: note = Target: FXN; (-) strand; PAM type: YTN; PAM sequence: CTG
  source 1..20: mol_type = other DNA
tcctccagcctgagtgccaa

SEQ ID NO: 29234 - DNA, 20 bp, synthetic construct
  misc_feature 1..20: note = Description of Artificial Sequence: Synthetic oligonucleotide
  misc_feature 1..20: note = Target: FXN; (-) strand; PAM type: YTN; PAM sequence: TTG
  source 1..20: mol_type = other DNA
taccactgtcctccagcctg

SEQ ID NO: 29235 - DNA, 20 bp, synthetic construct
  misc_feature 1..20: note = Description of Artificial Sequence: Synthetic oligonucleotide
  misc_feature 1..20: note = Target: FXN; (-) strand; PAM type: YTN; PAM sequence: TTG
  source 1..20: mol_type = other DNA
attgtaccactgtcctccag

SEQ ID NO: 29236 - DNA, 20 bp, synthetic construct
  misc_feature 1..20: note = Description of Artificial Sequence: Synthetic oligonucleotide
  misc_feature 1..20: note = Target: FXN; (-) strand; PAM type: YTN; PAM sequence: TTT
  source 1..20: mol_type = other DNA
gattgtaccactgtcctcca

SEQ ID NO: 29237 - DNA, 20 bp, synthetic construct
  misc_feature 1..20: note = Description of Artificial Sequence: Synthetic oligonucleotide
  misc_feature 1..20: note = Target: FXN; (-) strand; PAM type: YTN; PAM sequence: CTT
  source 1..20: mol_type = other DNA
tgattgtaccactgtcctcc

SEQ ID NO: 29238 - DNA, 20 bp, synthetic construct
  misc_feature 1..20: note = Description of Artificial Sequence: Synthetic oligonucleotide
  misc_feature 1..20: note = Target: FXN; (-) strand; PAM type: YTN; PAM sequence: CTG
  source 1..20: mol_type = other DNA
ccatgagctttgattgtacc

SEQ ID NO: 29239 - DNA, 20 bp, synthetic construct
  misc_feature 1..20: note = Description of Artificial Sequence: Synthetic oligonucleotide
  misc_feature 1..20: note = Target: FXN; (-) strand; PAM type: YTN; PAM sequence: TTG
  source 1..20: mol_type = other DNA
cccaagcccagggaggtcga

SEQ ID NO: 29240 - DNA, 20 bp, synthetic construct
  misc_feature 1..20: note = Description of Artificial Sequence: Synthetic oligonucleotide
  misc_feature 1..20: note = Target: FXN; (-) strand; PAM type: YTN; PAM sequence: CTG
  source 1..20: mol_type = other DNA
tgggaggattgcccaagccc

SEQ ID NO: 29241 - DNA, 20 bp, synthetic construct
  misc_feature 1..20: note = Description of Artificial Sequence: Synthetic oligonucleotide
  misc_feature 1..20: note = Target: FXN; (-) strand; PAM type: YTN; PAM sequence: CTA
  source 1..20: mol_type = other DNA
tggaggtgcacacctgtggg

SEQ ID NO: 29242 - DNA, 20 bp, synthetic construct
  misc_feature 1..20: note = Description of Artificial Sequence: Synthetic oligonucleotide
  misc_feature 1..20: note = Target: FXN; (-) strand; PAM type: YTN; PAM sequence: TTA
  source 1..20: mol_type = other DNA
gccagctatggaggtgcaca

SEQ ID NO: 29243 - DNA, 20 bp, synthetic construct
  misc_feature 1..20: note = Description of Artificial Sequence: Synthetic oligonucleotide
  misc_feature 1..20: note = Target: FXN; (-) strand; PAM type: YTN; PAM sequence: CTA
  source 1..20: mol_type = other DNA
caaaaaatacacaaattagc

SEQ ID NO: 29244 - DNA, 20 bp, synthetic construct
  misc_feature 1..20: note = Description of Artificial Sequence: Synthetic oligonucleotide
  misc_feature 1..20: note = Target: FXN; (-) strand; PAM type: YTN; PAM sequence: CTC
  source 1..20: mol_type = other DNA
tacaaaaaatacacaaatta

SEQ ID NO: 29245 - DNA, 20 bp, synthetic construct
  misc_feature 1..20: note = Description of Artificial Sequence: Synthetic oligonucleotide
  misc_feature 1..20: note = Target: FXN; (-) strand; PAM type: YTN; PAM sequence: CTG
  source 1..20: mol_type = other DNA
ggcaacatggtgaaacccca

SEQ ID NO: 29246 - DNA, 20 bp, synthetic construct
  misc_feature 1..20: note = Description of Artificial Sequence: Synthetic oligonucleotide
  misc_feature 1..20: note = Target: FXN; (-) strand; PAM type: YTN; PAM sequence: TTA
  source 1..20: mol_type = other DNA
gagaccagcctgggcaacat

SEQ ID NO: 29247 - DNA, 20 bp, synthetic construct
  misc_feature 1..20: note = Description of Artificial Sequence: Synthetic oligonucleotide
  misc_feature 1..20: note = Target: FXN; (-) strand; PAM type: YTN; PAM sequence: CTA
  source 1..20: mol_type = other DNA
agtgttagagaccagcctgg

SEQ ID NO: 29248 - DNA, 20 bp, synthetic construct
  misc_feature 1..20: note = Description of Artificial Sequence: Synthetic oligonucleotide
  misc_feature 1..20: note = Target: FXN; (-) strand; PAM type: YTN; PAM sequence: TTG
  source 1..20: mol_type = other DNA
agcctaagtgttagagacca

SEQ ID NO: 29249 - DNA, 20 bp, synthetic construct
  misc_feature 1..20: note = Description of Artificial Sequence: Synthetic oligonucleotide
  misc_feature 1..20: note = Target: FXN; (-) strand; PAM type: YTN; PAM sequence: CTT
  source 1..20: mol_type = other DNA
gagcctaagtgttagagacc

SEQ ID NO: 29250 - DNA, 20 bp, synthetic construct
  misc_feature 1..20: note = Description of Artificial Sequence: Synthetic oligonucleotide
  misc_feature 1..20: note = Target: FXN; (-) strand; PAM type: YTN; PAM sequence: TTG
  source 1..20: mol_type = other DNA
ggaggacgaggcaggtggat

SEQ ID NO: 29251 - DNA, 20 bp, synthetic construct
  misc_feature 1..20: note = Description of Artificial Sequence: Synthetic oligonucleotide
  misc_feature 1..20: note = Target: FXN; (-) strand; PAM type: YTN; PAM sequence: CTT
  source 1..20: mol_type = other DNA
gggaggacgaggcaggtgga

SEQ ID NO: 29252 - DNA, 20 bp, synthetic construct
  misc_feature 1..20: note = Description of Artificial Sequence: Synthetic oligonucleotide
  misc_feature 1..20: note = Target: FXN; (-) strand; PAM type: YTN; PAM sequence: CTG
  source 1..20: mol_type = other DNA
taatcccagcatcttgggag

SEQ ID NO: 29253 - DNA, 20 bp, synthetic construct
  misc_feature 1..20: note = Description of Artificial Sequence: Synthetic oligonucleotide
  misc_feature 1..20: note = Target: FXN; (-) strand; PAM type: YTN; PAM sequence: CTG
  source 1..20: mol_type = other DNA
tggcacacacctgtaatccc

SEQ ID NO: 29254 - DNA, 20 bp, synthetic construct
  misc_feature 1..20: note = Description of Artificial Sequence: Synthetic oligonucleotide
  misc_feature 1..20: note = Target: FXN; (-) strand; PAM type: YTN; PAM sequence: CTG
  source 1..20: mol_type = other DNA
atgaacacctgtggcacaca

SEQ ID NO: 29255 - DNA, 20 bp, synthetic construct
  misc_feature 1..20: note = Description of Artificial Sequence: Synthetic oligonucleotide
  misc_feature 1..20: note = Target: FXN; (-) strand; PAM type: YTN; PAM sequence: TTC
  source 1..20: mol_type = other DNA
tgatgaacacctgtggcaca

SEQ ID NO: 29256 - DNA, 20 bp, synthetic construct
  misc_feature 1..20: note = Description of Artificial Sequence: Synthetic oligonucleotide
  misc_feature 1..20: note = Target: FXN; (-) strand; PAM type: YTN; PAM sequence: TTT
  source 1..20: mol_type = other DNA
ctgatgaacacctgtggcac

SEQ ID NO: 29257 - DNA, 20 bp, synthetic construct
  misc_feature 1..20: note = Description of Artificial Sequence: Synthetic oligonucleotide
  misc_feature 1..20: note = Target: FXN; (-) strand; PAM type: YTN; PAM sequence: CTT
  source 1..20: mol_type = other DNA
tctgatgaacacctgtggca

SEQ ID NO: 29258 - DNA, 20 bp, synthetic construct
  misc_feature 1..20: note = Description of Artificial Sequence: Synthetic oligonucleotide
  misc_feature 1..20: note = Target: FXN; (-) strand; PAM type: YTN; PAM sequence: CTC
  source 1..20: mol_type = other DNA
aagaaggtaaaaataataga

SEQ ID NO: 29259 - DNA, 20 bp, synthetic construct
  misc_feature 1..20: note = Description of Artificial Sequence: Synthetic oligonucleotide
  misc_feature 1..20: note = Target: FXN; (-) strand; PAM type: YTN; PAM sequence: CTA
  source 1..20: mol_type = other DNA
cccactcaagaaggtaaaaa

SEQ ID NO: 29260 - DNA, 20 bp, synthetic construct
  misc_feature 1..20: note = Description of Artificial Sequence: Synthetic oligonucleotide
  misc_feature 1..20: note = Target: FXN; (-) strand; PAM type: YTN; PAM sequence: TTC
  source 1..20: mol_type = other DNA
tacccactcaagaaggtaaa

SEQ ID NO: 29261 - DNA, 20 bp, synthetic construct
  misc_feature 1..20: note = Description of Artificial Sequence: Synthetic oligonucleotide
  misc_feature 1..20: note = Target: FXN; (-) strand; PAM type: YTN; PAM sequence: CTG
  source 1..20: mol_type = other DNA
aggttctacccactcaagaa

SEQ ID NO: 29262 - DNA, 20 bp, synthetic construct
  misc_feature 1..20: note = Description of Artificial Sequence: Synthetic oligonucleotide
  misc_feature 1..20: note = Target: FXN; (-) strand; PAM type: YTN; PAM sequence: CTA
  source 1..20: mol_type = other DNA
tgtggctgaggttctaccca

SEQ ID NO: 29263 - DNA, 20 bp, synthetic construct
  misc_feature 1..20: note = Description of Artificial Sequence: Synthetic oligonucleotide
  misc_feature 1..20: note = Target: FXN; (-) strand; PAM type: YTN; PAM sequence: TTC
  source 1..20: mol_type = other DNA
tatgtggctgaggttctacc

SEQ ID NO: 29264 - DNA, 20 bp, synthetic construct
  misc_feature 1..20: note = Description of Artificial Sequence: Synthetic oligonucleotide
  misc_feature 1..20: note = Target: FXN; (-) strand; PAM type: YTN; PAM sequence: TTT
  source 1..20: mol_type = other DNA
ctatgtggctgaggttctac

SEQ ID NO: 29265 - DNA, 20 bp, synthetic construct
  misc_feature 1..20: note = Description of Artificial Sequence: Synthetic oligonucleotide
  misc_feature 1..20: note = Target: FXN; (-) strand; PAM type: YTN; PAM sequence: TTT
  source 1..20: mol_type = other DNA
tctatgtggctgaggttcta

SEQ ID NO: 29266 - DNA, 20 bp, synthetic construct
  misc_feature 1..20: note = Description of Artificial Sequence: Synthetic oligonucleotide
  misc_feature 1..20: note = Target: FXN; (-) strand; PAM type: YTN; PAM sequence: TTA
  source 1..20: mol_type = other DNA
ttttctatgtggctgaggtt

SEQ ID NO: 29267 - DNA, 20 bp, synthetic construct
  misc_feature 1..20: note = Description of Artificial Sequence: Synthetic oligonucleotide
  misc_feature 1..20: note = Target: FXN; (-) strand; PAM type: YTN; PAM sequence: TTT
  source 1..20: mol_type = other DNA
attttctatgtggctgaggt

SEQ ID NO: 29268 - DNA, 20 bp, synthetic construct
  misc_feature 1..20: note = Description of Artificial Sequence: Synthetic oligonucleotide
  misc_feature 1..20: note = Target: FXN; (-) strand; PAM type: YTN; PAM sequence: TTT
  source 1..20: mol_type = other DNA
tattttctatgtggctgagg

SEQ ID NO: 29269 - DNA, 20 bp, synthetic construct
  misc_feature 1..20: note = Description of Artificial Sequence: Synthetic oligonucleotide
  misc_feature 1..20: note = Target: FXN; (-) strand; PAM type: YTN; PAM sequence: CTA
  source 1..20: mol_type = other DNA
aataagtcatgccagaacat

SEQ ID NO: 29270 - DNA, 20 bp, synthetic construct
  misc_feature 1..20: note = Description of Artificial Sequence: Synthetic oligonucleotide
  misc_feature 1..20: note = Target: FXN; (-) strand; PAM type: YTN; PAM sequence: TTC
  source 1..20: mol_type = other DNA
cagagagctaaataagtcat

SEQ ID NO: 29271 - DNA, 20 bp, synthetic construct
  misc_feature 1..20: note = Description of Artificial Sequence: Synthetic oligonucleotide
  misc_feature 1..20: note = Target: FXN; (-) strand; PAM type: YTN; PAM sequence: TTG
  source 1..20: mol_type = other DNA
taattccagagagctaaata

SEQ ID NO: 29272 - DNA, 20 bp, synthetic construct
  misc_feature 1..20: note = Description of Artificial Sequence: Synthetic oligonucleotide
  misc_feature 1..20: note = Target: FXN; (-) strand; PAM type: YTN; PAM sequence: TTT
  source 1..20: mol_type = other DNA
gtaattccagagagctaaat

SEQ ID NO: 29273 - DNA, 20 bp, synthetic construct
  misc_feature 1..20: note = Description of Artificial Sequence: Synthetic oligonucleotide
  misc_feature 1..20: note = Target: FXN; (-) strand; PAM type: YTN; PAM sequence: CTT
  source 1..20: mol_type = other DNA
tgtaattccagagagctaaa

SEQ ID NO: 29274 - DNA, 20 bp, synthetic construct
  misc_feature 1..20: note = Description of Artificial Sequence: Synthetic oligonucleotide
  misc_feature 1..20: note = Target: FXN; (-) strand; PAM type: YTN; PAM sequence: TTC
  source 1..20: mol_type = other DNA
tttgtaattccagagagcta

SEQ ID NO: 29275 - DNA, 20 bp, synthetic construct
  misc_feature 1..20: note = Description of Artificial Sequence: Synthetic oligonucleotide
  misc_feature 1..20: note = Target: FXN; (-) strand; PAM type: YTN; PAM sequence: CTT
  source 1..20: mol_type = other DNA
ctttgtaattccagagagct

SEQ ID NO: 29276 - DNA, 20 bp, synthetic construct
  misc_feature 1..20: note = Description of Artificial Sequence: Synthetic oligonucleotide
  misc_feature 1..20: note = Target: FXN; (-) strand; PAM type: YTN; PAM sequence: TTC
  source 1..20: mol_type = other DNA
cttctttgtaattccagaga

SEQ ID NO: 29277 - DNA, 20 bp, synthetic construct
  misc_feature 1..20: note = Description of Artificial Sequence: Synthetic oligonucleotide
  misc_feature 1..20: note = Target: FXN; (-) strand; PAM type: YTN; PAM sequence: CTC
  source 1..20: mol_type = other DNA
attccttctttgtaattcca

SEQ ID NO: 29278 - DNA, 20 bp, synthetic construct
  misc_feature 1..20: note = Description of Artificial Sequence: Synthetic oligonucleotide
  misc_feature 1..20: note = Target: FXN; (-) strand; PAM type: YTN; PAM sequence: TTA
  source 1..20: mol_type = other DNA
cacacctcattccttctttg

SEQ ID NO: 29279 - DNA, 20 bp, synthetic construct
  misc_feature 1..20: note = Description of Artificial Sequence: Synthetic oligonucleotide
  misc_feature 1..20: note = Target: FXN; (-) strand; PAM type: YTN; PAM sequence: TTT
  source 1..20: mol_type = other DNA
acacacctcattccttcttt

SEQ ID NO: 29280 - DNA, 20 bp, synthetic construct
  misc_feature 1..20: note = Description of Artificial Sequence: Synthetic oligonucleotide
  misc_feature 1..20: note = Target: FXN; (-) strand; PAM type: YTN; PAM sequence: TTT
  source 1..20: mol_type = other DNA
tacacacctcattccttctt

SEQ ID NO: 29281 - DNA, 20 bp, synthetic construct
  misc_feature 1..20: note = Description of Artificial Sequence: Synthetic oligonucleotide
  misc_feature 1..20: note = Target: FXN; (-) strand; PAM type: YTN; PAM sequence: CTT
  source 1..20: mol_type = other DNA
ttacacacctcattccttct

SEQ ID NO: 29282 - DNA, 20 bp, synthetic construct
  misc_feature 1..20: note = Description of Artificial Sequence: Synthetic oligonucleotide
  misc_feature 1..20: note = Target: FXN; (-) strand; PAM type: YTN; PAM sequence: CTC
  source 1..20: mol_type = other DNA
ttttacacacctcattcctt

SEQ ID NO: 29283 - DNA, 20 bp, synthetic construct
  misc_feature 1..20: note = Description of Artificial Sequence: Synthetic oligonucleotide
  misc_feature 1..20: note = Target: FXN; (-) strand; PAM type: YTN; PAM sequence: TTC
  source 1..20: mol_type = other DNA
tcttttacacacctcattcc

SEQ ID NO: 29284 - DNA, 20 bp, synthetic construct
  misc_feature 1..20: note = Description of Artificial Sequence: Synthetic oligonucleotide
  misc_feature 1..20: note = Target: FXN; (-) strand; PAM type: YTN; PAM sequence: TTC
  source 1..20: mol_type = other DNA
aaaaacccaggttctctttt

SEQ ID NO: 29285 - DNA, 20 bp, synthetic construct
  misc_feature 1..20: note = Description of Artificial Sequence: Synthetic oligonucleotide
  misc_feature 1..20: note = Target: FXN; (-) strand; PAM type: YTN; PAM sequence: TTG
  source 1..20: mol_type = other DNA
tgattcaaaaacccaggttc

SEQ ID NO: 29286 - DNA, 20 bp, synthetic construct
  misc_feature 1..20: note = Description of Artificial Sequence: Synthetic oligonucleotide
  misc_feature 1..20: note = Target: FXN; (-) strand; PAM type: YTN; PAM sequence: TTT
  source 1..20: mol_type = other DNA
gtgattcaaaaacccaggtt

SEQ ID NO: 29287 - DNA, 20 bp, synthetic construct
  misc_feature 1..20: note = Description of Artificial Sequence: Synthetic oligonucleotide
  misc_feature 1..20: note = Target: FXN; (-) strand; PAM type: YTN; PAM sequence: CTA
  source 1..20: mol_type = other DNA
aatttgtgattcaaaaaccc

SEQ ID NO: 29288 - DNA, 20 bp, synthetic construct
  misc_feature 1..20: note = Description of Artificial Sequence: Synthetic oligonucleotide
  misc_feature 1..20: note = Target: FXN; (-) strand; PAM type: YTN; PAM sequence: TTC
  source 1..20: mol_type = other DNA
taaatttgtgattcaaaaac

SEQ ID NO: 29289 - DNA, 20 bp, synthetic construct
  misc_feature 1..20: note = Description of Artificial Sequence: Synthetic oligonucleotide
  misc_feature 1..20: note = Target: FXN; (-) strand; PAM type: YTN; PAM sequence: TTA
  source 1..20: mol_type = other DNA
aattctaaatttgtgattca

SEQ ID NO: 29290 - DNA, 20 bp, synthetic construct
  misc_feature 1..20: note = Description of Artificial Sequence: Synthetic oligonucleotide
  misc_feature 1..20: note = Target: FXN; (-) strand; PAM type: YTN; PAM sequence: TTC
  source 1..20: mol_type = other DNA
gattaaattctaaatttgtg

SEQ ID NO: 29291 - DNA, 20 bp, synthetic construct
  misc_feature 1..20: note = Description of Artificial Sequence: Synthetic oligonucleotide
  misc_feature 1..20: note = Target: FXN; (-) strand; PAM type: YTN; PAM sequence: TTT
  source 1..20: mol_type = other DNA
cgattaaattctaaatttgt

SEQ ID NO: 29292 - DNA, 20 bp, synthetic construct
  misc_feature 1..20: note = Description of Artificial Sequence: Synthetic oligonucleotide
  misc_feature 1..20: note = Target: FXN; (-) strand; PAM type: YTN; PAM sequence: CTA
  source 1..20: mol_type = other DNA
caaacaagtaagaggcagag

SEQ ID NO: 29293 - DNA, 20 bp, synthetic construct
  misc_feature 1..20: note = Description of Artificial Sequence: Synthetic oligonucleotide
  misc_feature 1..20: note = Target: FXN; (-) strand; PAM type: YTN; PAM sequence: CTG
  source 1..20: mol_type = other DNA
tcagtgtctacaaacaagta

SEQ ID NO: 29294 - DNA, 20 bp, synthetic construct
  misc_feature 1..20: note = Description of Artificial Sequence: Synthetic oligonucleotide
  misc_feature 1..20: note = Target: FXN; (-) strand; PAM type: YTN; PAM sequence: TTA
  source 1..20: mol_type = other DNA
aaaaaaaaaaaaacatgagg

SEQ ID NO: 29295 - DNA, 20 bp, synthetic construct
  misc_feature 1..20: note = Description of Artificial Sequence: Synthetic oligonucleotide
  misc_feature 1..20: note = Target: FXN; (-) strand; PAM type: YTN; PAM sequence: TTA
  source 1..20: mol_type = other DNA
tagattaaaaaaaaaaaaaa

SEQ ID NO: 29296 - DNA, 20 bp, synthetic construct
  misc_feature 1..20: note = Description of Artificial Sequence: Synthetic oligonucleotide
  misc_feature 1..20: note = Target: FXN; (-) strand; PAM type: YTN; PAM sequence: TTT
  source 1..20: mol_type = other DNA
atagattaaaaaaaaaaaaa

SEQ ID NO: 29297 - DNA, 20 bp, synthetic construct
  misc_feature 1..20: note = Description of Artificial Sequence: Synthetic oligonucleotide
  misc_feature 1..20: note = Target: FXN; (-) strand; PAM type: YTN; PAM sequence: TTT
  source 1..20: mol_type = other DNA
tatagattaaaaaaaaaaaa

SEQ ID NO: 29298 - DNA, 20 bp, synthetic construct
  misc_feature 1..20: note = Description of Artificial Sequence: Synthetic oligonucleotide
  misc_feature 1..20: note = Target: FXN; (-) strand; PAM type: YTN; PAM sequence: CTC
  source 1..20: mol_type = other DNA
cattttatagattaaaaaaa

SEQ ID NO: 29299 - DNA, 20 bp, synthetic construct
  misc_feature 1..20: note = Description of Artificial Sequence: Synthetic oligonucleotide
  misc_feature 1..20: note = Target: FXN; (-) strand; PAM type: YTN; PAM sequence: TTA
  source 1..20: mol_type = other DNA
gatatctccattttatagat

SEQ ID NO: 29300 - DNA, 20 bp, synthetic construct
  misc_feature 1..20: note = Description of Artificial Sequence: Synthetic oligonucleotide
  misc_feature 1..20: note = Target: FXN; (-) strand; PAM type: YTN; PAM sequence: CTC
  source 1..20: mol_type = other DNA
aacatgttagatatctccat

SEQ ID NO: 29301 - DNA, 20 bp, synthetic construct
  misc_feature 1..20: note = Description of Artificial Sequence: Synthetic oligonucleotide
  misc_feature 1..20: note = Target: FXN; (-) strand; PAM type: YTN; PAM sequence: CTG
  source 1..20: mol_type = other DNA
tgggcccaggctcaacatgt

SEQ ID NO: 29302 - DNA, 20 bp, synthetic construct
  misc_feature 1..20: note = Description of Artificial Sequence: Synthetic oligonucleotide
  misc_feature 1..20: note = Target: FXN; (-) strand; PAM type: YTN; PAM sequence: TTG
  source 1..20: mol_type = other DNA
cctgtgggcccaggctcaac

SEQ ID NO: 29303 - DNA, 20 bp, synthetic construct
  misc_feature 1..20: note = Description of Artificial Sequence: Synthetic oligonucleotide
  misc_feature 1..20: note = Target: FXN; (-) strand; PAM type: YTN; PAM sequence: TTT
  source 1..20: mol_type = other DNA
gcctgtgggcccaggctcaa

SEQ ID NO: 29304 - DNA, 20 bp, synthetic construct
  misc_feature 1..20: note = Description of Artificial Sequence: Synthetic oligonucleotide
  misc_feature 1..20: note = Target: FXN; (-) strand; PAM type: YTN; PAM sequence: CTT
  source 1..20: mol_type = other DNA
tgcctgtgggcccaggctca

SEQ ID NO: 29305 - DNA, 20 bp, synthetic construct
  misc_feature 1..20: note = Description of Artificial Sequence: Synthetic oligonucleotide
  misc_feature 1..20: note = Target: FXN; (-) strand; PAM type: YTN; PAM sequence: TTG
  source 1..20: mol_type = other DNA
tgctttgcctgtgggcccag

SEQ ID NO: 29306 - DNA, 20 bp, synthetic construct
  misc_feature 1..20: note = Description of Artificial Sequence: Synthetic oligonucleotide
  misc_feature 1..20: note = Target: FXN; (-) strand; PAM type: YTN; PAM sequence: CTC
  source 1..20: mol_type = other DNA
acatcaggattgtgctttgc

SEQ ID NO: 29307 - DNA, 20 bp, synthetic construct
  misc_feature 1..20: note = Description of Artificial Sequence: Synthetic oligonucleotide
  misc_feature 1..20: note = Target: FXN; (-) strand; PAM type: YTN; PAM sequence: TTC
  source 1..20: mol_type = other DNA
tcacatcaggattgtgcttt

SEQ ID NO: 29308 - DNA, 20 bp, synthetic construct
  misc_feature 1..20: note = Description of Artificial Sequence: Synthetic oligonucleotide
  misc_feature 1..20: note = Target: FXN; (-) strand; PAM type: YTN; PAM sequence: CTT
  source 1..20: mol_type = other DNA
ctcacatcaggattgtgctt

SEQ ID NO: 29309 - DNA, 20 bp, synthetic construct
  misc_feature 1..20: note = Description of Artificial Sequence: Synthetic oligonucleotide
  misc_feature 1..20: note = Target: FXN; (-) strand; PAM type: YTN; PAM sequence: CTG
  source 1..20: mol_type = other DNA
agtacttctcacatcaggat

SEQ ID NO: 29310 - DNA, 20 bp, synthetic construct
  misc_feature 1..20: note = Description of Artificial Sequence: Synthetic oligonucleotide
  misc_feature 1..20: note = Target: FXN; (-) strand; PAM type: YTN; PAM sequence: TTG
  source 1..20: mol_type = other DNA
tcatgaactgagtacttctc

SEQ ID NO: 29311 - DNA, 20 bp, synthetic construct
  misc_feature 1..20: note = Description of Artificial Sequence: Synthetic oligonucleotide
  misc_feature 1..20: note = Target: FXN; (-) strand; PAM type: YTN; PAM sequence: CTA
  source 1..20: mol_type = other DNA
tgcatgtgagaacaacagtt

SEQ ID NO: 29312 - DNA, 20 bp, synthetic construct
  misc_feature 1..20: note = Description of Artificial Sequence: Synthetic oligonucleotide
  misc_feature 1..20: note = Target: FXN; (-) strand; PAM type: YTN; PAM sequence: TTA
  source 1..20: mol_type = other DNA
tgctatgcatgtgagaacaa

SEQ ID NO: 29313 - DNA, 20 bp, synthetic construct
  misc_feature 1..20: note = Description of Artificial Sequence: Synthetic oligonucleotide
  misc_feature 1..20: note = Target: FXN; (-) strand; PAM type: YTN; PAM sequence: CTC
  source 1..20: mol_type = other DNA
caatgtgaatatgaaattat

SEQ ID NO: 29314 - DNA, 20 bp, synthetic construct
  misc_feature 1..20: note = Description of Artificial Sequence: Synthetic oligonucleotide
  misc_feature 1..20: note = Target: FXN; (-) strand; PAM type: YTN; PAM sequence: TTG
  source 1..20: mol_type = other DNA
ggagaagtcctccaatgtga

SEQ ID NO: 29315 - DNA, 20 bp, synthetic construct
  misc_feature 1..20: note = Description of Artificial Sequence: Synthetic oligonucleotide
  misc_feature 1..20: note = Target: FXN; (-) strand; PAM type: YTN; PAM sequence: TTT
  source 1..20: mol_type = other DNA
gggagaagtcctccaatgtg

SEQ ID NO: 29316 - DNA, 20 bp, synthetic construct
  misc_feature 1..20: note = Description of Artificial Sequence: Synthetic oligonucleotide
  misc_feature 1..20: note = Target: FXN; (-) strand; PAM type: YTN; PAM sequence: TTT
  source 1..20: mol_type = other DNA
tgggagaagtcctccaatgt

SEQ ID NO: 29317 - DNA, 20 bp, synthetic construct
  misc_feature 1..20: note = Description of Artificial Sequence: Synthetic oligonucleotide
  misc_feature 1..20: note = Target: FXN; (-) strand; PAM type: YTN; PAM sequence: TTG
  source 1..20: mol_type = other DNA
agtagggaacgtcatccata

SEQ ID NO: 29318 - DNA, 20 bp, synthetic construct
  misc_feature 1..20: note = Description of Artificial Sequence: Synthetic oligonucleotide
  misc_feature 1..20: note = Target: FXN; (-) strand; PAM type: YTN; PAM sequence: TTC
  source 1..20: mol_type = other DNA
aaggttgagtagggaacgtc

SEQ ID NO: 29319 - DNA, 20 bp, synthetic construct
  misc_feature 1..20: note = Description of Artificial Sequence: Synthetic oligonucleotide
  misc_feature 1..20: note = Target: FXN; (-) strand; PAM type: YTN; PAM sequence: TTA
  source 1..20: mol_type = other DNA
agttcaaggttgagtaggga

SEQ ID NO: 29320 - DNA, 20 bp, synthetic construct
  misc_feature 1..20: note = Description of Artificial Sequence: Synthetic oligonucleotide
  misc_feature 1..20: note = Target: FXN; (-) strand; PAM type: YTN; PAM sequence: TTG
  source 1..20: mol_type = other DNA
attaagttcaaggttgagta

SEQ ID NO: 29321 - DNA, 20 bp, synthetic construct
  misc_feature 1..20: note = Description of Artificial Sequence: Synthetic oligonucleotide
  misc_feature 1..20: note = Target: FXN; (-) strand; PAM type: YTN; PAM sequence: TTT
  source 1..20: mol_type = other DNA
gattaagttcaaggttgagt

SEQ ID NO: 29322 - DNA, 20 bp, synthetic construct
  misc_feature 1..20: note = Description of Artificial Sequence: Synthetic oligonucleotide
  misc_feature 1..20: note = Target: FXN; (-) strand; PAM type: YTN; PAM sequence: TTT
  source 1..20: mol_type = other DNA
tgattaagttcaaggttgag

SEQ ID NO: 29323 - DNA, 20 bp, synthetic construct
  misc_feature 1..20: note = Description of Artificial Sequence: Synthetic oligonucleotide
  misc_feature 1..20: note = Target: FXN; (-) strand; PAM type: YTN; PAM sequence: CTG
  source 1..20: mol_type = other DNA
agtattttgattaagttcaa

SEQ ID NO: 29324 - DNA, 20 bp, synthetic construct
  misc_feature 1..20: note = Description of Artificial Sequence: Synthetic oligonucleotide
  misc_feature 1..20: note = Target: FXN; (-) strand; PAM type: YTN; PAM sequence: TTA
  source 1..20: mol_type = other DNA
agtaaactgagtattttgat

SEQ ID NO: 29325 - DNA, 20 bp, synthetic construct
  misc_feature 1..20: note = Description of Artificial Sequence: Synthetic oligonucleotide
  misc_feature 1..20: note = Target: FXN; (-) strand; PAM type: YTN; PAM sequence: CTA
  source 1..20: mol_type = other DNA
atacgaagttaagtaaactg

SEQ ID NO: 29326 - DNA, 20 bp, synthetic construct
  misc_feature 1..20: note = Description of Artificial Sequence: Synthetic oligonucleotide
  misc_feature 1..20: note = Target: FXN; (-) strand; PAM type: YTN; PAM sequence: TTC
  source 1..20: mol_type = other DNA
cagggaatcagaatctaata

SEQ ID NO: 29327 - DNA, 20 bp, synthetic construct
  misc_feature 1..20: note = Description of Artificial Sequence: Synthetic oligonucleotide
  misc_feature 1..20: note = Target: FXN; (-) strand; PAM type: YTN; PAM sequence: TTA
  source 1..20: mol_type = other DNA
gaaggtatgcaaaagatcaa

SEQ ID NO: 29328 - DNA, 20 bp, synthetic construct
  misc_feature 1..20: note = Description of Artificial Sequence: Synthetic oligonucleotide
  misc_feature 1..20: note = Target: FXN; (-) strand; PAM type: YTN; PAM sequence: TTT
  source 1..20: mol_type = other DNA
agaaggtatgcaaaagatca

SEQ ID NO: 29329 - DNA, 20 bp, synthetic construct
  misc_feature 1..20: note = Description of Artificial Sequence: Synthetic oligonucleotide
  misc_feature 1..20: note = Target: FXN; (-) strand; PAM type: YTN; PAM sequence: TTT
  source 1..20: mol_type = other DNA
tagaaggtatgcaaaagatc

SEQ ID NO: 29330 - DNA, 20 bp, synthetic construct
  misc_feature 1..20: note = Description of Artificial Sequence: Synthetic oligonucleotide
  misc_feature 1..20: note = Target: FXN; (-) strand; PAM type: YTN; PAM sequence: CTA
  source 1..20: mol_type = other DNA
aaatagttttagaaggtatg

SEQ ID NO: 29331 - DNA, 20 bp, synthetic construct
  misc_feature 1..20: note = Description of Artificial Sequence: Synthetic oligonucleotide
  misc_feature 1..20: note = Target: FXN; (-) strand; PAM type: YTN; PAM sequence: TTG
  source 1..20: mol_type = other DNA
gctaaaatagttttagaagg

SEQ ID NO: 29332 - DNA, 20 bp, synthetic construct
  misc_feature 1..20: note = Description of Artificial Sequence: Synthetic oligonucleotide
  misc_feature 1..20: note = Target: FXN; (-) strand; PAM type: YTN; PAM sequence: TTA
  source 1..20: mol_type = other DNA
aattggctaaaatagtttta

SEQ ID NO: 29333 - DNA, 20 bp, synthetic construct
  misc_feature 1..20: note = Description of Artificial Sequence: Synthetic oligonucleotide
  misc_feature 1..20: note = Target: FXN; (-) strand; PAM type: YTN; PAM sequence: TTT
  source 1..20: mol_type = other DNA
aaattggctaaaatagtttt

SEQ ID NO: 29334 - DNA, 20 bp, synthetic construct
  misc_feature 1..20: note = Description of Artificial Sequence: Synthetic oligonucleotide
  misc_feature 1..20: note = Target: FXN; (-) strand; PAM type: YTN; PAM sequence: TTT
  source 1..20: mol_type = other DNA
taaattggctaaaatagttt

SEQ ID NO: 29335 - DNA, 20 bp, synthetic construct
  misc_feature 1..20: note = Description of Artificial Sequence: Synthetic oligonucleotide
  misc_feature 1..20: note = Target: FXN; (-) strand; PAM type: YTN; PAM sequence: CTG
  source 1..20: mol_type = other DNA
tcaaattttaaattggctaa

SEQ ID NO: 29336 - DNA, 20 bp, synthetic construct
  misc_feature 1..20: note = Description of Artificial Sequence: Synthetic oligonucleotide
  misc_feature 1..20: note = Target: FXN; (-) strand; PAM type: YTN; PAM sequence: TTA
  source 1..20: mol_type = other DNA
atgcaaactgtcaaatttta

SEQ ID NO: 29337 - DNA, 20 bp, synthetic construct
  misc_feature 1..20: note = Description of Artificial Sequence: Synthetic oligonucleotide
  misc_feature 1..20: note = Target: FXN; (-) strand; PAM type: YTN; PAM sequence: TTT
  source 1..20: mol_type = other DNA
aatgcaaactgtcaaatttt

SEQ ID NO: 29338 - DNA, 20 bp, synthetic construct
  misc_feature 1..20: note = Description of Artificial Sequence: Synthetic oligonucleotide
  misc_feature 1..20: note = Target: FXN; (-) strand; PAM type: YTN; PAM sequence: CTA
  source 1..20: mol_type = other DNA
taatttaatgcaaactgtca

SEQ ID NO: 29339 - DNA, 20 bp, synthetic construct
  misc_feature 1..20: note = Description of Artificial Sequence: Synthetic oligonucleotide
  misc_feature 1..20: note = Target: FXN; (-) strand; PAM type: YTN; PAM sequence: TTG
  source 1..20: mol_type = other DNA
taaacctataatttaatgca

SEQ ID NO: 29340 - DNA, 20 bp, synthetic construct
  misc_feature 1..20: note = Description of Artificial Sequence: Synthetic oligonucleotide
  misc_feature 1..20: note = Target: FXN; (-) strand; PAM type: YTN; PAM sequence: CTG
  source 1..20: mol_type = other DNA
gataaagcatattgtaaacc

SEQ ID NO: 29341 - DNA, 20 bp, synthetic construct
  misc_feature 1..20: note = Description of Artificial Sequence: Synthetic oligonucleotide
  misc_feature 1..20: note = Target: FXN; (-) strand; PAM type: YTN; PAM sequence: TTG
  source 1..20: mol_type = other DNA
gggcaggtatagctggataa

SEQ ID NO: 29342 - DNA, 20 bp, synthetic construct
  misc_feature 1..20: note = Description of Artificial Sequence: Synthetic oligonucleotide
  misc_feature 1..20: note = Target: FXN; (-) strand; PAM type: YTN; PAM sequence: TTT
  source 1..20: mol_type = other DNA
ggggcaggtatagctggata

SEQ ID NO: 29343 - DNA, 20 bp, synthetic construct
  misc_feature 1..20: note = Description of Artificial Sequence: Synthetic oligonucleotide
  misc_feature 1..20: note = Target: FXN; (-) strand; PAM type: YTN; PAM sequence: CTG
  source 1..20: mol_type = other DNA
tcagaatttggggcaggtat

SEQ ID NO: 29344 - DNA, 20 bp, synthetic construct
  misc_feature 1..20: note = Description of Artificial Sequence: Synthetic oligonucleotide
  misc_feature 1..20: note = Target: FXN; (-) strand; PAM type: YTN; PAM sequence: TTA
  source 1..20: mol_type = other DNA
gaggtggcaaaagcatctgt

SEQ ID NO: 29345 - DNA, 20 bp, synthetic construct
  misc_feature 1..20: note = Description of Artificial Sequence: Synthetic oligonucleotide
  misc_feature 1..20: note = Target: FXN; (-) strand; PAM type: YTN; PAM sequence: TTT
  source 1..20: mol_type = other DNA
agaggtggcaaaagcatctg

SEQ ID NO: 29346 - DNA, 20 bp, synthetic construct
  misc_feature 1..20: note = Description of Artificial Sequence: Synthetic oligonucleotide
  misc_feature 1..20: note = Target: FXN; (-) strand; PAM type: YTN; PAM sequence: CTT
  source 1..20: mol_type = other DNA
tagaggtggcaaaagcatct

SEQ ID NO: 29347 - DNA, 20 bp, synthetic construct
  misc_feature 1..20: note = Description of Artificial Sequence: Synthetic oligonucleotide
  misc_feature 1..20: note = Target: FXN; (-) strand; PAM type: YTN; PAM sequence: TTC
  source 1..20: mol_type = other DNA
ctttagaggtggcaaaagca

SEQ ID NO: 29348 - DNA, 20 bp, synthetic construct
  misc_feature 1..20: note = Description of Artificial Sequence: Synthetic oligonucleotide
  misc_feature 1..20: note = Target: FXN; (-) strand; PAM type: YTN; PAM sequence: CTT
  source 1..20: mol_type = other DNA
cctttagaggtggcaaaagc

SEQ ID NO: 29349 - DNA, 20 bp, synthetic construct
  misc_feature 1..20: note = Description of Artificial Sequence: Synthetic oligonucleotide
  misc_feature 1..20: note = Target: FXN; (-) strand; PAM type: YTN; PAM sequence: CTA
  source 1..20: mol_type = other DNA
tgaacatgggtcttccttta

SEQ ID NO: 29350 - DNA, 20 bp, synthetic construct
  misc_feature 1..20: note = Description of Artificial Sequence: Synthetic oligonucleotide
  misc_feature 1..20: note = Target: FXN; (-) strand; PAM type: YTN; PAM sequence: CTC
  source 1..20: mol_type = other DNA
catcactatgaacatgggtc

SEQ ID NO: 29351 - DNA, 20 bp, synthetic construct
  misc_feature 1..20: note = Description of Artificial Sequence: Synthetic oligonucleotide
  misc_feature 1..20: note = Target: FXN; (-) strand; PAM type: YTN; PAM sequence: TTA
  source 1..20: mol_type = other DNA
gtccacacaaactccatcac

SEQ ID NO: 29352 - DNA, 20 bp, synthetic construct
  misc_feature 1..20: note = Description of Artificial Sequence: Synthetic oligonucleotide
  misc_feature 1..20: note = Target: FXN; (-) strand; PAM type: YTN; PAM sequence: TTG
  source 1..20: mol_type = other DNA
catggttagtccacacaaac

SEQ ID NO: 29353 - DNA, 20 bp, synthetic construct
  misc_feature 1..20: note = Description of Artificial Sequence: Synthetic oligonucleotide
  misc_feature 1..20: note = Target: FXN; (-) strand; PAM type: YTN; PAM sequence: CTT
  source 1..20: mol_type = other DNA
gcatggttagtccacacaaa

SEQ ID NO: 29354 - DNA, 20 bp, synthetic construct
  misc_feature 1..20: note = Description of Artificial Sequence: Synthetic oligonucleotide
  misc_feature 1..20: note = Target: FXN; (-) strand; PAM type: YTN; PAM sequence: TTG
  source 1..20: mol_type = other DNA
gcaaccttgcatggttagtc

SEQ ID NO: 29355 - DNA, 20 bp, synthetic construct
  misc_feature 1..20: note = Description of Artificial Sequence: Synthetic oligonucleotide
  misc_feature 1..20: note = Target: FXN; (-) strand; PAM type: YTN; PAM sequence: CTT
  source 1..20: mol_type = other DNA
ggcaaccttgcatggttagt

SEQ ID NO: 29356 - DNA, 20 bp, synthetic construct
  misc_feature 1..20: note = Description of Artificial Sequence: Synthetic oligonucleotide
  misc_feature 1..20: note = Target: FXN; (-) strand; PAM type: YTN; PAM sequence: TTC
  source 1..20: mol_type = other DNA
cttggcaaccttgcatggtt

SEQ ID NO: 29357 - DNA, 20 bp, synthetic construct
  misc_feature 1..20: note = Description of Artificial Sequence: Synthetic oligonucleotide
  misc_feature 1..20: note = Target: FXN; (-) strand; PAM type: YTN; PAM sequence: TTT
  source 1..20: mol_type = other DNA
ccttggcaaccttgcatggt

SEQ ID NO: 29358 - DNA, 20 bp, synthetic construct
  misc_feature 1..20: note = Description of Artificial Sequence: Synthetic oligonucleotide
  misc_feature 1..20: note = Target: FXN; (-) strand; PAM type: YTN; PAM sequence: TTT
  source 1..20: mol_type = other DNA
tccttggcaaccttgcatgg

SEQ ID NO: 29359 - DNA, 20 bp, synthetic construct
  misc_feature 1..20: note = Description of Artificial Sequence: Synthetic oligonucleotide
  misc_feature 1..20: note = Target: FXN; (-) strand; PAM type: YTN; PAM sequence: TTT
  source 1..20: mol_type = other DNA
ttccttggcaaccttgcatg

SEQ ID NO: 29360 - DNA, 20 bp, synthetic construct
  misc_feature 1..20: note = Description of Artificial Sequence: Synthetic oligonucleotide
  misc_feature 1..20: note = Target: FXN; (-) strand; PAM type: YTN; PAM sequence: TTG
  source 1..20: mol_type = other DNA
gaagcgtaaagcgatttttc

SEQ ID NO: 29361 - DNA, 20 bp, synthetic construct
  misc_feature 1..20: note = Description of Artificial Sequence: Synthetic oligonucleotide
  misc_feature 1..20: note = Target: FXN; (-) strand; PAM type: YTN; PAM sequence: CTT
  source 1..20: mol_type = other DNA
ggaagcgtaaagcgattttt

SEQ ID NO: 29362 - DNA, 20 bp, synthetic construct
  misc_feature 1..20: note = Description of Artificial Sequence: Synthetic oligonucleotide
  misc_feature 1..20: note = Target: FXN; (-) strand; PAM type: YTN; PAM sequence: TTA
  source 1..20: mol_type = other DNA
gtgtgtaccttggaagcgta

SEQ ID NO: 29363 - DNA, 20 bp, synthetic construct
  misc_feature 1..20: note = Description of Artificial Sequence: Synthetic oligonucleotide
  misc_feature 1..20: note = Target: FXN; (-) strand; PAM type: YTN; PAM sequence: CTT
  source 1..20: mol_type = other DNA
agtgtgtaccttggaagcgt

SEQ ID NO: 29364 - DNA, 20 bp, synthetic construct
  misc_feature 1..20: note = Description of Artificial Sequence: Synthetic oligonucleotide
  misc_feature 1..20: note = Target: FXN; (-) strand; PAM type: YTN; PAM sequence: TTC
  source 1..20: mol_type = other DNA
atcttagtgtgtaccttgga

SEQ ID NO: 29365 - DNA, 20 bp, synthetic construct
  misc_feature 1..20: note = Description of Artificial Sequence: Synthetic oligonucleotide
  misc_feature 1..20: note = Target: FXN; (-) strand; PAM type: YTN; PAM sequence: TTT
  source 1..20: mol_type = other DNA
catcttagtgtgtaccttgg

SEQ ID NO: 29366 - DNA, 20 bp, synthetic construct
  misc_feature 1..20: note = Description of Artificial Sequence: Synthetic oligonucleotide
  misc_feature 1..20: note = Target: FXN; (-) strand; PAM type: YTN; PAM sequence: CTT
  source 1..20: mol_type = other DNA
tcatcttagtgtgtaccttg

SEQ ID NO: 29367 - DNA, 20 bp, synthetic construct
  misc_feature 1..20: note = Description of Artificial Sequence: Synthetic oligonucleotide
  misc_feature 1..20: note = Target: FXN; (-) strand; PAM type: YTN; PAM sequence: TTA
  source 1..20: mol_type = other DNA
ctttcatcttagtgtgtacc

SEQ ID NO: 29368 - DNA, 20 bp, synthetic construct
  misc_feature 1..20: note = Description of Artificial Sequence: Synthetic oligonucleotide
  misc_feature 1..20: note = Target: FXN; (-) strand; PAM type: YTN; PAM sequence: CTA
  source 1..20: mol_type = other DNA
aaattactttcatcttagtg

SEQ ID NO: 29369 - DNA, 20 bp, synthetic construct
  misc_feature 1..20: note = Description of Artificial Sequence: Synthetic oligonucleotide
  misc_feature 1..20: note = Target: FXN; (-) strand; PAM type: YTN; PAM sequence: CTG
  source 1..20: mol_type = other DNA
gacacggactaaaattactt

SEQ ID NO: 29370 - DNA, 20 bp, synthetic construct
  misc_feature 1..20: note = Description of Artificial Sequence: Synthetic oligonucleotide
  misc_feature 1..20: note = Target: FXN; (-) strand; PAM type: YTN; PAM sequence: CTA
  source 1..20: mol_type = other DNA
tgtgccaagaatccaactgg

SEQ ID NO: 29371 - DNA, 20 bp, synthetic construct
  misc_feature 1..20: note = Description of Artificial Sequence: Synthetic oligonucleotide
  misc_feature 1..20: note = Target: FXN; (-) strand; PAM type: YTN; PAM sequence: CTA
  source 1..20: mol_type = other DNA
gcagaagataactatgtgcc

SEQ ID NO: 29372 - DNA, 20 bp, synthetic construct
  misc_feature 1..20: note = Description of Artificial Sequence: Synthetic oligonucleotide
  misc_feature 1..20: note = Target: FXN; (-) strand; PAM type: YTN; PAM sequence: TTC
  source 1..20: mol_type = other DNA
tagcagaagataactatgtg

SEQ ID NO: 29373 - DNA, 20 bp, synthetic construct
  misc_feature 1..20: note = Description of Artificial Sequence: Synthetic oligonucleotide
  misc_feature 1..20: note = Target: FXN; (-) strand; PAM type: YTN; PAM sequence: TTG
  source 1..20: mol_type = other DNA
ttctagcagaagataactat

SEQ ID NO: 29374 - DNA, 20 bp, synthetic construct
  misc_feature 1..20: note = Description of Artificial Sequence: Synthetic oligonucleotide
  misc_feature 1..20: note = Target: FXN; (-) strand; PAM type: YTN; PAM sequence: TTT
  source 1..20: mol_type = other DNA
gttctagcagaagataacta

SEQ ID NO: 29375 - DNA, 20 bp, synthetic construct
  misc_feature 1..20: note = Description of Artificial Sequence: Synthetic oligonucleotide
  misc_feature 1..20: note = Target: FXN; (-) strand; PAM type: YTN; PAM sequence: TTA
  source 1..20: mol_type = other DNA
gtttgttctagcagaagata

SEQ ID NO: 29376 - DNA, 20 bp, synthetic construct
  misc_feature 1..20: note = Description of Artificial Sequence: Synthetic oligonucleotide
  misc_feature 1..20: note = Target: FXN; (-) strand; PAM type: YTN; PAM sequence: TTT
  source 1..20: mol_type = other DNA
agtttgttctagcagaagat

SEQ ID NO: 29377 - DNA, 20 bp, synthetic construct
  misc_feature 1..20: note = Description of Artificial Sequence: Synthetic oligonucleotide
  misc_feature 1..20: note = Target: FXN; (-) strand; PAM type: YTN; PAM sequence: TTT
  source 1..20: mol_type = other DNA
tagtttgttctagcagaaga

SEQ ID NO: 29378 - DNA, 20 bp, synthetic construct
  misc_feature 1..20: note = Description of Artificial Sequence: Synthetic oligonucleotide
  misc_feature 1..20: note = Target: FXN; (-) strand; PAM type: YTN; PAM sequence: CTG
  source 1..20: mol_type = other DNA
ttttagtttgttctagcaga

SEQ ID NO: 29379 - DNA, 20 bp, synthetic construct
  misc_feature 1..20: note = Description of Artificial Sequence: Synthetic oligonucleotide
  misc_feature 1..20: note = Target: FXN; (-) strand; PAM type: YTN; PAM sequence: CTG
  source 1..20: mol_type = other DNA
gcatgtagctgttttagttt

SEQ ID NO: 29380 - DNA, 20 bp, synthetic construct
  misc_feature 1..20: note = Description of Artificial Sequence: Synthetic oligonucleotide
  misc_feature 1..20: note = Target: FXN; (-) strand; PAM type: YTN; PAM sequence: TTG
  source 1..20: mol_type = other DNA
ctggcatgtagctgttttag

SEQ ID NO: 29381 - DNA, 20 bp, synthetic construct
  misc_feature 1..20: note = Description of Artificial Sequence: Synthetic oligonucleotide
  misc_feature 1..20: note = Target: FXN; (-) strand; PAM type: YTN; PAM sequence: CTT
  source 1..20: mol_type = other DNA
gctggcatgtagctgtttta

SEQ ID NO: 29382 - DNA, 20 bp, synthetic construct
  misc_feature 1..20: note = Description of Artificial Sequence: Synthetic oligonucleotide
  misc_feature 1..20: note = Target: FXN; (-) strand; PAM type: YTN; PAM sequence: CTC
  source 1..20: mol_type = other DNA
ccttgctggcatgtagctgt

SEQ ID NO: 29383 - DNA, 20 bp, synthetic construct
  misc_feature 1..20: note = Description of Artificial Sequence: Synthetic oligonucleotide
  misc_feature 1..20: note = Target: FXN; (-) strand; PAM type: YTN; PAM sequence: TTC
  source 1..20: mol_type = other DNA
tcccttgctggcatgtagct

SEQ ID NO: 29384 - DNA, 20 bp, synthetic construct
  misc_feature 1..20: note = Description of Artificial Sequence: Synthetic oligonucleotide
  misc_feature 1..20: note = Target: FXN; (-) strand; PAM type: YTN; PAM sequence: TTT
  source 1..20: mol_type = other DNA
ctcccttgctggcatgtagc

SEQ ID NO: 29385 - DNA, 20 bp, synthetic construct
  misc_feature 1..20: note = Description of Artificial Sequence: Synthetic oligonucleotide
  misc_feature 1..20: note = Target: FXN; (-) strand; PAM type: YTN; PAM sequence: CTT
  source 1..20: mol_type = other DNA
tctcccttgctggcatgtag

SEQ ID NO: 29386 - DNA, 20 bp, synthetic construct
  misc_feature 1..20: note = Description of Artificial Sequence: Synthetic oligonucleotide
  misc_feature 1..20: note = Target: FXN; (-) strand; PAM type: YTN; PAM sequence: TTC
  source 1..20: mol_type = other DNA
ccctttctcccttgctggca

SEQ ID NO: 29387 - DNA, 20 bp, synthetic construct
  misc_feature 1..20: note = Description of Artificial Sequence: Synthetic oligonucleotide
  misc_feature 1..20: note = Target: FXN; (-) strand; PAM type: YTN; PAM sequence: CTT
  source 1..20: mol_type = other DNA
cccctttctcccttgctggc

SEQ ID NO: 29388 - DNA, 20 bp, synthetic construct
  misc_feature 1..20: note = Description of Artificial Sequence: Synthetic oligonucleotide
  misc_feature 1..20: note = Target: FXN; (-) strand; PAM type: YTN; PAM sequence: CTC
  source 1..20: mol_type = other DNA
cttcccctttctcccttgct

SEQ ID NO: 29389 - DNA, 20 bp, synthetic construct
  misc_feature 1..20: note = Description of Artificial Sequence: Synthetic oligonucleotide
  misc_feature 1..20: note = Target: FXN; (-) strand; PAM type: YTN; PAM sequence: TTG
  source 1..20: mol_type = other DNA
cccctccttcccctttctcc

SEQ ID NO: 29390 - DNA, 20 bp, synthetic construct
  misc_feature 1..20: note = Description of Artificial Sequence: Synthetic oligonucleotide
  misc_feature 1..20: note = Target: FXN; (-) strand; PAM type: YTN; PAM sequence: TTT
  source 1..20: mol_type = other DNA
gcccctccttcccctttctc

SEQ ID NO: 29391 - DNA, 20 bp, synthetic construct
  misc_feature 1..20: note = Description of Artificial Sequence: Synthetic oligonucleotide
  misc_feature 1..20: note = Target: FXN; (-) strand; PAM type: YTN; PAM sequence: CTT
  source 1..20: mol_type = other DNA
tgcccctccttcccctttct

SEQ ID NO: 29392 - DNA, 20 bp, synthetic construct
  misc_feature 1..20: note = Description of Artificial Sequence: Synthetic oligonucleotide
  misc_feature 1..20: note = Target: FXN; (-) strand; PAM type: YTN; PAM sequence: TTC
  source 1..20: mol_type = other DNA
aaaactttgcccctccttcc

SEQ ID NO: 29393 - DNA, 20 bp, synthetic construct
  misc_feature 1..20: note = Description of Artificial Sequence: Synthetic oligonucleotide
  misc_feature 1..20: note = Target: FXN; (-) strand; PAM type: YTN; PAM sequence: TTT
  source 1..20: mol_type = other DNA
caaaactttgcccctccttc

SEQ ID NO: 29394 - DNA, 20 bp, synthetic construct
  misc_feature 1..20: note = Description of Artificial Sequence: Synthetic oligonucleotide
  misc_feature 1..20: note = Target: FXN; (-) strand; PAM type: YTN; PAM sequence: TTA
  source 1..20: mol_type = other DNA
catgaaatttcaaaactttg

SEQ ID NO: 29395 - DNA, 20 bp, synthetic construct
  misc_feature 1..20: note = Description of Artificial Sequence: Synthetic oligonucleotide
  misc_feature 1..20: note = Target: FXN; (-) strand; PAM type: YTN; PAM sequence: TTT
  source 1..20: mol_type = other DNA
acatgaaatttcaaaacttt

SEQ ID NO: 29396 - DNA, 20 bp, synthetic construct
  misc_feature 1..20: note = Description of Artificial Sequence: Synthetic oligonucleotide
  misc_feature 1..20: note = Target: FXN; (-) strand; PAM type: YTN; PAM sequence: TTG
  source 1..20: mol_type = other DNA
aacagcataaatttacatga

SEQ ID NO: 29397 - DNA, 20 bp, synthetic construct
  misc_feature 1..20: note = Description of Artificial Sequence: Synthetic oligonucleotide
  misc_feature 1..20: note = Target: FXN; (-) strand; PAM type: YTN; PAM sequence: TTT
  source 1..20: mol_type = other DNA
gaacagcataaatttacatg

SEQ ID NO: 29398 - DNA, 20 bp, synthetic construct
  misc_feature 1..20: note = Description of Artificial Sequence: Synthetic oligonucleotide
  misc_feature 1..20: note = Target: FXN; (-) strand; PAM type: YTN; PAM sequence: TTT
  source 1..20: mol_type = other DNA
tgaacagcataaatttacat

SEQ ID NO: 29399 - DNA, 20 bp, synthetic construct
  misc_feature 1..20: note = Description of Artificial Sequence: Synthetic oligonucleotide
  misc_feature 1..20: note = Target: FXN; (-) strand; PAM type: YTN; PAM sequence: CTC
  source 1..20: mol_type = other DNA
gtcgttttgaacagcataaa

SEQ ID NO: 29400 - DNA, 20 bp, synthetic construct
  misc_feature 1..20: note = Description of Artificial Sequence: Synthetic oligonucleotide
  misc_feature 1..20: note = Target: FXN; (-) strand; PAM type: YTN; PAM sequence: CTA
  source 1..20: mol_type = other DNA
tacacaaagtcatgaactcg

SEQ ID NO: 29401 - DNA, 20 bp, synthetic construct
  misc_feature 1..20: note = Description of Artificial Sequence: Synthetic oligonucleotide
  misc_feature 1..20: note = Target: FXN; (-) strand; PAM type: YTN; PAM sequence: CTC
  source 1..20: mol_type = other DNA
tatacacaaagtcatgaact

SEQ ID NO: 29402 - DNA, 20 bp, synthetic construct
  misc_feature 1..20: note = Description of Artificial Sequence: Synthetic oligonucleotide
  misc_feature 1..20: note = Target: FXN; (-) strand; PAM type: YTN; PAM sequence: TTA
  source 1..20: mol_type = other DNA
ctctatacacaaagtcatga

SEQ ID NO: 29403 - DNA, 20 bp, synthetic construct
  misc_feature 1..20: note = Description of Artificial Sequence: Synthetic oligonucleotide
  misc_feature 1..20: note = Target: FXN; (-) strand; PAM type: YTN; PAM sequence: CTT
  source 1..20: mol_type = other DNA
actctatacacaaagtcatg

SEQ ID NO: 29404 - DNA, 20 bp, synthetic construct
  misc_feature 1..20: note = Description of Artificial Sequence: Synthetic oligonucleotide
  misc_feature 1..20: note = Target: FXN; (-) strand; PAM type: YTN; PAM sequence: TTC
  source 1..20: mol_type = other DNA
ttactctatacacaaagtca

SEQ ID NO: 29405 - DNA, 20 bp, synthetic construct
  misc_feature 1..20: note = Description of Artificial Sequence: Synthetic oligonucleotide
  misc_feature 1..20: note = Target: FXN; (-) strand; PAM type: YTN; PAM sequence: TTT
  source 1..20: mol_type = other DNA
cttactctatacacaaagtc

SEQ ID NO: 29406 - DNA, 20 bp, synthetic construct
  misc_feature 1..20: note = Description of Artificial Sequence: Synthetic oligonucleotide
  misc_feature 1..20: note = Target: FXN; (-) strand; PAM type: YTN; PAM sequence: CTC
  source 1..20: mol_type = other DNA
aaaaaagaaaaggcatttct

SEQ ID NO: 29407 - DNA, 20 bp, synthetic construct
  misc_feature 1..20: note = Description of Artificial Sequence: Synthetic oligonucleotide
  misc_feature 1..20: note = Target: FXN; (-) strand; PAM type: YTN; PAM sequence: CTG
  source 1..20: mol_type = other DNA
tctcaaaaaagaaaaggcat

SEQ ID NO: 29408 - DNA, 20 bp, synthetic construct
  misc_feature 1..20: note = Description of Artificial Sequence: Synthetic oligonucleotide
  misc_feature 1..20: note = Target: FXN; (-) strand; PAM type: YTN; PAM sequence: CTC
  source 1..20: mol_type = other DNA
tgtctcaaaaaagaaaaggc

SEQ ID NO: 29409 - DNA, 20 bp, synthetic construct
  misc_feature 1..20: note = Description of Artificial Sequence: Synthetic oligonucleotide
  misc_feature 1..20: note = Target: FXN; (-) strand; PAM type: YTN; PAM sequence: CTG
  source 1..20: mol_type = other DNA
ggtgacagagcaagactctg

SEQ ID NO: 29410 - DNA, 20 bp, synthetic construct
  misc_feature 1..20: note = Description of Artificial Sequence: Synthetic oligonucleotide
  misc_feature 1..20: note = Target: FXN; (-) strand; PAM type: YTN; PAM sequence: CTC
  source 1..20: mol_type = other DNA
cagcctgggtgacagagcaa

SEQ ID NO: 29411 - DNA, 20 bp, synthetic construct
  misc_feature 1..20: note = Description of Artificial Sequence: Synthetic oligonucleotide
  misc_feature 1..20: note = Target: FXN; (-) strand; PAM type: YTN; PAM sequence: CTG
  source 1..20: mol_type = other DNA
cactccagcctgggtgacag

SEQ ID NO: 29412 - DNA, 20 bp, synthetic construct
  misc_feature 1..20: note = Description of Artificial Sequence: Synthetic oligonucleotide
  misc_feature 1..20: note = Target: FXN; (-) strand; PAM type: YTN; PAM sequence: TTG
  source 1..20: mol_type = other DNA
tagtgagcccagatcgtgcc

SEQ ID NO: 29413 - DNA, 20 bp, synthetic construct
  misc_feature 1..20: note = Description of Artificial Sequence: Synthetic oligonucleotide
  misc_feature 1..20: note = Target: FXN; (-) strand; PAM type: YTN; PAM sequence: TTG
  source 1..20: mol_type = other DNA
aacccaggaggcggaggttg

SEQ ID NO: 29414 - DNA, 20 bp, synthetic construct
  misc_feature 1..20: note = Description of Artificial Sequence: Synthetic oligonucleotide
  misc_feature 1..20: note = Target: FXN; (-) strand; PAM type: YTN; PAM sequence: CTT
  source 1..20: mol_type = other DNA
gaacccaggaggcggaggtt

SEQ ID NO: 29415 - DNA, 20 bp, synthetic construct
  misc_feature 1..20: note = Description of Artificial Sequence: Synthetic oligonucleotide
  misc_feature 1..20: note = Target: FXN; (-) strand; PAM type: YTN; PAM sequence: TTG
  source 1..20: mol_type = other DNA
cttgaacccaggaggcggag

SEQ ID NO: 29416 - DNA, 20 bp, synthetic construct
  misc_feature 1..20: note = Description of Artificial Sequence: Synthetic oligonucleotide
  misc_feature 1..20: note = Target: FXN; (-) strand; PAM type: YTN; PAM sequence: CTG
  source 1..20: mol_type = other DNA
aggcagagaattgcttgaac

SEQ ID NO: 29417 - DNA, 20 bp, synthetic construct
  misc_feature 1..20: note = Description of Artificial Sequence: Synthetic oligonucleotide
  misc_feature 1..20: note = Target: FXN; (-) strand; PAM type: YTN; PAM sequence: CTC
  source 1..20: mol_type = other DNA
gggaggctgaggcagagaat

SEQ ID NO: 29418 - DNA, 20 bp, synthetic construct
  misc_feature 1..20: note = Description of Artificial Sequence: Synthetic oligonucleotide
  misc_feature 1..20: note = Target: FXN; (-) strand; PAM type: YTN; PAM sequence: CTA
  source 1..20: mol_type = other DNA
ctcgggaggctgaggcagag

SEQ ID NO: 29419 - DNA, 20 bp, synthetic construct
  misc_feature 1..20: note = Description of Artificial Sequence: Synthetic oligonucleotide
  misc_feature 1..20: note = Target: FXN; (-) strand; PAM type: YTN; PAM sequence: CTG
  source 1..20: mol_type = other DNA
taatcccagctactcgggag

SEQ ID NO: 29420 - DNA, 20 bp, synthetic construct
  misc_feature 1..20: note = Description of Artificial Sequence: Synthetic oligonucleotide
  misc_feature 1..20: note = Target: FXN; (-) strand; PAM type: YTN; PAM sequence: TTA
  source 1..20: mol_type = other DNA
gccgggtgtggtggcaggca

SEQ ID NO: 29421 - DNA, 20 bp, synthetic construct
  misc_feature 1..20: note = Description of Artificial Sequence: Synthetic oligonucleotide
  misc_feature 1..20: note = Target: FXN; (-) strand; PAM type: YTN; PAM sequence: CTA
  source 1..20: mol_type = other DNA
aaaatacaaaaattagccgg

SEQ ID NO: 29422 - DNA, 20 bp, synthetic construct
  misc_feature 1..20: note = Description of Artificial Sequence: Synthetic oligonucleotide
  misc_feature 1..20: note = Target: FXN; (-) strand; PAM type: YTN; PAM sequence: CTA
  source 1..20: mol_type = other DNA
ctaaaaatacaaaaattagc

SEQ ID NO: 29423 - DNA, 20 bp, synthetic construct
  misc_feature 1..20: note = Description of Artificial Sequence: Synthetic oligonucleotide
  misc_feature 1..20: note = Target: FXN; (-) strand; PAM type: YTN; PAM sequence: CTC
  source 1..20: mol_type = other DNA
tactaaaaatacaaaaatta

SEQ ID NO: 29424 - DNA, 20 bp, synthetic construct
  misc_feature 1..20: note = Description of Artificial Sequence: Synthetic oligonucleotide
  misc_feature 1..20: note = Target: FXN; (-) strand; PAM type: YTN; PAM sequence: CTG
  source 1..20: mol_type = other DNA
gccatgatggtgaaaccccg

SEQ ID NO: 29425 - DNA, 20 bp, synthetic construct
  misc_feature 1..20: note = Description of Artificial Sequence: Synthetic oligonucleotide
  misc_feature 1..20: note = Target: FXN; (-) strand; PAM type: YTN; PAM sequence: TTC
  source 1..20: mol_type = other DNA
aagaccagcctggccatgat

SEQ ID NO: 29426 - DNA, 20 bp, synthetic construct
  misc_feature 1..20: note = Description of Artificial Sequence: Synthetic oligonucleotide
  misc_feature 1..20: note = Target: FXN; (-) strand; PAM type: YTN; PAM sequence: CTA
  source 1..20: mol_type = other DNA
ggtcaggagttcaagaccag

SEQ ID NO: 29427 - DNA, 20 bp, synthetic construct
  misc_feature 1..20: note = Description of Artificial Sequence: Synthetic oligonucleotide
  misc_feature 1..20: note = Target: FXN; (-) strand; PAM type: YTN; PAM sequence: TTA
  source 1..20: mol_type = other DNA
ctaggtcaggagttcaagac

SEQ ID NO: 29428 - DNA, 20 bp, synthetic construct
  misc_feature 1..20: note = Description of Artificial Sequence: Synthetic oligonucleotide
  misc_feature 1..20: note = Target: FXN; (-) strand; PAM type: YTN; PAM sequence: TTG
  source 1..20: mol_type = other DNA
ggaggcggaggcaggtggat

SEQ ID NO: 29429 - DNA, 20 bp, synthetic construct
  misc_feature 1..20: note = Description of Artificial Sequence: Synthetic oligonucleotide
  misc_feature 1..20: note = Target: FXN; (-) strand; PAM type: YTN; PAM sequence: TTT
  source 1..20: mol_type = other DNA
gggaggcggaggcaggtgga

SEQ ID NO: 29430 - DNA, 20 bp, synthetic construct
  misc_feature 1..20: note = Description of Artificial Sequence: Synthetic oligonucleotide
  misc_feature 1..20: note = Target: FXN; (-) strand; PAM type: YTN; PAM sequence: CTT
  source 1..20: mol_type = other DNA
tgggaggcggaggcaggtgg

SEQ ID NO: 29431 - DNA, 20 bp, synthetic construct
  misc_feature 1..20: note = Description of Artificial Sequence: Synthetic oligonucleotide
  misc_feature 1..20: note = Target: FXN; (-) strand; PAM type: YTN; PAM sequence: CTG
  source 1..20: mol_type = other DNA
taatcccagcactttgggag

SEQ ID NO: 29432 - DNA, 20 bp, synthetic construct
  misc_feature 1..20: note = Description of Artificial Sequence: Synthetic oligonucleotide
  misc_feature 1..20: note = Target: FXN; (-) strand; PAM type: YTN; PAM sequence: CTC
  source 1..20: mol_type = other DNA
acgcctgtaatcccagcact

SEQ ID NO: 29433 - DNA, 20 bp, synthetic construct
  misc_feature 1..20: note = Description of Artificial Sequence: Synthetic oligonucleotide
  misc_feature 1..20: note = Target: FXN; (-) strand; PAM type: YTN; PAM sequence: CTG
  source 1..20: mol_type = other DNA
ggtgcagtggctcacgcctg

SEQ ID NO: 29434 - DNA, 20 bp, synthetic construct
  misc_feature 1..20: note = Description of Artificial Sequence: Synthetic oligonucleotide
  misc_feature 1..20: note = Target: FXN; (-) strand; PAM type: YTN; PAM sequence: CTG
  source 1..20: mol_type = other DNA
gctgggtgcagtggctcacg

SEQ ID NO: 29435 - DNA, 20 bp, synthetic construct
  misc_feature 1..20: note = Description of Artificial Sequence: Synthetic oligonucleotide
  misc_feature 1..20: note = Target: FXN; (-) strand; PAM type: YTN; PAM sequence: TTC
  source 1..20: mol_type = other DNA
tggctgggtgcagtggctca

SEQ ID NO: 29436 - DNA, 20 bp, synthetic construct
  misc_feature 1..20: note = Description of Artificial Sequence: Synthetic oligonucleotide
  misc_feature 1..20: note = Target: FXN; (-) strand; PAM type: YTN; PAM sequence: TTT
  source 1..20: mol_type = other DNA
ctggctgggtgcagtggctc

SEQ ID NO: 29437 - DNA, 20 bp, synthetic construct
  misc_feature 1..20: note = Description of Artificial Sequence: Synthetic oligonucleotide
  misc_feature 1..20: note = Target: FXN; (-) strand; PAM type: YTN; PAM sequence: TTA
  source 1..20: mol_type = other DNA
gaaggcatttctggctgggt

SEQ ID NO: 29438 - DNA, 20 bp, synthetic construct
  misc_feature 1..20: note = Description of Artificial Sequence: Synthetic oligonucleotide
  misc_feature 1..20: note = Target: FXN; (-) strand; PAM type: YTN; PAM sequence: TTA
  source 1..20: mol_type = other DNA
agataaaccaaagattagaa

SEQ ID NO: 29439 - DNA, 20 bp, synthetic construct
  misc_feature 1..20: note = Description of Artificial Sequence: Synthetic oligonucleotide
  misc_feature 1..20: note = Target: FXN; (-) strand; PAM type: YTN; PAM sequence: CTA
  source 1..20: mol_type = other DNA
attaagataaaccaaagatt

SEQ ID NO: 29440 - DNA, 20 bp, synthetic construct
  misc_feature 1..20: note = Description of Artificial Sequence: Synthetic oligonucleotide
  misc_feature 1..20: note = Target: FXN; (-) strand; PAM type: YTN; PAM sequence: CTG
  source 1..20: mol_type = other DNA
gctaattaagataaaccaaa

SEQ ID NO: 29441 - DNA, 20 bp, synthetic construct
  misc_feature 1..20: note = Description of Artificial Sequence: Synthetic oligonucleotide
  misc_feature 1..20: note = Target: FXN; (-) strand; PAM type: YTN; PAM sequence: CTC
  source 1..20: mol_type = other DNA
caagtgtcctggctaattaa

SEQ ID NO: 29442 - DNA, 20 bp, synthetic construct
  misc_feature 1..20: note = Description of Artificial Sequence: Synthetic oligonucleotide
  misc_feature 1..20: note = Target: FXN; (-) strand; PAM type: YTN; PAM sequence: TTC
  source 1..20: mol_type = other DNA
gggatgcactccaagtgtcc

SEQ ID NO: 29443 - DNA, 20 bp, synthetic construct
  misc_feature 1..20: note = Description of Artificial Sequence: Synthetic oligonucleotide
  misc_feature 1..20: note = Target: FXN; (-) strand; PAM type: YTN; PAM sequence: CTT
  source 1..20: mol_type = other DNA
cgggatgcactccaagtgtc

SEQ ID NO: 29444 - DNA, 20 bp, synthetic construct
  misc_feature 1..20: note = Description of Artificial Sequence: Synthetic oligonucleotide
  misc_feature 1..20: note = Target: FXN; (-) strand; PAM type: YTN; PAM sequence: CTG
  source 1..20: mol_type = other DNA
atcaggtacttcgggatgca

SEQ ID NO: 29445 - DNA, 20 bp, synthetic construct
  misc_feature 1..20: note = Description of Artificial Sequence: Synthetic oligonucleotide
  misc_feature 1..20: note = Target: FXN; (-) strand; PAM type: YTN; PAM sequence: TTC
  source 1..20: mol_type = other DNA
caaaggggccactgatcagg

SEQ ID NO: 29446 - DNA, 20 bp, synthetic construct
  misc_feature 1..20: note = Description of Artificial Sequence: Synthetic oligonucleotide
  misc_feature 1..20: note = Target: FXN; (-) strand; PAM type: YTN; PAM sequence: TTA
  source 1..20: mol_type = other DNA
cacattccaaaggggccact

SEQ ID NO: 29447 - DNA, 20 bp, synthetic construct
  misc_feature 1..20: note = Description of Artificial Sequence: Synthetic oligonucleotide
  misc_feature 1..20: note = Target: FXN; (-) strand; PAM type: YTN; PAM sequence: TTT
  source 1..20: mol_type = other DNA
acacattccaaaggggccac

SEQ ID NO: 29448 - DNA, 20 bp, synthetic construct
  misc_feature 1..20: note = Description of Artificial Sequence: Synthetic oligonucleotide
  misc_feature 1..20: note = Target: FXN; (-) strand; PAM type: YTN; PAM sequence: TTT
  source 1..20: mol_type = other DNA
tacacattccaaaggggcca

SEQ ID NO: 29449 - DNA, 20 bp, synthetic construct
  misc_feature 1..20: note = Description of Artificial Sequence: Synthetic oligonucleotide
  misc_feature 1..20: note = Target: FXN; (-) strand; PAM type: YTN; PAM sequence: CTG
  source 1..20: mol_type = other DNA
agttttacacattccaaagg

SEQ ID NO: 29450 - DNA, 20 bp, synthetic construct
  misc_feature 1..20: note = Description of Artificial Sequence: Synthetic oligonucleotide
  misc_feature 1..20: note = Target: FXN; (-) strand; PAM type: YTN; PAM sequence: CTG
  source 1..20: mol_type = other DNA
tagcggatgcagggatataa

SEQ ID NO: 29451 - DNA, 20 bp, synthetic construct
  misc_feature 1..20: note = Description of Artificial Sequence: Synthetic oligonucleotide
  misc_feature 1..20: note = Target: FXN; (-) strand; PAM type: YTN; PAM sequence: CTC
  source 1..20: mol_type = other DNA
tgtagcggatgcagggatat

SEQ ID NO: 29452 - DNA, 20 bp, synthetic construct
  misc_feature 1..20: note = Description of Artificial Sequence: Synthetic oligonucleotide
  misc_feature 1..20: note = Target: FXN; (-) strand; PAM type: YTN; PAM sequence: CTG
  source 1..20: mol_type = other DNA
tctctgtagcggatgcaggg

SEQ ID NO: 29453 - DNA, 20 bp, synthetic construct
  misc_feature 1..20: note = Description of Artificial Sequence: Synthetic oligonucleotide
  misc_feature 1..20: note = Target: FXN; (-) strand; PAM type: YTN; PAM sequence: TTC
  source 1..20: mol_type = other DNA
tgtctctgtagcggatgcag

SEQ ID NO: 29454 - DNA, 20 bp, synthetic construct
  misc_feature 1..20: note = Description of Artificial Sequence: Synthetic oligonucleotide
  misc_feature 1..20: note = Target: FXN; (-) strand; PAM type: YTN; PAM sequence: TTG
  source 1..20: mol_type = other DNA
gattctgtctctgtagcgga

SEQ ID NO: 29455 - DNA, 20 bp, synthetic construct
  misc_feature 1..20: note = Description of Artificial Sequence: Synthetic oligonucleotide
  misc_feature 1..20: note = Target: FXN; (-) strand; PAM type: YTN; PAM sequence: CTT
  source 1..20: mol_type = other DNA
ggattctgtctctgtagcgg

SEQ ID NO: 29456 - DNA, 20 bp, synthetic construct
  misc_feature 1..20: note = Description of Artificial Sequence: Synthetic oligonucleotide
  misc_feature 1..20: note = Target: FXN; (-) strand; PAM type: YTN; PAM sequence: CTA
  source 1..20: mol_type = other DNA
tacagccagagaagatggaa

SEQ ID NO: 29457 - DNA, 20 bp, synthetic construct
  misc_feature 1..20: note = Description of Artificial Sequence: Synthetic oligonucleotide
  misc_feature 1..20: note = Target: FXN; (-) strand; PAM type: YTN; PAM sequence: TTA
  source 1..20: mol_type = other DNA
aactatacagccagagaaga

SEQ ID NO: 29458 - DNA, 20 bp, synthetic construct
  misc_feature 1..20: note = Description of Artificial Sequence: Synthetic oligonucleotide
  misc_feature 1..20: note = Target: FXN; (-) strand; PAM type: YTN; PAM sequence: CTT
  source 1..20: mol_type = other DNA
aaactatacagccagagaag

SEQ ID NO: 29459 - DNA, 20 bp, synthetic construct
  misc_feature 1..20: note = Description of Artificial Sequence: Synthetic oligonucleotide
  misc_feature 1..20: note = Target: FXN; (-) strand; PAM type: YTN; PAM sequence: TTC
  source 1..20: mol_type = other DNA
cttaaactatacagccagag

SEQ ID NO: 29460 - DNA, 20 bp, synthetic construct
  misc_feature 1..20: note = Description of Artificial Sequence: Synthetic oligonucleotide
  misc_feature 1..20: note = Target: FXN; (-) strand; PAM type: YTN; PAM sequence: TTC
  source 1..20: mol_type = other DNA
cattccttaaactatacagc

SEQ ID NO: 29461 - DNA, 20 bp, synthetic construct
  misc_feature 1..20: note = Description of Artificial Sequence: Synthetic oligonucleotide
  misc_feature 1..20: note = Target: FXN; (-) strand; PAM type: YTN; PAM sequence: CTT
  source 1..20: mol_type = other DNA
ccattccttaaactatacag

SEQ ID NO: 29462 - DNA, 20 bp, synthetic construct
  misc_feature 1..20: note = Description of Artificial Sequence: Synthetic oligonucleotide
  misc_feature 1..20: note = Target: FXN; (-) strand; PAM type: YTN; PAM sequence: CTG
  source 1..20: mol_type = other DNA
gtgccttccattccttaaac

SEQ ID NO: 29463 - DNA, 20 bp, synthetic construct
  misc_feature 1..20: note = Description of Artificial Sequence: Synthetic oligonucleotide
  misc_feature 1..20: note = Target: FXN; (-) strand; PAM type: YTN; PAM sequence: TTC
  source 1..20: mol_type = other DNA
tggtgccttccattccttaa

SEQ ID NO: 29464 - DNA, 20 bp, synthetic construct
  misc_feature 1..20: note = Description of Artificial Sequence: Synthetic oligonucleotide
  misc_feature 1..20: note = Target: FXN; (-) strand; PAM type: YTN; PAM sequence: CTG
  source 1..20: mol_type = other DNA
ttctggtgccttccattcct

SEQ ID NO: 29465 - DNA, 20 bp, synthetic construct
  misc_feature 1..20: note = Description of Artificial Sequence: Synthetic oligonucleotide
  misc_feature 1..20: note = Target: FXN; (-) strand; PAM type: YTN; PAM sequence: TTC
  source 1..20: mol_type = other DNA
aataaatctgttctggtgcc

SEQ ID NO: 29466 - DNA, 20 bp, synthetic construct
  misc_feature 1..20: note = Description of Artificial Sequence: Synthetic oligonucleotide
  misc_feature 1..20: note = Target: FXN; (-) strand; PAM type: YTN; PAM sequence: TTT
  source 1..20: mol_type = other DNA
caataaatctgttctggtgc

SEQ ID NO: 29467 - DNA, 20 bp, synthetic construct
  misc_feature 1..20: note = Description of Artificial Sequence: Synthetic oligonucleotide
  misc_feature 1..20: note = Target: FXN; (-) strand; PAM type: YTN; PAM sequence: CTA
  source 1..20: mol_type = other DNA
ataaacatttcaataaatct

SEQ ID NO: 29468 - DNA, 20 bp, synthetic construct
  misc_feature 1..20: note = Description of Artificial Sequence: Synthetic oligonucleotide
  misc_feature 1..20: note = Target: FXN; (-) strand; PAM type: YTN; PAM sequence: TTC
  source 1..20: mol_type = other DNA
agctaataaacatttcaata

SEQ ID NO: 29469 - DNA, 20 bp, synthetic construct
  misc_feature 1..20: note = Description of Artificial Sequence: Synthetic oligonucleotide
  misc_feature 1..20: note = Target: FXN; (-) strand; PAM type: YTN; PAM sequence: CTT
  source 1..20: mol_type = other DNA
cagctaataaacatttcaat

SEQ ID NO: 29470 - DNA, 20 bp, synthetic construct
  misc_feature 1..20: note = Description of Artificial Sequence: Synthetic oligonucleotide
  misc_feature 1..20: note = Target: FXN; (-) strand; PAM type: YTN; PAM sequence: CTA
  source 1..20: mol_type = other DNA
aataaatcttcagctaataa

SEQ ID NO: 29471 - DNA, 20 bp, synthetic construct
  misc_feature 1..20: note = Description of Artificial Sequence: Synthetic oligonucleotide
  misc_feature 1..20: note = Target: FXN; (-) strand; PAM type: YTN; PAM sequence: CTG
  source 1..20: mol_type = other DNA
tctaaataaatcttcagcta

SEQ ID NO: 29472 - DNA, 20 bp, synthetic construct
  misc_feature 1..20: note = Description of Artificial Sequence: Synthetic oligonucleotide
  misc_feature 1..20: note = Target: FXN; (-) strand; PAM type: YTN; PAM sequence: CTC
  source 1..20: mol_type = other DNA
aactgtctaaataaatcttc

SEQ ID NO: 29473 - DNA, 20 bp, synthetic construct
  misc_feature 1..20: note = Description of Artificial Sequence: Synthetic oligonucleotide
  misc_feature 1..20: note = Target: FXN; (-) strand; PAM type: YTN; PAM sequence: TTC
  source 1..20: mol_type = other DNA
ctcaactgtctaaataaatc

SEQ ID NO: 29474 - DNA, 20 bp, synthetic construct
  misc_feature 1..20: note = Description of Artificial Sequence: Synthetic oligonucleotide
  misc_feature 1..20: note = Target: FXN; (-) strand; PAM type: YTN; PAM sequence: TTT
  source 1..20: mol_type = other DNA
cctcaactgtctaaataaat

SEQ ID NO: 29475 - DNA, 20 bp, synthetic construct
  misc_feature 1..20: note = Description of Artificial Sequence: Synthetic oligonucleotide
  misc_feature 1..20: note = Target: FXN; (-) strand; PAM type: YTN; PAM sequence: TTT
  source 1..20: mol_type = other DNA
tcctcaactgtctaaataaa

SEQ ID NO: 29476 - DNA, 20 bp, synthetic construct
  misc_feature 1..20: note = Description of Artificial Sequence: Synthetic oligonucleotide
  misc_feature 1..20: note = Target: FXN; (-) strand; PAM type: YTN; PAM sequence: CTG
  source 1..20: mol_type = other DNA
atgttttcctcaactgtcta

SEQ ID NO: 29477 - DNA, 20 bp, synthetic construct
  misc_feature 1..20: note = Description of Artificial Sequence: Synthetic oligonucleotide
  misc_feature 1..20: note = Target: FXN; (-) strand; PAM type: YTN; PAM sequence: CTG
  source 1..20: mol_type = other DNA
ggtgctgatgttttcctcaa

SEQ ID NO: 29478 - DNA, 20 bp, synthetic construct
  misc_feature 1..20: note = Description of Artificial Sequence: Synthetic oligonucleotide
  misc_feature 1..20: note = Target: FXN; (-) strand; PAM type: YTN; PAM sequence: CTG
  source 1..20: mol_type = other DNA
ctgggtgctgatgttttcct

SEQ ID NO: 29479 - DNA, 20 bp, synthetic construct
  misc_feature 1..20: note = Description of Artificial Sequence: Synthetic oligonucleotide
  misc_feature 1..20: note = Target: FXN; (-) strand; PAM type: YTN; PAM sequence: TTA
  source 1..20: mol_type = other DNA
ctgctgggtgctgatgtttt

SEQ ID NO: 29480 - DNA, 20 bp, synthetic construct
  misc_feature 1..20: note = Description of Artificial Sequence: Synthetic oligonucleotide
  misc_feature 1..20: note = Target: FXN; (-) strand; PAM type: YTN; PAM sequence: TTT
  source 1..20: mol_type = other DNA
actgctgggtgctgatgttt

SEQ ID NO: 29481 - DNA, 20 bp, synthetic construct
  misc_feature 1..20: note = Description of Artificial Sequence: Synthetic oligonucleotide
  misc_feature 1..20: note = Target: FXN; (-) strand; PAM type: YTN; PAM sequence: TTT
  source 1..20: mol_type = other DNA
tactgctgggtgctgatgtt

SEQ ID NO: 29482 - DNA, 20 bp, synthetic construct
  misc_feature 1..20: note = Description of Artificial Sequence: Synthetic oligonucleotide
  misc_feature 1..20: note = Target: FXN; (-) strand; PAM type: YTN; PAM sequence: TTG
  source 1..20: mol_type = other DNA
agagccaattttactgctgg

SEQ ID NO: 29483 - DNA, 20 bp, synthetic construct
  misc_feature 1..20: note = Description of Artificial Sequence: Synthetic oligonucleotide
  misc_feature 1..20: note = Target: FXN; (-) strand; PAM type: YTN; PAM sequence: TTT
  source 1..20: mol_type = other DNA
gagagccaattttactgctg

SEQ ID NO: 29484 - DNA, 20 bp, synthetic construct
  misc_feature 1..20: note = Description of Artificial Sequence: Synthetic oligonucleotide
  misc_feature 1..20: note = Target: FXN; (-) strand; PAM type: YTN; PAM sequence: CTT
  source 1..20: mol_type = other DNA
tgagagccaattttactgct

SEQ ID NO: 29485 - DNA, 20 bp, synthetic construct
  misc_feature 1..20: note = Description of Artificial Sequence: Synthetic oligonucleotide
  misc_feature 1..20: note = Target: FXN; (-) strand; PAM type: YTN; PAM sequence: TTC
  source 1..20: mol_type = other DNA
cacaggagaagaaaatcttt

SEQ ID NO: 29486 - DNA, 20 bp, synthetic construct
  misc_feature 1..20: note = Description of Artificial Sequence: Synthetic oligonucleotide
  misc_feature 1..20: note = Target: FXN; (-) strand; PAM type: YTN; PAM sequence: TTT
  source 1..20: mol_type = other DNA
ccacaggagaagaaaatctt

SEQ ID NO: 29487 - DNA, 20 bp, synthetic construct
  misc_feature 1..20: note = Description of Artificial Sequence: Synthetic oligonucleotide
  misc_feature 1..20: note = Target: FXN; (-) strand; PAM type: YTN; PAM sequence: CTT
  source 1..20: mol_type = other DNA
tccacaggagaagaaaatct

SEQ ID NO: 29488 - DNA, 20 bp, synthetic construct
  misc_feature 1..20: note = Description of Artificial Sequence: Synthetic oligonucleotide
  misc_feature 1..20: note = Target: FXN; (-) strand; PAM type: YTN; PAM sequence: CTG
  source 1..20: mol_type = other DNA
actttccacaggagaagaaa

SEQ ID NO: 29489 - DNA, 20 bp, synthetic construct
  misc_feature 1..20: note = Description of Artificial Sequence: Synthetic oligonucleotide
  misc_feature 1..20: note = Target: FXN; (-) strand; PAM type: YTN; PAM sequence: CTC
  source 1..20: mol_type = other DNA
agaggtctgactttccacag

SEQ ID NO: 29490 - DNA, 20 bp, synthetic construct
  misc_feature 1..20: note = Description of Artificial Sequence: Synthetic oligonucleotide
  misc_feature 1..20: note = Target: FXN; (-) strand; PAM type: YTN; PAM sequence: CTG
  source 1..20: mol_type = other DNA
gatggggcctcagaggtctg

SEQ ID NO: 29491 - DNA, 20 bp, synthetic construct
  misc_feature 1..20: note = Description of Artificial Sequence: Synthetic oligonucleotide
  misc_feature 1..20: note = Target: FXN; (-) strand; PAM type: YTN; PAM sequence: CTA
  source 1..20: mol_type = other DNA
cctggatggggcctcagagg

SEQ ID NO: 29492 - DNA, 20 bp, synthetic construct
  misc_feature 1..20: note = Description of Artificial Sequence: Synthetic oligonucleotide
  misc_feature 1..20: note = Target: FXN; (-) strand; PAM type: YTN; PAM sequence: TTC
  source 1..20: mol_type = other DNA
tacctggatggggcctcaga

SEQ ID NO: 29493 - DNA, 20 bp, synthetic construct
  misc_feature 1..20: note = Description of Artificial Sequence: Synthetic oligonucleotide
  misc_feature 1..20: note = Target: FXN; (-) strand; PAM type: YTN; PAM sequence: CTT
  source 1..20: mol_type = other DNA
ctacctggatggggcctcag

SEQ ID NO: 29494 - DNA, 20 bp, synthetic construct
  misc_feature 1..20: note = Description of Artificial Sequence: Synthetic oligonucleotide
  misc_feature 1..20: note = Target: FXN; (-) strand; PAM type: YTN; PAM sequence: CTA
  source 1..20: mol_type = other DNA
gtacttctacctggatgggg

SEQ ID NO: 29495 - DNA, 20 bp, synthetic construct
  misc_feature 1..20: note = Description of Artificial Sequence: Synthetic oligonucleotide
  misc_feature 1..20: note = Target: FXN; (-) strand; PAM type: YTN; PAM sequence: TTG
  source 1..20: mol_type = other DNA
cactagtacttctacctgga

SEQ ID NO: 29496 - DNA, 20 bp, synthetic construct
  misc_feature 1..20: note = Description of Artificial Sequence: Synthetic oligonucleotide
  misc_feature 1..20: note = Target: FXN; (-) strand; PAM type: YTN; PAM sequence: CTT
  source 1..20: mol_type = other DNA
gcactagtacttctacctgg

SEQ ID NO: 29497 - DNA, 20 bp, synthetic construct
  misc_feature 1..20: note = Description of Artificial Sequence: Synthetic oligonucleotide
  misc_feature 1..20: note = Target: FXN; (-) strand; PAM type: YTN; PAM sequence: TTC
  source 1..20: mol_type = other DNA
ttgcactagtacttctacct

SEQ ID NO: 29498 - DNA, 20 bp, synthetic construct
  misc_feature 1..20: note = Description of Artificial Sequence: Synthetic oligonucleotide
  misc_feature 1..20: note = Target: FXN; (-) strand; PAM type: YTN; PAM sequence: CTT
  source 1..20: mol_type = other DNA
cttgcactagtacttctacc

SEQ ID NO: 29499 - DNA, 20 bp, synthetic construct
  misc_feature 1..20: note = Description of Artificial Sequence: Synthetic oligonucleotide
  misc_feature 1..20: note = Target: FXN; (-) strand; PAM type: YTN; PAM sequence: TTC
  source 1..20: mol_type = other DNA
ccacagatcacagaaacaca

SEQ ID NO: 29500 - DNA, 20 bp, synthetic construct
  misc_feature 1..20: note = Description of Artificial Sequence: Synthetic oligonucleotide
  misc_feature 1..20: note = Target: FXN; (-) strand; PAM type: YTN; PAM sequence: TTA
  source 1..20: mol_type = other DNA
acaatgttcccacagatcac

SEQ ID NO: 29501 - DNA, 20 bp, synthetic construct
  misc_feature 1..20: note = Description of Artificial Sequence: Synthetic oligonucleotide
  misc_feature 1..20: note = Target: FXN; (-) strand; PAM type: YTN; PAM sequence: TTG
  source 1..20: mol_type = other DNA
aggtcaagatgtggcgttaa

SEQ ID NO: 29502 - DNA, 20 bp, synthetic construct
  misc_feature 1..20: note = Description of Artificial Sequence: Synthetic oligonucleotide
  misc_feature 1..20: note = Target: FXN; (-) strand; PAM type: YTN; PAM sequence: TTT
  source 1..20: mol_type = other DNA
gaggtcaagatgtggcgtta

SEQ ID NO: 29503 - DNA, 20 bp, synthetic construct
  misc_feature 1..20: note = Description of Artificial Sequence: Synthetic oligonucleotide
  misc_feature 1..20: note = Target: FXN; (-) strand; PAM type: YTN; PAM sequence: CTA
  source 1..20: mol_type = other DNA
aacaatttgaggtcaagatg

SEQ ID NO: 29504 - DNA, 20 bp, synthetic construct
  misc_feature 1..20: note = Description of Artificial Sequence: Synthetic oligonucleotide
  misc_feature 1..20: note = Target: FXN; (-) strand; PAM type: YTN; PAM sequence: CTG
  source 1..20: mol_type = other DNA
gccaggagctaaacaatttg

SEQ ID NO: 29505 - DNA, 20 bp, synthetic construct
  misc_feature 1..20: note = Description of Artificial Sequence: Synthetic oligonucleotide
  misc_feature 1..20: note = Target: FXN; (-) strand; PAM type: YTN; PAM sequence: TTA
  source 1..20: mol_type = other DNA
caggtgtgagccaccgtgtc

SEQ ID NO: 29506 - DNA, 20 bp, synthetic construct
  misc_feature 1..20: note = Description of Artificial Sequence: Synthetic oligonucleotide
  misc_feature 1..20: note = Target: FXN; (-) strand; PAM type: YTN; PAM sequence: CTG
  source 1..20: mol_type = other DNA
ggattacaggtgtgagccac

SEQ ID NO: 29507 - DNA, 20 bp, synthetic construct
  misc_feature 1..20: note = Description of Artificial Sequence: Synthetic oligonucleotide
  misc_feature 1..20: note = Target: FXN; (-) strand; PAM type: YTN; PAM sequence: CTC
  source 1..20: mol_type = other DNA
aaagtgctgggattacaggt

SEQ ID NO: 29508 - DNA, 20 bp, synthetic construct
  misc_feature 1..20: note = Description of Artificial Sequence: Synthetic oligonucleotide
  misc_feature 1..20: note = Target: FXN; (-) strand; PAM type: YTN; PAM sequence: CTC
  source 1..20: mol_type = other DNA
tcaaagtgctgggattacag

SEQ ID NO: 29509 - DNA, 20 bp, synthetic construct
  misc_feature 1..20: note = Description of Artificial Sequence: Synthetic oligonucleotide
  misc_feature 1..20: note = Target: FXN; (-) strand; PAM type: YTN; PAM sequence: CTC
  source 1..20: mol_type = other DNA
agcctctcaaagtgctggga

SEQ ID NO: 29510 - DNA, 20 bp, synthetic construct
  misc_feature 1..20: note = Description of Artificial Sequence: Synthetic oligonucleotide
  misc_feature 1..20: note = Target: FXN; (-) strand; PAM type: YTN; PAM sequence: CTG
  source 1..20: mol_type = other DNA
cctcagcctctcaaagtgct

SEQ ID NO: 29511 - DNA, 20 bp, synthetic construct
  misc_feature 1..20: note = Description of Artificial Sequence: Synthetic oligonucleotide
  misc_feature 1..20: note = Target: FXN; (-) strand; PAM type: YTN; PAM sequence: CTC
  source 1..20: mol_type = other DNA
aggtgatccacctgcctcag

SEQ ID NO: 29512 - DNA, 20 bp, synthetic construct
  misc_feature 1..20: note = Description of Artificial Sequence: Synthetic oligonucleotide
  misc_feature 1..20: note = Target: FXN; (-) strand; PAM type: YTN; PAM sequence: CTA
  source 1..20: mol_type = other DNA
acctcaggtgatccacctgc

SEQ ID NO: 29513 - DNA, 20 bp, synthetic construct
  misc_feature 1..20: note = Description of Artificial Sequence: Synthetic oligonucleotide
  misc_feature 1..20: note = Target: FXN; (-) strand; PAM type: YTN; PAM sequence: CTC
  source 1..20: mol_type = other DNA
ctaacctcaggtgatccacc

SEQ ID NO: 29514 - DNA, 20 bp, synthetic construct
  misc_feature 1..20: note = Description of Artificial Sequence: Synthetic oligonucleotide
  misc_feature 1..20: note = Target: FXN; (-) strand; PAM type: YTN; PAM sequence: CTC
  source 1..20: mol_type = other DNA
gaactcctaacctcaggtga

SEQ ID NO: 29515 - DNA, 20 bp, synthetic construct
  misc_feature 1..20: note = Description of Artificial Sequence: Synthetic oligonucleotide
  misc_feature 1..20: note = Target: FXN; (-) strand; PAM type: YTN; PAM sequence: CTG
  source 1..20: mol_type = other DNA
gcctcgaactcctaacctca

SEQ ID NO: 29516 - DNA, 20 bp, synthetic construct
  misc_feature 1..20: note = Description of Artificial Sequence: Synthetic oligonucleotide
  misc_feature 1..20: note = Target: FXN; (-) strand; PAM type: YTN; PAM sequence: TTG
  source 1..20: mol_type = other DNA
accaggctggcctcgaactc

SEQ ID NO: 29517 - DNA, 20 bp, synthetic construct
  misc_feature 1..20: note = Description of Artificial Sequence: Synthetic oligonucleotide
  misc_feature 1..20: note = Target: FXN; (-) strand; PAM type: YTN; PAM sequence: TTA
  source 1..20: mol_type = other DNA
ccatgttgaccaggctggcc

SEQ ID NO: 29518 - DNA, 20 bp, synthetic construct
  misc_feature 1..20: note = Description of Artificial Sequence: Synthetic oligonucleotide
  misc_feature 1..20: note = Target: FXN; (-) strand; PAM type: YTN; PAM sequence: TTT
  source 1..20: mol_type = other DNA
accatgttgaccaggctggc

SEQ ID NO: 29519 - DNA, 20 bp, synthetic construct
  misc_feature 1..20: note = Description of Artificial Sequence: Synthetic oligonucleotide
  misc_feature 1..20: note = Target: FXN; (-) strand; PAM type: YTN; PAM sequence: TTT
  source 1..20: mol_type = other DNA
taccatgttgaccaggctgg

SEQ ID NO: 29520 - DNA, 20 bp, synthetic construct
  misc_feature 1..20: note = Description of Artificial Sequence: Synthetic oligonucleotide
  misc_feature 1..20: note = Target: FXN; (-) strand; PAM type: YTN; PAM sequence: TTA
  source 1..20: mol_type = other DNA
gtagaggcggggttttacca

SEQ ID NO: 29521 - DNA, 20 bp, synthetic construct
  misc_feature 1..20: note = Description of Artificial Sequence: Synthetic oligonucleotide
  misc_feature 1..20: note = Target: FXN; (-) strand; PAM type: YTN; PAM sequence: TTT
  source 1..20: mol_type = other DNA
agtagaggcggggttttacc

SEQ ID NO: 29522 - DNA, 20 bp, synthetic construct
  misc_feature 1..20: note = Description of Artificial Sequence: Synthetic oligonucleotide
  misc_feature 1..20: note = Target: FXN; (-) strand; PAM type: YTN; PAM sequence: TTT
  source 1..20: mol_type = other DNA
tagtagaggcggggttttac

SEQ ID NO: 29523 - DNA, 20 bp, synthetic construct
  misc_feature 1..20: note = Description of Artificial Sequence: Synthetic oligonucleotide
  misc_feature 1..20: note = Target: FXN; (-) strand; PAM type: YTN; PAM sequence: TTT
  source 1..20: mol_type = other DNA
ttagtagaggcggggtttta

SEQ ID NO: 29524 - DNA, 20 bp, synthetic construct
  misc_feature 1..20: note = Description of Artificial Sequence: Synthetic oligonucleotide
  misc_feature 1..20: note = Target: FXN; (-) strand; PAM type: YTN; PAM sequence: TTG
  source 1..20: mol_type = other DNA
tatttttagtagaggcgggg

SEQ ID NO: 29525 - DNA, 20 bp, synthetic construct
  misc_feature 1..20: note = Description of Artificial Sequence: Synthetic oligonucleotide
  misc_feature 1..20: note = Target: FXN; (-) strand; PAM type: YTN; PAM sequence: TTT
  source 1..20: mol_type = other DNA
gtatttttagtagaggcggg

SEQ ID NO: 29526 - DNA, 20 bp, synthetic construct
  misc_feature 1..20: note = Description of Artificial Sequence: Synthetic oligonucleotide
  misc_feature 1..20: note = Target: FXN; (-) strand; PAM type: YTN; PAM sequence: TTT
  source 1..20: mol_type = other DNA
tgtatttttagtagaggcgg

SEQ ID NO: 29527 - DNA, 20 bp, synthetic construct
  misc_feature 1..20: note = Description of Artificial Sequence: Synthetic oligonucleotide
  misc_feature 1..20: note = Target: FXN; (-) strand; PAM type: YTN; PAM sequence: TTT
  source 1..20: mol_type = other DNA
ttgtatttttagtagaggcg

SEQ ID NO: 29528 - DNA, 20 bp, synthetic construct
  misc_feature 1..20: note = Description of Artificial Sequence: Synthetic oligonucleotide
  misc_feature 1..20: note = Target: FXN; (-) strand; PAM type: YTN; PAM sequence: CTA
  source 1..20: mol_type = other DNA
atttttgtatttttagtaga

SEQ ID NO: 29529 - DNA, 20 bp, synthetic construct
  misc_feature 1..20: note = Description of Artificial Sequence: Synthetic oligonucleotide
  misc_feature 1..20: note = Target: FXN; (-) strand; PAM type: YTN; PAM sequence: CTA
  source 1..20: mol_type = other DNA
cggccagctaatttttgtat

SEQ ID NO: 29530 - DNA, 20 bp, synthetic construct
  misc_feature 1..20: note = Description of Artificial Sequence: Synthetic oligonucleotide
  misc_feature 1..20: note = Target: FXN; (-) strand; PAM type: YTN; PAM sequence: CTG
  source 1..20: mol_type = other DNA
ggataacaggcgtgcgccac

SEQ ID NO: 29531 - DNA, 20 bp, synthetic construct
  misc_feature 1..20: note = Description of Artificial Sequence: Synthetic oligonucleotide
  misc_feature 1..20: note = Target: FXN; (-) strand; PAM type: YTN; PAM sequence: CTC
  source 1..20: mol_type = other DNA
ccgagtagctgggataacag

SEQ ID NO: 29532 - DNA, 20 bp, synthetic construct
  misc_feature 1..20: note = Description of Artificial Sequence: Synthetic oligonucleotide
  misc_feature 1..20: note = Target: FXN; (-) strand; PAM type: YTN; PAM sequence: CTC
  source 1..20: mol_type = other DNA
agcctcccgagtagctggga

SEQ ID NO: 29533 - DNA, 20 bp, synthetic construct
  misc_feature 1..20: note = Description of Artificial Sequence: Synthetic oligonucleotide
  misc_feature 1..20: note = Target: FXN; (-) strand; PAM type: YTN; PAM sequence: CTG
  source 1..20: mol_type = other DNA
cctcagcctcccgagtagct

SEQ ID NO: 29534 - DNA, 20 bp, synthetic construct
  misc_feature 1..20: note = Description of Artificial Sequence: Synthetic oligonucleotide
  misc_feature 1..20: note = Target: FXN; (-) strand; PAM type: YTN; PAM sequence: CTC
  source 1..20: mol_type = other DNA
ctgcctcagcctcccgagta

SEQ ID NO: 29535 - DNA, 20 bp, synthetic construct
  misc_feature 1..20: note = Description of Artificial Sequence: Synthetic oligonucleotide
  misc_feature 1..20: note = Target: FXN; (-) strand; PAM type: YTN; PAM sequence: TTC
  source 1..20: mol_type = other DNA
tcctgcctcagcctcccgag

SEQ ID NO: 29536 - DNA, 20 bp, synthetic construct
  misc_feature 1..20: note = Description of Artificial Sequence: Synthetic oligonucleotide
  misc_feature 1..20: note = Target: FXN; (-) strand; PAM type: YTN; PAM sequence: TTC
  source 1..20: mol_type = other DNA
aagcaattctcctgcctcag

SEQ ID NO: 29537 - DNA, 20 bp, synthetic construct
  misc_feature 1..20: note = Description of Artificial Sequence: Synthetic oligonucleotide
  misc_feature 1..20: note = Target: FXN; (-) strand; PAM type: YTN; PAM sequence: CTC
  source 1..20: mol_type = other DNA
caccacccaggttcaagcaa

SEQ ID NO: 29538 - DNA, 20 bp, synthetic construct
  misc_feature 1..20: note = Description of Artificial Sequence: Synthetic oligonucleotide
  misc_feature 1..20: note = Target: FXN; (-) strand; PAM type: YTN; PAM sequence: CTG
  source 1..20: mol_type = other DNA
caacctccaccacccaggtt

SEQ ID NO: 29539 - DNA, 20 bp, synthetic construct
  misc_feature 1..20: note = Description of Artificial Sequence: Synthetic oligonucleotide
  misc_feature 1..20: note = Target: FXN; (-) strand; PAM type: YTN; PAM sequence: CTC
  source 1..20: mol_type = other DNA
actgcaacctccaccaccca

SEQ ID NO: 29540 - DNA, 20 bp, synthetic construct
  misc_feature 1..20: note = Description of Artificial Sequence: Synthetic oligonucleotide
  misc_feature 1..20: note = Target: FXN; (-) strand; PAM type: YTN; PAM sequence: CTC
  source 1..20: mol_type = other DNA
ggctcactgcaacctccacc

SEQ ID NO: 29541 - DNA, 20 bp, synthetic construct
  misc_feature 1..20: note = Description of Artificial Sequence: Synthetic oligonucleotide
  misc_feature 1..20: note = Target: FXN; (-) strand; PAM type: YTN; PAM sequence: CTG
  source 1..20: mol_type = other DNA
gagtgcagtggtgtaatctc

SEQ ID NO: 29542 - DNA, 20 bp, synthetic construct
  misc_feature 1..20: note = Description of Artificial Sequence: Synthetic oligonucleotide
  misc_feature 1..20: note = Target: FXN; (-) strand; PAM type: YTN; PAM sequence: TTG
  source 1..20: mol_type = other DNA
tcacccaggctggagtgcag

SEQ ID NO: 29543 - DNA, 20 bp, synthetic construct
  misc_feature 1..20: note = Description of Artificial Sequence: Synthetic oligonucleotide
  misc_feature 1..20: note = Target: FXN; (-) strand; PAM type: YTN; PAM sequence: CTT
  source 1..20: mol_type = other DNA
gtcacccaggctggagtgca

SEQ ID NO: 29544 - DNA, 20 bp, synthetic construct
  misc_feature 1..20: note = Description of Artificial Sequence: Synthetic oligonucleotide
  misc_feature 1..20: note = Target: FXN; (-) strand; PAM type: YTN; PAM sequence: CTC
  source 1..20: mol_type = other DNA
ttgtcacccaggctggagtg

SEQ ID NO: 29545 - DNA, 20 bp, synthetic construct
  misc_feature 1..20: note = Description of Artificial Sequence: Synthetic oligonucleotide
  misc_feature 1..20: note = Target: FXN; (-) strand; PAM type: YTN; PAM sequence: TTC
  source 1..20: mol_type = other DNA
cctcttgtcacccaggctgg

SEQ ID NO: 29546 - DNA, 20 bp, synthetic construct
  misc_feature 1..20: note = Description of Artificial Sequence: Synthetic oligonucleotide
  misc_feature 1..20: note = Target: FXN; (-) strand; PAM type: YTN; PAM sequence: TTT
  source 1..20: mol_type = other DNA
ccctcttgtcacccaggctg

SEQ ID NO: 29547 - DNA, 20 bp, synthetic construct
  misc_feature 1..20: note = Description of Artificial Sequence: Synthetic oligonucleotide
  misc_feature 1..20: note = Target: FXN; (-) strand; PAM type: YTN; PAM sequence: TTA
  source 1..20: mol_type = other DNA
atggagtttccctcttgtca

SEQ ID NO: 29548 - DNA, 20 bp, synthetic construct
  misc_feature 1..20: note = Description of Artificial Sequence: Synthetic oligonucleotide
  misc_feature 1..20: note = Target: FXN; (-) strand; PAM type: YTN; PAM sequence: TTT
  source 1..20: mol_type = other DNA
aatggagtttccctcttgtc

SEQ ID NO: 29549 - DNA, 20 bp, synthetic construct
  misc_feature 1..20: note = Description of Artificial Sequence: Synthetic oligonucleotide
  misc_feature 1..20: note = Target: FXN; (-) strand; PAM type: YTN; PAM sequence: TTT
  source 1..20: mol_type = other DNA
taatggagtttccctcttgt

SEQ ID NO: 29550 - DNA, 20 bp, synthetic construct
  misc_feature 1..20: note = Description of Artificial Sequence: Synthetic oligonucleotide
  misc_feature 1..20: note = Target: FXN; (-) strand; PAM type: YTN; PAM sequence: TTT
  source 1..20: mol_type = other DNA
ttaatggagtttccctcttg

SEQ ID NO: 29551 - DNA, 20 bp, synthetic construct
  misc_feature 1..20: note = Description of Artificial Sequence: Synthetic oligonucleotide
  misc_feature 1..20: note = Target: FXN; (-) strand; PAM type: YTN; PAM sequence: TTT
  source 1..20: mol_type = other DNA
tttaatggagtttccctctt

SEQ ID NO: 29552 - DNA, 20 bp, synthetic construct
  misc_feature 1..20: note = Description of Artificial Sequence: Synthetic oligonucleotide
  misc_feature 1..20: note = Target: FXN; (-) strand; PAM type: YTN; PAM sequence: TTT
  source 1..20: mol_type = other DNA
ttttaatggagtttccctct

SEQ ID NO: 29553 - DNA, 20 bp, synthetic construct
  misc_feature 1..20: note = Description of Artificial Sequence: Synthetic oligonucleotide
  misc_feature 1..20: note = Target: FXN; (-) strand; PAM type: YTN; PAM sequence: TTA
  source 1..20: mol_type = other DNA
catttttttaatggagtttc

SEQ ID NO: 29554 - DNA, 20 bp, synthetic construct
  misc_feature 1..20: note = Description of Artificial Sequence: Synthetic oligonucleotide
  misc_feature 1..20: note = Target: FXN; (-) strand; PAM type: YTN; PAM sequence: TTA
  source 1..20: mol_type = other DNA
agatggcagacacgggaatt

SEQ ID NO: 29555 - DNA, 20 bp, synthetic construct
  misc_feature 1..20: note = Description of Artificial Sequence: Synthetic oligonucleotide
  misc_feature 1..20: note = Target: FXN; (-) strand; PAM type: YTN; PAM sequence: CTT
  source 1..20: mol_type = other DNA
aagatggcagacacgggaat

SEQ ID NO: 29556 - DNA, 20 bp, synthetic construct
  misc_feature 1..20: note = Description of Artificial Sequence: Synthetic oligonucleotide
  misc_feature 1..20: note = Target: FXN; (-) strand; PAM type: YTN; PAM sequence: TTA
  source 1..20: mol_type = other DNA
cacttaagatggcagacacg

SEQ ID NO: 29557 - DNA, 20 bp, synthetic construct
  misc_feature 1..20: note = Description of Artificial Sequence: Synthetic oligonucleotide
  misc_feature 1..20: note = Target: FXN; (-) strand; PAM type: YTN; PAM sequence: TTT
  source 1..20: mol_type = other DNA
acacttaagatggcagacac

SEQ ID NO: 29558 - DNA, 20 bp, synthetic construct
  misc_feature 1..20: note = Description of Artificial Sequence: Synthetic oligonucleotide
  misc_feature 1..20: note = Target: FXN; (-) strand; PAM type: YTN; PAM sequence: CTT
  source 1..20: mol_type = other DNA
tacacttaagatggcagaca

SEQ ID NO: 29559 - DNA, 20 bp, synthetic construct
  misc_feature 1..20: note = Description of Artificial Sequence: Synthetic oligonucleotide
  misc_feature 1..20: note = Target: FXN; (-) strand; PAM type: YTN; PAM sequence: TTA
  source 1..20: mol_type = other DNA
gccacctttacacttaagat

SEQ ID NO: 29560 - DNA, 20 bp, synthetic construct
  misc_feature 1..20: note = Description of Artificial Sequence: Synthetic oligonucleotide
  misc_feature 1..20: note = Target: FXN; (-) strand; PAM type: YTN; PAM sequence: TTT
  source 1..20: mol_type = other DNA
agccacctttacacttaaga

SEQ ID NO: 29561 - DNA, 20 bp, synthetic construct
  misc_feature 1..20: note = Description of Artificial Sequence: Synthetic oligonucleotide
  misc_feature 1..20: note = Target: FXN; (-) strand; PAM type: YTN; PAM sequence: CTA
  source 1..20: mol_type = other DNA
tataatttagccacctttac

SEQ ID NO: 29562 - DNA, 20 bp, synthetic construct
  misc_feature 1..20: note = Description of Artificial Sequence: Synthetic oligonucleotide
  misc_feature 1..20: note = Target: FXN; (-) strand; PAM type: YTN; PAM sequence: TTC
  source 1..20: mol_type = other DNA
tatataatttagccaccttt

SEQ ID NO: 29563 - DNA, 20 bp, synthetic construct
  misc_feature 1..20: note = Description of Artificial Sequence: Synthetic oligonucleotide
  misc_feature 1..20: note = Target: FXN; (-) strand; PAM type: YTN; PAM sequence: TTT
  source 1..20: mol_type = other DNA
ctatataatttagccacctt

SEQ ID NO: 29564 - DNA, 20 bp, synthetic construct
  misc_feature 1..20: note = Description of Artificial Sequence: Synthetic oligonucleotide
  misc_feature 1..20: note = Target: FXN; (-) strand; PAM type: YTN; PAM sequence: TTT
  source 1..20: mol_type = other DNA
tctatataatttagccacct

SEQ ID NO: 29565 - DNA, 20 bp, synthetic construct
  misc_feature 1..20: note = Description of Artificial Sequence: Synthetic oligonucleotide
  misc_feature 1..20: note = Target: FXN; (-) strand; PAM type: YTN; PAM sequence: TTT
  source 1..20: mol_type = other DNA
ttctatataatttagccacc

SEQ ID NO: 29566 - DNA, 20 bp, synthetic construct
  misc_feature 1..20: note = Description of Artificial Sequence: Synthetic oligonucleotide
  misc_feature 1..20: note = Target: FXN; (-) strand; PAM type: YTN; PAM sequence: TTA
  source 1..20: mol_type = other DNA
tttttctatataatttagcc

SEQ ID NO: 29567 - DNA, 20 bp, synthetic construct
  misc_feature 1..20: note = Description of Artificial Sequence: Synthetic oligonucleotide
  misc_feature 1..20: note = Target: FXN; (-) strand; PAM type: YTN; PAM sequence: CTT
  source 1..20: mol_type = other DNA
atttttctatataatttagc

SEQ ID NO: 29568 - DNA, 20 bp, synthetic construct
  misc_feature 1..20: note = Description of Artificial Sequence: Synthetic oligonucleotide
  misc_feature 1..20: note = Target: FXN; (-) strand; PAM type: YTN; PAM sequence: TTG
  source 1..20: mol_type = other DNA
tcttatttttctatataatt

SEQ ID NO: 29569 - DNA, 20 bp, synthetic construct
  misc_feature 1..20: note = Description of Artificial Sequence: Synthetic oligonucleotide
  misc_feature 1..20: note = Target: FXN; (-) strand; PAM type: YTN; PAM sequence: TTG
  source 1..20: mol_type = other DNA
ggaaatgatattgtcttatt

SEQ ID NO: 29570 - DNA, 20 bp, synthetic construct
  misc_feature 1..20: note = Description of Artificial Sequence: Synthetic oligonucleotide
  misc_feature 1..20: note = Target: FXN; (-) strand; PAM type: YTN; PAM sequence: CTA
  source 1..20: mol_type = other DNA
gcatcatagagtgcggtagg

SEQ ID NO: 29571 - DNA, 20 bp, synthetic construct
  misc_feature 1..20: note = Description of Artificial Sequence: Synthetic oligonucleotide
  misc_feature 1..20: note = Target: FXN; (-) strand; PAM type: YTN; PAM sequence: CTC
  source 1..20: mol_type = other DNA
agctagcatcatagagtgcg

SEQ ID NO: 29572 - DNA, 20 bp, synthetic construct
  misc_feature 1..20: note = Description of Artificial Sequence: Synthetic oligonucleotide
  misc_feature 1..20: note = Target: FXN; (-) strand; PAM type: YTN; PAM sequence: TTG
  source 1..20: mol_type = other DNA
gaaaaatctcagctagcatc

SEQ ID NO: 29573 - DNA, 20 bp, synthetic construct
  misc_feature 1..20: note = Description of Artificial Sequence: Synthetic oligonucleotide
  misc_feature 1..20: note = Target: FXN; (-) strand; PAM type: YTN; PAM sequence: TTT
  source 1..20: mol_type = other DNA
ggaaaaatctcagctagcat

SEQ ID NO: 29574 - DNA, 20 bp, synthetic construct
  misc_feature 1..20: note = Description of Artificial Sequence: Synthetic oligonucleotide
  misc_feature 1..20: note = Target: FXN; (-) strand; PAM type: YTN; PAM sequence: TTT
  source 1..20: mol_type = other DNA
tggaaaaatctcagctagca

SEQ ID NO: 29575 - DNA, 20 bp, synthetic construct
  misc_feature 1..20: note = Description of Artificial Sequence: Synthetic oligonucleotide
  misc_feature 1..20: note = Target: FXN; (-) strand; PAM type: YTN; PAM sequence: CTT
  source 1..20: mol_type = other DNA
ttggaaaaatctcagctagc

SEQ ID NO: 29576 - DNA, 20 bp, synthetic construct
  misc_feature 1..20: note = Description of Artificial Sequence: Synthetic oligonucleotide
  misc_feature 1..20: note = Target: FXN; (-) strand; PAM type: YTN; PAM sequence: TTC
  source 1..20: mol_type = other DNA
ttttggaaaaatctcagcta

SEQ ID NO: 29577 - DNA, 20 bp, synthetic construct
  misc_feature 1..20: note = Description of Artificial Sequence: Synthetic oligonucleotide
  misc_feature 1..20: note = Target: FXN; (-) strand; PAM type: YTN; PAM sequence: TTT
  source 1..20: mol_type = other DNA
cttttggaaaaatctcagct

SEQ ID NO: 29578 - DNA, 20 bp, synthetic construct
  misc_feature 1..20: note = Description of Artificial Sequence: Synthetic oligonucleotide
  misc_feature 1..20: note = Target: FXN; (-) strand; PAM type: YTN; PAM sequence: TTT
  source 1..20: mol_type = other DNA
tcttttggaaaaatctcagc

SEQ ID NO: 29579 - DNA, 20 bp, synthetic construct
  misc_feature 1..20: note = Description of Artificial Sequence: Synthetic oligonucleotide
  misc_feature 1..20: note = Target: FXN; (-) strand; PAM type: YTN; PAM sequence: TTA
  source 1..20: mol_type = other DNA
agccattttcttttggaaaa

SEQ ID NO: 29580 - DNA, 20 bp, synthetic construct
  misc_feature 1..20: note = Description of Artificial Sequence: Synthetic oligonucleotide
  misc_feature 1..20: note = Target: FXN; (-) strand; PAM type: YTN; PAM sequence: TTT
  source 1..20: mol_type = other DNA
aagccattttcttttggaaa

SEQ ID NO: 29581 - DNA, 20 bp, synthetic construct
  misc_feature 1..20: note = Description of Artificial Sequence: Synthetic oligonucleotide
  misc_feature 1..20: note = Target: FXN; (-) strand; PAM type: YTN; PAM sequence: TTA
  source 1..20: mol_type = other DNA
tttaagccattttcttttgg

SEQ ID NO: 29582 - DNA, 20 bp, synthetic construct
  misc_feature 1..20: note = Description of Artificial Sequence: Synthetic oligonucleotide
  misc_feature 1..20: note = Target: FXN; (-) strand; PAM type: YTN; PAM sequence: TTT
  source 1..20: mol_type = other DNA
atttaagccattttcttttg

SEQ ID NO: 29583 - DNA, 20 bp, synthetic construct
  misc_feature 1..20: note = Description of Artificial Sequence: Synthetic oligonucleotide
  misc_feature 1..20: note = Target: FXN; (-) strand; PAM type: YTN; PAM sequence: TTT
  source 1..20: mol_type = other DNA
tatttaagccattttctttt

SEQ ID NO: 29584 - DNA, 20 bp, synthetic construct
  misc_feature 1..20: note = Description of Artificial Sequence: Synthetic oligonucleotide
  misc_feature 1..20: note = Target: FXN; (-) strand; PAM type: YTN; PAM sequence: TTA
  source 1..20: mol_type = other DNA
gggttttatttaagccattt

SEQ ID NO: 29585 - DNA, 20 bp, synthetic construct
  misc_feature 1..20: note = Description of Artificial Sequence: Synthetic oligonucleotide
  misc_feature 1..20: note = Target: FXN; (-) strand; PAM type: YTN; PAM sequence: CTT
  source 1..20: mol_type = other DNA
agggttttatttaagccatt

SEQ ID NO: 29586 - DNA, 20 bp, synthetic construct
  misc_feature 1..20: note = Description of Artificial Sequence: Synthetic oligonucleotide
  misc_feature 1..20: note = Target: FXN; (-) strand; PAM type: YTN; PAM sequence: CTC
  source 1..20: mol_type = other DNA
ttagggttttatttaagcca

SEQ ID NO: 29587 - DNA, 20 bp, synthetic construct
  misc_feature 1..20: note = Description of Artificial Sequence: Synthetic oligonucleotide
  misc_feature 1..20: note = Target: FXN; (-) strand; PAM type: YTN; PAM sequence: TTC
  source 1..20: mol_type = other DNA
tcttagggttttatttaagc

SEQ ID NO: 29588 - DNA, 20 bp, synthetic construct
  misc_feature 1..20: note = Description of Artificial Sequence: Synthetic oligonucleotide
  misc_feature 1..20: note = Target: FXN; (-) strand; PAM type: YTN; PAM sequence: TTT
  source 1..20: mol_type = other DNA
ctcttagggttttatttaag

SEQ ID NO: 29589 - DNA, 20 bp, synthetic construct
  misc_feature 1..20: note = Description of Artificial Sequence: Synthetic oligonucleotide
  misc_feature 1..20: note = Target: FXN; (-) strand; PAM type: YTN; PAM sequence: CTT
  source 1..20: mol_type = other DNA
tctcttagggttttatttaa

SEQ ID NO: 29590 - DNA, 20 bp, synthetic construct
  misc_feature 1..20: note = Description of Artificial Sequence: Synthetic oligonucleotide
  misc_feature 1..20: note = Target: FXN; (-) strand; PAM type: YTN; PAM sequence: TTC
  source 1..20: mol_type = other DNA
tttctcttagggttttattt

SEQ ID NO: 29591 - DNA, 20 bp, synthetic construct
  misc_feature 1..20: note = Description of Artificial Sequence: Synthetic oligonucleotide
  misc_feature 1..20: note = Target: FXN; (-) strand; PAM type: YTN; PAM sequence: TTT
  source 1..20: mol_type = other DNA
ctttctcttagggttttatt

SEQ ID NO: 29592 - DNA, 20 bp, synthetic construct
  misc_feature 1..20: note = Description of Artificial Sequence: Synthetic oligonucleotide
  misc_feature 1..20: note = Target: FXN; (-) strand; PAM type: YTN; PAM sequence: TTT
  source 1..20: mol_type = other DNA
tctttctcttagggttttat

SEQ ID NO: 29593 - DNA, 20 bp, synthetic construct
  misc_feature 1..20: note = Description of Artificial Sequence: Synthetic oligonucleotide
  misc_feature 1..20: note = Target: FXN; (-) strand; PAM type: YTN; PAM sequence: TTT
  source 1..20: mol_type = other DNA
ttctttctcttagggtttta

SEQ ID NO: 29594 - DNA, 20 bp, synthetic construct
  misc_feature 1..20: note = Description of Artificial Sequence: Synthetic oligonucleotide
  misc_feature 1..20: note = Target: FXN; (-) strand; PAM type: YTN; PAM sequence: TTA
  source 1..20: mol_type = other DNA
aagtttttctttctcttagg

SEQ ID NO: 29595 - DNA, 20 bp, synthetic construct
  misc_feature 1..20: note = Description of Artificial Sequence: Synthetic oligonucleotide
  misc_feature 1..20: note = Target: FXN; (-) strand; PAM type: YTN; PAM sequence: TTT
  source 1..20: mol_type = other DNA
aaagtttttctttctcttag

SEQ ID NO: 29596 - DNA, 20 bp, synthetic construct
  misc_feature 1..20: note = Description of Artificial Sequence: Synthetic oligonucleotide
  misc_feature 1..20: note = Target: FXN; (-) strand; PAM type: YTN; PAM sequence: TTG
  source 1..20: mol_type = other DNA
gagggatttaaagtttttct

SEQ ID NO: 29597 - DNA, 20 bp, synthetic construct
  misc_feature 1..20: note = Description of Artificial Sequence: Synthetic oligonucleotide
  misc_feature 1..20: note = Target: FXN; (-) strand; PAM type: YTN; PAM sequence: TTT
  source 1..20: mol_type = other DNA
ggagggatttaaagtttttc

SEQ ID NO: 29598 - DNA, 20 bp, synthetic construct
  misc_feature 1..20: note = Description of Artificial Sequence: Synthetic oligonucleotide
  misc_feature 1..20: note = Target: FXN; (-) strand; PAM type: YTN; PAM sequence: CTT
  source 1..20: mol_type = other DNA
tggagggatttaaagttttt

SEQ ID NO: 29599 - DNA, 20 bp, synthetic construct
  misc_feature 1..20: note = Description of Artificial Sequence: Synthetic oligonucleotide
  misc_feature 1..20: note = Target: FXN; (-) strand; PAM type: YTN; PAM sequence: TTG
  source 1..20: mol_type = other DNA
agctttggagggatttaaag

SEQ ID NO: 29600 - DNA, 20 bp, synthetic construct
  misc_feature 1..20: note = Description of Artificial Sequence: Synthetic oligonucleotide
  misc_feature 1..20: note = Target: FXN; (-) strand; PAM type: YTN; PAM sequence: TTT
  source 1..20: mol_type = other DNA
gagctttggagggatttaaa

SEQ ID NO: 29601 - DNA, 20 bp, synthetic construct
  misc_feature 1..20: note = Description of Artificial Sequence: Synthetic oligonucleotide
  misc_feature 1..20: note = Target: FXN; (-) strand; PAM type: YTN; PAM sequence: TTT
  source 1..20: mol_type = other DNA
tgagctttggagggatttaa

SEQ ID NO: 29602 - DNA, 20 bp, synthetic construct
  misc_feature 1..20: note = Description of Artificial Sequence: Synthetic oligonucleotide
  misc_feature 1..20: note = Target: FXN; (-) strand; PAM type: YTN; PAM sequence: CTT
  source 1..20: mol_type = other DNA
ttgagctttggagggattta

SEQ ID NO: 29603 - DNA, 20 bp, synthetic construct
  misc_feature 1..20: note = Description of Artificial Sequence: Synthetic oligonucleotide
  misc_feature 1..20: note = Target: FXN; (-) strand; PAM type: YTN; PAM sequence: TTA
  source 1..20: mol_type = other DNA
cttttgagctttggagggat

SEQ ID NO: 29604 - DNA, 20 bp, synthetic construct
  misc_feature 1..20: note = Description of Artificial Sequence: Synthetic oligonucleotide
  misc_feature 1..20: note = Target: FXN; (-) strand; PAM type: YTN; PAM sequence: CTA
  source 1..20: mol_type = other DNA
ttacttttgagctttggagg

SEQ ID NO: 29605 - DNA, 20 bp, synthetic construct
  misc_feature 1..20: note = Description of Artificial Sequence: Synthetic oligonucleotide
  misc_feature 1..20: note = Target: FXN; (-) strand; PAM type: YTN; PAM sequence: TTC
  source 1..20: mol_type = other DNA
tattacttttgagctttgga

SEQ ID NO: 29606 - DNA, 20 bp, synthetic construct
  misc_feature 1..20: note = Description of Artificial Sequence: Synthetic oligonucleotide
  misc_feature 1..20: note = Target: FXN; (-) strand; PAM type: YTN; PAM sequence: TTT
  source 1..20: mol_type = other DNA
ctattacttttgagctttgg

SEQ ID NO: 29607 - DNA, 20 bp, synthetic construct
  misc_feature 1..20: note = Description of Artificial Sequence: Synthetic oligonucleotide
  misc_feature 1..20: note = Target: FXN; (-) strand; PAM type: YTN; PAM sequence: CTG
  source 1..20: mol_type = other DNA
tttctattacttttgagctt

SEQ ID NO: 29608 - DNA, 20 bp, synthetic construct
  misc_feature 1..20: note = Description of Artificial Sequence: Synthetic oligonucleotide
  misc_feature 1..20: note = Target: FXN; (-) strand; PAM type: YTN; PAM sequence: CTC
  source 1..20: mol_type = other DNA
atctgtttctattacttttg

SEQ ID NO: 29609 - DNA, 20 bp, synthetic construct
  misc_feature 1..20: note = Description of Artificial Sequence: Synthetic oligonucleotide
  misc_feature 1..20: note = Target: FXN; (-) strand; PAM type: YTN; PAM sequence: CTC
  source 1..20: mol_type = other DNA
caaactcatctgtttctatt

SEQ ID NO: 29610 - DNA, 20 bp, synthetic construct
  misc_feature 1..20: note = Description of Artificial Sequence: Synthetic oligonucleotide
  misc_feature 1..20: note = Target: FXN; (-) strand; PAM type: YTN; PAM sequence: CTG
  source 1..20: mol_type = other DNA
actccaaactcatctgtttc

SEQ ID NO: 29611 - DNA, 20 bp, synthetic construct
  misc_feature 1..20: note = Description of Artificial Sequence: Synthetic oligonucleotide
  misc_feature 1..20: note = Target: FXN; (-) strand; PAM type: YTN; PAM sequence: TTA
  source 1..20: mol_type = other DNA
cagagaaatcctgactccaa

SEQ ID NO: 29612 - DNA, 20 bp, synthetic construct
  misc_feature 1..20: note = Description of Artificial Sequence: Synthetic oligonucleotide
  misc_feature 1..20: note = Target: FXN; (-) strand; PAM type: YTN; PAM sequence: CTT
  source 1..20: mol_type = other DNA
acagagaaatcctgactcca

SEQ ID NO: 29613 - DNA, 20 bp, synthetic construct
  misc_feature 1..20: note = Description of Artificial Sequence: Synthetic oligonucleotide
  misc_feature 1..20: note = Target: FXN; (-) strand; PAM type: YTN; PAM sequence: CTA
  source 1..20: mol_type = other DNA
ggcaatcttacagagaaatc

SEQ ID NO: 29614 - DNA, 20 bp, synthetic construct
  misc_feature 1..20: note = Description of Artificial Sequence: Synthetic oligonucleotide
  misc_feature 1..20: note = Target: FXN; (-) strand; PAM type: YTN; PAM sequence: CTG
  source 1..20: mol_type = other DNA
gagatgtgcagtacacagcc

SEQ ID NO: 29615 - DNA, 20 bp, synthetic construct
  misc_feature 1..20: note = Description of Artificial Sequence: Synthetic oligonucleotide
  misc_feature 1..20: note = Target: FXN; (-) strand; PAM type: YTN; PAM sequence: CTG
  source 1..20: mol_type = other DNA
tcaacagtggcacctggaga

SEQ ID NO: 29616 - DNA, 20 bp, synthetic construct
  misc_feature 1..20: note = Description of Artificial Sequence: Synthetic oligonucleotide
  misc_feature 1..20: note = Target: FXN; (-) strand; PAM type: YTN; PAM sequence: CTC
  source 1..20: mol_type = other DNA
tgtcaacagtggcacctgga

SEQ ID NO: 29617 - DNA, 20 bp, synthetic construct
  misc_feature 1..20: note = Description of Artificial Sequence: Synthetic oligonucleotide
  misc_feature 1..20: note = Target: FXN; (-) strand; PAM type: YTN; PAM sequence: TTA
  source 1..20: mol_type = other DNA
taatctctgtcaacagtggc

SEQ ID NO: 29618 - DNA, 20 bp, synthetic construct
  misc_feature 1..20: note = Description of Artificial Sequence: Synthetic oligonucleotide
  misc_feature 1..20: note = Target: FXN; (-) strand; PAM type: YTN; PAM sequence: TTG
  source 1..20: mol_type = other DNA
tagttataatctctgtcaac

SEQ ID NO: 29619 - DNA, 20 bp, synthetic construct
  misc_feature 1..20: note = Description of Artificial Sequence: Synthetic oligonucleotide
  misc_feature 1..20: note = Target: FXN; (-) strand; PAM type: YTN; PAM sequence: TTC
  source 1..20: mol_type = other DNA
acattgtagttataatctct

SEQ ID NO: 29620 - DNA, 20 bp, synthetic construct
  misc_feature 1..20: note = Description of Artificial Sequence: Synthetic oligonucleotide
  misc_feature 1..20: note = Target: FXN; (-) strand; PAM type: YTN; PAM sequence: CTT
  source 1..20: mol_type = other DNA
cacattgtagttataatctc

SEQ ID NO: 29621 - DNA, 20 bp, synthetic construct
  misc_feature 1..20: note = Description of Artificial Sequence: Synthetic oligonucleotide
  misc_feature 1..20: note = Target: FXN; (-) strand; PAM type: YTN; PAM sequence: TTC
  source 1..20: mol_type = other DNA
acttcacattgtagttataa

SEQ ID NO: 29622 - DNA, 20 bp, synthetic construct
  misc_feature 1..20: note = Description of Artificial Sequence: Synthetic oligonucleotide
  misc_feature 1..20: note = Target: FXN; (-) strand; PAM type: YTN; PAM sequence: CTG
  source 1..20: mol_type = other DNA
tcagtggcaccattcacttc

SEQ ID NO: 29623 - DNA, 20 bp, synthetic construct
  misc_feature 1..20: note = Description of Artificial Sequence: Synthetic oligonucleotide
  misc_feature 1..20: note = Target: FXN; (-) strand; PAM type: YTN; PAM sequence: TTG
  source 1..20: mol_type = other DNA
cataactgtcagtggcacca

SEQ ID NO: 29624 - DNA, 20 bp, synthetic construct
  misc_feature 1..20: note = Description of Artificial Sequence: Synthetic oligonucleotide
  misc_feature 1..20: note = Target: FXN; (-) strand; PAM type: YTN; PAM sequence: TTT
  source 1..20: mol_type = other DNA
gcataactgtcagtggcacc

SEQ ID NO: 29625 - DNA, 20 bp, synthetic construct
  misc_feature 1..20: note = Description of Artificial Sequence: Synthetic oligonucleotide
  misc_feature 1..20: note = Target: FXN; (-) strand; PAM type: YTN; PAM sequence: CTG
  source 1..20: mol_type = other DNA
gacggtttgcataactgtca

SEQ ID NO: 29626 - DNA, 20 bp, synthetic construct
  misc_feature 1..20: note = Description of Artificial Sequence: Synthetic oligonucleotide
  misc_feature 1..20: note = Target: FXN; (-) strand; PAM type: YTN; PAM sequence: CTC
  source 1..20: mol_type = other DNA
tggacggtttgcataactgt

SEQ ID NO: 29627 - DNA, 20 bp, synthetic construct
  misc_feature 1..20: note = Description of Artificial Sequence: Synthetic oligonucleotide
  misc_feature 1..20: note = Target: FXN; (-) strand; PAM type: YTN; PAM sequence: CTA
  source 1..20: mol_type = other DNA
tgctctggacggtttgcata

SEQ ID NO: 29628 - DNA, 20 bp, synthetic construct
  misc_feature 1..20: note = Description of Artificial Sequence: Synthetic oligonucleotide
  misc_feature 1..20: note = Target: FXN; (-) strand; PAM type: YTN; PAM sequence: CTG
  source 1..20: mol_type = other DNA
gcaagaggaatcccagcagg

SEQ ID NO: 29629 - DNA, 20 bp, synthetic construct
  misc_feature 1..20: note = Description of Artificial Sequence: Synthetic oligonucleotide
  misc_feature 1..20: note = Target: FXN; (-) strand; PAM type: YTN; PAM sequence: CTG
  source 1..20: mol_type = other DNA
atggactggcaagaggaatc

SEQ ID NO: 29630 - DNA, 20 bp, synthetic construct
  misc_feature 1..20: note = Description of Artificial Sequence: Synthetic oligonucleotide
  misc_feature 1..20: note = Target: FXN; (-) strand; PAM type: YTN; PAM sequence: CTG
  source 1..20: mol_type = other DNA
ctgatggactggcaagagga

SEQ ID NO: 29631 - DNA, 20 bp, synthetic construct
  misc_feature 1..20: note = Description of Artificial Sequence: Synthetic oligonucleotide
  misc_feature 1..20: note = Target: FXN; (-) strand; PAM type: YTN; PAM sequence: TTC
  source 1..20: mol_type = other DNA
aaggggaactgctgatggac

SEQ ID NO: 29632 - DNA, 20 bp, synthetic construct
  misc_feature 1..20: note = Description of Artificial Sequence: Synthetic oligonucleotide
  misc_feature 1..20: note = Target: FXN; (-) strand; PAM type: YTN; PAM sequence: TTT
  source 1..20: mol_type = other DNA
caaggggaactgctgatgga

SEQ ID NO: 29633 - DNA, 20 bp, synthetic construct
  misc_feature 1..20: note = Description of Artificial Sequence: Synthetic oligonucleotide
  misc_feature 1..20: note = Target: FXN; (-) strand; PAM type: YTN; PAM sequence: CTT
  source 1..20: mol_type = other DNA
tcaaggggaactgctgatgg

SEQ ID NO: 29634 - DNA, 20 bp, synthetic construct
  misc_feature 1..20: note = Description of Artificial Sequence: Synthetic oligonucleotide
  misc_feature 1..20: note = Target: FXN; (-) strand; PAM type: YTN; PAM sequence: TTG
  source 1..20: mol_type = other DNA
gtgaaactttcaaggggaac

SEQ ID NO: 29635 - DNA, 20 bp, synthetic construct
  misc_feature 1..20: note = Description of Artificial Sequence: Synthetic oligonucleotide
  misc_feature 1..20: note = Target: FXN; (-) strand; PAM type: YTN; PAM sequence: TTT
  source 1..20: mol_type = other DNA
ggtgaaactttcaaggggaa

SEQ ID NO: 29636 - DNA, 20 bp, synthetic construct
  misc_feature 1..20: note = Description of Artificial Sequence: Synthetic oligonucleotide
  misc_feature 1..20: note = Target: FXN; (-) strand; PAM type: YTN; PAM sequence: TTA
  source 1..20: mol_type = other DNA
agggatgtttggtgaaactt

SEQ ID NO: 29637 - DNA, 20 bp, synthetic construct
  misc_feature 1..20: note = Description of Artificial Sequence: Synthetic oligonucleotide
  misc_feature 1..20: note = Target: FXN; (-) strand; PAM type: YTN; PAM sequence: TTT
  source 1..20: mol_type = other DNA
aagggatgtttggtgaaact

SEQ ID NO: 29638 - DNA, 20 bp, synthetic construct
  misc_feature 1..20: note = Description of Artificial Sequence: Synthetic oligonucleotide
  misc_feature 1..20: note = Target: FXN; (-) strand; PAM type: YTN; PAM sequence: CTG
  source 1..20: mol_type = other DNA
gggacgggcaggagagggca

SEQ ID NO: 29639 - DNA, 20 bp, synthetic construct
  misc_feature 1..20: note = Description of Artificial Sequence: Synthetic oligonucleotide
  misc_feature 1..20: note = Target: FXN; (-) strand; PAM type: YTN; PAM sequence: CTC
  source 1..20: mol_type = other DNA
cactggggacgggcaggaga

SEQ ID NO: 29640 - DNA, 20 bp, synthetic construct
  misc_feature 1..20: note = Description of Artificial Sequence: Synthetic oligonucleotide
  misc_feature 1..20: note = Target: FXN; (-) strand; PAM type: YTN; PAM sequence: CTG
  source 1..20: mol_type = other DNA
caaaaatgcaggtgaaaaat

SEQ ID NO: 29641 - DNA, 20 bp, synthetic construct
  misc_feature 1..20: note = Description of Artificial Sequence: Synthetic oligonucleotide
  misc_feature 1..20: note = Target: FXN; (-) strand; PAM type: YTN; PAM sequence: CTC
  source 1..20: mol_type = other DNA
ctgcaaaaatgcaggtgaaa

SEQ ID NO: 29642 - DNA, 20 bp, synthetic construct
  misc_feature 1..20: note = Description of Artificial Sequence: Synthetic oligonucleotide
  misc_feature 1..20: note = Target: FXN; (-) strand; PAM type: YTN; PAM sequence: CTG
  source 1..20: mol_type = other DNA
agagaaaaggaggaaggtgg

SEQ ID NO: 29643 - DNA, 20 bp, synthetic construct
  misc_feature 1..20: note = Description of Artificial Sequence: Synthetic oligonucleotide
  misc_feature 1..20: note = Target: FXN; (-) strand; PAM type: YTN; PAM sequence: CTA
  source 1..20: mol_type = other DNA
gatgatgggctgagagaaaa

SEQ ID NO: 29644 - DNA, 20 bp, synthetic construct
  misc_feature 1..20: note = Description of Artificial Sequence: Synthetic oligonucleotide
  misc_feature 1..20: note = Target: FXN; (-) strand; PAM type: YTN; PAM sequence: CTG
  source 1..20: mol_type = other DNA
tgtagctagatgatgggctg

SEQ ID NO: 29645 - DNA, 20 bp, synthetic construct
  misc_feature 1..20: note = Description of Artificial Sequence: Synthetic oligonucleotide
  misc_feature 1..20: note = Target: FXN; (-) strand; PAM type: YTN; PAM sequence: CTG
  source 1..20: mol_type = other DNA
gagactgtgtagctagatga

SEQ ID NO: 29646 - DNA, 20 bp, synthetic construct
  misc_feature 1..20: note = Description of Artificial Sequence: Synthetic oligonucleotide
  misc_feature 1..20: note = Target: FXN; (-) strand; PAM type: YTN; PAM sequence: TTA
  source 1..20: mol_type = other DNA
ccctggagactgtgtagcta

SEQ ID NO: 29647 - DNA, 20 bp, synthetic construct
  misc_feature 1..20: note = Description of Artificial Sequence: Synthetic oligonucleotide
  misc_feature 1..20: note = Target: FXN; (-) strand; PAM type: YTN; PAM sequence: CTT
  source 1..20: mol_type = other DNA
accctggagactgtgtagct

SEQ ID NO: 29648 - DNA, 20 bp, synthetic construct
  misc_feature 1..20: note = Description of Artificial Sequence: Synthetic oligonucleotide
  misc_feature 1..20: note = Target: FXN; (-) strand; PAM type: YTN; PAM sequence: CTG
  source 1..20: mol_type = other DNA
aaagcttaccctggagactg

SEQ ID NO: 29649 - DNA, 20 bp, synthetic construct
  misc_feature 1..20: note = Description of Artificial Sequence: Synthetic oligonucleotide
  misc_feature 1..20: note = Target: FXN; (-) strand; PAM type: YTN; PAM sequence: TTC
  source 1..20: mol_type = other DNA
tgaaagcttaccctggagac

SEQ ID NO: 29650 - DNA, 20 bp, synthetic construct
  misc_feature 1..20: note = Description of Artificial Sequence: Synthetic oligonucleotide
  misc_feature 1..20: note = Target: FXN; (-) strand; PAM type: YTN; PAM sequence: TTT
  source 1..20: mol_type = other DNA
ctgaaagcttaccctggaga

SEQ ID NO: 29651 - DNA, 20 bp, synthetic construct
  misc_feature 1..20: note = Description of Artificial Sequence: Synthetic oligonucleotide
  misc_feature 1..20: note = Target: FXN; (-) strand; PAM type: YTN; PAM sequence: CTT
  source 1..20: mol_type = other DNA
tctgaaagcttaccctggag

SEQ ID NO: 29652 - DNA, 20 bp, synthetic construct
  misc_feature 1..20: note = Description of Artificial Sequence: Synthetic oligonucleotide
  misc_feature 1..20: note = Target: FXN; (-) strand; PAM type: YTN; PAM sequence: TTG
  source 1..20: mol_type = other DNA
cctttctgaaagcttaccct

SEQ ID NO: 29653 - DNA, 20 bp, synthetic construct
  misc_feature 1..20: note = Description of Artificial Sequence: Synthetic oligonucleotide
  misc_feature 1..20: note = Target: FXN; (-) strand; PAM type: YTN; PAM sequence: TTA
  source 1..20: mol_type = other DNA
cagacaagagattgcctttc

SEQ ID NO: 29654 - DNA, 20 bp, synthetic construct
  misc_feature 1..20: note = Description of Artificial Sequence: Synthetic oligonucleotide
  misc_feature 1..20: note = Target: FXN; (-) strand; PAM type: YTN; PAM sequence: TTT
  source 1..20: mol_type = other DNA
acagacaagagattgccttt

SEQ ID NO: 29655 - DNA, 20 bp, synthetic construct
  misc_feature 1..20: note = Description of Artificial Sequence: Synthetic oligonucleotide
  misc_feature 1..20: note = Target: FXN; (-) strand; PAM type: YTN; PAM sequence: TTT
  source 1..20: mol_type = other DNA
tacagacaagagattgcctt

SEQ ID NO: 29656 - DNA, 20 bp, synthetic construct
  misc_feature 1..20: note = Description of Artificial Sequence: Synthetic oligonucleotide
  misc_feature 1..20: note = Target: FXN; (-) strand; PAM type: YTN; PAM sequence: TTA
  source 1..20: mol_type = other DNA
ggttttacagacaagagatt

SEQ ID NO: 29657 - DNA, 20 bp, synthetic construct
  misc_feature 1..20: note = Description of Artificial Sequence: Synthetic oligonucleotide
  misc_feature 1..20: note = Target: FXN; (-) strand; PAM type: YTN; PAM sequence: CTT
  source 1..20: mol_type = other DNA
aggttttacagacaagagat

SEQ ID NO: 29658 - DNA, 20 bp, synthetic construct
  misc_feature 1..20: note = Description of Artificial Sequence: Synthetic oligonucleotide
  misc_feature 1..20: note = Target: FXN; (-) strand; PAM type: YTN; PAM sequence: CTG
  source 1..20: mol_type = other DNA
cttaggttttacagacaaga

SEQ ID NO: 29659 - DNA, 20 bp, synthetic construct
  misc_feature 1..20: note = Description of Artificial Sequence: Synthetic oligonucleotide
  misc_feature 1..20: note = Target: FXN; (-) strand; PAM type: YTN; PAM sequence: TTG
  source 1..20: mol_type = other DNA
gtcctgcttaggttttacag

SEQ ID NO: 29660 - DNA, 20 bp, synthetic construct
  misc_feature 1..20: note = Description of Artificial Sequence: Synthetic oligonucleotide
  misc_feature 1..20: note = Target: FXN; (-) strand; PAM type: YTN; PAM sequence: CTT
  source 1..20: mol_type = other DNA
ggtcctgcttaggttttaca

SEQ ID NO: 29661 - DNA, 20 bp, synthetic construct
  misc_feature 1..20: note = Description of Artificial Sequence: Synthetic oligonucleotide
  misc_feature 1..20: note = Target: FXN; (-) strand; PAM type: YTN; PAM sequence: TTG
  source 1..20: mol_type = other DNA
gccttggtcctgcttaggtt

SEQ ID NO: 29662 - DNA, 20 bp, synthetic construct
  misc_feature 1..20: note = Description of Artificial Sequence: Synthetic oligonucleotide
  misc_feature 1..20: note = Target: FXN; (-) strand; PAM type: YTN; PAM sequence: CTT
  source 1..20: mol_type = other DNA
ggccttggtcctgcttaggt

SEQ ID NO: 29663 - DNA, 20 bp, synthetic construct
  misc_feature 1..20: note = Description of Artificial Sequence: Synthetic oligonucleotide
  misc_feature 1..20: note = Target: FXN; (-) strand; PAM type: YTN; PAM sequence: CTA
  source 1..20: mol_type = other DNA
agaaacttggccttggtcct

SEQ ID NO: 29664 - DNA, 20 bp, synthetic construct
  misc_feature 1..20: note = Description of Artificial Sequence: Synthetic oligonucleotide
  misc_feature 1..20: note = Target: FXN; (-) strand; PAM type: YTN; PAM sequence: TTC
  source 1..20: mol_type = other DNA
aggctaagaaacttggcctt

SEQ ID NO: 29665 - DNA, 20 bp, synthetic construct
  misc_feature 1..20: note = Description of Artificial Sequence: Synthetic oligonucleotide
  misc_feature 1..20: note = Target: FXN; (-) strand; PAM type: YTN; PAM sequence: TTT
  source 1..20: mol_type = other DNA
caggctaagaaacttggcct

SEQ ID NO: 29666 - DNA, 20 bp, synthetic construct
  misc_feature 1..20: note = Description of Artificial Sequence: Synthetic oligonucleotide
  misc_feature 1..20: note = Target: FXN; (-) strand; PAM type: YTN; PAM sequence: TTT
  source 1..20: mol_type = other DNA
tcaggctaagaaacttggcc

SEQ ID NO: 29667 - DNA, 20 bp, synthetic construct
  misc_feature 1..20: note = Description of Artificial Sequence: Synthetic oligonucleotide
  misc_feature 1..20: note = Target: FXN; (-) strand; PAM type: YTN; PAM sequence: TTT
  source 1..20: mol_type = other DNA
ttcaggctaagaaacttggc

SEQ ID NO: 29668 - DNA, 20 bp, synthetic construct
  misc_feature 1..20: note = Description of Artificial Sequence: Synthetic oligonucleotide
  misc_feature 1..20: note = Target: FXN; (-) strand; PAM type: YTN; PAM sequence: TTC
  source 1..20: mol_type = other DNA
agtcagaaaagcacattttt

SEQ ID NO: 29669 - DNA, 20 bp, synthetic construct
  misc_feature 1..20: note = Description of Artificial Sequence: Synthetic oligonucleotide
  misc_feature 1..20: note = Target: FXN; (-) strand; PAM type: YTN; PAM sequence: CTG
  source 1..20: mol_type = other DNA
aacagttcagtcagaaaagc

SEQ ID NO: 29670 - DNA, 20 bp, synthetic construct
  misc_feature 1..20: note = Description of Artificial Sequence: Synthetic oligonucleotide
  misc_feature 1..20: note = Target: FXN; (-) strand; PAM type: YTN; PAM sequence: TTA
  source 1..20: mol_type = other DNA
tatgtagagtcagtgcctga

SEQ ID NO: 29671 - DNA, 20 bp, synthetic construct
  misc_feature 1..20: note = Description of Artificial Sequence: Synthetic oligonucleotide
  misc_feature 1..20: note = Target: FXN; (-) strand; PAM type: YTN; PAM sequence: TTG
  source 1..20: mol_type = other DNA
agtgtgagggggtagaaaag

SEQ ID NO: 29672 - DNA, 20 bp, synthetic construct
  misc_feature 1..20: note = Description of Artificial Sequence: Synthetic oligonucleotide
  misc_feature 1..20: note = Target: FXN; (-) strand; PAM type: YTN; PAM sequence: CTG
  source 1..20: mol_type = other DNA
gagtcaaagtgttgagtgtg

SEQ ID NO: 29673 - DNA, 20 bp, synthetic construct
  misc_feature 1..20: note = Description of Artificial Sequence: Synthetic oligonucleotide
  misc_feature 1..20: note = Target: FXN; (-) strand; PAM type: YTN; PAM sequence: TTG
  source 1..20: mol_type = other DNA
ctggagtcaaagtgttgagt

SEQ ID NO: 29674 - DNA, 20 bp, synthetic construct
  misc_feature 1..20: note = Description of Artificial Sequence: Synthetic oligonucleotide
  misc_feature 1..20: note = Target: FXN; (-) strand; PAM type: YTN; PAM sequence: TTG
  source 1..20: mol_type = other DNA
ggattgctggagtcaaagtg

SEQ ID NO: 29675 - DNA, 20 bp, synthetic construct
  misc_feature 1..20: note = Description of Artificial Sequence: Synthetic oligonucleotide
  misc_feature 1..20: note = Target: FXN; (-) strand; PAM type: YTN; PAM sequence: TTT
  source 1..20: mol_type = other DNA
gggattgctggagtcaaagt

SEQ ID NO: 29676 - DNA, 20 bp, synthetic construct
  misc_feature 1..20: note = Description of Artificial Sequence: Synthetic oligonucleotide
  misc_feature 1..20: note = Target: FXN; (-) strand; PAM type: YTN; PAM sequence: CTG
  source 1..20: mol_type = other DNA
gggatttgggattgctggag

SEQ ID NO: 29677 - DNA, 20 bp, synthetic construct
  misc_feature 1..20: note = Description of Artificial Sequence: Synthetic oligonucleotide
  misc_feature 1..20: note = Target: FXN; (-) strand; PAM type: YTN; PAM sequence: TTA
  source 1..20: mol_type = other DNA
gggatctggggatttgggat

SEQ ID NO: 29678 - DNA, 20 bp, synthetic construct
  misc_feature 1..20: note = Description of Artificial Sequence: Synthetic oligonucleotide
  misc_feature 1..20: note = Target: FXN; (-) strand; PAM type: YTN; PAM sequence: CTT
  source 1..20: mol_type = other DNA
agggatctggggatttggga

SEQ ID NO: 29679 - DNA, 20 bp, synthetic construct
  misc_feature 1..20: note = Description of Artificial Sequence: Synthetic oligonucleotide
  misc_feature 1..20: note = Target: FXN; (-) strand; PAM type: YTN; PAM sequence: CTG
  source 1..20: mol_type = other DNA
agagccacgtgaaaatagca

SEQ ID NO: 29680 - DNA, 20 bp, synthetic construct
  misc_feature 1..20: note = Description of Artificial Sequence: Synthetic oligonucleotide
  misc_feature 1..20: note = Target: FXN; (-) strand; PAM type: YTN; PAM sequence: CTG
  source 1..20: mol_type = other DNA
gccaagtctgagagccacgt

SEQ ID NO: 29681 - DNA, 20 bp, synthetic construct
  misc_feature 1..20: note = Description of Artificial Sequence: Synthetic oligonucleotide
  misc_feature 1..20: note = Target: FXN; (-) strand; PAM type: YTN; PAM sequence: CTA
  source 1..20: mol_type = other DNA
ccccccaggcagagatgtgg

SEQ ID NO: 29682 - DNA, 20 bp, synthetic construct
  misc_feature 1..20: note = Description of Artificial Sequence: Synthetic oligonucleotide
  misc_feature 1..20: note = Target: FXN; (-) strand; PAM type: YTN; PAM sequence: TTC
  source 1..20: mol_type = other DNA
agggtagaatctacccccca

SEQ ID NO: 29683 - DNA, 20 bp, synthetic construct
  misc_feature 1..20: note = Description of Artificial Sequence: Synthetic oligonucleotide
  misc_feature 1..20: note = Target: FXN; (-) strand; PAM type: YTN; PAM sequence: TTT
  source 1..20: mol_type = other DNA
cagggtagaatctacccccc

SEQ ID NO: 29684 - DNA, 20 bp, synthetic construct
  misc_feature 1..20: note = Description of Artificial Sequence: Synthetic oligonucleotide
  misc_feature 1..20: note = Target: FXN; (-) strand; PAM type: YTN; PAM sequence: TTT
  source 1..20: mol_type = other DNA
tcagggtagaatctaccccc

SEQ ID NO: 29685 - DNA, 20 bp, synthetic construct
  misc_feature 1..20: note = Description of Artificial Sequence: Synthetic oligonucleotide
  misc_feature 1..20: note = Target: FXN; (-) strand; PAM type: YTN; PAM sequence: TTT
  source 1..20: mol_type = other DNA
ttcagggtagaatctacccc

SEQ ID NO: 29686 - DNA, 20 bp, synthetic construct
  misc_feature 1..20: note = Description of Artificial Sequence: Synthetic oligonucleotide
  misc_feature 1..20: note = Target: FXN; (-) strand; PAM type: YTN; PAM sequence: CTG
  source 1..20: mol_type = other DNA
tgccaagaacatttttcagg

SEQ ID NO: 29687 - DNA, 20 bp, synthetic construct
  misc_feature 1..20: note = Description of Artificial Sequence: Synthetic oligonucleotide
  misc_feature 1..20: note = Target: FXN; (-) strand; PAM type: YTN; PAM sequence: TTG
  source 1..20: mol_type = other DNA
caaggctgtgccaagaacat

SEQ ID NO: 29688 - DNA, 20 bp, synthetic construct
  misc_feature 1..20: note = Description of Artificial Sequence: Synthetic oligonucleotide
  misc_feature 1..20: note = Target: FXN; (-) strand; PAM type: YTN; PAM sequence: TTT
  source 1..20: mol_type = other DNA
gcaaggctgtgccaagaaca

SEQ ID NO: 29689 - DNA, 20 bp, synthetic construct
  misc_feature 1..20: note = Description of Artificial Sequence: Synthetic oligonucleotide
  misc_feature 1..20: note = Target: FXN; (-) strand; PAM type: YTN; PAM sequence: CTG
  source 1..20: mol_type = other DNA
agtggaggaggagtttgcaa

SEQ ID NO: 29690 - DNA, 20 bp, synthetic construct
  misc_feature 1..20: note = Description of Artificial Sequence: Synthetic oligonucleotide
  misc_feature 1..20: note = Target: FXN; (-) strand; PAM type: YTN; PAM sequence: CTG
  source 1..20: mol_type = other DNA
aggacatggaacaatcaagg

SEQ ID NO: 29691 - DNA, 20 bp, synthetic construct
  misc_feature 1..20: note = Description of Artificial Sequence: Synthetic oligonucleotide
  misc_feature 1..20: note = Target: FXN; (-) strand; PAM type: YTN; PAM sequence: CTG
  source 1..20: mol_type = other DNA
ggaaagacaaacatggtatg

SEQ ID NO: 29692 - DNA, 20 bp, synthetic construct
  misc_feature 1..20: note = Description of Artificial Sequence: Synthetic oligonucleotide
  misc_feature 1..20: note = Target: FXN; (-) strand; PAM type: YTN; PAM sequence: CTC
  source 1..20: mol_type = other DNA
atggaaggtacagccaagca

SEQ ID NO: 29693 - DNA, 20 bp, synthetic construct
  misc_feature 1..20: note = Description of Artificial Sequence: Synthetic oligonucleotide
  misc_feature 1..20: note = Target: FXN; (-) strand; PAM type: YTN; PAM sequence: CTA
  source 1..20: mol_type = other DNA
gcctcatggaaggtacagcc

SEQ ID NO: 29694 - DNA, 20 bp, synthetic construct
  misc_feature 1..20: note = Description of Artificial Sequence: Synthetic oligonucleotide
  misc_feature 1..20: note = Target: FXN; (-) strand; PAM type: YTN; PAM sequence: CTA
  source 1..20: mol_type = other DNA
gggcaacagcagtcaacaaa

SEQ ID NO: 29695 - DNA, 20 bp, synthetic construct
  misc_feature 1..20: note = Description of Artificial Sequence: Synthetic oligonucleotide
  misc_feature 1..20: note = Target: FXN; (-) strand; PAM type: YTN; PAM sequence: CTG
  source 1..20: mol_type = other DNA
tgcaagatgctagggcaaca

SEQ ID NO: 29696 - DNA, 20 bp, synthetic construct
  misc_feature 1..20: note = Description of Artificial Sequence: Synthetic oligonucleotide
  misc_feature 1..20: note = Target: FXN; (-) strand; PAM type: YTN; PAM sequence: TTG
  source 1..20: mol_type = other DNA
tgtgcaaggaactgtgcaag

SEQ ID NO: 29697 - DNA, 20 bp, synthetic construct
  misc_feature 1..20: note = Description of Artificial Sequence: Synthetic oligonucleotide
  misc_feature 1..20: note = Target: FXN; (-) strand; PAM type: YTN; PAM sequence: CTA
  source 1..20: mol_type = other DNA
attgtgtgcaaggaactgtg

SEQ ID NO: 29698 - DNA, 20 bp, synthetic construct
  misc_feature 1..20: note = Description of Artificial Sequence: Synthetic oligonucleotide
  misc_feature 1..20: note = Target: FXN; (-) strand; PAM type: YTN; PAM sequence: CTC
  source 1..20: mol_type = other DNA
taattgtgtgcaaggaactg

SEQ ID NO: 29699 - DNA, 20 bp, synthetic construct
  misc_feature 1..20: note = Description of Artificial Sequence: Synthetic oligonucleotide
  misc_feature 1..20: note = Target: FXN; (-) strand; PAM type: YTN; PAM sequence: TTA
  source 1..20: mol_type = other DNA
tagagctctaattgtgtgca

SEQ ID NO: 29700 - DNA, 20 bp, synthetic construct
  misc_feature 1..20: note = Description of Artificial Sequence: Synthetic oligonucleotide
  misc_feature 1..20: note = Target: FXN; (-) strand; PAM type: YTN; PAM sequence: TTT
  source 1..20: mol_type = other DNA
atagagctctaattgtgtgc

SEQ ID NO: 29701 - DNA, 20 bp, synthetic construct
  misc_feature 1..20: note = Description of Artificial Sequence: Synthetic oligonucleotide
  misc_feature 1..20: note = Target: FXN; (-) strand; PAM type: YTN; PAM sequence: TTG
  source 1..20: mol_type = other DNA
acatttatagagctctaatt

SEQ ID NO: 29702 - DNA, 20 bp, synthetic construct
  misc_feature 1..20: note = Description of Artificial Sequence: Synthetic oligonucleotide
  misc_feature 1..20: note = Target: FXN; (-) strand; PAM type: YTN; PAM sequence: TTT
  source 1..20: mol_type = other DNA
gacatttatagagctctaat

SEQ ID NO: 29703 - DNA, 20 bp, synthetic construct
  misc_feature 1..20: note = Description of Artificial Sequence: Synthetic oligonucleotide
  misc_feature 1..20: note = Target: FXN; (-) strand; PAM type: YTN; PAM sequence: TTA
  source 1..20: mol_type = other DNA
tttgacatttatagagctct

SEQ ID NO: 29704 - DNA, 20 bp, synthetic construct
  misc_feature 1..20: note = Description of Artificial Sequence: Synthetic oligonucleotide
  misc_feature 1..20: note = Target: FXN; (-) strand; PAM type: YTN; PAM sequence: TTT
  source 1..20: mol_type = other DNA
atttgacatttatagagctc

SEQ ID NO: 29705 - DNA, 20 bp, synthetic construct
  misc_feature 1..20: note = Description of Artificial Sequence: Synthetic oligonucleotide
  misc_feature 1..20: note = Target: FXN; (-) strand; PAM type: YTN; PAM sequence: TTA
  source 1..20: mol_type = other DNA
taacacatttatttgacatt

SEQ ID NO: 29706 - DNA, 20 bp, synthetic construct
  misc_feature 1..20: note = Description of Artificial Sequence: Synthetic oligonucleotide
  misc_feature 1..20: note = Target: FXN; (-) strand; PAM type: YTN; PAM sequence: TTA
  source 1..20: mol_type = other DNA
aacatataattataacacat

SEQ ID NO: 29707 - DNA, 20 bp, synthetic construct
  misc_feature 1..20: note = Description of Artificial Sequence: Synthetic oligonucleotide
  misc_feature 1..20: note = Target: FXN; (-) strand; PAM type: YTN; PAM sequence: CTT
  source 1..20: mol_type = other DNA
aaacatataattataacaca

SEQ ID NO: 29708 - DNA, 20 bp, synthetic construct
  misc_feature 1..20: note = Description of Artificial Sequence: Synthetic oligonucleotide
  misc_feature 1..20: note = Target: FXN; (-) strand; PAM type: YTN; PAM sequence: CTA
  source 1..20: mol_type = other DNA
tcttaaacatataattataa

SEQ ID NO: 29709 - DNA, 20 bp, synthetic construct
  misc_feature 1..20: note = Description of Artificial Sequence: Synthetic oligonucleotide
  misc_feature 1..20: note = Target: FXN; (-) strand; PAM type: YTN; PAM sequence: TTG
  source 1..20: mol_type = other DNA
aacaactatcttaaacatat

SEQ ID NO: 29710 - DNA, 20 bp, synthetic construct
  misc_feature 1..20: note = Description of Artificial Sequence: Synthetic oligonucleotide
  misc_feature 1..20: note = Target: FXN; (-) strand; PAM type: YTN; PAM sequence: TTT
  source 1..20: mol_type = other DNA
gaacaactatcttaaacata

SEQ ID NO: 29711 - DNA, 20 bp, synthetic construct
  misc_feature 1..20: note = Description of Artificial Sequence: Synthetic oligonucleotide
  misc_feature 1..20: note = Target: FXN; (-) strand; PAM type: YTN; PAM sequence: TTA
  source 1..20: mol_type = other DNA
tttgaacaactatcttaaac

SEQ ID NO: 29712 - DNA, 20 bp, synthetic construct
  misc_feature 1..20: note = Description of Artificial Sequence: Synthetic oligonucleotide
  misc_feature 1..20: note = Target: FXN; (-) strand; PAM type: YTN; PAM sequence: TTT
  source 1..20: mol_type = other DNA
atttgaacaactatcttaaa

SEQ ID NO: 29713 - DNA, 20 bp, synthetic construct
  misc_feature 1..20: note = Description of Artificial Sequence: Synthetic oligonucleotide
  misc_feature 1..20: note = Target: FXN; (-) strand; PAM type: YTN; PAM sequence: TTA
  source 1..20: mol_type = other DNA
gagtttatttgaacaactat

SEQ ID NO: 29714 - DNA, 20 bp, synthetic construct
  misc_feature 1..20: note = Description of Artificial Sequence: Synthetic oligonucleotide
  misc_feature 1..20: note = Target: FXN; (-) strand; PAM type: YTN; PAM sequence: TTT
  source 1..20: mol_type = other DNA
agagtttatttgaacaacta

SEQ ID NO: 29715 - DNA, 20 bp, synthetic construct
  misc_feature 1..20: note = Description of Artificial Sequence: Synthetic oligonucleotide
  misc_feature 1..20: note = Target: FXN; (-) strand; PAM type: YTN; PAM sequence: TTA
  source 1..20: mol_type = other DNA
tttagagtttatttgaacaa

SEQ ID NO: 29716 - DNA, 20 bp, synthetic construct
  misc_feature 1..20: note = Description of Artificial Sequence: Synthetic oligonucleotide
  misc_feature 1..20: note = Target: FXN; (-) strand; PAM type: YTN; PAM sequence: TTG
  source 1..20: mol_type = other DNA
gggttatttagagtttattt

SEQ ID NO: 29717 - DNA, 20 bp, synthetic construct
  misc_feature 1..20: note = Description of Artificial Sequence: Synthetic oligonucleotide
  misc_feature 1..20: note = Target: FXN; (-) strand; PAM type: YTN; PAM sequence: TTG
  source 1..20: mol_type = other DNA
gagttggggttatttagagt

SEQ ID NO: 29718 - DNA, 20 bp, synthetic construct
  misc_feature 1..20: note = Description of Artificial Sequence: Synthetic oligonucleotide
  misc_feature 1..20: note = Target: FXN; (-) strand; PAM type: YTN; PAM sequence: CTT
  source 1..20: mol_type = other DNA
ggagttggggttatttagag

SEQ ID NO: 29719 - DNA, 20 bp, synthetic construct
  misc_feature 1..20: note = Description of Artificial Sequence: Synthetic oligonucleotide
  misc_feature 1..20: note = Target: FXN; (-) strand; PAM type: YTN; PAM sequence: CTC
  source 1..20: mol_type = other DNA
ttggagttggggttatttag

SEQ ID NO: 29720 - DNA, 20 bp, synthetic construct
  misc_feature 1..20: note = Description of Artificial Sequence: Synthetic oligonucleotide
  misc_feature 1..20: note = Target: FXN; (-) strand; PAM type: YTN; PAM sequence: CTA
  source 1..20: mol_type = other DNA
acactcttggagttggggtt

SEQ ID NO: 29721 - DNA, 20 bp, synthetic construct
  misc_feature 1..20: note = Description of Artificial Sequence: Synthetic oligonucleotide
  misc_feature 1..20: note = Target: FXN; (-) strand; PAM type: YTN; PAM sequence: TTG
  source 1..20: mol_type = other DNA
ctaacactcttggagttggg

SEQ ID NO: 29722 - DNA, 20 bp, synthetic construct
  misc_feature 1..20: note = Description of Artificial Sequence: Synthetic oligonucleotide
  misc_feature 1..20: note = Target: FXN; (-) strand; PAM type: YTN; PAM sequence: CTT
  source 1..20: mol_type = other DNA
gctaacactcttggagttgg

SEQ ID NO: 29723 - DNA, 20 bp, synthetic construct
  misc_feature 1..20: note = Description of Artificial Sequence: Synthetic oligonucleotide
  misc_feature 1..20: note = Target: FXN; (-) strand; PAM type: YTN; PAM sequence: TTC
  source 1..20: mol_type = other DNA
ttgctaacactcttggagtt

SEQ ID NO: 29724 - DNA, 20 bp, synthetic construct
  misc_feature 1..20: note = Description of Artificial Sequence: Synthetic oligonucleotide
  misc_feature 1..20: note = Target: FXN; (-) strand; PAM type: YTN; PAM sequence: TTT
  source 1..20: mol_type = other DNA
cttgctaacactcttggagt

SEQ ID NO: 29725 - DNA, 20 bp, synthetic construct
  misc_feature 1..20: note = Description of Artificial Sequence: Synthetic oligonucleotide
  misc_feature 1..20: note = Target: FXN; (-) strand; PAM type: YTN; PAM sequence: TTA
  source 1..20: mol_type = other DNA
tatttcttgctaacactctt

SEQ ID NO: 29726 - DNA, 20 bp, synthetic construct
  misc_feature 1..20: note = Description of Artificial Sequence: Synthetic oligonucleotide
  misc_feature 1..20: note = Target: FXN; (-) strand; PAM type: YTN; PAM sequence: TTT
  source 1..20: mol_type = other DNA
atatttcttgctaacactct

SEQ ID NO: 29727 - DNA, 20 bp, synthetic construct
  misc_feature 1..20: note = Description of Artificial Sequence: Synthetic oligonucleotide
  misc_feature 1..20: note = Target: FXN; (-) strand; PAM type: YTN; PAM sequence: CTG
  source 1..20: mol_type = other DNA
taaaatttatatttcttgct

SEQ ID NO: 29728 - DNA, 20 bp, synthetic construct
  misc_feature 1..20: note = Description of Artificial Sequence: Synthetic oligonucleotide
  misc_feature 1..20: note = Target: FXN; (-) strand; PAM type: YTN; PAM sequence: TTC
  source 1..20: mol_type = other DNA
tgtaaaatttatatttcttg

SEQ ID NO: 29729 - DNA, 20 bp, synthetic construct
  misc_feature 1..20: note = Description of Artificial Sequence: Synthetic oligonucleotide
  misc_feature 1..20: note = Target: FXN; (-) strand; PAM type: YTN; PAM sequence: CTT
  source 1..20: mol_type = other DNA
ctgtaaaatttatatttctt

SEQ ID NO: 29730 - DNA, 20 bp, synthetic construct
  misc_feature 1..20: note = Description of Artificial Sequence: Synthetic oligonucleotide
  misc_feature 1..20: note = Target: FXN; (-) strand; PAM type: YTN; PAM sequence: TTC
  source 1..20: mol_type = other DNA
ttctgtaaaatttatatttc

SEQ ID NO: 29731 - DNA, 20 bp, synthetic construct
  misc_feature 1..20: note = Description of Artificial Sequence: Synthetic oligonucleotide
  misc_feature 1..20: note = Target: FXN; (-) strand; PAM type: YTN; PAM sequence: CTC
  source 1..20: mol_type = other DNA
caaccattcttctgtaaaat

SEQ ID NO: 29732 - DNA, 20 bp, synthetic construct
  misc_feature 1..20: note = Description of Artificial Sequence: Synthetic oligonucleotide
  misc_feature 1..20: note = Target: FXN; (-) strand; PAM type: YTN; PAM sequence: CTC
  source 1..20: mol_type = other DNA
cccacctccaaccattcttc

SEQ ID NO: 29733 - DNA, 20 bp, synthetic construct
  misc_feature 1..20: note = Description of Artificial Sequence: Synthetic oligonucleotide
  misc_feature 1..20: note = Target: FXN; (-) strand; PAM type: YTN; PAM sequence: CTC
  source 1..20: mol_type = other DNA
cgtggacaccctccccacct

SEQ ID NO: 29734 - DNA, 20 bp, synthetic construct
  misc_feature 1..20: note = Description of Artificial Sequence: Synthetic oligonucleotide
  misc_feature 1..20: note = Target: FXN; (-) strand; PAM type: YTN; PAM sequence: CTC
  source 1..20: mol_type = other DNA
actccgtggacaccctcccc

SEQ ID NO: 29735 - DNA, 20 bp, synthetic construct
  misc_feature 1..20: note = Description of Artificial Sequence: Synthetic oligonucleotide
  misc_feature 1..20: note = Target: FXN; (-) strand; PAM type: YTN; PAM sequence: CTG
  source 1..20: mol_type = other DNA
tgtgaggtaactcactccgt

SEQ ID NO: 29736 - DNA, 20 bp, synthetic construct
  misc_feature 1..20: note = Description of Artificial Sequence: Synthetic oligonucleotide
  misc_feature 1..20: note = Target: FXN; (-) strand; PAM type: YTN; PAM sequence: TTC
  source 1..20: mol_type = other DNA
cgtgcctgtgtgaggtaact

SEQ ID NO: 29737 - DNA, 20 bp, synthetic construct
  misc_feature 1..20: note = Description of Artificial Sequence: Synthetic oligonucleotide
  misc_feature 1..20: note = Target: FXN; (-) strand; PAM type: YTN; PAM sequence: TTT
  source 1..20: mol_type = other DNA
ccgtgcctgtgtgaggtaac

SEQ ID NO: 29738 - DNA, 20 bp, synthetic construct
  misc_feature 1..20: note = Description of Artificial Sequence: Synthetic oligonucleotide
  misc_feature 1..20: note = Target: FXN; (-) strand; PAM type: YTN; PAM sequence: TTT
  source 1..20: mol_type = other DNA
tccgtgcctgtgtgaggtaa

SEQ ID NO: 29739 - DNA, 20 bp, synthetic construct
  misc_feature 1..20: note = Description of Artificial Sequence: Synthetic oligonucleotide
  misc_feature 1..20: note = Target: FXN; (-) strand; PAM type: YTN; PAM sequence: TTT
  source 1..20: mol_type = other DNA
ttccgtgcctgtgtgaggta

SEQ ID NO: 29740 - DNA, 20 bp, synthetic construct
  misc_feature 1..20: note = Description of Artificial Sequence: Synthetic oligonucleotide
  misc_feature 1..20: note = Target: FXN; (-) strand; PAM type: YTN; PAM sequence: TTC
  source 1..20: mol_type = other DNA
aagtttttccgtgcctgtgt

SEQ ID NO: 29741 - DNA, 20 bp, synthetic construct
  misc_feature 1..20: note = Description of Artificial Sequence: Synthetic oligonucleotide
  misc_feature 1..20: note = Target: FXN; (-) strand; PAM type: YTN; PAM sequence: TTA
  source 1..20: mol_type = other DNA
ggaggttcaagtttttccgt

SEQ ID NO: 29742 - DNA, 20 bp, synthetic construct
  misc_feature 1..20: note = Description of Artificial Sequence: Synthetic oligonucleotide
  misc_feature 1..20: note = Target: FXN; (-) strand; PAM type: YTN; PAM sequence: CTT
  source 1..20: mol_type = other DNA
aggaggttcaagtttttccg

SEQ ID NO: 29743 - DNA, 20 bp, synthetic construct
  misc_feature 1..20: note = Description of Artificial Sequence: Synthetic oligonucleotide
  misc_feature 1..20: note = Target: FXN; (-) strand; PAM type: YTN; PAM sequence: TTA
  source 1..20: mol_type = other DNA
aaaatgtccttaggaggttc

SEQ ID NO: 29744 - DNA, 20 bp, synthetic construct
  misc_feature 1..20: note = Description of Artificial Sequence: Synthetic oligonucleotide
  misc_feature 1..20: note = Target: FXN; (-) strand; PAM type: YTN; PAM sequence: CTT
  source 1..20: mol_type = other DNA
aaaaatgtccttaggaggtt

SEQ ID NO: 29745 - DNA, 20 bp, synthetic construct
  misc_feature 1..20: note = Description of Artificial Sequence: Synthetic oligonucleotide
  misc_feature 1..20: note = Target: FXN; (+) strand; PAM type: YTN; PAM sequence: TTC
  source 1..20: mol_type = other DNA
ttgcttcaaagtgaaactat

SEQ ID NO: 29746 - DNA, 20 bp, synthetic construct
  misc_feature 1..20: note = Description of Artificial Sequence: Synthetic oligonucleotide
  misc_feature 1..20: note = Target: FXN; (+) strand; PAM type: YTN; PAM sequence: CTT
  source 1..20: mol_type = other DNA
gcttcaaagtgaaactatac

SEQ ID NO: 29747 - DNA, 20 bp, synthetic construct
  misc_feature 1..20: note = Description of Artificial Sequence: Synthetic oligonucleotide
  misc_feature 1..20: note = Target: FXN; (+) strand; PAM type: YTN; PAM sequence: TTG
  source 1..20: mol_type = other DNA
cttcaaagtgaaactataca

SEQ ID NO: 29748 - DNA, 20 bp, synthetic construct
  misc_feature 1..20: note = Description of Artificial Sequence: Synthetic oligonucleotide
  misc_feature 1..20: note = Target: FXN; (+) strand; PAM type: YTN; PAM sequence: CTT
  source 1..20: mol_type = other DNA
caaagtgaaactatacacta

SEQ ID NO: 29749 - DNA, 20 bp, synthetic construct
  misc_feature 1..20: note = Description of Artificial Sequence: Synthetic oligonucleotide
  misc_feature 1..20: note = Target: FXN; (+) strand; PAM type: YTN; PAM sequence: TTC
  source 1..20: mol_type = other DNA
aaagtgaaactatacactaa

SEQ ID NO: 29750 - DNA, 20 bp, synthetic construct
  misc_feature 1..20: note = Description of Artificial Sequence: Synthetic oligonucleotide
  misc_feature 1..20: note = Target: FXN; (+) strand; PAM type: YTN; PAM sequence: CTA
  source 1..20: mol_type = other DNA
tacactaaattcctcccaca

SEQ ID NO: 29751 - DNA, 20 bp, synthetic construct
  misc_feature 1..20: note = Description of Artificial Sequence: Synthetic oligonucleotide
  misc_feature 1..20: note = Target: FXN; (+) strand; PAM type: YTN; PAM sequence: CTA
  source 1..20: mol_type = other DNA
aattcctcccacagttagct

SEQ ID NO: 29752 - DNA, 20 bp, synthetic construct
  misc_feature 1..20: note = Description of Artificial Sequence: Synthetic oligonucleotide
  misc_feature 1..20: note = Target: FXN; (+) strand; PAM type: YTN; PAM sequence: TTC
  source 1..20: mol_type = other DNA
ctcccacagttagcttggcg

SEQ ID NO: 29753 - DNA, 20 bp, synthetic construct
  misc_feature 1..20: note = Description of Artificial Sequence: Synthetic oligonucleotide
  misc_feature 1..20: note = Target: FXN; (+) strand; PAM type: YTN; PAM sequence: CTC
  source 1..20: mol_type = other DNA
ccacagttagcttggcgtgg

SEQ ID NO: 29754 - DNA, 20 bp, synthetic construct
  misc_feature 1..20: note = Description of Artificial Sequence: Synthetic oligonucleotide
  misc_feature 1..20: note = Target: FXN; (+) strand; PAM type: YTN; PAM sequence: TTA
  source 1..20: mol_type = other DNA
gcttggcgtggcctttgtta

SEQ ID NO: 29755 - DNA, 20 bp, synthetic construct
  misc_feature 1..20: note = Description of Artificial Sequence: Synthetic oligonucleotide
  misc_feature 1..20: note = Target: FXN; (+) strand; PAM type: YTN; PAM sequence: CTT
  source 1..20: mol_type = other DNA
ggcgtggcctttgttatatg

SEQ ID NO: 29756 - DNA, 20 bp, synthetic construct
  misc_feature 1..20: note = Description of Artificial Sequence: Synthetic oligonucleotide
  misc_feature 1..20: note = Target: FXN; (+) strand; PAM type: YTN; PAM sequence: TTG
  source 1..20: mol_type = other DNA
gcgtggcctttgttatatgc

SEQ ID NO: 29757 - DNA, 20 bp, synthetic construct
  misc_feature 1..20: note = Description of Artificial Sequence: Synthetic oligonucleotide
  misc_feature 1..20: note = Target: FXN; (+) strand; PAM type: YTN; PAM sequence: CTT
  source 1..20: mol_type = other DNA
tgttatatgcccaggaataa

SEQ ID NO: 29758 - DNA, 20 bp, synthetic construct
  misc_feature 1..20: note = Description of Artificial Sequence: Synthetic oligonucleotide
  misc_feature 1..20: note = Target: FXN; (+) strand; PAM type: YTN; PAM sequence: TTT
  source 1..20: mol_type = other DNA
gttatatgcccaggaataag

SEQ ID NO: 29759 - DNA, 20 bp, synthetic construct
  misc_feature 1..20: note = Description of Artificial Sequence: Synthetic oligonucleotide
  misc_feature 1..20: note = Target: FXN; (+) strand; PAM type: YTN; PAM sequence: TTG
  source 1..20: mol_type = other DNA
ttatatgcccaggaataagt

SEQ ID NO: 29760 - DNA, 20 bp, synthetic construct
  misc_feature 1..20: note = Description of Artificial Sequence: Synthetic oligonucleotide
  misc_feature 1..20: note = Target: FXN; (+) strand; PAM type: YTN; PAM sequence: TTA
  source 1..20: mol_type = other DNA
tatgcccaggaataagtgag

SEQ ID NO: 29761 - DNA, 20 bp, synthetic construct
  misc_feature 1..20: note = Description of Artificial Sequence: Synthetic oligonucleotide
  misc_feature 1..20: note = Target: FXN; (+) strand; PAM type: YTN; PAM sequence: CTA
  source 1..20: mol_type = other DNA
tgagactagaagcaagatgg

SEQ ID NO: 29762 - DNA, 20 bp, synthetic construct
  misc_feature 1..20: note = Description of Artificial Sequence: Synthetic oligonucleotide
  misc_feature 1..20: note = Target: FXN; (+) strand; PAM type: YTN; PAM sequence: CTA
  source 1..20: mol_type = other DNA
gaagcaagatggagtcagcc

SEQ ID NO: 29763 - DNA, 20 bp, synthetic construct
  misc_feature 1..20: note = Description of Artificial Sequence: Synthetic oligonucleotide
  misc_feature 1..20: note = Target: FXN; (+) strand; PAM type: YTN; PAM sequence: CTA
  source 1..20: mol_type = other DNA
aatttctctcactgtcataa

SEQ ID NO: 29764 - DNA, 20 bp, synthetic construct
  misc_feature 1..20: note = Description of Artificial Sequence: Synthetic oligonucleotide
  misc_feature 1..20: note = Target: FXN; (+) strand; PAM type: YTN; PAM sequence: TTT
  source 1..20: mol_type = other DNA
ctctcactgtcataaccttt

SEQ ID NO: 29765 - DNA, 20 bp, synthetic construct
  misc_feature 1..20: note = Description of Artificial Sequence: Synthetic oligonucleotide
  misc_feature 1..20: note = Target: FXN; (+) strand; PAM type: YTN; PAM sequence: TTC
  source 1..20: mol_type = other DNA
tctcactgtcataaccttta

SEQ ID NO: 29766 - DNA, 20 bp, synthetic construct
  misc_feature 1..20: note = Description of Artificial Sequence: Synthetic oligonucleotide
  misc_feature 1..20: note = Target: FXN; (+) strand; PAM type: YTN; PAM sequence: CTC
  source 1..20: mol_type = other DNA
tcactgtcataacctttaca

SEQ ID NO: 29767 - DNA, 20 bp, synthetic construct
  misc_feature 1..20: note = Description of Artificial Sequence: Synthetic oligonucleotide
  misc_feature 1..20: note = Target: FXN; (+) strand; PAM type: YTN; PAM sequence: CTC
  source 1..20: mol_type = other DNA
actgtcataacctttacaaa

SEQ ID NO: 29768 - DNA, 20 bp, synthetic construct
  misc_feature 1..20: note = Description of Artificial Sequence: Synthetic oligonucleotide
  misc_feature 1..20: note = Target: FXN; (+) strand; PAM type: YTN; PAM sequence: CTG
  source 1..20: mol_type = other DNA
tcataacctttacaaaggtg

SEQ ID NO: 29769 - DNA, 20 bp, synthetic construct
  misc_feature 1..20: note = Description of Artificial Sequence: Synthetic oligonucleotide
  misc_feature 1..20: note = Target: FXN; (+) strand; PAM type: YTN; PAM sequence: CTT
  source 1..20: mol_type = other DNA
tacaaaggtggtttcattag

SEQ ID NO: 29770 - DNA, 20 bp, synthetic construct
  misc_feature 1..20: note = Description of Artificial Sequence: Synthetic oligonucleotide
  misc_feature 1..20: note = Target: FXN; (+) strand; PAM type: YTN; PAM sequence: TTT
  source 1..20: mol_type = other DNA
acaaaggtggtttcattagg

SEQ ID NO: 29771 - DNA, 20 bp, synthetic construct
  misc_feature 1..20: note = Description of Artificial Sequence: Synthetic oligonucleotide
  misc_feature 1..20: note = Target: FXN; (+) strand; PAM type: YTN; PAM sequence: TTA
  source 1..20: mol_type = other DNA
caaaggtggtttcattaggc

SEQ ID NO: 29772 - DNA, 20 bp, synthetic construct
  misc_feature 1..20: note = Description of Artificial Sequence: Synthetic oligonucleotide
  misc_feature 1..20: note = Target: FXN; (+) strand; PAM type: YTN; PAM sequence: TTT
  source 1..20: mol_type = other DNA
cattaggcatattaatgcaa

SEQ ID NO: 29773 - DNA, 20 bp, synthetic construct
  misc_feature 1..20: note = Description of Artificial Sequence: Synthetic oligonucleotide
  misc_feature 1..20: note = Target: FXN; (+) strand; PAM type: YTN; PAM sequence: TTC
  source 1..20: mol_type = other DNA
attaggcatattaatgcaaa

SEQ ID NO: 29774 - DNA, 20 bp, synthetic construct
  misc_feature 1..20: note = Description of Artificial Sequence: Synthetic oligonucleotide
  misc_feature 1..20: note = Target: FXN; (+) strand; PAM type: YTN; PAM sequence: TTA
  source 1..20: mol_type = other DNA
ggcatattaatgcaaattcc

SEQ ID NO: 29775 - DNA, 20 bp, synthetic construct
  misc_feature 1..20: note = Description of Artificial Sequence: Synthetic oligonucleotide
  misc_feature 1..20: note = Target: FXN; (+) strand; PAM type: YTN; PAM sequence: TTA
  source 1..20: mol_type = other DNA
atgcaaattccttagttaaa

SEQ ID NO: 29776 - DNA, 20 bp, synthetic construct
  misc_feature 1..20: note = Description of Artificial Sequence: Synthetic oligonucleotide
  misc_feature 1..20: note = Target: FXN; (+) strand; PAM type: YTN; PAM sequence: TTC
  source 1..20: mol_type = other DNA
cttagttaaaacaagaatga

SEQ ID NO: 29777 - DNA, 20 bp, synthetic construct
  misc_feature 1..20: note = Description of Artificial Sequence: Synthetic oligonucleotide
  misc_feature 1..20: note = Target: FXN; (+) strand; PAM type: YTN; PAM sequence: CTT
  source 1..20: mol_type = other DNA
agttaaaacaagaatgactc

SEQ ID NO: 29778 - DNA, 20 bp, synthetic construct
  misc_feature 1..20: note = Description of Artificial Sequence: Synthetic oligonucleotide
  misc_feature 1..20: note = Target: FXN; (+) strand; PAM type: YTN; PAM sequence: TTA
  source 1..20: mol_type = other DNA
gttaaaacaagaatgactct

SEQ ID NO: 29779 - DNA, 20 bp, synthetic construct
  misc_feature 1..20: note = Description of Artificial Sequence: Synthetic oligonucleotide
  misc_feature 1..20: note = Target: FXN; (+) strand; PAM type: YTN; PAM sequence: TTA
  source 1..20: mol_type = other DNA
aaacaagaatgactctctaa

SEQ ID NO: 29780 - DNA, 20 bp, synthetic construct
  misc_feature 1..20: note = Description of Artificial Sequence: Synthetic oligonucleotide
  misc_feature 1..20: note = Target: FXN; (+) strand; PAM type: YTN; PAM sequence: CTC
  source 1..20: mol_type = other DNA
tctaaaggctatatttcaga

SEQ ID NO: 29781 - DNA, 20 bp, synthetic construct
  misc_feature 1..20: note = Description of Artificial Sequence: Synthetic oligonucleotide
  misc_feature 1..20: note = Target: FXN; (+) strand; PAM type: YTN; PAM sequence: CTC
  source 1..20: mol_type = other DNA
taaaggctatatttcagata

SEQ ID NO: 29782 - DNA, 20 bp, synthetic construct
  misc_feature 1..20: note = Description of Artificial Sequence: Synthetic oligonucleotide
  misc_feature 1..20: note = Target: FXN; (+) strand; PAM type: YTN; PAM sequence: CTA
  source 1..20: mol_type = other DNA
aaggctatatttcagataca

SEQ ID NO: 29783 - DNA, 20 bp, synthetic construct
  misc_feature 1..20: note = Description of Artificial Sequence: Synthetic oligonucleotide
  misc_feature 1..20: note = Target: FXN; (+) strand; PAM type: YTN; PAM sequence: CTA
  source 1..20: mol_type = other DNA
tatttcagatacatcacatg

SEQ ID NO: 29784 - DNA, 20 bp, synthetic construct
  misc_feature 1..20: note = Description of Artificial Sequence: Synthetic oligonucleotide
  misc_feature 1..20: note = Target: FXN; (+) strand; PAM type: YTN; PAM sequence: TTT
  source 1..20: mol_type = other DNA
cagatacatcacatgcttct

SEQ ID NO: 29785 - DNA, 20 bp, synthetic construct
  misc_feature 1..20: note = Description of Artificial Sequence: Synthetic oligonucleotide
  misc_feature 1..20: note = Target: FXN; (+) strand; PAM type: YTN; PAM sequence: TTC
  source 1..20: mol_type = other DNA
agatacatcacatgcttctt

SEQ ID NO: 29786 - DNA, 20 bp, synthetic construct
  misc_feature 1..20: note = Description of Artificial Sequence: Synthetic oligonucleotide
  misc_feature 1..20: note = Target: FXN; (+) strand; PAM type: YTN; PAM sequence: CTT
  source 1..20: mol_type = other DNA
ctttcctcttgtcccctcaa

SEQ ID NO: 29787 - DNA, 20 bp, synthetic construct
  misc_feature 1..20: note = Description of Artificial Sequence: Synthetic oligonucleotide
  misc_feature 1..20: note = Target: FXN; (+) strand; PAM type: YTN; PAM sequence: TTC
  source 1..20: mol_type = other DNA
tttcctcttgtcccctcaac

SEQ ID NO: 29788 - DNA, 20 bp, synthetic construct
  misc_feature 1..20: note = Description of Artificial Sequence: Synthetic oligonucleotide
  misc_feature 1..20: note = Target: FXN; (+) strand; PAM type: YTN; PAM sequence: CTT
  source 1..20: mol_type = other DNA
tcctcttgtcccctcaacag

SEQ ID NO: 29789 - DNA, 20 bp, synthetic construct
  misc_feature 1..20: note = Description of Artificial Sequence: Synthetic oligonucleotide
  misc_feature 1..20: note = Target: FXN; (+) strand; PAM type: YTN; PAM sequence: TTT
  source 1..20: mol_type = other DNA
cctcttgtcccctcaacagt

SEQ ID NO: 29790 - DNA, 20 bp, synthetic construct
  misc_feature 1..20: note = Description of Artificial Sequence: Synthetic oligonucleotide
  misc_feature 1..20: note = Target: FXN; (+) strand; PAM type: YTN; PAM sequence: TTC
  source 1..20: mol_type = other DNA
ctcttgtcccctcaacagta

SEQ ID NO: 29791 - DNA, 20 bp, synthetic construct
  misc_feature 1..20: note = Description of Artificial Sequence: Synthetic oligonucleotide
  misc_feature 1..20: note = Target: FXN; (+) strand; PAM type: YTN; PAM sequence: CTC
  source 1..20: mol_type = other DNA
ttgtcccctcaacagtaagc

SEQ ID NO: 29792 - DNA, 20 bp, synthetic construct
  misc_feature 1..20: note = Description of Artificial Sequence: Synthetic oligonucleotide
  misc_feature 1..20: note = Target: FXN; (+) strand; PAM type: YTN; PAM sequence: CTT
  source 1..20: mol_type = other DNA
gtcccctcaacagtaagcaa

SEQ ID NO: 29793 - DNA, 20 bp, synthetic construct
  misc_feature 1..20: note = Description of Artificial Sequence: Synthetic oligonucleotide
  misc_feature 1..20: note = Target: FXN; (+) strand; PAM type: YTN; PAM sequence: TTG
  source 1..20: mol_type = other DNA
tcccctcaacagtaagcaag

SEQ ID NO: 29794 - DNA, 20 bp, synthetic construct
  misc_feature 1..20: note = Description of Artificial Sequence: Synthetic oligonucleotide
  misc_feature 1..20: note = Target: FXN; (+) strand; PAM type: YTN; PAM sequence: CTC
  source 1..20: mol_type = other DNA
aacagtaagcaagaagagta

SEQ ID NO: 29795 - DNA, 20 bp, synthetic construct
  misc_feature 1..20: note = Description of Artificial Sequence: Synthetic oligonucleotide
  misc_feature 1..20: note = Target: FXN; (+) strand; PAM type: YTN; PAM sequence: TTT
  source 1..20: mol_type = other DNA
ttgtacaagagagaggcctc

SEQ ID NO: 29796 - DNA, 20 bp, synthetic construct
  misc_feature 1..20: note = Description of Artificial Sequence: Synthetic oligonucleotide
  misc_feature 1..20: note = Target: FXN; (+) strand; PAM type: YTN; PAM sequence: TTT
  source 1..20: mol_type = other DNA
tgtacaagagagaggcctct

SEQ ID NO: 29797 - DNA, 20 bp, synthetic construct
  misc_feature 1..20: note = Description of Artificial Sequence: Synthetic oligonucleotide
  misc_feature 1..20: note = Target: FXN; (+) strand; PAM type: YTN; PAM sequence: TTT
  source 1..20: mol_type = other DNA
gtacaagagagaggcctctg

SEQ ID NO: 29798 - DNA, 20 bp, synthetic construct
  misc_feature 1..20: note = Description of Artificial Sequence: Synthetic oligonucleotide
  misc_feature 1..20: note = Target: FXN; (+) strand; PAM type: YTN; PAM sequence: TTG
  source 1..20: mol_type = other DNA
tacaagagagaggcctctgc

SEQ ID NO: 29799 - DNA, 20 bp, synthetic construct
  misc_feature 1..20: note = Description of Artificial Sequence: Synthetic oligonucleotide
  misc_feature 1..20: note = Target: FXN; (+) strand; PAM type: YTN; PAM sequence: CTC
  source 1..20: mol_type = other DNA
tgcctgaagctcccttaatc

SEQ ID NO: 29800 - DNA, 20 bp, synthetic construct
  misc_feature 1..20: note = Description of Artificial Sequence: Synthetic oligonucleotide
  misc_feature 1..20: note = Target: FXN; (+) strand; PAM type: YTN; PAM sequence: CTG
  source 1..20: mol_type = other DNA
cctgaagctcccttaatctg

SEQ ID NO: 29801 - DNA, 20 bp, synthetic construct
  misc_feature 1..20: note = Description of Artificial Sequence: Synthetic oligonucleotide
  misc_feature 1..20: note = Target: FXN; (+) strand; PAM type: YTN; PAM sequence: CTG
  source 1..20: mol_type = other DNA
aagctcccttaatctgtcag

SEQ ID NO: 29802 - DNA, 20 bp, synthetic construct
  misc_feature 1..20: note = Description of Artificial Sequence: Synthetic oligonucleotide
  misc_feature 1..20: note = Target: FXN; (+) strand; PAM type: YTN; PAM sequence: CTC
  source 1..20: mol_type = other DNA
ccttaatctgtcagatcaca

SEQ ID NO: 29803 - DNA, 20 bp, synthetic construct
  misc_feature 1..20: note = Description of Artificial Sequence: Synthetic oligonucleotide
  misc_feature 1..20: note = Target: FXN; (+) strand; PAM type: YTN; PAM sequence: CTT
  source 1..20: mol_type = other DNA
aatctgtcagatcacagatc

SEQ ID NO: 29804 - DNA, 20 bp, synthetic construct
  misc_feature 1..20: note = Description of Artificial Sequence: Synthetic oligonucleotide
  misc_feature 1..20: note = Target: FXN; (+) strand; PAM type: YTN; PAM sequence: TTA
  source 1..20: mol_type = other DNA
atctgtcagatcacagatca

SEQ ID NO: 29805 - DNA, 20 bp, synthetic construct
  misc_feature 1..20: note = Description of Artificial Sequence: Synthetic oligonucleotide
  misc_feature 1..20: note = Target: FXN; (+) strand; PAM type: YTN; PAM sequence: CTG
  source 1..20: mol_type = other DNA
tcagatcacagatcaaaagc

SEQ ID NO: 29806 - DNA, 20 bp, synthetic construct
  misc_feature 1..20: note = Description of Artificial Sequence: Synthetic oligonucleotide
  misc_feature 1..20: note = Target: FXN; (+) strand; PAM type: YTN; PAM sequence: CTA
  source 1..20: mol_type = other DNA
tcacacactgcccaagggac

SEQ ID NO: 29807 - DNA, 20 bp, synthetic construct
  misc_feature 1..20: note = Description of Artificial Sequence: Synthetic oligonucleotide
  misc_feature 1..20: note = Target: FXN; (+) strand; PAM type: YTN; PAM sequence: CTG
  source 1..20: mol_type = other DNA
cccaagggaccctaaaggga

SEQ ID NO: 29808 - DNA, 20 bp, synthetic construct
  misc_feature 1..20: note = Description of Artificial Sequence: Synthetic oligonucleotide
  misc_feature 1..20: note = Target: FXN; (+) strand; PAM type: YTN; PAM sequence: CTA
  source 1..20: mol_type = other DNA
aagggagccactctcagaaa

SEQ ID NO: 29809 - DNA, 20 bp, synthetic construct
  misc_feature 1..20: note = Description of Artificial Sequence: Synthetic oligonucleotide
  misc_feature 1..20: note = Target: FXN; (+) strand; PAM type: YTN; PAM sequence: CTC
  source 1..20: mol_type = other DNA
tcagaaaataaatccaaacc

SEQ ID NO: 29810 - DNA, 20 bp, synthetic construct
  misc_feature 1..20: note = Description of Artificial Sequence: Synthetic oligonucleotide
  misc_feature 1..20: note = Target: FXN; (+) strand; PAM type: YTN; PAM sequence: CTC
  source 1..20: mol_type = other DNA
agaaaataaatccaaacctc

SEQ ID NO: 29811 - DNA, 20 bp, synthetic construct
  misc_feature 1..20: note = Description of Artificial Sequence: Synthetic oligonucleotide
  misc_feature 1..20: note = Target: FXN; (+) strand; PAM type: YTN; PAM sequence: CTC
  source 1..20: mol_type = other DNA
cttttttctggccactgaaa

SEQ ID NO: 29812 - DNA, 20 bp, synthetic construct
  misc_feature 1..20: note = Description of Artificial Sequence: Synthetic oligonucleotide
  misc_feature 1..20: note = Target: FXN; (+) strand; PAM type: YTN; PAM sequence: CTT
  source 1..20: mol_type = other DNA
ttttctggccactgaaacgt

SEQ ID NO: 29813 - DNA, 20 bp, synthetic construct
  misc_feature 1..20: note = Description of Artificial Sequence: Synthetic oligonucleotide
  misc_feature 1..20: note = Target: FXN; (+) strand; PAM type: YTN; PAM sequence: TTT
  source 1..20: mol_type = other DNA
tttctggccactgaaacgtt

SEQ ID NO: 29814 - DNA, 20 bp, synthetic construct
  misc_feature 1..20: note = Description of Artificial Sequence: Synthetic oligonucleotide
  misc_feature 1..20: note = Target: FXN; (+) strand; PAM type: YTN; PAM sequence: TTT
  source 1..20: mol_type = other DNA
ttctggccactgaaacgttc

SEQ ID NO: 29815 - DNA, 20 bp, synthetic construct
  misc_feature 1..20: note = Description of Artificial Sequence: Synthetic oligonucleotide
  misc_feature 1..20: note = Target: FXN; (+) strand; PAM type: YTN; PAM sequence: TTT
  source 1..20: mol_type = other DNA
tctggccactgaaacgttca

SEQ ID NO: 29816 - DNA, 20 bp, synthetic construct
  misc_feature 1..20: note = Description of Artificial Sequence: Synthetic oligonucleotide
  misc_feature 1..20: note = Target: FXN; (+) strand; PAM type: YTN; PAM sequence: TTT
  source 1..20: mol_type = other DNA
ctggccactgaaacgttcaa

SEQ ID NO: 29817 - DNA, 20 bp, synthetic construct
  misc_feature 1..20: note = Description of Artificial Sequence: Synthetic oligonucleotide
  misc_feature 1..20: note = Target: FXN; (+) strand; PAM type: YTN; PAM sequence: TTC
  source 1..20: mol_type = other DNA
tggccactgaaacgttcaat

SEQ ID NO: 29818 - DNA, 20 bp, synthetic construct
  misc_feature 1..20: note = Description of Artificial Sequence: Synthetic oligonucleotide
  misc_feature 1..20: note = Target: FXN; (+) strand; PAM type: YTN; PAM sequence: CTG
  source 1..20: mol_type = other DNA
gccactgaaacgttcaataa

SEQ ID NO: 29819 - DNA, 20 bp, synthetic construct
  misc_feature 1..20: note = Description of Artificial Sequence: Synthetic oligonucleotide
  misc_feature 1..20: note = Target: FXN; (+) strand; PAM type: YTN; PAM sequence: CTG
  source 1..20: mol_type = other DNA
aaacgttcaataattagttc

SEQ ID NO: 29820 - DNA, 20 bp, synthetic construct
  misc_feature 1..20: note = Description of Artificial Sequence: Synthetic oligonucleotide
  misc_feature 1..20: note = Target: FXN; (+) strand; PAM type: YTN; PAM sequence: TTC
  source 1..20: mol_type = other DNA
aataattagttcattatcta

SEQ ID NO: 29821 - DNA, 20 bp, synthetic construct
  misc_feature 1..20: note = Description of Artificial Sequence: Synthetic oligonucleotide
  misc_feature 1..20: note = Target: FXN; (+) strand; PAM type: YTN; PAM sequence: TTA
  source 1..20: mol_type = other DNA
gttcattatctacatcattc

SEQ ID NO: 29822 - DNA, 20 bp, synthetic construct
  misc_feature 1..20: note = Description of Artificial Sequence: Synthetic oligonucleotide
  misc_feature 1..20: note = Target: FXN; (+) strand; PAM type: YTN; PAM sequence: TTC
  source 1..20: mol_type = other DNA
attatctacatcattcacat

SEQ ID NO: 29823 - DNA, 20 bp, synthetic construct
  misc_feature 1..20: note = Description of Artificial Sequence: Synthetic oligonucleotide
  misc_feature 1..20: note = Target: FXN; (+) strand; PAM type: YTN; PAM sequence: TTA
  source 1..20: mol_type = other DNA
tctacatcattcacatgttt

SEQ ID NO: 29824 - DNA, 20 bp, synthetic construct
  misc_feature 1..20: note = Description of Artificial Sequence: Synthetic oligonucleotide
  misc_feature 1..20: note = Target: FXN; (+) strand; PAM type: YTN; PAM sequence: CTA
  source 1..20: mol_type = other DNA
catcattcacatgtttaata

SEQ ID NO: 29825 - DNA, 20 bp, synthetic construct
  misc_feature 1..20: note = Description of Artificial Sequence: Synthetic oligonucleotide
  misc_feature 1..20: note = Target: FXN; (+) strand; PAM type: YTN; PAM sequence: TTC
  source 1..20: mol_type = other DNA
acatgtttaatatttattga

SEQ ID NO: 29826 - DNA, 20 bp, synthetic construct
  misc_feature 1..20: note = Description of Artificial Sequence: Synthetic oligonucleotide
  misc_feature 1..20: note = Target: FXN; (+) strand; PAM type: YTN; PAM sequence: TTT
  source 1..20: mol_type = other DNA
aatatttattgactttggaa

SEQ ID NO: 29827 - DNA, 20 bp, synthetic construct
  misc_feature 1..20: note = Description of Artificial Sequence: Synthetic oligonucleotide
  misc_feature 1..20: note = Target: FXN; (+) strand; PAM type: YTN; PAM sequence: TTA
  source 1..20: mol_type = other DNA
atatttattgactttggaat

SEQ ID NO: 29828 - DNA, 20 bp, synthetic construct
  misc_feature 1..20: note = Description of Artificial Sequence: Synthetic oligonucleotide
  misc_feature 1..20: note = Target: FXN; (+) strand; PAM type: YTN; PAM sequence: TTT
  source 1..20: mol_type = other DNA
attgactttggaattattga

SEQ ID NO: 29829 - DNA, 20 bp, synthetic construct
  misc_feature 1..20: note = Description of Artificial Sequence: Synthetic oligonucleotide
  misc_feature 1..20: note = Target: FXN; (+) strand; PAM type: YTN; PAM sequence: TTA
  source 1..20: mol_type = other DNA
ttgactttggaattattgat

SEQ ID NO: 29830 - DNA, 20 bp, synthetic construct
  misc_feature 1..20: note = Description of Artificial Sequence: Synthetic oligonucleotide
  misc_feature 1..20: note = Target: FXN; (+) strand; PAM type: YTN; PAM sequence: TTG
  source 1..20: mol_type = other DNA
actttggaattattgattac

SEQ ID NO: 29831 - DNA, 20 bp, synthetic construct
  misc_feature 1..20: note = Description of Artificial Sequence: Synthetic oligonucleotide
  misc_feature 1..20: note = Target: FXN; (+) strand; PAM type: YTN; PAM sequence: CTT
  source 1..20: mol_type = other DNA
tggaattattgattactttg

SEQ ID NO: 29832 - DNA, 20 bp, synthetic construct
  misc_feature 1..20: note = Description of Artificial Sequence: Synthetic oligonucleotide
  misc_feature 1..20: note = Target: FXN; (+) strand; PAM type: YTN; PAM sequence: TTT
  source 1..20: mol_type = other DNA
ggaattattgattactttgc

SEQ ID NO: 29833 - DNA, 20 bp, synthetic construct
  misc_feature 1..20: note = Description of Artificial Sequence: Synthetic oligonucleotide
  misc_feature 1..20: note = Target: FXN; (+) strand; PAM type: YTN; PAM sequence: TTG
  source 1..20: mol_type = other DNA
gaattattgattactttgct

SEQ ID NO: 29834 - DNA, 20 bp, synthetic construct
  misc_feature 1..20: note = Description of Artificial Sequence: Synthetic oligonucleotide
  misc_feature 1..20: note = Target: FXN; (+) strand; PAM type: YTN; PAM sequence: TTA
  source 1..20: mol_type = other DNA
ttgattactttgctgagtat

SEQ ID NO: 29835 - DNA, 20 bp, synthetic construct
  misc_feature 1..20: note = Description of Artificial Sequence: Synthetic oligonucleotide
  misc_feature 1..20: note = Target: FXN; (+) strand; PAM type: YTN; PAM sequence: TTG
  source 1..20: mol_type = other DNA
attactttgctgagtatctt

SEQ ID NO: 29836 - DNA, 20 bp, synthetic construct
  misc_feature 1..20: note = Description of Artificial Sequence: Synthetic oligonucleotide
  misc_feature 1..20: note = Target: FXN; (+) strand; PAM type: YTN; PAM sequence: TTA
  source 1..20: mol_type = other DNA
ctttgctgagtatcttatga

SEQ ID NO: 29837 - DNA, 20 bp, synthetic construct
  misc_feature 1..20: note = Description of Artificial Sequence: Synthetic oligonucleotide
  misc_feature 1..20: note = Target: FXN; (+) strand; PAM type: YTN; PAM sequence: CTT
  source 1..20: mol_type = other DNA
tgctgagtatcttatgaatt

SEQ ID NO: 29838 - DNA, 20 bp, synthetic construct
  misc_feature 1..20: note = Description of Artificial Sequence: Synthetic oligonucleotide
  misc_feature 1..20: note = Target: FXN; (+) strand; PAM type: YTN; PAM sequence: TTT
  source 1..20: mol_type = other DNA
gctgagtatcttatgaattt

SEQ ID NO: 29839 - DNA, 20 bp, synthetic construct
  misc_feature 1..20: note = Description of Artificial Sequence: Synthetic oligonucleotide
  misc_feature 1..20: note = Target: FXN; (+) strand; PAM type: YTN; PAM sequence: TTG
  source 1..20: mol_type = other DNA
ctgagtatcttatgaattta

SEQ ID NO: 29840 - DNA, 20 bp, synthetic construct
  misc_feature 1..20: note = Description of Artificial Sequence: Synthetic oligonucleotide
  misc_feature 1..20: note = Target: FXN; (+) strand; PAM type: YTN; PAM sequence: CTG
  source 1..20: mol_type = other DNA
agtatcttatgaatttaatc

SEQ ID NO: 29841 - DNA, 20 bp, synthetic construct
  misc_feature 1..20: note = Description of Artificial Sequence: Synthetic oligonucleotide
  misc_feature 1..20: note = Target: FXN; (+) strand; PAM type: YTN; PAM sequence: CTT
  source 1..20: mol_type = other DNA
atgaatttaatctatattaa

SEQ ID NO: 29842 - DNA, 20 bp, synthetic construct
  misc_feature 1..20: note = Description of Artificial Sequence: Synthetic oligonucleotide
  misc_feature 1..20: note = Target: FXN; (+) strand; PAM type: YTN; PAM sequence: TTA
  source 1..20: mol_type = other DNA
tgaatttaatctatattaat

SEQ ID NO: 29843 - DNA, 20 bp, synthetic construct
  misc_feature 1..20: note = Description of Artificial Sequence: Synthetic oligonucleotide
  misc_feature 1..20: note = Target: FXN; (+) strand; PAM type: YTN; PAM sequence: TTT
  source 1..20: mol_type = other DNA
aatctatattaatattaagg

SEQ ID NO: 29844 - DNA, 20 bp, synthetic construct
  misc_feature 1..20: note = Description of Artificial Sequence: Synthetic oligonucleotide
  misc_feature 1..20: note = Target: FXN; (+) strand; PAM type: YTN; PAM sequence: TTA
  source 1..20: mol_type = other DNA
atctatattaatattaaggt

SEQ ID NO: 29845 - DNA, 20 bp, synthetic construct
  misc_feature 1..20: note = Description of Artificial Sequence: Synthetic oligonucleotide
  misc_feature 1..20: note = Target: FXN; (+) strand; PAM type: YTN; PAM sequence: CTA
  source 1..20: mol_type = other DNA
tattaatattaaggtgatgt

SEQ ID NO: 29846 - DNA, 20 bp, synthetic construct
  misc_feature 1..20: note = Description of Artificial Sequence: Synthetic oligonucleotide
  misc_feature 1..20: note = Target: FXN; (+) strand; PAM type: YTN; PAM sequence: TTA
  source 1..20: mol_type = other DNA
atattaaggtgatgtatcaa

SEQ ID NO: 29847 - DNA, 20 bp, synthetic construct
  misc_feature 1..20: note = Description of Artificial Sequence: Synthetic oligonucleotide
  misc_feature 1..20: note = Target: FXN; (+) strand; PAM type: YTN; PAM sequence: TTA
  source 1..20: mol_type = other DNA
aggtgatgtatcaaattgca

SEQ ID NO: 29848 - DNA, 20 bp, synthetic construct
  misc_feature 1..20: note = Description of Artificial Sequence: Synthetic oligonucleotide
  misc_feature 1..20: note = Target: FXN; (+) strand; PAM type: YTN; PAM sequence: TTG
  source 1..20: mol_type = other DNA
cattccagagtgtggatttg

SEQ ID NO: 29849 - DNA, 20 bp, synthetic construct
  misc_feature 1..20: note = Description of Artificial Sequence: Synthetic oligonucleotide
  misc_feature 1..20: note = Target: FXN; (+) strand; PAM type: YTN; PAM sequence: TTC
  source 1..20: mol_type = other DNA
cagagtgtggatttgactct

SEQ ID NO: 29850 - DNA, 20 bp, synthetic construct
  misc_feature 1..20: note = Description of Artificial Sequence: Synthetic oligonucleotide
  misc_feature 1..20: note = Target: FXN; (+) strand; PAM type: YTN; PAM sequence: TTT
  source 1..20: mol_type = other DNA
gactctagtgccataatcag

SEQ ID NO: 29851 - DNA, 20 bp, synthetic construct
  misc_feature 1..20: note = Description of Artificial Sequence: Synthetic oligonucleotide
  misc_feature 1..20: note = Target: FXN; (+) strand; PAM type: YTN; PAM sequence: TTG
  source 1..20: mol_type = other DNA
actctagtgccataatcagt

SEQ ID NO: 29852 - DNA, 20 bp, synthetic construct
  misc_feature 1..20: note = Description of Artificial Sequence: Synthetic oligonucleotide
  misc_feature 1..20: note = Target: FXN; (+) strand; PAM type: YTN; PAM sequence: CTC
  source 1..20: mol_type = other DNA
tagtgccataatcagtctcc

SEQ ID NO: 29853 - DNA, 20 bp, synthetic construct
  misc_feature 1..20: note = Description of Artificial Sequence: Synthetic oligonucleotide
  misc_feature 1..20: note = Target: FXN; (+) strand; PAM type: YTN; PAM sequence: CTA
  source 1..20: mol_type = other DNA
gtgccataatcagtctcctg

SEQ ID NO: 29854 - DNA, 20 bp, synthetic construct
  misc_feature 1..20: note = Description of Artificial Sequence: Synthetic oligonucleotide
  misc_feature 1..20: note = Target: FXN; (+) strand; PAM type: YTN; PAM sequence: CTC
  source 1..20: mol_type = other DNA
ctgggacaaacagctgtttc

SEQ ID NO: 29855 - DNA, 20 bp, synthetic construct
  misc_feature 1..20: note = Description of Artificial Sequence: Synthetic oligonucleotide
  misc_feature 1..20: note = Target: FXN; (+) strand; PAM type: YTN; PAM sequence: CTG
  source 1..20: mol_type = other DNA
ggacaaacagctgtttctct

SEQ ID NO: 29856 - DNA, 20 bp, synthetic construct
  misc_feature 1..20: note = Description of Artificial Sequence: Synthetic oligonucleotide
  misc_feature 1..20: note = Target: FXN; (+) strand; PAM type: YTN; PAM sequence: CTG
  source 1..20: mol_type = other DNA
tttctcttccctcattatag

SEQ ID NO: 29857 - DNA, 20 bp, synthetic construct
  misc_feature 1..20: note = Description of Artificial Sequence: Synthetic oligonucleotide
  misc_feature 1..20: note = Target: FXN; (+) strand; PAM type: YTN; PAM sequence: TTT
  source 1..20: mol_type = other DNA
ctcttccctcattatagaaa

SEQ ID NO: 29858 - DNA, 20 bp, synthetic construct
  misc_feature 1..20: note = Description of Artificial Sequence: Synthetic oligonucleotide
  misc_feature 1..20: note = Target: FXN; (+) strand; PAM type: YTN; PAM sequence: TTC
  source 1..20: mol_type = other DNA
tcttccctcattatagaaaa

SEQ ID NO: 29859 - DNA, 20 bp, synthetic construct
  misc_feature 1..20: note = Description of Artificial Sequence: Synthetic oligonucleotide
  misc_feature 1..20: note = Target: FXN; (+) strand; PAM type: YTN; PAM sequence: CTC
  source 1..20: mol_type = other DNA
ttccctcattatagaaaaaa

SEQ ID NO: 29860 - DNA, 20 bp, synthetic construct
  misc_feature 1..20: note = Description of Artificial Sequence: Synthetic oligonucleotide
  misc_feature 1..20: note = Target: FXN; (+) strand; PAM type: YTN; PAM sequence: CTT
  source 1..20: mol_type = other DNA
ccctcattatagaaaaaaat

SEQ ID NO: 29861 - DNA, 20 bp, synthetic construct
  misc_feature 1..20: note = Description of Artificial Sequence: Synthetic oligonucleotide
  misc_feature 1..20: note = Target: FXN; (+) strand; PAM type: YTN; PAM sequence: TTC
  source 1..20: mol_type = other DNA
cctcattatagaaaaaaatt

SEQ ID NO: 29862 - DNA, 20 bp, synthetic construct
  misc_feature 1..20: note = Description of Artificial Sequence: Synthetic oligonucleotide
  misc_feature 1..20: note = Target: FXN; (+) strand; PAM type: YTN; PAM sequence: CTC
  source 1..20: mol_type = other DNA
attatagaaaaaaattgccc

SEQ ID NO: 29863 - DNA, 20 bp, synthetic construct
  misc_feature 1..20: note = Description of Artificial Sequence: Synthetic oligonucleotide
  misc_feature 1..20: note = Target: FXN; (+) strand; PAM type: YTN; PAM sequence: TTA
  source 1..20: mol_type = other DNA
tagaaaaaaattgcccttgg

SEQ ID NO: 29864 - DNA, 20 bp, synthetic construct
  misc_feature 1..20: note = Description of Artificial Sequence: Synthetic oligonucleotide
  misc_feature 1..20: note = Target: FXN; (+) strand; PAM type: YTN; PAM sequence: TTG
  source 1..20: mol_type = other DNA
cccttggcaaatgtcaaaga

SEQ ID NO: 29865 - DNA, 20 bp, synthetic construct
  misc_feature 1..20: note = Description of Artificial Sequence: Synthetic oligonucleotide
  misc_feature 1..20: note = Target: FXN; (+) strand; PAM type: YTN; PAM sequence: CTT
  source 1..20: mol_type = other DNA
ggcaaatgtcaaagaacatc

SEQ ID NO: 29866 - DNA, 20 bp, synthetic construct
  misc_feature 1..20: note = Description of Artificial Sequence: Synthetic oligonucleotide
  misc_feature 1..20: note = Target: FXN; (+) strand; PAM type: YTN; PAM sequence: TTG
  source 1..20: mol_type = other DNA
gcaaatgtcaaagaacatcc

SEQ ID NO: 29867 - DNA, 20 bp, synthetic construct
  misc_feature 1..20: note = Description of Artificial Sequence: Synthetic oligonucleotide
  misc_feature 1..20: note = Target: FXN; (+) strand; PAM type: YTN; PAM sequence: CTT
  source 1..20: mol_type = other DNA
ttatcaatctctcttaccaa

SEQ ID NO: 29868 - DNA, 20 bp, synthetic construct
  misc_feature 1..20: note = Description of Artificial Sequence: Synthetic oligonucleotide
  misc_feature 1..20: note = Target: FXN; (+) strand; PAM type: YTN; PAM sequence: TTT
  source 1..20: mol_type = other DNA
tatcaatctctcttaccaat

SEQ ID NO: 29869 - DNA, 20 bp, synthetic construct
  misc_feature 1..20: note = Description of Artificial Sequence: Synthetic oligonucleotide
  misc_feature 1..20: note = Target: FXN; (+) strand; PAM type: YTN; PAM sequence: TTT
  source 1..20: mol_type = other DNA
atcaatctctcttaccaatc

SEQ ID NO: 29870 - DNA, 20 bp, synthetic construct
  misc_feature 1..20: note = Description of Artificial Sequence: Synthetic oligonucleotide
  misc_feature 1..20: note = Target: FXN; (+) strand; PAM type: YTN; PAM sequence: TTA
  source 1..20: mol_type = other DNA
tcaatctctcttaccaatca

SEQ ID NO: 29871 - DNA, 20 bp, synthetic construct
  misc_feature 1..20: note = Description of Artificial Sequence: Synthetic oligonucleotide
  misc_feature 1..20: note = Target: FXN; (+) strand; PAM type: YTN; PAM sequence: CTC
  source 1..20: mol_type = other DNA
tcttaccaatcaatccaagc

SEQ ID NO: 29872 - DNA, 20 bp, synthetic construct
  misc_feature 1..20: note = Description of Artificial Sequence: Synthetic oligonucleotide
  misc_feature 1..20: note = Target: FXN; (+) strand; PAM type: YTN; PAM sequence: CTC
  source 1..20: mol_type = other DNA
ttaccaatcaatccaagcaa

SEQ ID NO: 29873 - DNA, 20 bp, synthetic construct
  misc_feature 1..20: note = Description of Artificial Sequence: Synthetic oligonucleotide
  misc_feature 1..20: note = Target: FXN; (+) strand; PAM type: YTN; PAM sequence: CTT
  source 1..20: mol_type = other DNA
accaatcaatccaagcaaat

SEQ ID NO: 29874 - DNA, 20 bp, synthetic construct
  misc_feature 1..20: note = Description of Artificial Sequence: Synthetic oligonucleotide
  misc_feature 1..20: note = Target: FXN; (+) strand; PAM type: YTN; PAM sequence: TTA
  source 1..20: mol_type = other DNA
ccaatcaatccaagcaaatg

SEQ ID NO: 29875 - DNA, 20 bp, synthetic construct
  misc_feature 1..20: note = Description of Artificial Sequence: Synthetic oligonucleotide
  misc_feature 1..20: note = Target: FXN; (+) strand; PAM type: YTN; PAM sequence: TTT
  source 1..20: mol_type = other DNA
cttttccccagagttgaagt

SEQ ID NO: 29876 - DNA, 20 bp, synthetic construct
  misc_feature 1..20: note = Description of Artificial Sequence: Synthetic oligonucleotide
  misc_feature 1..20: note = Target: FXN; (+) strand; PAM type: YTN; PAM sequence: TTC
  source 1..20: mol_type = other DNA
ttttccccagagttgaagtc

SEQ ID NO: 29877 - DNA, 20 bp, synthetic construct
  misc_feature 1..20: note = Description of Artificial Sequence: Synthetic oligonucleotide
  misc_feature 1..20: note = Target: FXN; (+) strand; PAM type: YTN; PAM sequence: CTT
  source 1..20: mol_type = other DNA
ttccccagagttgaagtcac

SEQ ID NO: 29878 - DNA, 20 bp, synthetic construct
  misc_feature 1..20: note = Description of Artificial Sequence: Synthetic oligonucleotide
  misc_feature 1..20: note = Target: FXN; (+) strand; PAM type: YTN; PAM sequence: TTT
  source 1..20: mol_type = other DNA
tccccagagttgaagtcacc

SEQ ID NO: 29879 - DNA, 20 bp, synthetic construct
  misc_feature 1..20: note = Description of Artificial Sequence: Synthetic oligonucleotide
  misc_feature 1..20: note = Target: FXN; (+) strand; PAM type: YTN; PAM sequence: TTT
  source 1..20: mol_type = other DNA
ccccagagttgaagtcacct

SEQ ID NO: 29880 - DNA, 20 bp, synthetic construct
  misc_feature 1..20: note = Description of Artificial Sequence: Synthetic oligonucleotide
  misc_feature 1..20: note = Target: FXN; (+) strand; PAM type: YTN; PAM sequence: TTC
  source 1..20: mol_type = other DNA
cccagagttgaagtcacctc

SEQ ID NO: 29881 - DNA, 20 bp, synthetic construct
  misc_feature 1..20: note = Description of Artificial Sequence: Synthetic oligonucleotide
  misc_feature 1..20: note = Target: FXN; (+) strand; PAM type: YTN; PAM sequence: TTG
  source 1..20: mol_type = other DNA
aagtcacctcctgacaggaa

SEQ ID NO: 29882 - DNA, 20 bp, synthetic construct
  misc_feature 1..20: note = Description of Artificial Sequence: Synthetic oligonucleotide
  misc_feature 1..20: note = Target: FXN; (+) strand; PAM type: YTN; PAM sequence: CTC
  source 1..20: mol_type = other DNA
ctgacaggaagttaagtctt

SEQ ID NO: 29883 - DNA, 20 bp, synthetic construct
  misc_feature 1..20: note = Description of Artificial Sequence: Synthetic oligonucleotide
  misc_feature 1..20: note = Target: FXN; (+) strand; PAM type: YTN; PAM sequence: CTG
  source 1..20: mol_type = other DNA
acaggaagttaagtctttag

SEQ ID NO: 29884 - DNA, 20 bp, synthetic construct
  misc_feature 1..20: note = Description of Artificial Sequence: Synthetic oligonucleotide
  misc_feature 1..20: note = Target: FXN; (+) strand; PAM type: YTN; PAM sequence: TTA
  source 1..20: mol_type = other DNA
agtctttaggcactgaatca

SEQ ID NO: 29885 - DNA, 20 bp, synthetic construct
  misc_feature 1..20: note = Description of Artificial Sequence: Synthetic oligonucleotide
  misc_feature 1..20: note = Target: FXN; (+) strand; PAM type: YTN; PAM sequence: CTT
  source 1..20: mol_type = other DNA
taggcactgaatcatagcac

SEQ ID NO: 29886 - DNA, 20 bp, synthetic construct
  misc_feature 1..20: note = Description of Artificial Sequence: Synthetic oligonucleotide
  misc_feature 1..20: note = Target: FXN; (+) strand; PAM type: YTN; PAM sequence: TTT
  source 1..20: mol_type = other DNA
aggcactgaatcatagcact

SEQ ID NO: 29887 - DNA, 20 bp, synthetic construct
  misc_feature 1..20: note = Description of Artificial Sequence: Synthetic oligonucleotide
  misc_feature 1..20: note = Target: FXN; (+) strand; PAM type: YTN; PAM sequence: TTA
  source 1..20: mol_type = other DNA
ggcactgaatcatagcactg

SEQ ID NO: 29888 - DNA, 20 bp, synthetic construct
  misc_feature 1..20: note = Description of Artificial Sequence: Synthetic oligonucleotide
  misc_feature 1..20: note = Target: FXN; (+) strand; PAM type: YTN; PAM sequence: CTG
  source 1..20: mol_type = other DNA
aatcatagcactgagctgaa

SEQ ID NO: 29889 - DNA, 20 bp, synthetic construct
  misc_feature 1..20: note = Description of Artificial Sequence: Synthetic oligonucleotide
  misc_feature 1..20: note = Target: FXN; (+) strand; PAM type: YTN; PAM sequence: CTG
  source 1..20: mol_type = other DNA
agctgaagcccaggactaag

SEQ ID NO: 29890 - DNA, 20 bp, synthetic construct
  misc_feature 1..20: note = Description of Artificial Sequence: Synthetic oligonucleotide
  misc_feature 1..20: note = Target: FXN; (+) strand; PAM type: YTN; PAM sequence: CTG
  source 1..20: mol_type = other DNA
aagcccaggactaagcaaga

SEQ ID NO: 29891 - DNA, 20 bp, synthetic construct
  misc_feature 1..20: note = Description of Artificial Sequence: Synthetic oligonucleotide
  misc_feature 1..20: note = Target: FXN; (+) strand; PAM type: YTN; PAM sequence: CTA
  source 1..20: mol_type = other DNA
agcaagaatgagtgagaatt

SEQ ID NO: 29892 - DNA, 20 bp, synthetic construct
  misc_feature 1..20: note = Description of Artificial Sequence: Synthetic oligonucleotide
  misc_feature 1..20: note = Target: FXN; (+) strand; PAM type: YTN; PAM sequence: TTT
  source 1..20: mol_type = other DNA
ggagacttaaggtttggtca

SEQ ID NO: 29893 - DNA, 20 bp, synthetic construct
  misc_feature 1..20: note = Description of Artificial Sequence: Synthetic oligonucleotide
  misc_feature 1..20: note = Target: FXN; (+) strand; PAM type: YTN; PAM sequence: TTG
  source 1..20: mol_type = other DNA
gagacttaaggtttggtcat

SEQ ID NO: 29894 - DNA, 20 bp, synthetic construct
  misc_feature 1..20: note = Description of Artificial Sequence: Synthetic oligonucleotide
  misc_feature 1..20: note = Target: FXN; (+) strand; PAM type: YTN; PAM sequence: CTT
  source 1..20: mol_type = other DNA
aaggtttggtcatctgtaga

SEQ ID NO: 29895 - DNA, 20 bp, synthetic construct
  misc_feature 1..20: note = Description of Artificial Sequence: Synthetic oligonucleotide
  misc_feature 1..20: note = Target: FXN; (+) strand; PAM type: YTN; PAM sequence: TTA
  source 1..20: mol_type = other DNA
aggtttggtcatctgtagag

SEQ ID NO: 29896 - DNA, 20 bp, synthetic construct
  misc_feature 1..20: note = Description of Artificial Sequence: Synthetic oligonucleotide
  misc_feature 1..20: note = Target: FXN; (+) strand; PAM type: YTN; PAM sequence: TTT
  source 1..20: mol_type = other DNA
ggtcatctgtagaggattgg

SEQ ID NO: 29897 - DNA, 20 bp, synthetic construct
  misc_feature 1..20: note = Description of Artificial Sequence: Synthetic oligonucleotide
  misc_feature 1..20: note = Target: FXN; (+) strand; PAM type: YTN; PAM sequence: TTG
  source 1..20: mol_type = other DNA
gtcatctgtagaggattggg

SEQ ID NO: 29898 - DNA, 20 bp, synthetic construct
  misc_feature 1..20: note = Description of Artificial Sequence: Synthetic oligonucleotide
  misc_feature 1..20: note = Target: FXN; (+) strand; PAM type: YTN; PAM sequence: CTG
  source 1..20: mol_type = other DNA
tagaggattgggttttgtct

SEQ ID NO: 29899 - DNA, 20 bp, synthetic construct
  misc_feature 1..20: note = Description of Artificial Sequence: Synthetic oligonucleotide
  misc_feature 1..20: note = Target: FXN; (+) strand; PAM type: YTN; PAM sequence: TTG
  source 1..20: mol_type = other DNA
ggttttgtcttgttttgttt

SEQ ID NO: 29900 - DNA, 20 bp, synthetic construct
  misc_feature 1..20: note = Description of Artificial Sequence: Synthetic oligonucleotide
  misc_feature 1..20: note = Target: FXN; (+) strand; PAM type: YTN; PAM sequence: TTT
  source 1..20: mol_type = other DNA
tgtcttgttttgtttttgtt

SEQ ID NO: 29901 - DNA, 20 bp, synthetic construct
  misc_feature 1..20: note = Description of Artificial Sequence: Synthetic oligonucleotide
  misc_feature 1..20: note = Target: FXN; (+) strand; PAM type: YTN; PAM sequence: TTT
  source 1..20: mol_type = other DNA
gtcttgttttgtttttgttt

SEQ ID NO: 29902 - DNA, 20 bp, synthetic construct
  misc_feature 1..20: note = Description of Artificial Sequence: Synthetic oligonucleotide
  misc_feature 1..20: note = Target: FXN; (+) strand; PAM type: YTN; PAM sequence: TTG
  source 1..20: mol_type = other DNA
tcttgttttgtttttgtttt

SEQ ID NO: 29903 - DNA, 20 bp, synthetic construct
  misc_feature 1..20: note = Description of Artificial Sequence: Synthetic oligonucleotide
  misc_feature 1..20: note = Target: FXN; (+) strand; PAM type: YTN; PAM sequence: CTT
  source 1..20: mol_type = other DNA
gttttgtttttgttttggtg

SEQ ID NO: 29904 - DNA, 20 bp, synthetic construct
  misc_feature 1..20: note = Description of Artificial Sequence: Synthetic oligonucleotide
  misc_feature 1..20: note = Target: FXN; (+) strand; PAM type: YTN; PAM sequence: TTG
  source 1..20: mol_type = other DNA
ttttgtttttgttttggtgt

SEQ ID NO: 29905 - DNA, 20 bp, synthetic construct
  misc_feature 1..20: note = Description of Artificial Sequence: Synthetic oligonucleotide
  misc_feature 1..20: note = Target: FXN; (+) strand; PAM type: YTN; PAM sequence: TTT
  source 1..20: mol_type = other DNA
tgtttttgttttggtgtcct

SEQ ID NO: 29906 - DNA, 20 bp, synthetic construct
  misc_feature 1..20: note = Description of Artificial Sequence: Synthetic oligonucleotide
  misc_feature 1..20: note = Target: FXN; (+) strand; PAM type: YTN; PAM sequence: TTT
  source 1..20: mol_type = other DNA
gtttttgttttggtgtcctg

SEQ ID NO: 29907 - DNA, 20 bp, synthetic construct
  misc_feature 1..20: note = Description of Artificial Sequence: Synthetic oligonucleotide
  misc_feature 1..20: note = Target: FXN; (+) strand; PAM type: YTN; PAM sequence: TTG
  source 1..20: mol_type = other DNA
tttttgttttggtgtcctgc

SEQ ID NO: 29908 - DNA, 20 bp, synthetic construct
  misc_feature 1..20: note = Description of Artificial Sequence: Synthetic oligonucleotide
  misc_feature 1..20: note = Target: FXN; (+) strand; PAM type: YTN; PAM sequence: TTT
  source 1..20: mol_type = other DNA
ttgttttggtgtcctgcaag

SEQ ID NO: 29909 - DNA, 20 bp, synthetic construct
  misc_feature 1..20: note = Description of Artificial Sequence: Synthetic oligonucleotide
  misc_feature 1..20: note = Target: FXN; (+) strand; PAM type: YTN; PAM sequence: TTT
  source 1..20: mol_type = other DNA
tgttttggtgtcctgcaagg

SEQ ID NO: 29910 - DNA, 20 bp, synthetic construct
  misc_feature 1..20: note = Description of Artificial Sequence: Synthetic oligonucleotide
  misc_feature 1..20: note = Target: FXN; (+) strand; PAM type: YTN; PAM sequence: TTT
  source 1..20: mol_type = other DNA
gttttggtgtcctgcaaggt

SEQ ID NO: 29911 - DNA, 20 bp, synthetic construct
  misc_feature 1..20: note = Description of Artificial Sequence: Synthetic oligonucleotide
  misc_feature 1..20: note = Target: FXN; (+) strand; PAM type: YTN; PAM sequence: TTG
  source 1..20: mol_type = other DNA
ttttggtgtcctgcaaggtt

SEQ ID NO: 29912 - DNA, 20 bp, synthetic construct
  misc_feature 1..20: note = Description of Artificial Sequence: Synthetic oligonucleotide
  misc_feature 1..20: note = Target: FXN; (+) strand; PAM type: YTN; PAM sequence: TTT
  source 1..20: mol_type = other DNA
tggtgtcctgcaaggtttct

SEQ ID NO: 29913 - DNA, 20 bp, synthetic construct
  misc_feature 1..20: note = Description of Artificial Sequence: Synthetic oligonucleotide
  misc_feature 1..20: note = Target: FXN; (+) strand; PAM type: YTN; PAM sequence: TTT
  source 1..20: mol_type = other DNA
ggtgtcctgcaaggtttctc

SEQ ID NO: 29914 - DNA, 20 bp, synthetic construct
  misc_feature 1..20: note = Description of Artificial Sequence: Synthetic oligonucleotide
  misc_feature 1..20: note = Target: FXN; (+) strand; PAM type: YTN; PAM sequence: TTG
  source 1..20: mol_type = other DNA
gtgtcctgcaaggtttctca

SEQ ID NO: 29915 - DNA, 20 bp, synthetic construct
  misc_feature 1..20: note = Description of Artificial Sequence: Synthetic oligonucleotide
  misc_feature 1..20: note = Target: FXN; (+) strand; PAM type: YTN; PAM sequence: CTG
  source 1..20: mol_type = other DNA
caaggtttctcactgccctt

SEQ ID NO: 29916 - DNA, 20 bp, synthetic construct
  misc_feature 1..20: note = Description of Artificial Sequence: Synthetic oligonucleotide
  misc_feature 1..20: note = Target: FXN; (+) strand; PAM type: YTN; PAM sequence: TTT
  source 1..20: mol_type = other DNA
ctcactgcccttcatcaggt

SEQ ID NO: 29917 - DNA, 20 bp, synthetic construct
  misc_feature 1..20: note = Description of Artificial Sequence: Synthetic oligonucleotide
  misc_feature 1..20: note = Target: FXN; (+) strand; PAM type: YTN; PAM sequence: TTC
  source 1..20: mol_type = other DNA
tcactgcccttcatcaggta

SEQ ID NO: 29918 - DNA, 20 bp, synthetic construct
  misc_feature 1..20: note = Description of Artificial Sequence: Synthetic oligonucleotide
  misc_feature 1..20: note = Target: FXN; (+) strand; PAM type: YTN; PAM sequence: CTC
  source 1..20: mol_type = other DNA
actgcccttcatcaggtaat

SEQ ID NO: 29919 - DNA, 20 bp, synthetic construct
  misc_feature 1..20: note = Description of Artificial Sequence: Synthetic oligonucleotide
  misc_feature 1..20: note = Target: FXN; (+) strand; PAM type: YTN; PAM sequence: CTG
  source 1..20: mol_type = other DNA
cccttcatcaggtaatatgc

SEQ ID NO: 29920 - DNA, 20 bp, synthetic construct
  misc_feature 1..20: note = Description of Artificial Sequence: Synthetic oligonucleotide
  misc_feature 1..20: note = Target: FXN; (+) strand; PAM type: YTN; PAM sequence: CTT
  source 1..20: mol_type = other DNA
catcaggtaatatgccctgt

SEQ ID NO: 29921 - DNA, 20 bp, synthetic construct
  misc_feature 1..20: note = Description of Artificial Sequence: Synthetic oligonucleotide
  misc_feature 1..20: note = Target: FXN; (+) strand; PAM type: YTN; PAM sequence: TTC
  source 1..20: mol_type = other DNA
atcaggtaatatgccctgtc

SEQ ID NO: 29922 - DNA, 20 bp, synthetic construct
  misc_feature 1..20: note = Description of Artificial Sequence: Synthetic oligonucleotide
  misc_feature 1..20: note = Target: FXN; (+) strand; PAM type: YTN; PAM sequence: CTG
  source 1..20: mol_type = other DNA
tccctgaactggccaattgt

SEQ ID NO: 29923 - DNA, 20 bp, synthetic construct
  misc_feature 1..20: note = Description of Artificial Sequence: Synthetic oligonucleotide
  misc_feature 1..20: note = Target: FXN; (+) strand; PAM type: YTN; PAM sequence: CTG
  source 1..20: mol_type = other DNA
aactggccaattgtgttacc

SEQ ID NO: 29924 - DNA, 20 bp, synthetic construct
  misc_feature 1..20: note = Description of Artificial Sequence: Synthetic oligonucleotide
  misc_feature 1..20: note = Target: FXN; (+) strand; PAM type: YTN; PAM sequence: CTG
  source 1..20: mol_type = other DNA
gccaattgtgttaccccatt

SEQ ID NO: 29925 - DNA, 20 bp, synthetic construct
  misc_feature 1..20: note = Description of Artificial Sequence: Synthetic oligonucleotide
  misc_feature 1..20: note = Target: FXN; (+) strand; PAM type: YTN; PAM sequence: TTG
  source 1..20: mol_type = other DNA
tgttaccccattcccttagc

SEQ ID NO: 29926 - DNA, 20 bp, synthetic construct
  misc_feature 1..20: note = Description of Artificial Sequence: Synthetic oligonucleotide
  misc_feature 1..20: note = Target: FXN; (+) strand; PAM type: YTN; PAM sequence: TTA
  source 1..20: mol_type = other DNA
ccccattcccttagcaacag

SEQ ID NO: 29927 - DNA, 20 bp, synthetic construct
  misc_feature 1..20: note = Description of Artificial Sequence: Synthetic oligonucleotide
  misc_feature 1..20: note = Target: FXN; (+) strand; PAM type: YTN; PAM sequence: TTC
  source 1..20: mol_type = other DNA
ccttagcaacagtgattgct

SEQ ID NO: 29928 - DNA, 20 bp, synthetic construct
  misc_feature 1..20: note = Description of Artificial Sequence: Synthetic oligonucleotide
  misc_feature 1..20: note = Target: FXN; (+) strand; PAM type: YTN; PAM sequence: CTT
  source 1..20: mol_type = other DNA
agcaacagtgattgctactg

SEQ ID NO: 29929 - DNA, 20 bp, synthetic construct
  misc_feature 1..20: note = Description of Artificial Sequence: Synthetic oligonucleotide
  misc_feature 1..20: note = Target: FXN; (+) strand; PAM type: YTN; PAM sequence: TTA
  source 1..20: mol_type = other DNA
gcaacagtgattgctactga

SEQ ID NO: 29930 - DNA, 20 bp, synthetic construct
  misc_feature 1..20: note = Description of Artificial Sequence: Synthetic oligonucleotide
  misc_feature 1..20: note = Target: FXN; (+) strand; PAM type: YTN; PAM sequence: TTG
  source 1..20: mol_type = other DNA
ctactgaagaaacaggaggc

SEQ ID NO: 29931 - DNA, 20 bp, synthetic construct
  misc_feature 1..20: note = Description of Artificial Sequence: Synthetic oligonucleotide
  misc_feature 1..20: note = Target: FXN; (+) strand; PAM type: YTN; PAM sequence: CTA
  source 1..20: mol_type = other DNA
ctgaagaaacaggaggccaa

SEQ ID NO: 29932 - DNA, 20 bp, synthetic construct
  misc_feature 1..20: note = Description of Artificial Sequence: Synthetic oligonucleotide
  misc_feature 1..20: note = Target: FXN; (+) strand; PAM type: YTN; PAM sequence: CTG
  source 1..20: mol_type = other DNA
aagaaacaggaggccaacaa

SEQ ID NO: 29933 - DNA, 20 bp, synthetic construct
  misc_feature 1..20: note = Description of Artificial Sequence: Synthetic oligonucleotide
  misc_feature 1..20: note = Target: FXN; (+) strand; PAM type: YTN; PAM sequence: CTC
  source 1..20: mol_type = other DNA
attcaccagtagagtgtcta

SEQ ID NO: 29934 - DNA, 20 bp, synthetic construct
  misc_feature 1..20: note = Description of Artificial Sequence: Synthetic oligonucleotide
  misc_feature 1..20: note = Target: FXN; (+) strand; PAM type: YTN; PAM sequence: TTC
  source 1..20: mol_type = other DNA
accagtagagtgtctatgtc

SEQ ID NO: 29935 - DNA, 20 bp, synthetic construct
  misc_feature 1..20: note = Description of Artificial Sequence: Synthetic oligonucleotide
  misc_feature 1..20: note = Target: FXN; (+) strand; PAM type: YTN; PAM sequence: CTA
  source 1..20: mol_type = other DNA
tgtcagagatattagataaa

SEQ ID NO: 29936 - DNA, 20 bp, synthetic construct
  misc_feature 1..20: note = Description of Artificial Sequence: Synthetic oligonucleotide
  misc_feature 1..20: note = Target: FXN; (+) strand; PAM type: YTN; PAM sequence: TTA
  source 1..20: mol_type = other DNA
gataaacaggaaaactaaca

SEQ ID NO: 29937 - DNA, 20 bp, synthetic construct
  misc_feature 1..20: note = Description of Artificial Sequence: Synthetic oligonucleotide
  misc_feature 1..20: note = Target: FXN; (+) strand; PAM type: YTN; PAM sequence: CTA
  source 1..20: mol_type = other DNA
acaattacattgcaggctgt

SEQ ID NO: 29938 - DNA, 20 bp, synthetic construct
  misc_feature 1..20: note = Description of Artificial Sequence: Synthetic oligonucleotide
  misc_feature 1..20: note = Target: FXN; (+) strand; PAM type: YTN; PAM sequence: TTA
  source 1..20: mol_type = other DNA
cattgcaggctgtggaaaca

SEQ ID NO: 29939 - DNA, 20 bp, synthetic construct
  misc_feature 1..20: note = Description of Artificial Sequence: Synthetic oligonucleotide
  misc_feature 1..20: note = Target: FXN; (+) strand; PAM type: YTN; PAM sequence: TTG
  source 1..20: mol_type = other DNA
caggctgtggaaacagagag

SEQ ID NO: 29940 - DNA, 20 bp, synthetic construct
  misc_feature 1..20: note = Description of Artificial Sequence: Synthetic oligonucleotide
  misc_feature 1..20: note = Target: FXN; (+) strand; PAM type: YTN; PAM sequence: CTG
  source 1..20: mol_type = other DNA
tggaaacagagagaggtacc

SEQ ID NO: 29941 - DNA, 20 bp, synthetic construct
  misc_feature 1..20: note = Description of Artificial Sequence: Synthetic oligonucleotide
  misc_feature 1..20: note = Target: FXN; (+) strand; PAM type: YTN; PAM sequence: CTA
  source 1..20: mol_type = other DNA
aggcacacctgtgggaatat

SEQ ID NO: 29942 - DNA, 20 bp, synthetic construct
  misc_feature 1..20: note = Description of Artificial Sequence: Synthetic oligonucleotide
  misc_feature 1..20: note = Target: FXN; (+) strand; PAM type: YTN; PAM sequence: CTG
  source 1..20: mol_type = other DNA
tgggaatatgaaagtttggt

SEQ ID NO: 29943 - DNA, 20 bp, synthetic construct
  misc_feature 1..20: note = Description of Artificial Sequence: Synthetic oligonucleotide
  misc_feature 1..20: note = Target: FXN; (+) strand; PAM type: YTN; PAM sequence: TTT
  source 1..20: mol_type = other DNA
ggtttcataaaaggattctg

SEQ ID NO: 29944 - DNA, 20 bp, synthetic construct
  misc_feature 1..20: note = Description of Artificial Sequence: Synthetic oligonucleotide
  misc_feature 1..20: note = Target: FXN; (+) strand; PAM type: YTN; PAM sequence: TTG
  source 1..20: mol_type = other DNA
gtttcataaaaggattctgg

SEQ ID NO: 29945 - DNA, 20 bp, synthetic construct
  misc_feature 1..20: note = Description of Artificial Sequence: Synthetic oligonucleotide
  misc_feature 1..20: note = Target: FXN; (+) strand; PAM type: YTN; PAM sequence: TTT
  source 1..20: mol_type = other DNA
cataaaaggattctggagga

SEQ ID NO: 29946 - DNA, 20 bp, synthetic construct
  misc_feature 1..20: note = Description of Artificial Sequence: Synthetic oligonucleotide
  misc_feature 1..20: note = Target: FXN; (+) strand; PAM type: YTN; PAM sequence: TTC
  source 1..20: mol_type = other DNA
ataaaaggattctggaggaa

SEQ ID NO: 29947 - DNA, 20 bp, synthetic construct
  misc_feature 1..20: note = Description of Artificial Sequence: Synthetic oligonucleotide
  misc_feature 1..20: note = Target: FXN; (+) strand; PAM type: YTN; PAM sequence: TTC
  source 1..20: mol_type = other DNA
tggaggaagtcacctctgac

SEQ ID NO: 29948 - DNA, 20 bp, synthetic construct
  misc_feature 1..20: note = Description of Artificial Sequence: Synthetic oligonucleotide
  misc_feature 1..20: note = Target: FXN; (+) strand; PAM type: YTN; PAM sequence: CTG
  source 1..20: mol_type = other DNA
gaggaagtcacctctgacat

SEQ ID NO: 29949 - DNA, 20 bp, synthetic construct
  misc_feature 1..20: note = Description of Artificial Sequence: Synthetic oligonucleotide
  misc_feature 1..20: note = Target: FXN; (+) strand; PAM type: YTN; PAM sequence: CTC
  source 1..20: mol_type = other DNA
tgacatttgagttgagtcct

SEQ ID NO: 29950 - DNA, 20 bp, synthetic construct
  misc_feature 1..20: note = Description of Artificial Sequence: Synthetic oligonucleotide
  misc_feature 1..20: note = Target: FXN; (+) strand; PAM type: YTN; PAM sequence: CTG
  source 1..20: mol_type = other DNA
acatttgagttgagtcctac

SEQ ID NO: 29951 - DNA, 20 bp, synthetic construct
  misc_feature 1..20: note = Description of Artificial Sequence: Synthetic oligonucleotide
  misc_feature 1..20: note = Target: FXN; (+) strand; PAM type: YTN; PAM sequence: TTT
  source 1..20: mol_type = other DNA
gagttgagtcctacaggata

SEQ ID NO: 29952 - DNA, 20 bp, synthetic construct
  misc_feature 1..20: note = Description of Artificial Sequence: Synthetic oligonucleotide
  misc_feature 1..20: note = Target: FXN; (+) strand; PAM type: YTN; PAM sequence: TTG
  source 1..20: mol_type = other DNA
agttgagtcctacaggatat

SEQ ID NO: 29953 - DNA, 20 bp, synthetic construct
  misc_feature 1..20: note = Description of Artificial Sequence: Synthetic oligonucleotide
  misc_feature 1..20: note = Target: FXN; (+) strand; PAM type: YTN; PAM sequence: TTG
  source 1..20: mol_type = other DNA
agtcctacaggatatgaaga

SEQ ID NO: 29954 - DNA, 20 bp, synthetic construct
  misc_feature 1..20: note = Description of Artificial Sequence: Synthetic oligonucleotide
  misc_feature 1..20: note = Target: FXN; (+) strand; PAM type: YTN; PAM sequence: CTA
  source 1..20: mol_type = other DNA
caggatatgaagaaagtagc

SEQ ID NO: 29955 - DNA, 20 bp, synthetic construct
  misc_feature 1..20: note = Description of Artificial Sequence: Synthetic oligonucleotide
  misc_feature 1..20: note = Target: FXN; (+) strand; PAM type: YTN; PAM sequence: TTC
  source 1..20: mol_type = other DNA
cggttactatggctgtgtaa

SEQ ID NO: 29956 - DNA, 20 bp, synthetic construct
  misc_feature 1..20: note = Description of Artificial Sequence: Synthetic oligonucleotide
  misc_feature 1..20: note = Target: FXN; (+) strand; PAM type: YTN; PAM sequence: TTA
  source 1..20: mol_type = other DNA
ctatggctgtgtaataaatt

SEQ ID NO: 29957 - DNA, 20 bp, synthetic construct
  misc_feature 1..20: note = Description of Artificial Sequence: Synthetic oligonucleotide
  misc_feature 1..20: note = Target: FXN; (+) strand; PAM type: YTN; PAM sequence: CTA
  source 1..20: mol_type = other DNA
tggctgtgtaataaattacc

SEQ ID NO: 29958 - DNA, 20 bp, synthetic construct
  misc_feature 1..20: note = Description of Artificial Sequence: Synthetic oligonucleotide
  misc_feature 1..20: note = Target: FXN; (+) strand; PAM type: YTN; PAM sequence: CTG
  source 1..20: mol_type = other DNA
tgtaataaattacctaaaac

SEQ ID NO: 29959 - DNA, 20 bp, synthetic construct
  misc_feature 1..20: note = Description of Artificial Sequence: Synthetic oligonucleotide
  misc_feature 1..20: note = Target: FXN; (+) strand; PAM type: YTN; PAM sequence: TTA
  source 1..20: mol_type = other DNA
cctaaaacatactggattaa

SEQ ID NO: 29960 - DNA, 20 bp, synthetic construct
  misc_feature 1..20: note = Description of Artificial Sequence: Synthetic oligonucleotide
  misc_feature 1..20: note = Target: FXN; (+) strand; PAM type: YTN; PAM sequence: CTA
  source 1..20: mol_type = other DNA
aaacatactggattaaagct

SEQ ID NO: 29961 - DNA, 20 bp, synthetic construct
  misc_feature 1..20: note = Description of Artificial Sequence: Synthetic oligonucleotide
  misc_feature 1..20: note = Target: FXN; (+) strand; PAM type: YTN; PAM sequence: CTG
  source 1..20: mol_type = other DNA
gattaaagctatgaaaacat

SEQ ID NO: 29962 - DNA, 20 bp, synthetic construct
  misc_feature 1..20: note = Description of Artificial Sequence: Synthetic oligonucleotide
  misc_feature 1..20: note = Target: FXN; (+) strand; PAM type: YTN; PAM sequence: TTA
  source 1..20: mol_type = other DNA
aagctatgaaaacatctttt

SEQ ID NO: 29963 - DNA, 20 bp, synthetic construct
  misc_feature 1..20: note = Description of Artificial Sequence: Synthetic oligonucleotide
  misc_feature 1..20: note = Target: FXN; (+) strand; PAM type: YTN; PAM sequence: CTA
  source 1..20: mol_type = other DNA
tgaaaacatcttttctgccc

SEQ ID NO: 29964 - DNA, 20 bp, synthetic construct
  misc_feature 1..20: note = Description of Artificial Sequence: Synthetic oligonucleotide
  misc_feature 1..20: note = Target: FXN; (+) strand; PAM type: YTN; PAM sequence: CTT
  source 1..20: mol_type = other DNA
ttctgcccagagattctgtg

SEQ ID NO: 29965 - DNA, 20 bp, synthetic construct
  misc_feature 1..20: note = Description of Artificial Sequence: Synthetic oligonucleotide
  misc_feature 1..20: note = Target: FXN; (+) strand; PAM type: YTN; PAM sequence: TTT
  source 1..20: mol_type = other DNA
tctgcccagagattctgtgg

SEQ ID NO: 29966 - DNA, 20 bp, synthetic construct
  misc_feature 1..20: note = Description of Artificial Sequence: Synthetic oligonucleotide
  misc_feature 1..20: note = Target: FXN; (+) strand; PAM type: YTN; PAM sequence: TTT
  source 1..20: mol_type = other DNA
ctgcccagagattctgtggg

SEQ ID NO: 29967 - DNA, 20 bp, synthetic construct
  misc_feature 1..20: note = Description of Artificial Sequence: Synthetic oligonucleotide
  misc_feature 1..20: note = Target: FXN; (+) strand; PAM type: YTN; PAM sequence: TTC
  source 1..20: mol_type = other DNA
tgcccagagattctgtgggc

SEQ ID NO: 29968 - DNA, 20 bp, synthetic construct
  misc_feature 1..20: note = Description of Artificial Sequence: Synthetic oligonucleotide
  misc_feature 1..20: note = Target: FXN; (+) strand; PAM type: YTN; PAM sequence: CTG
  source 1..20: mol_type = other DNA
cccagagattctgtgggcct

SEQ ID NO: 29969 - DNA, 20 bp, synthetic construct
  misc_feature 1..20: note = Description of Artificial Sequence: Synthetic oligonucleotide
  misc_feature 1..20: note = Target: FXN; (+) strand; PAM type: YTN; PAM sequence: TTC
  source 1..20: mol_type = other DNA
tgtgggcctgaaattcacat

SEQ ID NO: 29970 - DNA, 20 bp, synthetic construct
  misc_feature 1..20: note = Description of Artificial Sequence: Synthetic oligonucleotide
  misc_feature 1..20: note = Target: FXN; (+) strand; PAM type: YTN; PAM sequence: CTG
  source 1..20: mol_type = other DNA
tgggcctgaaattcacatgg

SEQ ID NO: 29971 - DNA, 20 bp, synthetic construct
  misc_feature 1..20: note = Description of Artificial Sequence: Synthetic oligonucleotide
  misc_feature 1..20: note = Target: FXN; (+) strand; PAM type: YTN; PAM sequence: CTG
  source 1..20: mol_type = other DNA
aaattcacatggaacacata

SEQ ID NO: 29972 - DNA, 20 bp, synthetic construct
  misc_feature 1..20: note = Description of Artificial Sequence: Synthetic oligonucleotide
  misc_feature 1..20: note = Target: FXN; (+) strand; PAM type: YTN; PAM sequence: TTC
  source 1..20: mol_type = other DNA
acatggaacacataaggcat

SEQ ID NO: 29973 - DNA, 20 bp, synthetic construct
  misc_feature 1..20: note = Description of Artificial Sequence: Synthetic oligonucleotide
  misc_feature 1..20: note = Target: FXN; (+) strand; PAM type: YTN; PAM sequence: CTT
  source 1..20: mol_type = other DNA
gtttctgctccatgatgtct

SEQ ID NO: 29974 - DNA, 20 bp, synthetic construct
  misc_feature 1..20: note = Description of Artificial Sequence: Synthetic oligonucleotide
  misc_feature 1..20: note = Target: FXN; (+) strand; PAM type: YTN; PAM sequence: TTG
  source 1..20: mol_type = other DNA
tttctgctccatgatgtcta

SEQ ID NO: 29975 - DNA, 20 bp, synthetic construct
  misc_feature 1..20: note = Description of Artificial Sequence: Synthetic oligonucleotide
  misc_feature 1..20: note = Target: FXN; (+) strand; PAM type: YTN; PAM sequence: TTT
  source 1..20: mol_type = other DNA
ctgctccatgatgtctaagg

SEQ ID NO: 29976 - DNA, 20 bp, synthetic construct
  misc_feature 1..20: note = Description of Artificial Sequence: Synthetic oligonucleotide
  misc_feature 1..20: note = Target: FXN; (+) strand; PAM type: YTN; PAM sequence: TTC
  source 1..20: mol_type = other DNA
tgctccatgatgtctaagga

SEQ ID NO: 29977 - DNA, 20 bp, synthetic construct
  misc_feature 1..20: note = Description of Artificial Sequence: Synthetic oligonucleotide
  misc_feature 1..20: note = Target: FXN; (+) strand; PAM type: YTN; PAM sequence: CTG
  source 1..20: mol_type = other DNA
ctccatgatgtctaaggatt

SEQ ID NO: 29978 - DNA, 20 bp, synthetic construct
  misc_feature 1..20: note = Description of Artificial Sequence: Synthetic oligonucleotide
  misc_feature 1..20: note = Target: FXN; (+) strand; PAM type: YTN; PAM sequence: CTC
  source 1..20: mol_type = other DNA
catgatgtctaaggattcag

SEQ ID NO: 29979 - DNA, 20 bp, synthetic construct
  misc_feature 1..20: note = Description of Artificial Sequence: Synthetic oligonucleotide
  misc_feature 1..20: note = Target: FXN; (+) strand; PAM type: YTN; PAM sequence: CTA
  source 1..20: mol_type = other DNA
aggattcagctggaagactg

SEQ ID NO: 29980 - DNA, 20 bp, synthetic construct
  misc_feature 1..20: note = Description of Artificial Sequence: Synthetic oligonucleotide
  misc_feature 1..20: note = Target: FXN; (+) strand; PAM type: YTN; PAM sequence: TTC
  source 1..20: mol_type = other DNA
agctggaagactgggaggct

SEQ ID NO: 29981 - DNA, 20 bp, synthetic construct
  misc_feature 1..20: note = Description of Artificial Sequence: Synthetic oligonucleotide
  misc_feature 1..20: note = Target: FXN; (+) strand; PAM type: YTN; PAM sequence: CTG
  source 1..20: mol_type = other DNA
gaagactgggaggctggggg

SEQ ID NO: 29982 - DNA, 20 bp, synthetic construct
  misc_feature 1..20: note = Description of Artificial Sequence: Synthetic oligonucleotide
  misc_feature 1..20: note = Target: FXN; (+) strand; PAM type: YTN; PAM sequence: CTG
  source 1..20: mol_type = other DNA
ggaggctgggggctggaatt

SEQ ID NO: 29983 - DNA, 20 bp, synthetic construct
  misc_feature 1..20: note = Description of Artificial Sequence: Synthetic oligonucleotide
  misc_feature 1..20: note = Target: FXN; (+) strand; PAM type: YTN; PAM sequence: CTG
  source 1..20: mol_type = other DNA
ggggctggaatttatctgaa

SEQ ID NO: 29984 - DNA, 20 bp, synthetic construct
  misc_feature 1..20: note = Description of Artificial Sequence: Synthetic oligonucleotide
  misc_feature 1..20: note = Target: FXN; (+) strand; PAM type: YTN; PAM sequence: CTG
  source 1..20: mol_type = other DNA
gaatttatctgaagaatgac

SEQ ID NO: 29985 - DNA, 20 bp, synthetic construct
  misc_feature 1..20: note = Description of Artificial Sequence: Synthetic oligonucleotide
  misc_feature 1..20: note = Target: FXN; (+) strand; PAM type: YTN; PAM sequence: TTT
  source 1..20: mol_type = other DNA
atctgaagaatgactcattt

SEQ ID NO: 29986 - DNA, 20 bp, synthetic construct
  misc_feature 1..20: note = Description of Artificial Sequence: Synthetic oligonucleotide
  misc_feature 1..20: note = Target: FXN; (+) strand; PAM type: YTN; PAM sequence: TTA
  source 1..20: mol_type = other DNA
tctgaagaatgactcattta

SEQ ID NO: 29987 - DNA, 20 bp, synthetic construct
  misc_feature 1..20: note = Description of Artificial Sequence: Synthetic oligonucleotide
  misc_feature 1..20: note = Target: FXN; (+) strand; PAM type: YTN; PAM sequence: CTG
  source 1..20: mol_type = other DNA
aagaatgactcatttacatg

SEQ ID NO: 29988 - DNA, 20 bp, synthetic construct
  misc_feature 1..20: note = Description of Artificial Sequence: Synthetic oligonucleotide
  misc_feature 1..20: note = Target: FXN; (+) strand; PAM type: YTN; PAM sequence: CTC
  source 1..20: mol_type = other DNA
atttacatgtctactggttg

SEQ ID NO: 29989 - DNA, 20 bp, synthetic construct
  misc_feature 1..20: note = Description of Artificial Sequence: Synthetic oligonucleotide
  misc_feature 1..20: note = Target: FXN; (+) strand; PAM type: YTN; PAM sequence: TTT
  source 1..20: mol_type = other DNA
acatgtctactggttgaccc

SEQ ID NO: 29990 - DNA, 20 bp, synthetic construct
  misc_feature 1..20: note = Description of Artificial Sequence: Synthetic oligonucleotide
  misc_feature 1..20: note = Target: FXN; (+) strand; PAM type: YTN; PAM sequence: TTA
  source 1..20: mol_type = other DNA
catgtctactggttgaccct

SEQ ID NO: 29991 - DNA, 20 bp, synthetic construct
  misc_feature 1..20: note = Description of Artificial Sequence: Synthetic oligonucleotide
  misc_feature 1..20: note = Target: FXN; (+) strand; PAM type: YTN; PAM sequence: CTA
  source 1..20: mol_type = other DNA
ctggttgaccctggctgttg

SEQ ID NO: 29992 - DNA, 20 bp, synthetic construct
  misc_feature 1..20: note = Description of Artificial Sequence: Synthetic oligonucleotide
  misc_feature 1..20: note = Target: FXN; (+) strand; PAM type: YTN; PAM sequence: CTG
  source 1..20: mol_type = other DNA
gttgaccctggctgttggct

SEQ ID NO: 29993 - DNA, 20 bp, synthetic construct
  misc_feature 1..20: note = Description of Artificial Sequence: Synthetic oligonucleotide
  misc_feature 1..20: note = Target: FXN; (+) strand; PAM type: YTN; PAM sequence: TTG
  source 1..20: mol_type = other DNA
accctggctgttggctgagg

SEQ ID NO: 29994 - DNA, 20 bp, synthetic construct
  misc_feature 1..20: note = Description of Artificial Sequence: Synthetic oligonucleotide
  misc_feature 1..20: note = Target: FXN; (+) strand; PAM type: YTN; PAM sequence: CTG
  source 1..20: mol_type = other DNA
gctgttggctgagggggcct

SEQ ID NO: 29995 - DNA, 20 bp, synthetic construct
  misc_feature 1..20: note = Description of Artificial Sequence: Synthetic oligonucleotide
  misc_feature 1..20: note = Target: FXN; (+) strand; PAM type: YTN; PAM sequence: CTG
  source 1..20: mol_type = other DNA
ttggctgagggggcctcagc

SEQ ID NO: 29996 - DNA, 20 bp, synthetic construct
  misc_feature 1..20: note = Description of Artificial Sequence: Synthetic oligonucleotide
  misc_feature 1..20: note = Target: FXN; (+) strand; PAM type: YTN; PAM sequence: TTG
  source 1..20: mol_type = other DNA
gctgagggggcctcagctct

SEQ ID NO: 29997 - DNA, 20 bp, synthetic construct
  misc_feature 1..20: note = Description of Artificial Sequence: Synthetic oligonucleotide
  misc_feature 1..20: note = Target: FXN; (+) strand; PAM type: YTN; PAM sequence: CTG
  source 1..20: mol_type = other DNA
agggggcctcagctctctct

SEQ ID NO: 29998 - DNA, 20 bp, synthetic construct
  misc_feature 1..20: note = Description of Artificial Sequence: Synthetic oligonucleotide
  misc_feature 1..20: note = Target: FXN; (+) strand; PAM type: YTN; PAM sequence: CTC
  source 1..20: mol_type = other DNA
agctctctctacattgtttc

SEQ ID NO: 29999 - DNA, 20 bp, synthetic construct
  misc_feature 1..20: note = Description of Artificial Sequence: Synthetic oligonucleotide
  misc_feature 1..20: note = Target: FXN; (+) strand; PAM type: YTN; PAM sequence: CTC
  source 1..20: mol_type = other DNA
tctctacattgtttctctac

SEQ ID NO: 30000 - DNA, 20 bp, synthetic construct
  misc_feature 1..20: note = Description of Artificial Sequence: Synthetic oligonucleotide
  misc_feature 1..20: note = Target: FXN; (+) strand; PAM type: YTN; PAM sequence: CTC
  source 1..20: mol_type = other DNA
tctacattgtttctctactt

SEQ ID NO: 30001 - DNA, 20 bp, synthetic construct
  misc_feature 1..20: note = Description of Artificial Sequence: Synthetic oligonucleotide
  misc_feature 1..20: note = Target: FXN; (+) strand; PAM type: YTN; PAM sequence: CTC
  source 1..20: mol_type = other DNA
tacattgtttctctactttg

SEQ ID NO: 30002 - DNA, 20 bp, synthetic construct
  misc_feature 1..20: note = Description of Artificial Sequence: Synthetic oligonucleotide
  misc_feature 1..20: note = Target: FXN; (+) strand; PAM type: YTN; PAM sequence: CTA
  source 1..20: mol_type = other DNA
cattgtttctctactttggc

SEQ ID NO: 30003 - DNA, 20 bp, synthetic construct
  misc_feature 1..20: note = Description of Artificial Sequence: Synthetic oligonucleotide
  misc_feature 1..20: note = Target: FXN; (+) strand; PAM type: YTN; PAM sequence: TTG
  source 1..20: mol_type = other DNA
tttctctactttggctagtt

SEQ ID NO: 30004 - DNA, 20 bp, synthetic construct
  misc_feature 1..20: note = Description of Artificial Sequence: Synthetic oligonucleotide
  misc_feature 1..20: note = Target: FXN; (+) strand; PAM type: YTN; PAM sequence: TTT
  source 1..20: mol_type = other DNA
ctctactttggctagtttgg

SEQ ID NO: 30005 - DNA, 20 bp, synthetic construct
  misc_feature 1..20: note = Description of Artificial Sequence: Synthetic oligonucleotide
  misc_feature 1..20: note = Target: FXN; (+) strand; PAM type: YTN; PAM sequence: TTC
  source 1..20: mol_type = other DNA
tctactttggctagtttgga

SEQ ID NO: 30006 - DNA, 20 bp, synthetic construct
  misc_feature 1..20: note = Description of Artificial Sequence: Synthetic oligonucleotide
  misc_feature 1..20: note = Target: FXN; (+) strand; PAM type: YTN; PAM sequence: CTC
  source 1..20: mol_type = other DNA
tactttggctagtttggatt

SEQ ID NO: 30007 - DNA, 20 bp, synthetic construct
  misc_feature 1..20: note = Description of Artificial Sequence: Synthetic oligonucleotide
  misc_feature 1..20: note = Target: FXN; (+) strand; PAM type: YTN; PAM sequence: CTA
  source 1..20: mol_type = other DNA
ctttggctagtttggatttc

SEQ ID NO: 30008 - DNA, 20 bp, synthetic construct
  misc_feature 1..20: note = Description of Artificial Sequence: Synthetic oligonucleotide
  misc_feature 1..20: note = Target: FXN; (+) strand; PAM type: YTN; PAM sequence: CTT
  source 1..20: mol_type = other DNA
tggctagtttggatttcctc

SEQ ID NO: 30009 - DNA, 20 bp, synthetic construct
  misc_feature 1..20: note = Description of Artificial Sequence: Synthetic oligonucleotide
  misc_feature 1..20: note = Target: FXN; (+) strand; PAM type: YTN; PAM sequence: TTT
  source 1..20: mol_type = other DNA
ggctagtttggatttcctca

SEQ ID NO: 30010 - DNA, 20 bp, synthetic construct
  misc_feature 1..20: note = Description of Artificial Sequence: Synthetic oligonucleotide
  misc_feature 1..20: note = Target: FXN; (+) strand; PAM type: YTN; PAM sequence: TTG
  source 1..20: mol_type = other DNA
gctagtttggatttcctcaa

SEQ ID NO: 30011 - DNA, 20 bp, synthetic construct
  misc_feature 1..20: note = Description of Artificial Sequence: Synthetic oligonucleotide
  misc_feature 1..20: note = Target: FXN; (+) strand; PAM type: YTN; PAM sequence: CTA
  source 1..20: mol_type = other DNA
gtttggatttcctcaaaaca

SEQ ID NO: 30012 - DNA, 20 bp, synthetic construct
  misc_feature 1..20: note = Description of Artificial Sequence: Synthetic oligonucleotide
  misc_feature 1..20: note = Target: FXN; (+) strand; PAM type: YTN; PAM sequence: TTT
  source 1..20: mol_type = other DNA
ggatttcctcaaaacatgat

SEQ ID NO: 30013 - DNA, 20 bp, synthetic construct
  misc_feature 1..20: note = Description of Artificial Sequence: Synthetic oligonucleotide
  misc_feature 1..20: note = Target: FXN; (+) strand; PAM type: YTN; PAM sequence: TTG
  source 1..20: mol_type = other DNA
gatttcctcaaaacatgatg

SEQ ID NO: 30014 - DNA, 20 bp, synthetic construct
  misc_feature 1..20: note = Description of Artificial Sequence: Synthetic oligonucleotide
  misc_feature 1..20: note = Target: FXN; (+) strand; PAM type: YTN; PAM sequence: TTT
  source 1..20: mol_type = other DNA
cctcaaaacatgatggctgg

SEQ ID NO: 30015 - DNA, 20 bp, synthetic construct
  misc_feature 1..20: note = Description of Artificial Sequence: Synthetic oligonucleotide
  misc_feature 1..20: note = Target: FXN; (+) strand; PAM type: YTN; PAM sequence: TTC
  source 1..20: mol_type = other DNA
ctcaaaacatgatggctggt

SEQ ID NO: 30016 - DNA, 20 bp, synthetic construct
  misc_feature 1..20: note = Description of Artificial Sequence: Synthetic oligonucleotide
  misc_feature 1..20: note = Target: FXN; (+) strand; PAM type: YTN; PAM sequence: CTC
  source 1..20: mol_type = other DNA
aaaacatgatggctggtcct

SEQ ID NO: 30017 - DNA, 20 bp, synthetic construct
  misc_feature 1..20: note = Description of Artificial Sequence: Synthetic oligonucleotide
  misc_feature 1..20: note = Target: FXN; (+) strand; PAM type: YTN; PAM sequence: CTG
  source 1..20: mol_type = other DNA
gtcctcagtgtcagcatccc

SEQ ID NO: 30018 - DNA, 20 bp, synthetic construct
  misc_feature 1..20: note = Description of Artificial Sequence: Synthetic oligonucleotide
  misc_feature 1..20: note = Target: FXN; (+) strand; PAM type: YTN; PAM sequence: CTC
  source 1..20: mol_type = other DNA
agtgtcagcatcccaaaaag

SEQ ID NO: 30019 - DNA, 20 bp, synthetic construct
  misc_feature 1..20: note = Description of Artificial Sequence: Synthetic oligonucleotide
  misc_feature 1..20: note = Target: FXN; (+) strand; PAM type: YTN; PAM sequence: CTC
  source 1..20: mol_type = other DNA
acacctgtaacctcagcaat

SEQ ID NO: 30020 - DNA, 20 bp, synthetic construct
  misc_feature 1..20: note = Description of Artificial Sequence: Synthetic oligonucleotide
  misc_feature 1..20: note = Target: FXN; (+) strand; PAM type: YTN; PAM sequence: CTG
  source 1..20: mol_type = other DNA
taacctcagcaatttgggag

SEQ ID NO: 30021 - DNA, 20 bp, synthetic construct
  misc_feature 1..20: note = Description of Artificial Sequence: Synthetic oligonucleotide
  misc_feature 1..20: note = Target: FXN; (+) strand; PAM type: YTN; PAM sequence: CTC
  source 1..20: mol_type = other DNA
agcaatttgggaggctgagg

SEQ ID NO: 30022 - DNA, 20 bp, synthetic construct
  misc_feature 1..20: note = Description of Artificial Sequence: Synthetic oligonucleotide
  misc_feature 1..20: note = Target: FXN; (+) strand; PAM type: YTN; PAM sequence: TTT
  source 1..20: mol_type = other DNA
gggaggctgaggtgggaggt

SEQ ID NO: 30023 - DNA, 20 bp, synthetic construct
  misc_feature 1..20: note = Description of Artificial Sequence: Synthetic oligonucleotide
  misc_feature 1..20: note = Target: FXN; (+) strand; PAM type: YTN; PAM sequence: TTG
  source 1..20: mol_type = other DNA
ggaggctgaggtgggaggtt

SEQ ID NO: 30024 - DNA, 20 bp, synthetic construct
  misc_feature 1..20: note = Description of Artificial Sequence: Synthetic oligonucleotide
  misc_feature 1..20: note = Target: FXN; (+) strand; PAM type: YTN; PAM sequence: CTG
  source 1..20: mol_type = other DNA
aggtgggaggttgcttgagt

SEQ ID NO: 30025 - DNA, 20 bp, synthetic construct
  misc_feature 1..20: note = Description of Artificial Sequence: Synthetic oligonucleotide
  misc_feature 1..20: note = Target: FXN; (+) strand; PAM type: YTN; PAM sequence: TTG
  source 1..20: mol_type = other DNA
cttgagttcaggagttcaag

SEQ ID NO: 30026 - DNA, 20 bp, synthetic construct
  misc_feature 1..20: note = Description of Artificial Sequence: Synthetic oligonucleotide
  misc_feature 1..20: note = Target: FXN; (+) strand; PAM type: YTN; PAM sequence: CTT
  source 1..20: mol_type = other DNA
gagttcaggagttcaagacc

SEQ ID NO: 30027 - DNA, 20 bp, synthetic construct
  misc_feature 1..20: note = Description of Artificial Sequence: Synthetic oligonucleotide
  misc_feature 1..20: note = Target: FXN; (+) strand; PAM type: YTN; PAM sequence: TTG
  source 1..20: mol_type = other DNA
agttcaggagttcaagacca

SEQ ID NO: 30028 - DNA, 20 bp, synthetic construct
  misc_feature 1..20: note = Description of Artificial Sequence: Synthetic oligonucleotide
  misc_feature 1..20: note = Target: FXN; (+) strand; PAM type: YTN; PAM sequence: TTC
  source 1..20: mol_type = other DNA
aggagttcaagaccagcctg

SEQ ID NO: 30029 - DNA, 20 bp, synthetic construct
  misc_feature 1..20: note = Description of Artificial Sequence: Synthetic oligonucleotide
  misc_feature 1..20: note = Target: FXN; (+) strand; PAM type: YTN; PAM sequence: TTC
  source 1..20: mol_type = other DNA
aagaccagcctgggcaacat

SEQ ID NO: 30030 - DNA, 20 bp, synthetic construct
  misc_feature 1..20: note = Description of Artificial Sequence: Synthetic oligonucleotide
  misc_feature 1..20: note = Target: FXN; (+) strand; PAM type: YTN; PAM sequence: CTG
  source 1..20: mol_type = other DNA
ggcaacatagtgagactctg

SEQ ID NO: 30031 - DNA, 20 bp, synthetic construct
  misc_feature 1..20: note = Description of Artificial Sequence: Synthetic oligonucleotide
  misc_feature 1..20: note = Target: FXN; (+) strand; PAM type: YTN; PAM sequence: CTC
  source 1..20: mol_type = other DNA
tgtctctaccaaaaattttt

SEQ ID NO: 30032 - DNA, 20 bp, synthetic construct
  misc_feature 1..20: note = Description of Artificial Sequence: Synthetic oligonucleotide
  misc_feature 1..20: note = Target: FXN; (+) strand; PAM type: YTN; PAM sequence: CTG
  source 1..20: mol_type = other DNA
tctctaccaaaaatttttaa

SEQ ID NO: 30033 - DNA, 20 bp, synthetic construct
  misc_feature 1..20: note = Description of Artificial Sequence: Synthetic oligonucleotide
  misc_feature 1..20: note = Target: FXN; (+) strand; PAM type: YTN; PAM sequence: CTC
  source 1..20: mol_type = other DNA
taccaaaaatttttaaaatt

SEQ ID NO: 30034 - DNA, 20 bp, synthetic construct
  misc_feature 1..20: note = Description of Artificial Sequence: Synthetic oligonucleotide
  misc_feature 1..20: note = Target: FXN; (+) strand; PAM type: YTN; PAM sequence: CTA
  source 1..20: mol_type = other DNA
ccaaaaatttttaaaatttt

SEQ ID NO: 30035 - DNA, 20 bp, synthetic construct
  misc_feature 1..20: note = Description of Artificial Sequence: Synthetic oligonucleotide
  misc_feature 1..20: note = Target: FXN; (+) strand; PAM type: YTN; PAM sequence: TTT
  source 1..20: mol_type = other DNA
ttaaaattttaaaaatcagc

SEQ ID NO: 30036 - DNA, 20 bp, synthetic construct
  misc_feature 1..20: note = Description of Artificial Sequence: Synthetic oligonucleotide
  misc_feature 1..20: note = Target: FXN; (+) strand; PAM type: YTN; PAM sequence: TTT
  source 1..20: mol_type = other DNA
taaaattttaaaaatcagcc

SEQ ID NO: 30037 - DNA, 20 bp, synthetic construct
  misc_feature 1..20: note = Description of Artificial Sequence: Synthetic oligonucleotide
  misc_feature 1..20: note = Target: FXN; (+) strand; PAM type: YTN; PAM sequence: TTT
  source 1..20: mol_type = other DNA
aaaattttaaaaatcagcca

SEQ ID NO: 30038 - DNA, 20 bp, synthetic construct
  misc_feature 1..20: note = Description of Artificial Sequence: Synthetic oligonucleotide
  misc_feature 1..20: note = Target: FXN; (+) strand; PAM type: YTN; PAM sequence: TTA
  source 1..20: mol_type = other DNA
aaattttaaaaatcagccag

SEQ ID NO: 30039 - DNA, 20 bp, synthetic construct
  misc_feature 1..20: note = Description of Artificial Sequence: Synthetic oligonucleotide
  misc_feature 1..20: note = Target: FXN; (+) strand; PAM type: YTN; PAM sequence: TTT
  source 1..20: mol_type = other DNA
taaaaatcagccaggtgtgg

SEQ ID NO: 30040 - DNA, 20 bp, synthetic construct
  misc_feature 1..20: note = Description of Artificial Sequence: Synthetic oligonucleotide
  misc_feature 1..20: note = Target: FXN; (+) strand; PAM type: YTN; PAM sequence: TTT
  source 1..20: mol_type = other DNA
aaaaatcagccaggtgtggt

SEQ ID NO: 30041 - DNA, 20 bp, synthetic construct
  misc_feature 1..20: note = Description of Artificial Sequence: Synthetic oligonucleotide
  misc_feature 1..20: note = Target: FXN; (+) strand; PAM type: YTN; PAM sequence: TTA
  source 1..20: mol_type = other DNA
aaaatcagccaggtgtggtt

SEQ ID NO: 30042 - DNA, 20 bp, synthetic construct
  misc_feature 1..20: note = Description of Artificial Sequence: Synthetic oligonucleotide
  misc_feature 1..20: note = Target: FXN; (+) strand; PAM type: YTN; PAM sequence: TTA
  source 1..20: mol_type = other DNA
tgcacacctatagtcccagt

SEQ ID NO: 30043 - DNA, 20 bp, synthetic construct
  misc_feature 1..20: note = Description of Artificial Sequence: Synthetic oligonucleotide
  misc_feature 1..20: note = Target: FXN; (+) strand; PAM type: YTN; PAM sequence: CTA
  source 1..20: mol_type = other DNA
tagtcccagttacttaggag

SEQ ID NO: 30044 - DNA, 20 bp, synthetic construct
  misc_feature 1..20: note = Description of Artificial Sequence: Synthetic oligonucleotide
  misc_feature 1..20: note = Target: FXN; (+) strand; PAM type: YTN; PAM sequence: TTA
  source 1..20: mol_type = other DNA
cttaggaggctgaggcagga

SEQ ID NO: 30045 - DNA, 20 bp, synthetic construct
  misc_feature 1..20: note = Description of Artificial Sequence: Synthetic oligonucleotide
  misc_feature 1..20: note = Target: FXN; (+) strand; PAM type: YTN; PAM sequence: CTT
  source 1..20: mol_type = other DNA
aggaggctgaggcaggagga

SEQ ID NO: 30046 - DNA, 20 bp, synthetic construct
  misc_feature 1..20: note = Description of Artificial Sequence: Synthetic oligonucleotide
  misc_feature 1..20: note = Target: FXN; (+) strand; PAM type: YTN; PAM sequence: TTA
  source 1..20: mol_type = other DNA
ggaggctgaggcaggaggat

SEQ ID NO: 30047 - DNA, 20 bp, synthetic construct
  misc_feature 1..20: note = Description of Artificial Sequence: Synthetic oligonucleotide
  misc_feature 1..20: note = Target: FXN; (+) strand; PAM type: YTN; PAM sequence: CTG
  source 1..20: mol_type = other DNA
aggcaggaggatcacttgat

SEQ ID NO: 30048 - DNA, 20 bp, synthetic construct
  misc_feature 1..20: note = Description of Artificial Sequence: Synthetic oligonucleotide
  misc_feature 1..20: note = Target: FXN; (+) strand; PAM type: YTN; PAM sequence: CTT
  source 1..20: mol_type = other DNA
gattccaggaggtcaaggct

SEQ ID NO: 30049 - DNA, 20 bp, synthetic construct
  misc_feature 1..20: note = Description of Artificial Sequence: Synthetic oligonucleotide
  misc_feature 1..20: note = Target: FXN; (+) strand; PAM type: YTN; PAM sequence: TTG
  source 1..20: mol_type = other DNA
attccaggaggtcaaggctg

SEQ ID NO: 30050 - DNA, 20 bp, synthetic construct
  misc_feature 1..20: note = Description of Artificial Sequence: Synthetic oligonucleotide
  misc_feature 1..20: note = Target: FXN; (+) strand; PAM type: YTN; PAM sequence: TTC
  source 1..20: mol_type = other DNA
caggaggtcaaggctgctgt

SEQ ID NO: 30051 - DNA, 20 bp, synthetic construct
  misc_feature 1..20: note = Description of Artificial Sequence: Synthetic oligonucleotide
  misc_feature 1..20: note = Target: FXN; (+) strand; PAM type: YTN; PAM sequence: CTG
  source 1..20: mol_type = other DNA
ctgtgagctatgaccacacc

SEQ ID NO: 30052 - DNA, 20 bp, synthetic construct
  misc_feature 1..20: note = Description of Artificial Sequence: Synthetic oligonucleotide
  misc_feature 1..20: note = Target: FXN; (+) strand; PAM type: YTN; PAM sequence: CTG
  source 1..20: mol_type = other DNA
tgagctatgaccacaccact

SEQ ID NO: 30053 - DNA, 20 bp, synthetic construct
  misc_feature 1..20: note = Description of Artificial Sequence: Synthetic oligonucleotide
  misc_feature 1..20: note = Target: FXN; (+) strand; PAM type: YTN; PAM sequence: CTA
  source 1..20: mol_type = other DNA
tgaccacaccactgcatttc

SEQ ID NO: 30054 - DNA, 20 bp, synthetic construct
  misc_feature 1..20: note = Description of Artificial Sequence: Synthetic oligonucleotide
  misc_feature 1..20: note = Target: FXN; (+) strand; PAM type: YTN; PAM sequence: CTG
  source 1..20: mol_type = other DNA
catttcagcctgggtaacag

SEQ ID NO: 30055 - DNA, 20 bp, synthetic construct
  misc_feature 1..20: note = Description of Artificial Sequence: Synthetic oligonucleotide
  misc_feature 1..20: note = Target: FXN; (+) strand; PAM type: YTN; PAM sequence: TTT
  source 1..20: mol_type = other DNA
cagcctgggtaacagaatga

SEQ ID NO: 30056 - DNA, 20 bp, synthetic construct
  misc_feature 1..20: note = Description of Artificial Sequence: Synthetic oligonucleotide
  misc_feature 1..20: note = Target: FXN; (+) strand; PAM type: YTN; PAM sequence: TTC
  source 1..20: mol_type = other DNA
agcctgggtaacagaatgag

SEQ ID NO: 30057 - DNA, 20 bp, synthetic construct
  misc_feature 1..20: note = Description of Artificial Sequence: Synthetic oligonucleotide
  misc_feature 1..20: note = Target: FXN; (+) strand; PAM type: YTN; PAM sequence: CTG
  source 1..20: mol_type = other DNA
ggtaacagaatgagactctg

SEQ ID NO: 30058 - DNA, 20 bp, synthetic construct
  misc_feature 1..20: note = Description of Artificial Sequence: Synthetic oligonucleotide
  misc_feature 1..20: note = Target: FXN; (+) strand; PAM type: YTN; PAM sequence: CTC
  source 1..20: mol_type = other DNA
tgtttcaaacaaacaaaaac

SEQ ID NO: 30059 - DNA, 20 bp, synthetic construct
  misc_feature 1..20: note = Description of Artificial Sequence: Synthetic oligonucleotide
  misc_feature 1..20: note = Target: FXN; (+) strand; PAM type: YTN; PAM sequence: CTG
  source 1..20: mol_type = other DNA
tttcaaacaaacaaaaaccc

SEQ ID NO: 30060 - DNA, 20 bp, synthetic construct
  misc_feature 1..20: note = Description of Artificial Sequence: Synthetic oligonucleotide
  misc_feature 1..20: note = Target: FXN; (+) strand; PAM type: YTN; PAM sequence: TTT
  source 1..20: mol_type = other DNA
caaacaaacaaaaacccaaa

SEQ ID NO: 30061 - DNA, 20 bp, synthetic construct
  misc_feature 1..20: note = Description of Artificial Sequence: Synthetic oligonucleotide
  misc_feature 1..20: note = Target: FXN; (+) strand; PAM type: YTN; PAM sequence: TTC
  source 1..20: mol_type = other DNA
aaacaaacaaaaacccaaaa

SEQ ID NO: 30062 - DNA, 20 bp, synthetic construct
  misc_feature 1..20: note = Description of Artificial Sequence: Synthetic oligonucleotide
  misc_feature 1..20: note = Target: FXN; (+) strand; PAM type: YTN; PAM sequence: TTA
  source 1..20: mol_type = other DNA
gaaggaagatgcatcatttt

SEQ ID NO: 30063 - DNA, 20 bp, synthetic construct
  misc_feature 1..20: note = Description of Artificial Sequence: Synthetic oligonucleotide
  misc_feature 1..20: note = Target: FXN; (+) strand; PAM type: YTN; PAM sequence: TTT
  source 1..20: mol_type = other DNA
ttatgacctggacttggaag

SEQ ID NO: 30064 - DNA, 20 bp, synthetic construct
  misc_feature 1..20: note = Description of Artificial Sequence: Synthetic oligonucleotide
  misc_feature 1..20: note = Target: FXN; (+) strand; PAM type: YTN; PAM sequence: TTT
  source 1..20: mol_type = other DNA
tatgacctggacttggaagt

SEQ ID NO: 30065 - DNA, 20 bp, synthetic construct
  misc_feature 1..20: note = Description of Artificial Sequence: Synthetic oligonucleotide
  misc_feature 1..20: note = Target: FXN; (+) strand; PAM type: YTN; PAM sequence: TTT
  source 1..20: mol_type = other DNA
atgacctggacttggaagtc

SEQ ID NO: 30066 - DNA, 20 bp, synthetic construct
  misc_feature 1..20: note = Description of Artificial Sequence: Synthetic oligonucleotide
  misc_feature 1..20: note = Target: FXN; (+) strand; PAM type: YTN; PAM sequence: TTA
  source 1..20: mol_type = other DNA
tgacctggacttggaagtca

SEQ ID NO: 30067 - DNA, 20 bp, synthetic construct
  misc_feature 1..20: note = Description of Artificial Sequence: Synthetic oligonucleotide
  misc_feature 1..20: note = Target: FXN; (+) strand; PAM type: YTN; PAM sequence: CTG
  source 1..20: mol_type = other DNA
gacttggaagtcaccaagca

SEQ ID NO: 30068 - DNA, 20 bp, synthetic construct
  misc_feature 1..20: note = Description of Artificial Sequence: Synthetic oligonucleotide
  misc_feature 1..20: note = Target: FXN; (+) strand; PAM type: YTN; PAM sequence: CTT
  source 1..20: mol_type = other DNA
ggaagtcaccaagcagcact

SEQ ID NO: 30069 - DNA, 20 bp, synthetic construct
  misc_feature 1..20: note = Description of Artificial Sequence: Synthetic oligonucleotide
  misc_feature 1..20: note = Target: FXN; (+) strand; PAM type: YTN; PAM sequence: TTG
  source 1..20: mol_type = other DNA
gaagtcaccaagcagcactt

SEQ ID NO: 30070 - DNA, 20 bp, synthetic construct
  misc_feature 1..20: note = Description of Artificial Sequence: Synthetic oligonucleotide
  misc_feature 1..20: note = Target: FXN; (+) strand; PAM type: YTN; PAM sequence: CTT
  source 1..20: mol_type = other DNA
ctgcagtaccctgttggttg

SEQ ID NO: 30071 - DNA, 20 bp, synthetic construct
  misc_feature 1..20: note = Description of Artificial Sequence: Synthetic oligonucleotide
  misc_feature 1..20: note = Target: FXN; (+) strand; PAM type: YTN; PAM sequence: TTC
  source 1..20: mol_type = other DNA
tgcagtaccctgttggttgg

SEQ ID NO: 30072 - DNA, 20 bp, synthetic construct
  misc_feature 1..20: note = Description of Artificial Sequence: Synthetic oligonucleotide
  misc_feature 1..20: note = Target: FXN; (+) strand; PAM type: YTN; PAM sequence: CTG
  source 1..20: mol_type = other DNA
cagtaccctgttggttggaa

SEQ ID NO: 30073 - DNA, 20 bp, synthetic construct
  misc_feature 1..20: note = Description of Artificial Sequence: Synthetic oligonucleotide
  misc_feature 1..20: note = Target: FXN; (+) strand; PAM type: YTN; PAM sequence: CTG
  source 1..20: mol_type = other DNA
ttggttggaatagttgtagc

SEQ ID NO: 30074 - DNA, 20 bp, synthetic construct
  misc_feature 1..20: note = Description of Artificial Sequence: Synthetic oligonucleotide
  misc_feature 1..20: note = Target: FXN; (+) strand; PAM type: YTN; PAM sequence: TTG
  source 1..20: mol_type = other DNA
gttggaatagttgtagccca

SEQ ID NO: 30075 - DNA, 20 bp, synthetic construct
  misc_feature 1..20: note = Description of Artificial Sequence: Synthetic oligonucleotide
  misc_feature 1..20: note = Target: FXN; (+) strand; PAM type: YTN; PAM sequence: TTG
  source 1..20: mol_type = other DNA
gaatagttgtagcccaaacc

SEQ ID NO: 30076 - DNA, 20 bp, synthetic construct
  misc_feature 1..20: note = Description of Artificial Sequence: Synthetic oligonucleotide
  misc_feature 1..20: note = Target: FXN; (+) strand; PAM type: YTN; PAM sequence: TTG
  source 1..20: mol_type = other DNA
tagcccaaacccgaattcga

SEQ ID NO: 30077 - DNA, 20 bp, synthetic construct
  misc_feature 1..20: note = Description of Artificial Sequence: Synthetic oligonucleotide
  misc_feature 1..20: note = Target: FXN; (+) strand; PAM type: YTN; PAM sequence: TTC
  source 1..20: mol_type = other DNA
gaagggaggagaatagataa

SEQ ID NO: 30078 - DNA, 20 bp, synthetic construct
  misc_feature 1..20: note = Description of Artificial Sequence: Synthetic oligonucleotide
  misc_feature 1..20: note = Target: FXN; (+) strand; PAM type: YTN; PAM sequence: CTG
  source 1..20: mol_type = other DNA
ggtgacaggaatgtcaaagt

SEQ ID NO: 30079 - DNA, 20 bp, synthetic construct
  misc_feature 1..20: note = Description of Artificial Sequence: Synthetic oligonucleotide
  misc_feature 1..20: note = Target: FXN; (+) strand; PAM type: YTN; PAM sequence: TTG
  source 1..20: mol_type = other DNA
gtgtggccttctttggaaga

SEQ ID NO: 30080 - DNA, 20 bp, synthetic construct
  misc_feature 1..20: note = Description of Artificial Sequence: Synthetic oligonucleotide
  misc_feature 1..20: note = Target: FXN; (+) strand; PAM type: YTN; PAM sequence: CTT
  source 1..20: mol_type = other DNA
ctttggaagatccaatcttc

SEQ ID NO: 30081 - DNA, 20 bp, synthetic construct
  misc_feature 1..20: note = Description of Artificial Sequence: Synthetic oligonucleotide
  misc_feature 1..20: note = Target: FXN; (+) strand; PAM type: YTN; PAM sequence: TTC
  source 1..20: mol_type = other DNA
tttggaagatccaatcttcc

SEQ ID NO: 30082 - DNA, 20 bp, synthetic construct
  misc_feature 1..20: note = Description of Artificial Sequence: Synthetic oligonucleotide
  misc_feature 1..20: note = Target: FXN; (+) strand; PAM type: YTN; PAM sequence: CTT
  source 1..20: mol_type = other DNA
tggaagatccaatcttccat

SEQ ID NO: 30083 - DNA, 20 bp, synthetic construct
  misc_feature 1..20: note = Description of Artificial Sequence: Synthetic oligonucleotide
  misc_feature 1..20: note = Target: FXN; (+) strand; PAM type: YTN; PAM sequence: TTT
  source 1..20: mol_type = other DNA
ggaagatccaatcttccata

SEQ ID NO: 30084 - DNA, 20 bp, synthetic construct
  misc_feature 1..20: note = Description of Artificial Sequence: Synthetic oligonucleotide
  misc_feature 1..20: note = Target: FXN; (+) strand; PAM type: YTN; PAM sequence: TTG
  source 1..20: mol_type = other DNA
gaagatccaatcttccatac

SEQ ID NO: 30085 - DNA, 20 bp, synthetic construct
  misc_feature 1..20: note = Description of Artificial Sequence: Synthetic oligonucleotide
  misc_feature 1..20: note = Target: FXN; (+) strand; PAM type: YTN; PAM sequence: CTT
  source 1..20: mol_type = other DNA
ccataccaggcaaagggatg

SEQ ID NO: 30086 - DNA, 20 bp, synthetic construct
  misc_feature 1..20: note = Description of Artificial Sequence: Synthetic oligonucleotide
  misc_feature 1..20: note = Target: FXN; (+) strand; PAM type: YTN; PAM sequence: TTC
  source 1..20: mol_type = other DNA
cataccaggcaaagggatgg

SEQ ID NO: 30087 - DNA, 20 bp, synthetic construct
  misc_feature 1..20: note = Description of Artificial Sequence: Synthetic oligonucleotide
  misc_feature 1..20: note = Target: FXN; (+) strand; PAM type: YTN; PAM sequence: CTA
  source 1..20: mol_type = other DNA
aggaacaacatgagggatag

SEQ ID NO: 30088 - DNA, 20 bp, synthetic construct
  misc_feature 1..20: note = Description of Artificial Sequence: Synthetic oligonucleotide
  misc_feature 1..20: note = Target: FXN; (+) strand; PAM type: YTN; PAM sequence: CTT
  source 1..20: mol_type = other DNA
gttctaggaactacaaatag

SEQ ID NO: 30089 - DNA, 20 bp, synthetic construct
  misc_feature 1..20: note = Description of Artificial Sequence: Synthetic oligonucleotide
  misc_feature 1..20: note = Target: FXN; (+) strand; PAM type: YTN; PAM sequence: TTG
  source 1..20: mol_type = other DNA
ttctaggaactacaaatagc

SEQ ID NO: 30090 - DNA, 20 bp, synthetic construct
  misc_feature 1..20: note = Description of Artificial Sequence: Synthetic oligonucleotide
  misc_feature 1..20: note = Target: FXN; (+) strand; PAM type: YTN; PAM sequence: TTC
  source 1..20: mol_type = other DNA
taggaactacaaatagcttg

SEQ ID NO: 30091 - DNA, 20 bp, synthetic construct
  misc_feature 1..20: note = Description of Artificial Sequence: Synthetic oligonucleotide
  misc_feature 1..20: note = Target: FXN; (+) strand; PAM type: YTN; PAM sequence: CTA
  source 1..20: mol_type = other DNA
ggaactacaaatagcttgaa

SEQ ID NO: 30092 - DNA, 20 bp, synthetic construct
  misc_feature 1..20: note = Description of Artificial Sequence: Synthetic oligonucleotide
  misc_feature 1..20: note = Target: FXN; (+) strand; PAM type: YTN; PAM sequence: CTA
  source 1..20: mol_type = other DNA
caaatagcttgaagaagcaa

SEQ ID NO: 30093 - DNA, 20 bp, synthetic construct
  misc_feature 1..20: note = Description of Artificial Sequence: Synthetic oligonucleotide
  misc_feature 1..20: note = Target: FXN; (+) strand; PAM type: YTN; PAM sequence: CTT
  source 1..20: mol_type = other DNA
gaagaagcaaagatgtctag

SEQ ID NO: 30094 - DNA, 20 bp, synthetic construct
  misc_feature 1..20: note = Description of Artificial Sequence: Synthetic oligonucleotide
  misc_feature 1..20: note = Target: FXN; (+) strand; PAM type: YTN; PAM sequence: TTG
  source 1..20: mol_type = other DNA
aagaagcaaagatgtctaga

SEQ ID NO: 30095 - DNA, 20 bp, synthetic construct
  misc_feature 1..20: note = Description of Artificial Sequence: Synthetic oligonucleotide
  misc_feature 1..20: note = Target: FXN; (+) strand; PAM type: YTN; PAM sequence: CTA
  source 1..20: mol_type = other DNA
gatgcctcccaatatgcaga

SEQ ID NO: 30096 - DNA, 20 bp, synthetic construct
  misc_feature 1..20: note = Description of Artificial Sequence: Synthetic oligonucleotide
  misc_feature 1..20: note = Target: FXN; (+) strand; PAM type: YTN; PAM sequence: CTC
  source 1..20: mol_type = other DNA
ccaatatgcagagtggggtg

SEQ ID NO: 30097 - DNA, 20 bp, synthetic construct
  misc_feature 1..20: note = Description of Artificial Sequence: Synthetic oligonucleotide
  misc_feature 1..20: note = Target: FXN; (+) strand; PAM type: YTN; PAM sequence: CTG
  source 1..20: mol_type = other DNA
ggagagctaaggtgggcaag

SEQ ID NO: 30098 - DNA, 20 bp, synthetic construct
  misc_feature 1..20: note = Description of Artificial Sequence: Synthetic oligonucleotide
  misc_feature 1..20: note = Target: FXN; (+) strand; PAM type: YTN; PAM sequence: CTA
  source 1..20: mol_type = other DNA
aggtgggcaagagagcttcc

SEQ ID NO: 30099 - DNA, 20 bp, synthetic construct
  misc_feature 1..20: note = Description of Artificial Sequence: Synthetic oligonucleotide
  misc_feature 1..20: note = Target: FXN; (+) strand; PAM type: YTN; PAM sequence: CTT
  source 1..20: mol_type = other DNA
cctctgtcatgctaagaaag

SEQ ID NO: 30100 - DNA, 20 bp, synthetic construct
  misc_feature 1..20: note = Description of Artificial Sequence: Synthetic oligonucleotide
  misc_feature 1..20: note = Target: FXN; (+) strand; PAM type: YTN; PAM sequence: TTC
  source 1..20: mol_type = other DNA
ctctgtcatgctaagaaagt

SEQ ID NO: 30101 - DNA, 20 bp, synthetic construct
  misc_feature 1..20: note = Description of Artificial Sequence: Synthetic oligonucleotide
  misc_feature 1..20: note = Target: FXN; (+) strand; PAM type: YTN; PAM sequence: CTC
  source 1..20: mol_type = other DNA
tgtcatgctaagaaagttgg

SEQ ID NO: 30102 - DNA, 20 bp, synthetic construct
  misc_feature 1..20: note = Description of Artificial Sequence: Synthetic oligonucleotide
  misc_feature 1..20: note = Target: FXN; (+) strand; PAM type: YTN; PAM sequence: CTG
  source 1..20: mol_type = other DNA
tcatgctaagaaagttggaa

SEQ ID NO: 30103 - DNA, 20 bp, synthetic construct
  misc_feature 1..20: note = Description of Artificial Sequence: Synthetic oligonucleotide
  misc_feature 1..20: note = Target: FXN; (+) strand; PAM type: YTN; PAM sequence: CTA
  source 1..20: mol_type = other DNA
agaaagttggaatttatctt

SEQ ID NO: 30104 - DNA, 20 bp, synthetic construct
  misc_feature 1..20: note = Description of Artificial Sequence: Synthetic oligonucleotide
  misc_feature 1..20: note = Target: FXN; (+) strand; PAM type: YTN; PAM sequence: TTG
  source 1..20: mol_type = other DNA
gaatttatcttgatggtggt

SEQ ID NO: 30105 - DNA, 20 bp, synthetic construct
  misc_feature 1..20: note = Description of Artificial Sequence: Synthetic oligonucleotide
  misc_feature 1..20: note = Target: FXN; (+) strand; PAM type: YTN; PAM sequence: TTT
  source 1..20: mol_type = other DNA
atcttgatggtggtgaaagc

SEQ ID NO: 30106 - DNA, 20 bp, synthetic construct
  misc_feature 1..20: note = Description of Artificial Sequence: Synthetic oligonucleotide
  misc_feature 1..20: note = Target: FXN; (+) strand; PAM type: YTN; PAM sequence: TTA
  source 1..20: mol_type = other DNA
tcttgatggtggtgaaagca

SEQ ID NO: 30107 - DNA, 20 bp, synthetic construct
  misc_feature 1..20: note = Description of Artificial Sequence: Synthetic oligonucleotide
  misc_feature 1..20: note = Target: FXN; (+) strand; PAM type: YTN; PAM sequence: CTT
  source 1..20: mol_type = other DNA
gatggtggtgaaagcagagg

SEQ ID NO: 30108 - DNA, 20 bp, synthetic construct
  misc_feature 1..20: note = Description of Artificial Sequence: Synthetic oligonucleotide
  misc_feature 1..20: note = Target: FXN; (+) strand; PAM type: YTN; PAM sequence: TTG
  source 1..20: mol_type = other DNA
atggtggtgaaagcagaggg

SEQ ID NO: 30109 - DNA, 20 bp, synthetic construct
  misc_feature 1..20: note = Description of Artificial Sequence: Synthetic oligonucleotide
  misc_feature 1..20: note = Target: FXN; (+) strand; PAM type: YTN; PAM sequence: CTA
  source 1..20: mol_type = other DNA
tggttagattcacatttgag

SEQ ID NO: 30110 - DNA, 20 bp, synthetic construct
  misc_feature 1..20: note = Description of Artificial Sequence: Synthetic oligonucleotide
  misc_feature 1..20: note = Target: FXN; (+) strand; PAM type: YTN; PAM sequence: TTA
  source 1..20: mol_type = other DNA
gattcacatttgagatttag

SEQ ID NO: 30111 - DNA, 20 bp, synthetic construct
  misc_feature 1..20: note = Description of Artificial Sequence: Synthetic oligonucleotide
  misc_feature 1..20: note = Target: FXN; (+) strand; PAM type: YTN; PAM sequence: TTC
  source 1..20: mol_type = other DNA
acatttgagatttagatttt

SEQ ID NO: 30112 - DNA, 20 bp, synthetic construct
  misc_feature 1..20: note = Description of Artificial Sequence: Synthetic oligonucleotide
  misc_feature 1..20: note = Target: FXN; (+) strand; PAM type: YTN; PAM sequence: TTT
  source 1..20: mol_type = other DNA
gagatttagatttttagatt

SEQ ID NO: 30113 - DNA, 20 bp, synthetic construct
  misc_feature 1..20: note = Description of Artificial Sequence: Synthetic oligonucleotide
  misc_feature 1..20: note = Target: FXN; (+) strand; PAM type: YTN; PAM sequence: TTG
  source 1..20: mol_type = other DNA
agatttagatttttagattt

SEQ ID NO: 30114 - DNA, 20 bp, synthetic construct
  misc_feature 1..20: note = Description of Artificial Sequence: Synthetic oligonucleotide
  misc_feature 1..20: note = Target: FXN; (+) strand; PAM type: YTN; PAM sequence: TTT
  source 1..20: mol_type = other DNA
agatttttagatttaaaatg

SEQ ID NO: 30115 - DNA, 20 bp, synthetic construct
  misc_feature 1..20: note = Description of Artificial Sequence: Synthetic oligonucleotide
  misc_feature 1..20: note = Target: FXN; (+) strand; PAM type: YTN; PAM sequence: TTA
  source 1..20: mol_type = other DNA
gatttttagatttaaaatga

SEQ ID NO: 30116 - DNA, 20 bp, synthetic construct
  misc_feature 1..20: note = Description of Artificial Sequence: Synthetic oligonucleotide
  misc_feature 1..20: note = Target: FXN; (+) strand; PAM type: YTN; PAM sequence: TTT
  source 1..20: mol_type = other DNA
ttagatttaaaatgatcacc

SEQ ID NO: 30117 - DNA, 20 bp, synthetic construct
  misc_feature 1..20: note = Description of Artificial Sequence: Synthetic oligonucleotide
  misc_feature 1..20: note = Target: FXN; (+) strand; PAM type: YTN; PAM sequence: TTT
  source 1..20: mol_type = other DNA
tagatttaaaatgatcaccc

SEQ ID NO: 30118 - DNA, 20 bp, synthetic construct
  misc_feature 1..20: note = Description of Artificial Sequence: Synthetic oligonucleotide
  misc_feature 1..20: note = Target: FXN; (+) strand; PAM type: YTN; PAM sequence: TTT
  source 1..20: mol_type = other DNA
agatttaaaatgatcaccct

SEQ ID NO: 30119 - DNA, 20 bp, synthetic construct
  misc_feature 1..20: note = Description of Artificial Sequence: Synthetic oligonucleotide
  misc_feature 1..20: note = Target: FXN; (+) strand; PAM type: YTN; PAM sequence: TTA
  source 1..20: mol_type = other DNA
gatttaaaatgatcaccctg

SEQ ID NO: 30120 - DNA, 20 bp, synthetic construct
  misc_feature 1..20: note = Description of Artificial Sequence: Synthetic oligonucleotide
  misc_feature 1..20: note = Target: FXN; (+) strand; PAM type: YTN; PAM sequence: TTT
  source 1..20: mol_type = other DNA
aaaatgatcaccctggtgac

SEQ ID NO: 30121 - DNA, 20 bp, synthetic construct
  misc_feature 1..20: note = Description of Artificial Sequence: Synthetic oligonucleotide
  misc_feature 1..20: note = Target: FXN; (+) strand; PAM type: YTN; PAM sequence: TTA
  source 1..20: mol_type = other DNA
aaatgatcaccctggtgaca

SEQ ID NO: 30122 - DNA, 20 bp, synthetic construct
  misc_feature 1..20: note = Description of Artificial Sequence: Synthetic oligonucleotide
  misc_feature 1..20: note = Target: FXN; (+) strand; PAM type: YTN; PAM sequence: CTG
  source 1..20: mol_type = other DNA
gtgacactggcttaactcac

SEQ ID NO: 30123 - DNA, 20 bp, synthetic construct
  misc_feature 1..20: note = Description of Artificial Sequence: Synthetic oligonucleotide
  misc_feature 1..20: note = Target: FXN; (+) strand; PAM type: YTN; PAM sequence: CTG
  source 1..20: mol_type = other DNA
gcttaactcacaattttgcc

SEQ ID NO: 30124 - DNA, 20 bp, synthetic construct
  misc_feature 1..20: note = Description of Artificial Sequence: Synthetic oligonucleotide
  misc_feature 1..20: note = Target: FXN; (+) strand; PAM type: YTN; PAM sequence: CTT
  source 1..20: mol_type = other DNA
aactcacaattttgcccaag

SEQ ID NO: 30125 - DNA, 20 bp, synthetic construct
  misc_feature 1..20: note = Description of Artificial Sequence: Synthetic oligonucleotide
  misc_feature 1..20: note = Target: FXN; (+) strand; PAM type: YTN; PAM sequence: TTA
  source 1..20: mol_type = other DNA
actcacaattttgcccaagg

SEQ ID NO: 30126 - DNA, 20 bp, synthetic construct
  misc_feature 1..20: note = Description of Artificial Sequence: Synthetic oligonucleotide
  misc_feature 1..20: note = Target: FXN; (+) strand; PAM type: YTN; PAM sequence: CTC
  source 1..20: mol_type = other DNA
acaattttgcccaaggccta

SEQ ID NO: 30127 - DNA, 20 bp, synthetic construct
  misc_feature 1..20: note = Description of Artificial Sequence: Synthetic oligonucleotide
  misc_feature 1..20: note = Target: FXN; (+) strand; PAM type: YTN; PAM sequence: TTT
  source 1..20: mol_type = other DNA
tgcccaaggcctatgctacc

SEQ ID NO: 30128 - DNA, 20 bp, synthetic construct
  misc_feature 1..20: note = Description of Artificial Sequence: Synthetic oligonucleotide
  misc_feature 1..20: note = Target: FXN; (+) strand; PAM type: YTN; PAM sequence: TTT
  source 1..20: mol_type = other DNA
gcccaaggcctatgctacca

SEQ ID NO: 30129 - DNA, 20 bp, synthetic construct
  misc_feature 1..20: note = Description of Artificial Sequence: Synthetic oligonucleotide
  misc_feature 1..20: note = Target: FXN; (+) strand; PAM type: YTN; PAM sequence: TTG
  source 1..20: mol_type = other DNA
cccaaggcctatgctaccac

SEQ ID NO: 30130 - DNA, 20 bp, synthetic construct
  misc_feature 1..20: note = Description of Artificial Sequence: Synthetic oligonucleotide
  misc_feature 1..20: note = Target: FXN; (+) strand; PAM type: YTN; PAM sequence: CTA
  source 1..20: mol_type = other DNA
tgctaccacagtgcttctga

SEQ ID NO: 30131 - DNA, 20 bp, synthetic construct
  misc_feature 1..20: note = Description of Artificial Sequence: Synthetic oligonucleotide
  misc_feature 1..20: note = Target: FXN; (+) strand; PAM type: YTN; PAM sequence: CTA
  source 1..20: mol_type = other DNA
ccacagtgcttctgaaactt

SEQ ID NO: 30132 - DNA, 20 bp, synthetic construct
  misc_feature 1..20: note = Description of Artificial Sequence: Synthetic oligonucleotide
  misc_feature 1..20: note = Target: FXN; (+) strand; PAM type: YTN; PAM sequence: CTT
  source 1..20: mol_type = other DNA
ctgaaactttaaagcacatt

SEQ ID NO: 30133 - DNA, 20 bp, synthetic construct
  misc_feature 1..20: note = Description of Artificial Sequence: Synthetic oligonucleotide
  misc_feature 1..20: note = Target: FXN; (+) strand; PAM type: YTN; PAM sequence: TTC
  source 1..20: mol_type = other DNA
tgaaactttaaagcacatta

SEQ ID NO: 30134 - DNA, 20 bp, synthetic construct
  misc_feature 1..20: note = Description of Artificial Sequence: Synthetic oligonucleotide
  misc_feature 1..20: note = Target: FXN; (+) strand; PAM type: YTN; PAM sequence: CTG
  source 1..20: mol_type = other DNA
aaactttaaagcacattaga

SEQ ID NO: 30135 - DNA, 20 bp, synthetic construct
  misc_feature 1..20: note = Description of Artificial Sequence: Synthetic oligonucleotide
  misc_feature 1..20: note = Target: FXN; (+) strand; PAM type: YTN; PAM sequence: CTT
  source 1..20: mol_type = other DNA
taaagcacattagaatcacc

SEQ ID NO: 30136 - DNA, 20 bp, synthetic construct
  misc_feature 1..20: note = Description of Artificial Sequence: Synthetic oligonucleotide
  misc_feature 1..20: note = Target: FXN; (+) strand; PAM type: YTN; PAM sequence: TTT
  source 1..20: mol_type = other DNA
aaagcacattagaatcacct

SEQ ID NO: 30137 - DNA, 20 bp, synthetic construct
  misc_feature 1..20: note = Description of Artificial Sequence: Synthetic oligonucleotide
  misc_feature 1..20: note = Target: FXN; (+) strand; PAM type: YTN; PAM sequence: TTA
  source 1..20: mol_type = other DNA
aagcacattagaatcacctg

SEQ ID NO: 30138 - DNA, 20 bp, synthetic construct
  misc_feature 1..20: note = Description of Artificial Sequence: Synthetic oligonucleotide
  misc_feature 1..20: note = Target: FXN; (+) strand; PAM type: YTN; PAM sequence: TTA
  source 1..20: mol_type = other DNA
gaatcacctggaggtcttgt

SEQ ID NO: 30139 - DNA, 20 bp, synthetic construct
  misc_feature 1..20: note = Description of Artificial Sequence: Synthetic oligonucleotide
  misc_feature 1..20: note = Target: FXN; (+) strand; PAM type: YTN; PAM sequence: CTG
  source 1..20: mol_type = other DNA
gaggtcttgttaaaccatgg

SEQ ID NO: 30140 - DNA, 20 bp, synthetic construct
  misc_feature 1..20: note = Description of Artificial Sequence: Synthetic oligonucleotide
  misc_feature 1..20: note = Target: FXN; (+) strand; PAM type: YTN; PAM sequence: CTT
  source 1..20: mol_type = other DNA
gttaaaccatggattgctgg

SEQ ID NO: 30141 - DNA, 20 bp, synthetic construct
  misc_feature 1..20: note = Description of Artificial Sequence: Synthetic oligonucleotide
  misc_feature 1..20: note = Target: FXN; (+) strand; PAM type: YTN; PAM sequence: TTG
  source 1..20: mol_type = other DNA
ttaaaccatggattgctggg

SEQ ID NO: 30142 - DNA, 20 bp, synthetic construct
  misc_feature 1..20: note = Description of Artificial Sequence: Synthetic oligonucleotide
  misc_feature 1..20: note = Target: FXN; (+) strand; PAM type: YTN; PAM sequence: TTA
  source 1..20: mol_type = other DNA
aaccatggattgctgggcct

SEQ ID NO: 30143 - DNA, 20 bp, synthetic construct
  misc_feature 1..20: note = Description of Artificial Sequence: Synthetic oligonucleotide
  misc_feature 1..20: note = Target: FXN; (+) strand; PAM type: YTN; PAM sequence: TTG
  source 1..20: mol_type = other DNA
ctgggccttgaaaccccaga

SEQ ID NO: 30144 - DNA, 20 bp, synthetic construct
  misc_feature 1..20: note = Description of Artificial Sequence: Synthetic oligonucleotide
  misc_feature 1..20: note = Target: FXN; (+) strand; PAM type: YTN; PAM sequence: CTG
  source 1..20: mol_type = other DNA
ggccttgaaaccccagagat

SEQ ID NO: 30145 - DNA, 20 bp, synthetic construct
  misc_feature 1..20: note = Description of Artificial Sequence: Synthetic oligonucleotide
  misc_feature 1..20: note = Target: FXN; (+) strand; PAM type: YTN; PAM sequence: CTT
  source 1..20: mol_type = other DNA
gaaaccccagagattctgat

SEQ ID NO: 30146 - DNA, 20 bp, synthetic construct
  misc_feature 1..20: note = Description of Artificial Sequence: Synthetic oligonucleotide
  misc_feature 1..20: note = Target: FXN; (+) strand; PAM type: YTN; PAM sequence: TTG
  source 1..20: mol_type = other DNA
aaaccccagagattctgatt

SEQ ID NO: 30147 - DNA, 20 bp, synthetic construct
  misc_feature 1..20: note = Description of Artificial Sequence: Synthetic oligonucleotide
  misc_feature 1..20: note = Target: FXN; (+) strand; PAM type: YTN; PAM sequence: TTC
  source 1..20: mol_type = other DNA
tgattcagtagatcgagaat

SEQ ID NO: 30148 - DNA, 20 bp, synthetic construct
  misc_feature 1..20: note = Description of Artificial Sequence: Synthetic oligonucleotide
  misc_feature 1..20: note = Target: FXN; (+) strand; PAM type: YTN; PAM sequence: CTG
  source 1..20: mol_type = other DNA
attcagtagatcgagaatag

SEQ ID NO: 30149 - DNA, 20 bp, synthetic construct
  misc_feature 1..20: note = Description of Artificial Sequence: Synthetic oligonucleotide
  misc_feature 1..20: note = Target: FXN; (+) strand; PAM type: YTN; PAM sequence: TTC
  source 1..20: mol_type = other DNA
agtagatcgagaatagggcc

SEQ ID NO: 30150 - DNA, 20 bp, synthetic construct
  misc_feature 1..20: note = Description of Artificial Sequence: Synthetic oligonucleotide
  misc_feature 1..20: note = Target: FXN; (+) strand; PAM type: YTN; PAM sequence: CTG
  source 1..20: mol_type = other DNA
agaatttgtatttctaacaa

SEQ ID NO: 30151 - DNA, 20 bp, synthetic construct
  misc_feature 1..20: note = Description of Artificial Sequence: Synthetic oligonucleotide
  misc_feature 1..20: note = Target: FXN; (+) strand; PAM type: YTN; PAM sequence: TTT
  source 1..20: mol_type = other DNA
gtatttctaacaagtttcca

SEQ ID NO: 30152 - DNA, 20 bp, synthetic construct
  misc_feature 1..20: note = Description of Artificial Sequence: Synthetic oligonucleotide
  misc_feature 1..20: note = Target: FXN; (+) strand; PAM type: YTN; PAM sequence: TTG
  source 1..20: mol_type = other DNA
tatttctaacaagtttccag

SEQ ID NO: 30153 - DNA, 20 bp, synthetic construct
  misc_feature 1..20: note = Description of Artificial Sequence: Synthetic oligonucleotide
  misc_feature 1..20: note = Target: FXN; (+) strand; PAM type: YTN; PAM sequence: TTT
  source 1..20: mol_type = other DNA
ctaacaagtttccaggtgat

SEQ ID NO: 30154 - DNA, 20 bp, synthetic construct
  misc_feature 1..20: note = Description of Artificial Sequence: Synthetic oligonucleotide
  misc_feature 1..20: note = Target: FXN; (+) strand; PAM type: YTN; PAM sequence: TTC
  source 1..20: mol_type = other DNA
taacaagtttccaggtgatg

SEQ ID NO: 30155 - DNA, 20 bp, synthetic construct
  misc_feature 1..20: note = Description of Artificial Sequence: Synthetic oligonucleotide
  misc_feature 1..20: note = Target: FXN; (+) strand; PAM type: YTN; PAM sequence: CTA
  source 1..20: mol_type = other DNA
acaagtttccaggtgatgct

SEQ ID NO: 30156 - DNA, 20 bp, synthetic construct
  misc_feature 1..20: note = Description of Artificial Sequence: Synthetic oligonucleotide
  misc_feature 1..20: note = Target: FXN; (+) strand; PAM type: YTN; PAM sequence: TTT
  source 1..20: mol_type = other DNA
ccaggtgatgctgaggctgc

SEQ ID NO: 30157 - DNA, 20 bp, synthetic construct
  misc_feature 1..20: note = Description of Artificial Sequence: Synthetic oligonucleotide
  misc_feature 1..20: note = Target: FXN; (+) strand; PAM type: YTN; PAM sequence: TTC
  source 1..20: mol_type = other DNA
caggtgatgctgaggctgct

SEQ ID NO: 30158 - DNA, 20 bp, synthetic construct
  misc_feature 1..20: note = Description of Artificial Sequence: Synthetic oligonucleotide
  misc_feature 1..20: note = Target: FXN; (+) strand; PAM type: YTN; PAM sequence: CTG
  source 1..20: mol_type = other DNA
aggctgctggcccagcgacc

SEQ ID NO: 30159 - DNA, 20 bp, synthetic construct
  misc_feature 1..20: note = Description of Artificial Sequence: Synthetic oligonucleotide
  misc_feature 1..20: note = Target: FXN; (+) strand; PAM type: YTN; PAM sequence: CTG
  source 1..20: mol_type = other DNA
ctggcccagcgaccacattt

SEQ ID NO: 30160 - DNA, 20 bp, synthetic construct
  misc_feature 1..20: note = Description of Artificial Sequence: Synthetic oligonucleotide
  misc_feature 1..20: note = Target: FXN; (+) strand; PAM type: YTN; PAM sequence: CTG
  source 1..20: mol_type = other DNA
gcccagcgaccacatttgat

SEQ ID NO: 30161 - DNA, 20 bp, synthetic construct
  misc_feature 1..20: note = Description of Artificial Sequence: Synthetic oligonucleotide
  misc_feature 1..20: note = Target: FXN; (+) strand; PAM type: YTN; PAM sequence: TTT
  source 1..20: mol_type = other DNA
gataatcatagccctctgat

SEQ ID NO: 30162 - DNA, 20 bp, synthetic construct
  misc_feature 1..20: note = Description of Artificial Sequence: Synthetic oligonucleotide
  misc_feature 1..20: note = Target: FXN; (+) strand; PAM type: YTN; PAM sequence: TTG
  source 1..20: mol_type = other DNA
ataatcatagccctctgata

SEQ ID NO: 30163 - DNA, 20 bp, synthetic construct
  misc_feature 1..20: note = Description of Artificial Sequence: Synthetic oligonucleotide
  misc_feature 1..20: note = Target: FXN; (+) strand; PAM type: YTN; PAM sequence: CTC
  source 1..20: mol_type = other DNA
tgataaatcctatcaaaata

SEQ ID NO: 30164 - DNA, 20 bp, synthetic construct
  misc_feature 1..20: note = Description of Artificial Sequence: Synthetic oligonucleotide
  misc_feature 1..20: note = Target: FXN; (+) strand; PAM type: YTN; PAM sequence: CTG
  source 1..20: mol_type = other DNA
ataaatcctatcaaaatatc

SEQ ID NO: 30165 - DNA, 20 bp, synthetic construct
  misc_feature 1..20: note = Description of Artificial Sequence: Synthetic oligonucleotide
  misc_feature 1..20: note = Target: FXN; (+) strand; PAM type: YTN; PAM sequence: CTA
  source 1..20: mol_type = other DNA
tcaaaatatcctaatggcag

SEQ ID NO: 30166 - DNA, 20 bp, synthetic construct
  misc_feature 1..20: note = Description of Artificial Sequence: Synthetic oligonucleotide
  misc_feature 1..20: note = Target: FXN; (+) strand; PAM type: YTN; PAM sequence: CTA
  source 1..20: mol_type = other DNA
atggcagagcaagggaattc

SEQ ID NO: 30167 - DNA, 20 bp, synthetic construct
  misc_feature 1..20: note = Description of Artificial Sequence: Synthetic oligonucleotide
  misc_feature 1..20: note = Target: FXN; (+) strand; PAM type: YTN; PAM sequence: TTC
  source 1..20: mol_type = other DNA
tggtgatatcctcccctacc

SEQ ID NO: 30168 - DNA, 20 bp, synthetic construct
  misc_feature 1..20: note = Description of Artificial Sequence: Synthetic oligonucleotide
  misc_feature 1..20: note = Target: FXN; (+) strand; PAM type: YTN; PAM sequence: CTG
  source 1..20: mol_type = other DNA
gtgatatcctcccctaccca

SEQ ID NO: 30169 - DNA, 20 bp, synthetic construct
  misc_feature 1..20: note = Description of Artificial Sequence: Synthetic oligonucleotide
  misc_feature 1..20: note = Target: FXN; (+) strand; PAM type: YTN; PAM sequence: CTC
  source 1..20: mol_type = other DNA
ccctacccataacctgacag

SEQ ID NO: 30170 - DNA, 20 bp, synthetic construct
  misc_feature 1..20: note = Description of Artificial Sequence: Synthetic oligonucleotide
  misc_feature 1..20: note = Target: FXN; (+) strand; PAM type: YTN; PAM sequence: CTA
  source 1..20: mol_type = other DNA
cccataacctgacagctatt

SEQ ID NO: 30171 - DNA, 20 bp, synthetic construct
  misc_feature 1..20: note = Description of Artificial Sequence: Synthetic oligonucleotide
  misc_feature 1..20: note = Target: FXN; (+) strand; PAM type: YTN; PAM sequence: CTG
  source 1..20: mol_type = other DNA
acagctattaggatctgcct

SEQ ID NO: 30172 - DNA, 20 bp, synthetic construct
  misc_feature 1..20: note = Description of Artificial Sequence: Synthetic oligonucleotide
  misc_feature 1..20: note = Target: FXN; (+) strand; PAM type: YTN; PAM sequence: CTA
  source 1..20: mol_type = other DNA
ttaggatctgcctacttgag

SEQ ID NO: 30173 - DNA, 20 bp, synthetic construct
  misc_feature 1..20: note = Description of Artificial Sequence: Synthetic oligonucleotide
  misc_feature 1..20: note = Target: FXN; (+) strand; PAM type: YTN; PAM sequence: TTA
  source 1..20: mol_type = other DNA
ggatctgcctacttgaggct

SEQ ID NO: 30174 - DNA, 20 bp, synthetic construct
  misc_feature 1..20: note = Description of Artificial Sequence: Synthetic oligonucleotide
  misc_feature 1..20: note = Target: FXN; (+) strand; PAM type: YTN; PAM sequence: CTG
  source 1..20: mol_type = other DNA
cctacttgaggctaaaagca

SEQ ID NO: 30175 - DNA, 20 bp, synthetic construct
  misc_feature 1..20: note = Description of Artificial Sequence: Synthetic oligonucleotide
  misc_feature 1..20: note = Target: FXN; (+) strand; PAM type: YTN; PAM sequence: CTA
  source 1..20: mol_type = other DNA
cttgaggctaaaagcaacca

SEQ ID NO: 30176 - DNA, 20 bp, synthetic construct
  misc_feature 1..20: note = Description of Artificial Sequence: Synthetic oligonucleotide
  misc_feature 1..20: note = Target: FXN; (+) strand; PAM type: YTN; PAM sequence: CTT
  source 1..20: mol_type = other DNA
gaggctaaaagcaaccaaga

SEQ ID NO: 30177 - DNA, 20 bp, synthetic construct
  misc_feature 1..20: note = Description of Artificial Sequence: Synthetic oligonucleotide
  misc_feature 1..20: note = Target: FXN; (+) strand; PAM type: YTN; PAM sequence: TTG
  source 1..20: mol_type = other DNA
aggctaaaagcaaccaagag

SEQ ID NO: 30178 - DNA, 20 bp, synthetic construct
  misc_feature 1..20: note = Description of Artificial Sequence: Synthetic oligonucleotide
  misc_feature 1..20: note = Target: FXN; (+) strand; PAM type: YTN; PAM sequence: CTA
  source 1..20: mol_type = other DNA
aaagcaaccaagagaggaac

SEQ ID NO: 30179 - DNA, 20 bp, synthetic construct
  misc_feature 1..20: note = Description of Artificial Sequence: Synthetic oligonucleotide
  misc_feature 1..20: note = Target: FXN; (+) strand; PAM type: YTN; PAM sequence: CTA
  source 1..20: mol_type = other DNA
cagtgtaccacagagtccct

SEQ ID NO: 30180 - DNA, 20 bp, synthetic construct
  misc_feature 1..20: note = Description of Artificial Sequence: Synthetic oligonucleotide
  misc_feature 1..20: note = Target: FXN; (+) strand; PAM type: YTN; PAM sequence: CTC
  source 1..20: mol_type = other DNA
aacatctttgcccacgccac

SEQ ID NO: 30181 - DNA, 20 bp, synthetic construct
  misc_feature 1..20: note = Description of Artificial Sequence: Synthetic oligonucleotide
  misc_feature 1..20: note = Target: FXN; (+) strand; PAM type: YTN; PAM sequence: CTT
  source 1..20: mol_type = other DNA
tgcccacgccacggtgcccc

SEQ ID NO: 30182 - DNA, 20 bp, synthetic construct
  misc_feature 1..20: note = Description of Artificial Sequence: Synthetic oligonucleotide
  misc_feature 1..20: note = Target: FXN; (+) strand; PAM type: YTN; PAM sequence: TTT
  source 1..20: mol_type = other DNA
gcccacgccacggtgcccca

SEQ ID NO: 30183 - DNA, 20 bp, synthetic construct
  misc_feature 1..20: note = Description of Artificial Sequence: Synthetic oligonucleotide
  misc_feature 1..20: note = Target: FXN; (+) strand; PAM type: YTN; PAM sequence: TTG
  source 1..20: mol_type = other DNA
cccacgccacggtgccccag

SEQ ID NO: 30184 - DNA, 20 bp, synthetic construct
  misc_feature 1..20: note = Description of Artificial Sequence: Synthetic oligonucleotide
  misc_feature 1..20: note = Target: FXN; (+) strand; PAM type: YTN; PAM sequence: CTT
  source 1..20: mol_type = other DNA
cttaccaagtgtgcctgatt

SEQ ID NO: 30185 - DNA, 20 bp, synthetic construct
  misc_feature 1..20: note = Description of Artificial Sequence: Synthetic oligonucleotide
  misc_feature 1..20: note = Target: FXN; (+) strand; PAM type: YTN; PAM sequence: TTC
  source 1..20: mol_type = other DNA
ttaccaagtgtgcctgattc

SEQ ID NO: 30186 - DNA, 20 bp, synthetic construct
  misc_feature 1..20: note = Description of Artificial Sequence: Synthetic oligonucleotide
  misc_feature 1..20: note = Target: FXN; (+) strand; PAM type: YTN; PAM sequence: CTT
  source 1..20: mol_type = other DNA
accaagtgtgcctgattcct

SEQ ID NO: 30187 - DNA, 20 bp, synthetic construct
  misc_feature 1..20: note = Description of Artificial Sequence: Synthetic oligonucleotide
  misc_feature 1..20: note = Target: FXN; (+) strand; PAM type: YTN; PAM sequence: TTA
  source 1..20: mol_type = other DNA
ccaagtgtgcctgattcctc

SEQ ID NO: 30188 - DNA, 20 bp, synthetic construct
  misc_feature 1..20: note = Description of Artificial Sequence: Synthetic oligonucleotide
  misc_feature 1..20: note = Target: FXN; (+) strand; PAM type: YTN; PAM sequence: CTG
  source 1..20: mol_type = other DNA
attcctcttgactacctcca

SEQ ID NO: 30189 - DNA, 20 bp, synthetic construct
  misc_feature 1..20: note = Description of Artificial Sequence: Synthetic oligonucleotide
  misc_feature 1..20: note = Target: FXN; (+) strand; PAM type: YTN; PAM sequence: TTC
  source 1..20: mol_type = other DNA
ctcttgactacctccaagga

SEQ ID NO: 30190 - DNA, 20 bp, synthetic construct
  misc_feature 1..20: note = Description of Artificial Sequence: Synthetic oligonucleotide
  misc_feature 1..20: note = Target: FXN; (+) strand; PAM type: YTN; PAM sequence: CTC
  source 1..20: mol_type = other DNA
ttgactacctccaaggaagt

SEQ ID NO: 30191 - DNA, 20 bp, synthetic construct
  misc_feature 1..20: note = Description of Artificial Sequence: Synthetic oligonucleotide
  misc_feature 1..20: note = Target: FXN; (+) strand; PAM type: YTN; PAM sequence: CTT
  source 1..20: mol_type = other DNA
gactacctccaaggaagtgg

SEQ ID NO: 30192 - DNA, 20 bp, synthetic construct
  misc_feature 1..20: note = Description of Artificial Sequence: Synthetic oligonucleotide
  misc_feature 1..20: note = Target: FXN; (+) strand; PAM type: YTN; PAM sequence: TTG
  source 1..20: mol_type = other DNA
actacctccaaggaagtgga

SEQ ID NO: 30193 - DNA, 20 bp, synthetic construct
  misc_feature 1..20: note = Description of Artificial Sequence: Synthetic oligonucleotide
  misc_feature 1..20: note = Target: FXN; (+) strand; PAM type: YTN; PAM sequence: CTA
  source 1..20: mol_type = other DNA
cctccaaggaagtggagaaa

SEQ ID NO: 30194 - DNA, 20 bp, synthetic construct
  misc_feature 1..20: note = Description of Artificial Sequence: Synthetic oligonucleotide
  misc_feature 1..20: note = Target: FXN; (+) strand; PAM type: YTN; PAM sequence: CTC
  source 1..20: mol_type = other DNA
caaggaagtggagaaagaca

SEQ ID NO: 30195 - DNA, 20 bp, synthetic construct
  misc_feature 1..20: note = Description of Artificial Sequence: Synthetic oligonucleotide
  misc_feature 1..20: note = Target: FXN; (+) strand; PAM type: YTN; PAM sequence: TTC
  source 1..20: mol_type = other DNA
ttgcgaagccttcgtcttct

SEQ ID NO: 30196 - DNA, 20 bp, synthetic construct
  misc_feature 1..20: note = Description of Artificial Sequence: Synthetic oligonucleotide
  misc_feature 1..20: note = Target: FXN; (+) strand; PAM type: YTN; PAM sequence: CTT
  source 1..20: mol_type = other DNA
gcgaagccttcgtcttctct

SEQ ID NO: 30197 - DNA, 20 bp, synthetic construct
  misc_feature 1..20: note = Description of Artificial Sequence: Synthetic oligonucleotide
  misc_feature 1..20: note = Target: FXN; (+) strand; PAM type: YTN; PAM sequence: TTG
  source 1..20: mol_type = other DNA
cgaagccttcgtcttctctg

SEQ ID NO: 30198 - DNA, 20 bp, synthetic construct
  misc_feature 1..20: note = Description of Artificial Sequence: Synthetic oligonucleotide
  misc_feature 1..20: note = Target: FXN; (+) strand; PAM type: YTN; PAM sequence: CTT
  source 1..20: mol_type = other DNA
cgtcttctctgatatgctat

SEQ ID NO: 30199 - DNA, 20 bp, synthetic construct
  misc_feature 1..20: note = Description of Artificial Sequence: Synthetic oligonucleotide
  misc_feature 1..20: note = Target: FXN; (+) strand; PAM type: YTN; PAM sequence: TTC
  source 1..20: mol_type = other DNA
gtcttctctgatatgctatt

SEQ ID NO: 30200 - DNA, 20 bp, synthetic construct
  misc_feature 1..20: note = Description of Artificial Sequence: Synthetic oligonucleotide
  misc_feature 1..20: note = Target: FXN; (+) strand; PAM type: YTN; PAM sequence: CTT
  source 1..20: mol_type = other DNA
ctctgatatgctattctatg

SEQ ID NO: 30201 - DNA, 20 bp, synthetic construct
  misc_feature 1..20: note = Description of Artificial Sequence: Synthetic oligonucleotide
  misc_feature 1..20: note = Target: FXN; (+) strand; PAM type: YTN; PAM sequence: TTC
  source 1..20: mol_type = other DNA
tctgatatgctattctatgt

SEQ ID NO: 30202 - DNA, 20 bp, synthetic construct
  misc_feature 1..20: note = Description of Artificial Sequence: Synthetic oligonucleotide
  misc_feature 1..20: note = Target: FXN; (+) strand; PAM type: YTN; PAM sequence: CTC
  source 1..20: mol_type = other DNA
tgatatgctattctatgtct

SEQ ID NO: 30203 - DNA, 20 bp, synthetic construct
  misc_feature 1..20: note = Description of Artificial Sequence: Synthetic oligonucleotide
  misc_feature 1..20: note = Target: FXN; (+) strand; PAM type: YTN; PAM sequence: CTG
  source 1..20: mol_type = other DNA
atatgctattctatgtctat

SEQ ID NO: 30204 - DNA, 20 bp, synthetic construct
  misc_feature 1..20: note = Description of Artificial Sequence: Synthetic oligonucleotide
  misc_feature 1..20: note = Target: FXN; (+) strand; PAM type: YTN; PAM sequence: CTA
  source 1..20: mol_type = other DNA
ttctatgtctatttctttgg

SEQ ID NO: 30205 - DNA, 20 bp, synthetic construct
  misc_feature 1..20: note = Description of Artificial Sequence: Synthetic oligonucleotide
  misc_feature 1..20: note = Target: FXN; (+) strand; PAM type: YTN; PAM sequence: TTC
  source 1..20: mol_type = other DNA
tatgtctatttctttggcca

SEQ ID NO: 30206 - DNA, 20 bp, synthetic construct
  misc_feature 1..20: note = Description of Artificial Sequence: Synthetic oligonucleotide
  misc_feature 1..20: note = Target: FXN; (+) strand; PAM type: YTN; PAM sequence: CTA
  source 1..20: mol_type = other DNA
tgtctatttctttggccaaa

SEQ ID NO: 30207 - DNA, 20 bp, synthetic construct
  misc_feature 1..20: note = Description of Artificial Sequence: Synthetic oligonucleotide
  misc_feature 1..20: note = Target: FXN; (+) strand; PAM type: YTN; PAM sequence: CTA
  source 1..20: mol_type = other DNA
tttctttggccaaaaagatg

SEQ ID NO: 30208 - DNA, 20 bp, synthetic construct
  misc_feature 1..20: note = Description of Artificial Sequence: Synthetic oligonucleotide
  misc_feature 1..20: note = Target: FXN; (+) strand; PAM type: YTN; PAM sequence: TTT
  source 1..20: mol_type = other DNA
ctttggccaaaaagatgggg

SEQ ID NO: 30209 - DNA, 20 bp, synthetic construct
  misc_feature 1..20: note = Description of Artificial Sequence: Synthetic oligonucleotide
  misc_feature 1..20: note = Target: FXN; (+) strand; PAM type: YTN; PAM sequence: TTC
  source 1..20: mol_type = other DNA
tttggccaaaaagatggggc

SEQ ID NO: 30210 - DNA, 20 bp, synthetic construct
  misc_feature 1..20: note = Description of Artificial Sequence: Synthetic oligonucleotide
  misc_feature 1..20: note = Target: FXN; (+) strand; PAM type: YTN; PAM sequence: CTT
  source 1..20: mol_type = other DNA
tggccaaaaagatggggcaa

SEQ ID NO: 30211 - DNA, 20 bp, synthetic construct
  misc_feature 1..20: note = Description of Artificial Sequence: Synthetic oligonucleotide
  misc_feature 1..20: note = Target: FXN; (+) strand; PAM type: YTN; PAM sequence: TTT
  source 1..20: mol_type = other DNA
ggccaaaaagatggggcaat

SEQ ID NO: 30212 - DNA, 20 bp, synthetic construct
  misc_feature 1..20: note = Description of Artificial Sequence: Synthetic oligonucleotide
  misc_feature 1..20: note = Target: FXN; (+) strand; PAM type: YTN; PAM sequence: TTG
  source 1..20: mol_type = other DNA
gccaaaaagatggggcaatg

SEQ ID NO: 30213 - DNA, 20 bp, synthetic construct
  misc_feature 1..20: note = Description of Artificial Sequence: Synthetic oligonucleotide
  misc_feature 1..20: note = Target: FXN; (+) strand; PAM type: YTN; PAM sequence: CTT
  source 1..20: mol_type = other DNA
tgcagggagctggagcattt

SEQ ID NO: 30214 - DNA, 20 bp, synthetic construct
  misc_feature 1..20: note = Description of Artificial Sequence: Synthetic oligonucleotide
  misc_feature 1..20: note = Target: FXN; (+) strand; PAM type: YTN; PAM sequence: TTT
  source 1..20: mol_type = other DNA
gcagggagctggagcatttg

SEQ ID NO: 30215 - DNA, 20 bp, synthetic construct
  misc_feature 1..20: note = Description of Artificial Sequence: Synthetic oligonucleotide
  misc_feature 1..20: note = Target: FXN; (+) strand; PAM type: YTN; PAM sequence: TTG
  source 1..20: mol_type = other DNA
cagggagctggagcatttgc

SEQ ID NO: 30216 - DNA, 20 bp, synthetic construct
  misc_feature 1..20: note = Description of Artificial Sequence: Synthetic oligonucleotide
  misc_feature 1..20: note = Target: FXN; (+) strand; PAM type: YTN; PAM sequence: CTG
  source 1..20: mol_type = other DNA
gagcatttgctagtgacctt

SEQ ID NO: 30217 - DNA, 20 bp, synthetic construct
  misc_feature 1..20: note = Description of Artificial Sequence: Synthetic oligonucleotide
  misc_feature 1..20: note = Target: FXN; (+) strand; PAM type: YTN; PAM sequence: TTT
  source 1..20: mol_type = other DNA
gctagtgacctttctatgcc

SEQ ID NO: 30218 - DNA, 20 bp, synthetic construct
  misc_feature 1..20: note = Description of Artificial Sequence: Synthetic oligonucleotide
  misc_feature 1..20: note = Target: FXN; (+) strand; PAM type: YTN; PAM sequence: TTG
  source 1..20: mol_type = other DNA
ctagtgacctttctatgcca

SEQ ID NO: 30219 - DNA, 20 bp, synthetic construct
  misc_feature 1..20: note = Description of Artificial Sequence: Synthetic oligonucleotide
  misc_feature 1..20: note = Target: FXN; (+) strand; PAM type: YTN; PAM sequence: CTA
  source 1..20: mol_type = other DNA
gtgacctttctatgccagaa

SEQ ID NO: 30220 - DNA, 20 bp, synthetic construct
  misc_feature 1..20: note = Description of Artificial Sequence: Synthetic oligonucleotide
  misc_feature 1..20: note = Target: FXN; (+) strand; PAM type: YTN; PAM sequence: CTT
  source 1..20: mol_type = other DNA
tctatgccagaacttgctaa

SEQ ID NO: 30221 - DNA, 20 bp, synthetic construct
  misc_feature 1..20: note = Description of Artificial Sequence: Synthetic oligonucleotide
  misc_feature 1..20: note = Target: FXN; (+) strand; PAM type: YTN; PAM sequence: TTT
  source 1..20: mol_type = other DNA
ctatgccagaacttgctaag

SEQ ID NO: 30222 - DNA, 20 bp, synthetic construct
  misc_feature 1..20: note = Description of Artificial Sequence: Synthetic oligonucleotide
  misc_feature 1..20: note = Target: FXN; (+) strand; PAM type: YTN; PAM sequence: TTC
  source 1..20: mol_type = other DNA
tatgccagaacttgctaagc

SEQ ID NO: 30223 - DNA, 20 bp, synthetic construct
  misc_feature 1..20: note = Description of Artificial Sequence: Synthetic oligonucleotide
  misc_feature 1..20: note = Target: FXN; (+) strand; PAM type: YTN; PAM sequence: CTA
  source 1..20: mol_type = other DNA
tgccagaacttgctaagcat

SEQ ID NO: 30224 - DNA, 20 bp, synthetic construct
  misc_feature 1..20: note = Description of Artificial Sequence: Synthetic oligonucleotide
  misc_feature 1..20: note = Target: FXN; (+) strand; PAM type: YTN; PAM sequence: CTT
  source 1..20: mol_type = other DNA
gctaagcatgctagctaata

SEQ ID NO: 30225 - DNA, 20 bp, synthetic construct
  misc_feature 1..20: note = Description of Artificial Sequence: Synthetic oligonucleotide
  misc_feature 1..20: note = Target: FXN; (+) strand; PAM type: YTN; PAM sequence: TTG
  source 1..20: mol_type = other DNA
ctaagcatgctagctaataa

SEQ ID NO: 30226 - DNA, 20 bp, synthetic construct
  misc_feature 1..20: note = Description of Artificial Sequence: Synthetic oligonucleotide
  misc_feature 1..20: note = Target: FXN; (+) strand; PAM type: YTN; PAM sequence: CTA
  source 1..20: mol_type = other DNA
agcatgctagctaataatga

SEQ ID NO: 30227 - DNA, 20 bp, synthetic construct
  misc_feature 1..20: note = Description of Artificial Sequence: Synthetic oligonucleotide
  misc_feature 1..20: note = Target: FXN; (+) strand; PAM type: YTN; PAM sequence: CTA
  source 1..20: mol_type = other DNA
gctaataatgatgtagcaca

SEQ ID NO: 30228 - DNA, 20 bp, synthetic construct
  misc_feature 1..20: note = Description of Artificial Sequence: Synthetic oligonucleotide
  misc_feature 1..20: note = Target: FXN; (+) strand; PAM type: YTN; PAM sequence: CTA
  source 1..20: mol_type = other DNA
ataatgatgtagcacagggt

SEQ ID NO: 30229 - DNA, 20 bp, synthetic construct
  misc_feature 1..20: note = Description of Artificial Sequence: Synthetic oligonucleotide
  misc_feature 1..20: note = Target: FXN; (+) strand; PAM type: YTN; PAM sequence: CTC
  source 1..20: mol_type = other DNA
acgcctgtaatctcagcact

SEQ ID NO: 30230 - DNA, 20 bp, synthetic construct
  misc_feature 1..20: note = Description of Artificial Sequence: Synthetic oligonucleotide
  misc_feature 1..20: note = Target: FXN; (+) strand; PAM type: YTN; PAM sequence: CTG
  source 1..20: mol_type = other DNA
taatctcagcactttgggcg

SEQ ID NO: 30231 - DNA, 20 bp, synthetic construct
  misc_feature 1..20: note = Description of Artificial Sequence: Synthetic oligonucleotide
  misc_feature 1..20: note = Target: FXN; (+) strand; PAM type: YTN; PAM sequence: CTC
  source 1..20: mol_type = other DNA
agcactttgggcggccgagg

SEQ ID NO: 30232 - DNA, 20 bp, synthetic construct
  misc_feature 1..20: note = Description of Artificial Sequence: Synthetic oligonucleotide
  misc_feature 1..20: note = Target: FXN; (+) strand; PAM type: YTN; PAM sequence: CTT
  source 1..20: mol_type = other DNA
tgggcggccgaggcgggcgg

SEQ ID NO: 30233 - DNA, 20 bp, synthetic construct
  misc_feature 1..20: note = Description of Artificial Sequence: Synthetic oligonucleotide
  misc_feature 1..20: note = Target: FXN; (+) strand; PAM type: YTN; PAM sequence: TTT
  source 1..20: mol_type = other DNA
gggcggccgaggcgggcgga

SEQ ID NO: 30234 - DNA, 20 bp, synthetic construct
  misc_feature 1..20: note = Description of Artificial Sequence: Synthetic oligonucleotide
  misc_feature 1..20: note = Target: FXN; (+) strand; PAM type: YTN; PAM sequence: TTG
  source 1..20: mol_type = other DNA
ggcggccgaggcgggcggat

SEQ ID NO: 30235 - DNA, 20 bp, synthetic construct
  misc_feature 1..20: note = Description of Artificial Sequence: Synthetic oligonucleotide
  misc_feature 1..20: note = Target: FXN; (+) strand; PAM type: YTN; PAM sequence: CTG
  source 1..20: mol_type = other DNA
aggtcaggagttcgagacca

SEQ ID NO: 30236 - DNA, 20 bp, synthetic construct
  misc_feature 1..20: note = Description of Artificial Sequence: Synthetic oligonucleotide
  misc_feature 1..20: note = Target: FXN; (+) strand; PAM type: YTN; PAM sequence: TTC
  source 1..20: mol_type = other DNA
gagaccagcctggccaacat

SEQ ID NO: 30237 - DNA, 20 bp, synthetic construct
  misc_feature 1..20: note = Description of Artificial Sequence: Synthetic oligonucleotide
  misc_feature 1..20: note = Target: FXN; (+) strand; PAM type: YTN; PAM sequence: CTG
  source 1..20: mol_type = other DNA
gccaacatgatgaaacccca

SEQ ID NO: 30238 - DNA, 20 bp, synthetic construct
  misc_feature 1..20: note = Description of Artificial Sequence: Synthetic oligonucleotide
  misc_feature 1..20: note = Target: FXN; (+) strand; PAM type: YTN; PAM sequence: CTC
  source 1..20: mol_type = other DNA
tactaaaaatacaaaaatta

SEQ ID NO: 30239 - DNA, 20 bp, synthetic construct
  misc_feature 1..20: note = Description of Artificial Sequence: Synthetic oligonucleotide
  misc_feature 1..20: note = Target: FXN; (+) strand; PAM type: YTN; PAM sequence: CTA
  source 1..20: mol_type = other DNA
ctaaaaatacaaaaattagc

SEQ ID NO: 30240 - DNA, 20 bp, synthetic construct
  misc_feature 1..20: note = Description of Artificial Sequence: Synthetic oligonucleotide
  misc_feature 1..20: note = Target: FXN; (+) strand; PAM type: YTN; PAM sequence: CTA
  source 1..20: mol_type = other DNA
aaaatacaaaaattagccag

SEQ ID NO: 30241 - DNA, 20 bp, synthetic construct
  misc_feature 1..20: note = Description of Artificial Sequence: Synthetic oligonucleotide
  misc_feature 1..20: note = Target: FXN; (+) strand; PAM type: YTN; PAM sequence: TTA
  source 1..20: mol_type = other DNA
gccaggcgtggtggtgggca

SEQ ID NO: 30242 - DNA, 20 bp, synthetic construct
  misc_feature 1..20: note = Description of Artificial Sequence: Synthetic oligonucleotide
  misc_feature 1..20: note = Target: FXN; (+) strand; PAM type: YTN; PAM sequence: CTG
  source 1..20: mol_type = other DNA
caatcccagctactctggag

SEQ ID NO: 30243 - DNA, 20 bp, synthetic construct
  misc_feature 1..20: note = Description of Artificial Sequence: Synthetic oligonucleotide
  misc_feature 1..20: note = Target: FXN; (+) strand; PAM type: YTN; PAM sequence: CTA
  source 1..20: mol_type = other DNA
ctctggaggctgagacagaa

SEQ ID NO: 30244 - DNA, 20 bp, synthetic construct
  misc_feature 1..20: note = Description of Artificial Sequence: Synthetic oligonucleotide
  misc_feature 1..20: note = Target: FXN; (+) strand; PAM type: YTN; PAM sequence: CTC
  source 1..20: mol_type = other DNA
tggaggctgagacagaatct

SEQ ID NO: 30245 - DNA, 20 bp, synthetic construct
  misc_feature 1..20: note = Description of Artificial Sequence: Synthetic oligonucleotide
  misc_feature 1..20: note = Target: FXN; (+) strand; PAM type: YTN; PAM sequence: CTG
  source 1..20: mol_type = other DNA
gaggctgagacagaatctct

SEQ ID NO: 30246 - DNA, 20 bp, synthetic construct
  misc_feature 1..20: note = Description of Artificial Sequence: Synthetic oligonucleotide
  misc_feature 1..20: note = Target: FXN; (+) strand; PAM type: YTN; PAM sequence: CTG
  source 1..20: mol_type = other DNA
agacagaatctcttgaaccc

SEQ ID NO: 30247 - DNA, 20 bp, synthetic construct
  misc_feature 1..20: note = Description of Artificial Sequence: Synthetic oligonucleotide
  misc_feature 1..20: note = Target: FXN; (+) strand; PAM type: YTN; PAM sequence: CTC
  source 1..20: mol_type = other DNA
ttgaacccaggaggtggaga

SEQ ID NO: 30248 - DNA, 20 bp, synthetic construct
  misc_feature 1..20: note = Description of Artificial Sequence: Synthetic oligonucleotide
  misc_feature 1..20: note = Target: FXN; (+) strand; PAM type: YTN; PAM sequence: CTT
  source 1..20: mol_type = other DNA
gaacccaggaggtggagatt

SEQ ID NO: 30249 - DNA, 20 bp, synthetic construct
  misc_feature 1..20: note = Description of Artificial Sequence: Synthetic oligonucleotide
  misc_feature 1..20: note = Target: FXN; (+) strand; PAM type: YTN; PAM sequence: TTG
  source 1..20: mol_type = other DNA
aacccaggaggtggagattg

SEQ ID NO: 30250 - DNA, 20 bp, synthetic construct
  misc_feature 1..20: note = Description of Artificial Sequence: Synthetic oligonucleotide
  misc_feature 1..20: note = Target: FXN; (+) strand; PAM type: YTN; PAM sequence: TTG
  source 1..20: mol_type = other DNA
cagtgagcagagatggcacc

SEQ ID NO: 30251 - DNA, 20 bp, synthetic construct
  misc_feature 1..20: note = Description of Artificial Sequence: Synthetic oligonucleotide
  misc_feature 1..20: note = Target: FXN; (+) strand; PAM type: YTN; PAM sequence: CTG
  source 1..20: mol_type = other DNA
cattccagcctgggcaacaa

SEQ ID NO: 30252 - DNA, 20 bp, synthetic construct
  misc_feature 1..20: note = Description of Artificial Sequence: Synthetic oligonucleotide
  misc_feature 1..20: note = Target: FXN; (+) strand; PAM type: YTN; PAM sequence: TTC
  source 1..20: mol_type = other DNA
cagcctgggcaacaaagcaa

SEQ ID NO: 30253 - DNA, 20 bp, synthetic construct
  misc_feature 1..20: note = Description of Artificial Sequence: Synthetic oligonucleotide
  misc_feature 1..20: note = Target: FXN; (+) strand; PAM type: YTN; PAM sequence: CTG
  source 1..20: mol_type = other DNA
ggcaacaaagcaagactctg

SEQ ID NO: 30254 - DNA, 20 bp, synthetic construct
  misc_feature 1..20: note = Description of Artificial Sequence: Synthetic oligonucleotide
  misc_feature 1..20: note = Target: FXN; (+) strand; PAM type: YTN; PAM sequence: CTC
  source 1..20: mol_type = other DNA
tgtctcaaataataataata

SEQ ID NO: 30255 - DNA, 20 bp, synthetic construct
  misc_feature 1..20: note = Description of Artificial Sequence: Synthetic oligonucleotide
  misc_feature 1..20: note = Target: FXN; (+) strand; PAM type: YTN; PAM sequence: CTG
  source 1..20: mol_type = other DNA
tctcaaataataataataat

SEQ ID NO: 30256 - DNA, 20 bp, synthetic construct
  misc_feature 1..20: note = Description of Artificial Sequence: Synthetic oligonucleotide
  misc_feature 1..20: note = Target: FXN; (+) strand; PAM type: YTN; PAM sequence: CTC
  source 1..20: mol_type = other DNA
aaataataataataataata

SEQ ID NO: 30257 - DNA, 20 bp, synthetic construct
  misc_feature 1..20: note = Description of Artificial Sequence: Synthetic oligonucleotide
  misc_feature 1..20: note = Target: FXN; (+) strand; PAM type: YTN; PAM sequence: CTA
  source 1..20: mol_type = other DNA
atgatgcagctttctctctc

SEQ ID NO: 30258 - DNA, 20 bp, synthetic construct
  misc_feature 1..20: note = Description of Artificial Sequence: Synthetic oligonucleotide
  misc_feature 1..20: note = Target: FXN; (+) strand; PAM type: YTN; PAM sequence: CTT
  source 1..20: mol_type = other DNA
tctctctctgagtatataat

SEQ ID NO: 30259 - DNA, 20 bp, synthetic construct
  misc_feature 1..20: note = Description of Artificial Sequence: Synthetic oligonucleotide
  misc_feature 1..20: note = Target: FXN; (+) strand; PAM type: YTN; PAM sequence: TTT
  source 1..20: mol_type = other DNA
ctctctctgagtatataatg

SEQ ID NO: 30260 - DNA, 20 bp, synthetic construct
  misc_feature 1..20: note = Description of Artificial Sequence: Synthetic oligonucleotide
  misc_feature 1..20: note = Target: FXN; (+) strand; PAM type: YTN; PAM sequence: TTC
  source 1..20: mol_type = other DNA
tctctctgagtatataatgc

SEQ ID NO: 30261 - DNA, 20 bp, synthetic construct
  misc_feature 1..20: note = Description of Artificial Sequence: Synthetic oligonucleotide
  misc_feature 1..20: note = Target: FXN; (+) strand; PAM type: YTN; PAM sequence: CTC
  source 1..20: mol_type = other DNA
tctctgagtatataatgcag

SEQ ID NO: 30262 - DNA, 20 bp, synthetic construct
  misc_feature 1..20: note = Description of Artificial Sequence: Synthetic oligonucleotide
  misc_feature 1..20: note = Target: FXN; (+) strand; PAM type: YTN; PAM sequence: CTC
  source 1..20: mol_type = other DNA
tctgagtatataatgcagtt

SEQ ID NO: 30263 - DNA, 20 bp, synthetic construct
  misc_feature 1..20: note = Description of Artificial Sequence: Synthetic oligonucleotide
  misc_feature 1..20: note = Target: FXN; (+) strand; PAM type: YTN; PAM sequence: CTC
  source 1..20: mol_type = other DNA
tgagtatataatgcagttct

SEQ ID NO: 30264 - DNA, 20 bp, synthetic construct
  misc_feature 1..20: note = Description of Artificial Sequence: Synthetic oligonucleotide
  misc_feature 1..20: note = Target: FXN; (+) strand; PAM type: YTN; PAM sequence: CTG
  source 1..20: mol_type = other DNA
agtatataatgcagttctga

SEQ ID NO: 30265 - DNA, 20 bp, synthetic construct
  misc_feature 1..20: note = Description of Artificial Sequence: Synthetic oligonucleotide
  misc_feature 1..20: note = Target: FXN; (+) strand; PAM type: YTN; PAM sequence: TTC
  source 1..20: mol_type = other DNA
tgatgatgtgaggaagggcc

SEQ ID NO: 30266 - DNA, 20 bp, synthetic construct
  misc_feature 1..20: note = Description of Artificial Sequence: Synthetic oligonucleotide
  misc_feature 1..20: note = Target: FXN; (+) strand; PAM type: YTN; PAM sequence: CTG
  source 1..20: mol_type = other DNA
atgatgtgaggaagggcctc

SEQ ID NO: 30267 - DNA, 20 bp, synthetic construct
  misc_feature 1..20: note = Description of Artificial Sequence: Synthetic oligonucleotide
  misc_feature 1..20: note = Target: FXN; (+) strand; PAM type: YTN; PAM sequence: CTC
  source 1..20: mol_type = other DNA
actgttggtgtggcagagtc

SEQ ID NO: 30268 - DNA, 20 bp, synthetic construct
  misc_feature 1..20: note = Description of Artificial Sequence: Synthetic oligonucleotide
  misc_feature 1..20: note = Target: FXN; (+) strand; PAM type: YTN; PAM sequence: CTG
  source 1..20: mol_type = other DNA
ttggtgtggcagagtctgag

SEQ ID NO: 30269 - DNA, 20 bp, synthetic construct
  misc_feature 1..20: note = Description of Artificial Sequence: Synthetic oligonucleotide
  misc_feature 1..20: note = Target: FXN; (+) strand; PAM type: YTN; PAM sequence: TTG
  source 1..20: mol_type = other DNA
gtgtggcagagtctgagacc

SEQ ID NO: 30270 - DNA, 20 bp, synthetic construct
  misc_feature 1..20: note = Description of Artificial Sequence: Synthetic oligonucleotide
  misc_feature 1..20: note = Target: FXN; (+) strand; PAM type: YTN; PAM sequence: CTG
  source 1..20: mol_type = other DNA
agaccatggctggcaatgaa

SEQ ID NO: 30271 - DNA, 20 bp, synthetic construct
  misc_feature 1..20: note = Description of Artificial Sequence: Synthetic oligonucleotide
  misc_feature 1..20: note = Target: FXN; (+) strand; PAM type: YTN; PAM sequence: CTG
  source 1..20: mol_type = other DNA
gcaatgaaaacactaccctt

SEQ ID NO: 30272 - DNA, 20 bp, synthetic construct
  misc_feature 1..20: note = Description of Artificial Sequence: Synthetic oligonucleotide
  misc_feature 1..20: note = Target: FXN; (+) strand; PAM type: YTN; PAM sequence: CTA
  source 1..20: mol_type = other DNA
ccctttgatgcctatgggct

SEQ ID NO: 30273 - DNA, 20 bp, synthetic construct
  misc_feature 1..20: note = Description of Artificial Sequence: Synthetic oligonucleotide
  misc_feature 1..20: note = Target: FXN; (+) strand; PAM type: YTN; PAM sequence: CTT
  source 1..20: mol_type = other DNA
tgatgcctatgggctctccc

SEQ ID NO: 30274 - DNA, 20 bp, synthetic construct
  misc_feature 1..20: note = Description of Artificial Sequence: Synthetic oligonucleotide
  misc_feature 1..20: note = Target: FXN; (+) strand; PAM type: YTN; PAM sequence: TTT
  source 1..20: mol_type = other DNA
gatgcctatgggctctccct

SEQ ID NO: 30275 - DNA, 20 bp, synthetic construct
  misc_feature 1..20: note = Description of Artificial Sequence: Synthetic oligonucleotide
  misc_feature 1..20: note = Target: FXN; (+) strand; PAM type: YTN; PAM sequence: TTG
  source 1..20: mol_type = other DNA
atgcctatgggctctccctt

SEQ ID NO: 30276 - DNA, 20 bp, synthetic construct
  misc_feature 1..20: note = Description of Artificial Sequence: Synthetic oligonucleotide
  misc_feature 1..20: note = Target: FXN; (+) strand; PAM type: YTN; PAM sequence: CTA
  source 1..20: mol_type = other DNA
tgggctctccctttatggtt

SEQ ID NO: 30277 - DNA, 20 bp, synthetic construct
  misc_feature 1..20: note = Description of Artificial Sequence: Synthetic oligonucleotide
  misc_feature 1..20: note = Target: FXN; (+) strand; PAM type: YTN; PAM sequence: CTC
  source 1..20: mol_type = other DNA
tccctttatggtttcaagga

SEQ ID NO: 30278 - DNA, 20 bp, synthetic construct
  misc_feature 1..20: note = Description of Artificial Sequence: Synthetic oligonucleotide
  misc_feature 1..20: note = Target: FXN; (+) strand; PAM type: YTN; PAM sequence: CTC
  source 1..20: mol_type = other DNA
cctttatggtttcaaggagg

SEQ ID NO: 30279 - DNA, 20 bp, synthetic construct
  misc_feature 1..20: note = Description of Artificial Sequence: Synthetic oligonucleotide
  misc_feature 1..20: note = Target: FXN; (+) strand; PAM type: YTN; PAM sequence: CTT
  source 1..20: mol_type = other DNA
tatggtttcaaggagggctt

SEQ ID NO: 30280 - DNA, 20 bp, synthetic construct
  misc_feature 1..20: note = Description of Artificial Sequence: Synthetic oligonucleotide
  misc_feature 1..20: note = Target: FXN; (+) strand; PAM type: YTN; PAM sequence: TTT
  source 1..20: mol_type = other DNA
atggtttcaaggagggcttc

SEQ ID NO: 30281 - DNA, 20 bp, synthetic construct
  misc_feature 1..20: note = Description of Artificial Sequence: Synthetic oligonucleotide
  misc_feature 1..20: note = Target: FXN; (+) strand; PAM type: YTN; PAM sequence: TTA
  source 1..20: mol_type = other DNA
tggtttcaaggagggcttct

SEQ ID NO: 30282 - DNA, 20 bp, synthetic construct
  misc_feature 1..20: note = Description of Artificial Sequence: Synthetic oligonucleotide
  misc_feature 1..20: note = Target: FXN; (+) strand; PAM type: YTN; PAM sequence: TTT
  source 1..20: mol_type = other DNA
caaggagggcttctcaatct

SEQ ID NO: 30283 - DNA, 20 bp, synthetic construct
  misc_feature 1..20: note = Description of Artificial Sequence: Synthetic oligonucleotide
  misc_feature 1..20: note = Target: FXN; (+) strand; PAM type: YTN; PAM sequence: TTC
  source 1..20: mol_type = other DNA
aaggagggcttctcaatctt

SEQ ID NO: 30284 - DNA, 20 bp, synthetic construct
  misc_feature 1..20: note = Description of Artificial Sequence: Synthetic oligonucleotide
  misc_feature 1..20: note = Target: FXN; (+) strand; PAM type: YTN; PAM sequence: CTT
  source 1..20: mol_type = other DNA
ctcaatcttggcagaatttt

SEQ ID NO: 30285 - DNA, 20 bp, synthetic construct
  misc_feature 1..20: note = Description of Artificial Sequence: Synthetic oligonucleotide
  misc_feature 1..20: note = Target: FXN; (+) strand; PAM type: YTN; PAM sequence: TTC
  source 1..20: mol_type = other DNA
tcaatcttggcagaattttg

SEQ ID NO: 30286 - DNA, 20 bp, synthetic construct
  misc_feature 1..20: note = Description of Artificial Sequence: Synthetic oligonucleotide
  misc_feature 1..20: note = Target: FXN; (+) strand; PAM type: YTN; PAM sequence: CTC
  source 1..20: mol_type = other DNA
aatcttggcagaattttgga

SEQ ID NO: 30287 - DNA, 20 bp, synthetic construct
  misc_feature 1..20: note = Description of Artificial Sequence: Synthetic oligonucleotide
  misc_feature 1..20: note = Target: FXN; (+) strand; PAM type: YTN; PAM sequence: CTT
  source 1..20: mol_type = other DNA
ggcagaattttggactggat

SEQ ID NO: 30288 - DNA, 20 bp, synthetic construct
  misc_feature 1..20: note = Description of Artificial Sequence: Synthetic oligonucleotide
  misc_feature 1..20: note = Target: FXN; (+) strand; PAM type: YTN; PAM sequence: TTG
  source 1..20: mol_type = other DNA
gcagaattttggactggata

SEQ ID NO: 30289 - DNA, 20 bp, synthetic construct
  misc_feature 1..20: note = Description of Artificial Sequence: Synthetic oligonucleotide
  misc_feature 1..20: note = Target: FXN; (+) strand; PAM type: YTN; PAM sequence: TTT
  source 1..20: mol_type = other DNA
tggactggatagttctttgt

SEQ ID NO: 30290 - DNA, 20 bp, synthetic construct
  misc_feature 1..20: note = Description of Artificial Sequence: Synthetic oligonucleotide
  misc_feature 1..20: note = Target: FXN; (+) strand; PAM type: YTN; PAM sequence: TTT
  source 1..20: mol_type = other DNA
ggactggatagttctttgtt

SEQ ID NO: 30291 - DNA, 20 bp, synthetic construct
  misc_feature 1..20: note = Description of Artificial Sequence: Synthetic oligonucleotide
  misc_feature 1..20: note = Target: FXN; (+) strand; PAM type: YTN; PAM sequence: TTG
  source 1..20: mol_type = other DNA
gactggatagttctttgttg

SEQ ID NO: 30292 - DNA, 20 bp, synthetic construct
  misc_feature 1..20: note = Description of Artificial Sequence: Synthetic oligonucleotide
  misc_feature 1..20: note = Target: FXN; (+) strand; PAM type: YTN; PAM sequence: CTG
  source 1..20: mol_type = other DNA
gatagttctttgttgcacag

SEQ ID NO: 30293 - DNA, 20 bp, synthetic construct
  misc_feature 1..20: note = Description of Artificial Sequence: Synthetic oligonucleotide
  misc_feature 1..20: note = Target: FXN; (+) strand; PAM type: YTN; PAM sequence: TTC
  source 1..20: mol_type = other DNA
tttgttgcacaggtgggggg

SEQ ID NO: 30294 - DNA, 20 bp, synthetic construct
  misc_feature 1..20: note = Description of Artificial Sequence: Synthetic oligonucleotide
  misc_feature 1..20: note = Target: FXN; (+) strand; PAM type: YTN; PAM sequence: CTT
  source 1..20: mol_type = other DNA
tgttgcacaggtggggggct

SEQ ID NO: 30295 - DNA, 20 bp, synthetic construct
  misc_feature 1..20: note = Description of Artificial Sequence: Synthetic oligonucleotide
  misc_feature 1..20: note = Target: FXN; (+) strand; PAM type: YTN; PAM sequence: TTT
  source 1..20: mol_type = other DNA
gttgcacaggtggggggctg

SEQ ID NO: 30296 - DNA, 20 bp, synthetic construct
  misc_feature 1..20: note = Description of Artificial Sequence: Synthetic oligonucleotide
  misc_feature 1..20: note = Target: FXN; (+) strand; PAM type: YTN; PAM sequence: TTG
  source 1..20: mol_type = other DNA
ttgcacaggtggggggctgt

SEQ ID NO: 30297 - DNA, 20 bp, synthetic construct
  misc_feature 1..20: note = Description of Artificial Sequence: Synthetic oligonucleotide
  misc_feature 1..20: note = Target: FXN; (+) strand; PAM type: YTN; PAM sequence: TTG
  source 1..20: mol_type = other DNA
cacaggtggggggctgtcct

SEQ ID NO: 30298 - DNA, 20 bp, synthetic construct
  misc_feature 1..20: note = Description of Artificial Sequence: Synthetic oligonucleotide
  misc_feature 1..20: note = Target: FXN; (+) strand; PAM type: YTN; PAM sequence: CTG
  source 1..20: mol_type = other DNA
tcctgcacatcacaggatgt

SEQ ID NO: 30299 - DNA, 20 bp, synthetic construct
  misc_feature 1..20: note = Description of Artificial Sequence: Synthetic oligonucleotide
  misc_feature 1..20: note = Target: FXN; (+) strand; PAM type: YTN; PAM sequence: CTG
  source 1..20: mol_type = other DNA
cacatcacaggatgtttcat

SEQ ID NO: 30300 - DNA, 20 bp, synthetic construct
  misc_feature 1..20: note = Description of Artificial Sequence: Synthetic oligonucleotide
  misc_feature 1..20: note = Target: FXN; (+) strand; PAM type: YTN; PAM sequence: TTT
  source 1..20: mol_type = other DNA
catccctggcctctacctac

SEQ ID NO: 30301 - DNA, 20 bp, synthetic construct
  misc_feature 1..20: note = Description of Artificial Sequence: Synthetic oligonucleotide
  misc_feature 1..20: note = Target: FXN; (+) strand; PAM type: YTN; PAM sequence: TTC
  source 1..20: mol_type = other DNA
atccctggcctctacctact

SEQ ID NO: 30302 - DNA, 20 bp, synthetic construct
  misc_feature 1..20: note = Description of Artificial Sequence: Synthetic oligonucleotide
  misc_feature 1..20: note = Target: FXN; (+) strand; PAM type: YTN; PAM sequence: CTG
  source 1..20: mol_type = other DNA
gcctctacctactagatgcc

SEQ ID NO: 30303 - DNA, 20 bp, synthetic construct
  misc_feature 1..20: note = Description of Artificial Sequence: Synthetic oligonucleotide
  misc_feature 1..20: note = Target: FXN; (+) strand; PAM type: YTN; PAM sequence: CTC
  source 1..20: mol_type = other DNA
tacctactagatgccagtag

SEQ ID NO: 30304 - DNA, 20 bp, synthetic construct
  misc_feature 1..20: note = Description of Artificial Sequence: Synthetic oligonucleotide
  misc_feature 1..20: note = Target: FXN; (+) strand; PAM type: YTN; PAM sequence: CTA
  source 1..20: mol_type = other DNA
cctactagatgccagtagaa

SEQ ID NO: 30305 - DNA, 20 bp, synthetic construct
  misc_feature 1..20: note = Description of Artificial Sequence: Synthetic oligonucleotide
  misc_feature 1..20: note = Target: FXN; (+) strand; PAM type: YTN; PAM sequence: CTA
  source 1..20: mol_type = other DNA
ctagatgccagtagaacata

SEQ ID NO: 30306 - DNA, 20 bp, synthetic construct
  misc_feature 1..20: note = Description of Artificial Sequence: Synthetic oligonucleotide
  misc_feature 1..20: note = Target: FXN; (+) strand; PAM type: YTN; PAM sequence: CTA
  source 1..20: mol_type = other DNA
gatgccagtagaacataccc

SEQ ID NO: 30307 - DNA, 20 bp, synthetic construct
  misc_feature 1..20: note = Description of Artificial Sequence: Synthetic oligonucleotide
  misc_feature 1..20: note = Target: FXN; (+) strand; PAM type: YTN; PAM sequence: CTG
  source 1..20: mol_type = other DNA
cctgttgtgacaatcaaaag

SEQ ID NO: 30308 - DNA, 20 bp, synthetic construct
  misc_feature 1..20: note = Description of Artificial Sequence: Synthetic oligonucleotide
  misc_feature 1..20: note = Target: FXN; (+) strand; PAM type: YTN; PAM sequence: CTG
  source 1..20: mol_type = other DNA
ttgtgacaatcaaaagcatc

SEQ ID NO: 30309 - DNA, 20 bp, synthetic construct
  misc_feature 1..20: note = Description of Artificial Sequence: Synthetic oligonucleotide
  misc_feature 1..20: note = Target: FXN; (+) strand; PAM type: YTN; PAM sequence: TTG
  source 1..20: mol_type = other DNA
tgacaatcaaaagcatctcc

SEQ ID NO: 30310 - DNA, 20 bp, synthetic construct
  misc_feature 1..20: note = Description of Artificial Sequence: Synthetic oligonucleotide
  misc_feature 1..20: note = Target: FXN; (+) strand; PAM type: YTN; PAM sequence: CTC
  source 1..20: mol_type = other DNA
cagatactttgcagggggaa

SEQ ID NO: 30311 - DNA, 20 bp, synthetic construct
  misc_feature 1..20: note = Description of Artificial Sequence: Synthetic oligonucleotide
  misc_feature 1..20: note = Target: FXN; (+) strand; PAM type: YTN; PAM sequence: CTT
  source 1..20: mol_type = other DNA
tgcagggggaaaatgatttc

SEQ ID NO: 30312 - DNA, 20 bp, synthetic construct
  misc_feature 1..20: note = Description of Artificial Sequence: Synthetic oligonucleotide
  misc_feature 1..20: note = Target: FXN; (+) strand; PAM type: YTN; PAM sequence: TTT
  source 1..20: mol_type = other DNA
gcagggggaaaatgatttct

SEQ ID NO: 30313 - DNA, 20 bp, synthetic construct
  misc_feature 1..20: note = Description of Artificial Sequence: Synthetic oligonucleotide
  misc_feature 1..20: note = Target: FXN; (+) strand; PAM type: YTN; PAM sequence: TTG
  source 1..20: mol_type = other DNA
cagggggaaaatgatttctc

SEQ ID NO: 30314 - DNA, 20 bp, synthetic construct
  misc_feature 1..20: note = Description of Artificial Sequence: Synthetic oligonucleotide
  misc_feature 1..20: note = Target: FXN; (+) strand; PAM type: YTN; PAM sequence: TTT
  source 1..20: mol_type = other DNA
ctccaggcctggcatataca

SEQ ID NO: 30315 - DNA, 20 bp, synthetic construct
  misc_feature 1..20: note = Description of Artificial Sequence: Synthetic oligonucleotide
  misc_feature 1..20: note = Target: FXN; (+) strand; PAM type: YTN; PAM sequence: TTC
  source 1..20: mol_type = other DNA
tccaggcctggcatatacat

SEQ ID NO: 30316 - DNA, 20 bp, synthetic construct
  misc_feature 1..20: note = Description of Artificial Sequence: Synthetic oligonucleotide
  misc_feature 1..20: note = Target: FXN; (+) strand; PAM type: YTN; PAM sequence: CTC
  source 1..20: mol_type = other DNA
caggcctggcatatacataa

SEQ ID NO: 30317 - DNA, 20 bp, synthetic construct
  misc_feature 1..20: note = Description of Artificial Sequence: Synthetic oligonucleotide
  misc_feature 1..20: note = Target: FXN; (+) strand; PAM type: YTN; PAM sequence: CTG
  source 1..20: mol_type = other DNA
gcatatacataacagtattt

SEQ ID NO: 30318 - DNA, 20 bp, synthetic construct
  misc_feature 1..20: note = Description of Artificial Sequence: Synthetic oligonucleotide
  misc_feature 1..20: note = Target: FXN; (+) strand; PAM type: YTN; PAM sequence: TTT
  source 1..20: mol_type = other DNA
aagcagctgcctagaattaa

SEQ ID NO: 30319 - DNA, 20 bp, synthetic construct
  misc_feature 1..20: note = Description of Artificial Sequence: Synthetic oligonucleotide
  misc_feature 1..20: note = Target: FXN; (+) strand; PAM type: YTN; PAM sequence: TTA
  source 1..20: mol_type = other DNA
agcagctgcctagaattaat

SEQ ID NO: 30320 - DNA, 20 bp, synthetic construct
  misc_feature 1..20: note = Description of Artificial Sequence: Synthetic oligonucleotide
  misc_feature 1..20: note = Target: FXN; (+) strand; PAM type: YTN; PAM sequence: CTG
  source 1..20: mol_type = other DNA
cctagaattaattaaacaca

SEQ ID NO: 30321 - DNA, 20 bp, synthetic construct
  misc_feature 1..20: note = Description of Artificial Sequence: Synthetic oligonucleotide
  misc_feature 1..20: note = Target: FXN; (+) strand; PAM type: YTN; PAM sequence: CTA
  source 1..20: mol_type = other DNA
gaattaattaaacacagaag

SEQ ID NO: 30322 - DNA, 20 bp, synthetic construct
  misc_feature 1..20: note = Description of Artificial Sequence: Synthetic oligonucleotide
  misc_feature 1..20: note = Target: FXN; (+) strand; PAM type: YTN; PAM sequence: TTA
  source 1..20: mol_type = other DNA
attaaacacagaaggatgtc

SEQ ID NO: 30323 - DNA, 20 bp, synthetic construct
  misc_feature 1..20: note = Description of Artificial Sequence: Synthetic oligonucleotide
  misc_feature 1..20: note = Target: FXN; (+) strand; PAM type: YTN; PAM sequence: TTA
  source 1..20: mol_type = other DNA
aacacagaaggatgtctctc

SEQ ID NO: 30324 - DNA, 20 bp, synthetic construct
  misc_feature 1..20: note = Description of Artificial Sequence: Synthetic oligonucleotide
  misc_feature 1..20: note = Target: FXN; (+) strand; PAM type: YTN; PAM sequence: CTC
  source 1..20: mol_type = other DNA
tcatccagaatgccctggac

SEQ ID NO: 30325 - DNA, 20 bp, synthetic construct
  misc_feature 1..20: note = Description of Artificial Sequence: Synthetic oligonucleotide
  misc_feature 1..20: note = Target: FXN; (+) strand; PAM type: YTN; PAM sequence: CTC
  source 1..20: mol_type = other DNA
atccagaatgccctggacca

SEQ ID NO: 30326 - DNA, 20 bp, synthetic construct
  misc_feature 1..20: note = Description of Artificial Sequence: Synthetic oligonucleotide
  misc_feature 1..20: note = Target: FXN; (+) strand; PAM type: YTN; PAM sequence: CTG
  source 1..20: mol_type = other DNA
gaccacctctttgataggca

SEQ ID NO: 30327 - DNA, 20 bp, synthetic construct
  misc_feature 1..20: note = Description of Artificial Sequence: Synthetic oligonucleotide
  misc_feature 1..20: note = Target: FXN; (+) strand; PAM type: YTN; PAM sequence: CTC
  source 1..20: mol_type = other DNA
tttgataggcaatcagatcc

SEQ ID NO: 30328 - DNA, 20 bp, synthetic construct
  misc_feature 1..20: note = Description of Artificial Sequence: Synthetic oligonucleotide
  misc_feature 1..20: note = Target: FXN; (+) strand; PAM type: YTN; PAM sequence: CTT
  source 1..20: mol_type = other DNA
tgataggcaatcagatccca

SEQ ID NO: 30329 - DNA, 20 bp, synthetic construct
  misc_feature 1..20: note = Description of Artificial Sequence: Synthetic oligonucleotide
  misc_feature 1..20: note = Target: FXN; (+) strand; PAM type: YTN; PAM sequence: TTT
  source 1..20: mol_type = other DNA
gataggcaatcagatcccac

SEQ ID NO: 30330 - DNA, 20 bp, synthetic construct
  misc_feature 1..20: note = Description of Artificial Sequence: Synthetic oligonucleotide
  misc_feature 1..20: note = Target: FXN; (+) strand; PAM type: YTN; PAM sequence: TTG
  source 1..20: mol_type = other DNA
ataggcaatcagatcccacc

SEQ ID NO: 30331 - DNA, 20 bp, synthetic construct
  misc_feature 1..20: note = Description of Artificial Sequence: Synthetic oligonucleotide
  misc_feature 1..20: note = Target: FXN; (+) strand; PAM type: YTN; PAM sequence: CTC
  source 1..20: mol_type = other DNA
ctccaccctatttttgaagg

SEQ ID NO: 30332 - DNA, 20 bp, synthetic construct
  misc_feature 1..20: note = Description of Artificial Sequence: Synthetic oligonucleotide
  misc_feature 1..20: note = Target: FXN; (+) strand; PAM type: YTN; PAM sequence: CTC
  source 1..20: mol_type = other DNA
caccctatttttgaaggccc

SEQ ID NO: 30333 - DNA, 20 bp, synthetic construct
  misc_feature 1..20: note = Description of Artificial Sequence: Synthetic oligonucleotide
  misc_feature 1..20: note = Target: FXN; (+) strand; PAM type: YTN; PAM sequence: CTA
  source 1..20: mol_type = other DNA
tttttgaaggccctgtgcca

SEQ ID NO: 30334 - DNA, 20 bp, synthetic construct
  misc_feature 1..20: note = Description of Artificial Sequence: Synthetic oligonucleotide
  misc_feature 1..20: note = Target: FXN; (+) strand; PAM type: YTN; PAM sequence: TTT
  source 1..20: mol_type = other DNA
ttgaaggccctgtgccaaca

SEQ ID NO: 30335 - DNA, 20 bp, synthetic construct
  misc_feature 1..20: note = Description of Artificial Sequence: Synthetic oligonucleotide
  misc_feature 1..20: note = Target: FXN; (+) strand; PAM type: YTN; PAM sequence: TTT
  source 1..20: mol_type = other DNA
tgaaggccctgtgccaacac

SEQ ID NO: 30336 - DNA, 20 bp, synthetic construct
  misc_feature 1..20: note = Description of Artificial Sequence: Synthetic oligonucleotide
  misc_feature 1..20: note = Target: FXN; (+) strand; PAM type: YTN; PAM sequence: TTT
  source 1..20: mol_type = other DNA
gaaggccctgtgccaacacc

SEQ ID NO: 30337 - DNA, 20 bp, synthetic construct
  misc_feature 1..20: note = Description of Artificial Sequence: Synthetic oligonucleotide
  misc_feature 1..20: note = Target: FXN; (+) strand; PAM type: YTN; PAM sequence: TTG
  source 1..20: mol_type = other DNA
aaggccctgtgccaacacca

SEQ ID NO: 30338 - DNA, 20 bp, synthetic construct
  misc_feature 1..20: note = Description of Artificial Sequence: Synthetic oligonucleotide
  misc_feature 1..20: note = Target: FXN; (+) strand; PAM type: YTN; PAM sequence: CTG
  source 1..20: mol_type = other DNA
tgccaacaccacttcttcca

SEQ ID NO: 30339 - DNA, 20 bp, synthetic construct
  misc_feature 1..20: note = Description of Artificial Sequence: Synthetic oligonucleotide
  misc_feature 1..20: note = Target: FXN; (+) strand; PAM type: YTN; PAM sequence: CTT
  source 1..20: mol_type = other DNA
cttccatgaatacttccttg

SEQ ID NO: 30340 - DNA, 20 bp, synthetic construct
  misc_feature 1..20: note = Description of Artificial Sequence: Synthetic oligonucleotide
  misc_feature 1..20: note = Target: FXN; (+) strand; PAM type: YTN; PAM sequence: TTC
  source 1..20: mol_type = other DNA
ttccatgaatacttccttga

SEQ ID NO: 30341 - DNA, 20 bp, synthetic construct
  misc_feature 1..20: note = Description of Artificial Sequence: Synthetic oligonucleotide
  misc_feature 1..20: note = Target: FXN; (+) strand; PAM type: YTN; PAM sequence: CTT
  source 1..20: mol_type = other DNA
ccatgaatacttccttgatt

SEQ ID NO: 30342 - DNA, 20 bp, synthetic construct
  misc_feature 1..20: note = Description of Artificial Sequence: Synthetic oligonucleotide
  misc_feature 1..20: note = Target: FXN; (+) strand; PAM type: YTN; PAM sequence: TTC
  source 1..20: mol_type = other DNA
catgaatacttccttgattc

SEQ ID NO: 30343 - DNA, 20 bp, synthetic construct
  misc_feature 1..20: note = Description of Artificial Sequence: Synthetic oligonucleotide
  misc_feature 1..20: note = Target: FXN; (+) strand; PAM type: YTN; PAM sequence: CTT
  source 1..20: mol_type = other DNA
ccttgattcccccatcccta

SEQ ID NO: 30344 - DNA, 20 bp, synthetic construct
  misc_feature 1..20: note = Description of Artificial Sequence: Synthetic oligonucleotide
  misc_feature 1..20: note = Target: FXN; (+) strand; PAM type: YTN; PAM sequence: TTC
  source 1..20: mol_type = other DNA
cttgattcccccatccctag

SEQ ID NO: 30345 - DNA, 20 bp, synthetic construct
  misc_feature 1..20: note = Description of Artificial Sequence: Synthetic oligonucleotide
  misc_feature 1..20: note = Target: FXN; (+) strand; PAM type: YTN; PAM sequence: CTT
  source 1..20: mol_type = other DNA
gattcccccatccctagctc

SEQ ID NO: 30346 - DNA, 20 bp, synthetic construct
  misc_feature 1..20: note = Description of Artificial Sequence: Synthetic oligonucleotide
  misc_feature 1..20: note = Target: FXN; (+) strand; PAM type: YTN; PAM sequence: TTG
  source 1..20: mol_type = other DNA
attcccccatccctagctct

SEQ ID NO: 30347 - DNA, 20 bp, synthetic construct
  misc_feature 1..20: note = Description of Artificial Sequence: Synthetic oligonucleotide
  misc_feature 1..20: note = Target: FXN; (+) strand; PAM type: YTN; PAM sequence: TTC
  source 1..20: mol_type = other DNA
ccccatccctagctctatat

SEQ ID NO: 30348 - DNA, 20 bp, synthetic construct
  misc_feature 1..20: note = Description of Artificial Sequence: Synthetic oligonucleotide
  misc_feature 1..20: note = Target: FXN; (+) strand; PAM type: YTN; PAM sequence: CTA
  source 1..20: mol_type = other DNA
gctctatataaatctcccac

SEQ ID NO: 30349 - DNA, 20 bp, synthetic construct
  misc_feature 1..20: note = Description of Artificial Sequence: Synthetic oligonucleotide
  misc_feature 1..20: note = Target: FXN; (+) strand; PAM type: YTN; PAM sequence: CTC
  source 1..20: mol_type = other DNA
tatataaatctcccactcaa

SEQ ID NO: 30350 - DNA, 20 bp, synthetic construct
  misc_feature 1..20: note = Description of Artificial Sequence: Synthetic oligonucleotide
  misc_feature 1..20: note = Target: FXN; (+) strand; PAM type: YTN; PAM sequence: CTA
  source 1..20: mol_type = other DNA
tataaatctcccactcaaca

SEQ ID NO: 30351 - DNA, 20 bp, synthetic construct
  misc_feature 1..20: note = Description of Artificial Sequence: Synthetic oligonucleotide
  misc_feature 1..20: note = Target: FXN; (+) strand; PAM type: YTN; PAM sequence: CTC
  source 1..20: mol_type = other DNA
ccactcaacactcacacctg

SEQ ID NO: 30352 - DNA, 20 bp, synthetic construct
  misc_feature 1..20: note = Description of Artificial Sequence: Synthetic oligonucleotide
  misc_feature 1..20: note = Target: FXN; (+) strand; PAM type: YTN; PAM sequence: CTC
  source 1..20: mol_type = other DNA
aacactcacacctgttagtt

SEQ ID NO: 30353 - DNA, 20 bp, synthetic construct
  misc_feature 1..20: note = Description of Artificial Sequence: Synthetic oligonucleotide
  misc_feature 1..20: note = Target: FXN; (+) strand; PAM type: YTN; PAM sequence: CTC
  source 1..20: mol_type = other DNA
acacctgttagtttacattc

SEQ ID NO: 30354 - DNA, 20 bp, synthetic construct
  misc_feature 1..20: note = Description of Artificial Sequence: Synthetic oligonucleotide
  misc_feature 1..20: note = Target: FXN; (+) strand; PAM type: YTN; PAM sequence: CTG
  source 1..20: mol_type = other DNA
ttagtttacattcctcttga

SEQ ID NO: 30355 - DNA, 20 bp, synthetic construct
  misc_feature 1..20: note = Description of Artificial Sequence: Synthetic oligonucleotide
  misc_feature 1..20: note = Target: FXN; (+) strand; PAM type: YTN; PAM sequence: TTA
  source 1..20: mol_type = other DNA
gtttacattcctcttgacac

SEQ ID NO: 30356 - DNA, 20 bp, synthetic construct
  misc_feature 1..20: note = Description of Artificial Sequence: Synthetic oligonucleotide
  misc_feature 1..20: note = Target: FXN; (+) strand; PAM type: YTN; PAM sequence: TTT
  source 1..20: mol_type = other DNA
acattcctcttgacacttgt

SEQ ID NO: 30357 - DNA, 20 bp, synthetic construct
  misc_feature 1..20: note = Description of Artificial Sequence: Synthetic oligonucleotide
  misc_feature 1..20: note = Target: FXN; (+) strand; PAM type: YTN; PAM sequence: TTA
  source 1..20: mol_type = other DNA
cattcctcttgacacttgtc

SEQ ID NO: 30358 - DNA, 20 bp, synthetic construct
  misc_feature 1..20: note = Description of Artificial Sequence: Synthetic oligonucleotide
  misc_feature 1..20: note = Target: FXN; (+) strand; PAM type: YTN; PAM sequence: TTC
  source 1..20: mol_type = other DNA
ctcttgacacttgtcattta

SEQ ID NO: 30359 - DNA, 20 bp, synthetic construct
  misc_feature 1..20: note = Description of Artificial Sequence: Synthetic oligonucleotide
  misc_feature 1..20: note = Target: FXN; (+) strand; PAM type: YTN; PAM sequence: CTC
  source 1..20: mol_type = other DNA
ttgacacttgtcatttagca

SEQ ID NO: 30360 - DNA, 20 bp, synthetic construct
  misc_feature 1..20: note = Description of Artificial Sequence: Synthetic oligonucleotide
  misc_feature 1..20: note = Target: FXN; (+) strand; PAM type: YTN; PAM sequence: CTT
  source 1..20: mol_type = other DNA
gacacttgtcatttagcatc

SEQ ID NO: 30361 - DNA, 20 bp, synthetic construct
  misc_feature 1..20: note = Description of Artificial Sequence: Synthetic oligonucleotide
  misc_feature 1..20: note = Target: FXN; (+) strand; PAM type: YTN; PAM sequence: TTG
  source 1..20: mol_type = other DNA
acacttgtcatttagcatcc

SEQ ID NO: 30362 - DNA, 20 bp, synthetic construct
  misc_feature 1..20: note = Description of Artificial Sequence: Synthetic oligonucleotide
  misc_feature 1..20: note = Target: FXN; (+) strand; PAM type: YTN; PAM sequence: CTT
  source 1..20: mol_type = other DNA
gtcatttagcatcctaagta

SEQ ID NO: 30363 - DNA, 20 bp, synthetic construct
  misc_feature 1..20: note = Description of Artificial Sequence: Synthetic oligonucleotide
  misc_feature 1..20: note = Target: FXN; (+) strand; PAM type: YTN; PAM sequence: TTG
  source 1..20: mol_type = other DNA
tcatttagcatcctaagtat

SEQ ID NO: 30364 - DNA, 20 bp, synthetic construct
  misc_feature 1..20: note = Description of Artificial Sequence: Synthetic oligonucleotide
  misc_feature 1..20: note = Target: FXN; (+) strand; PAM type: YTN; PAM sequence: TTT
  source 1..20: mol_type = other DNA
agcatcctaagtatgtaaac

SEQ ID NO: 30365 - DNA, 20 bp, synthetic construct
  misc_feature 1..20: note = Description of Artificial Sequence: Synthetic oligonucleotide
  misc_feature 1..20: note = Target: FXN; (+) strand; PAM type: YTN; PAM sequence: TTA
  source 1..20: mol_type = other DNA
gcatcctaagtatgtaaaca

SEQ ID NO: 30366 - DNA, 20 bp, synthetic construct
  misc_feature 1..20: note = Description of Artificial Sequence: Synthetic oligonucleotide
  misc_feature 1..20: note = Target: FXN; (+) strand; PAM type: YTN; PAM sequence: CTA
  source 1..20: mol_type = other DNA
agtatgtaaacatgtctctc

SEQ ID NO: 30367 - DNA, 20 bp, synthetic construct
  misc_feature 1..20: note = Description of Artificial Sequence: Synthetic oligonucleotide
  misc_feature 1..20: note = Target: FXN; (+) strand; PAM type: YTN; PAM sequence: CTC
  source 1..20: mol_type = other DNA
tcttcacgattcacaaagtg

SEQ ID NO: 30368 - DNA, 20 bp, synthetic construct
  misc_feature 1..20: note = Description of Artificial Sequence: Synthetic oligonucleotide
  misc_feature 1..20: note = Target: FXN; (+) strand; PAM type: YTN; PAM sequence: CTC
  source 1..20: mol_type = other DNA
ttcacgattcacaaagtggc

SEQ ID NO: 30369 - DNA, 20 bp, synthetic construct
  misc_feature 1..20: note = Description of Artificial Sequence: Synthetic oligonucleotide
  misc_feature 1..20: note = Target: FXN; (+) strand; PAM type: YTN; PAM sequence: CTT
  source 1..20: mol_type = other DNA
cacgattcacaaagtggctt

SEQ ID NO: 30370 - DNA, 20 bp, synthetic construct
  misc_feature 1..20: note = Description of Artificial Sequence: Synthetic oligonucleotide
  misc_feature 1..20: note = Target: FXN; (+) strand; PAM type: YTN; PAM sequence: TTC
  source 1..20: mol_type = other DNA
acgattcacaaagtggcttt

SEQ ID NO: 30371 - DNA, 20 bp, synthetic construct
  misc_feature 1..20: note = Description of Artificial Sequence: Synthetic oligonucleotide
  misc_feature 1..20: note = Target: FXN; (+) strand; PAM type: YTN; PAM sequence: TTC
  source 1..20: mol_type = other DNA
acaaagtggctttggaagaa

SEQ ID NO: 30372 - DNA, 20 bp, synthetic construct
  misc_feature 1..20: note = Description of Artificial Sequence: Synthetic oligonucleotide
  misc_feature 1..20: note = Target: FXN; (+) strand; PAM type: YTN; PAM sequence: CTT
  source 1..20: mol_type = other DNA
tggaagaactttagtacctt

SEQ ID NO: 30373 - DNA, 20 bp, synthetic construct
  misc_feature 1..20: note = Description of Artificial Sequence: Synthetic oligonucleotide
  misc_feature 1..20: note = Target: FXN; (+) strand; PAM type: YTN; PAM sequence: TTT
  source 1..20: mol_type = other DNA
ggaagaactttagtaccttc

SEQ ID NO: 30374 - DNA, 20 bp, synthetic construct
  misc_feature 1..20: note = Description of Artificial Sequence: Synthetic oligonucleotide
  misc_feature 1..20: note = Target: FXN; (+) strand; PAM type: YTN; PAM sequence: TTG
  source 1..20: mol_type = other DNA
gaagaactttagtaccttcc

SEQ ID NO: 30375 - DNA, 20 bp, synthetic construct
  misc_feature 1..20: note = Description of Artificial Sequence: Synthetic oligonucleotide
  misc_feature 1..20: note = Target: FXN; (+) strand; PAM type: YTN; PAM sequence: CTT
  source 1..20: mol_type = other DNA
tagtaccttcccatcttctc

SEQ ID NO: 30376 - DNA, 20 bp, synthetic construct
  misc_feature 1..20: note = Description of Artificial Sequence: Synthetic oligonucleotide
  misc_feature 1..20: note = Target: FXN; (+) strand; PAM type: YTN; PAM sequence: TTT
  source 1..20: mol_type = other DNA
agtaccttcccatcttctct

SEQ ID NO: 30377 - DNA, 20 bp, synthetic construct
  misc_feature 1..20: note = Description of Artificial Sequence: Synthetic oligonucleotide
  misc_feature 1..20: note = Target: FXN; (+) strand; PAM type: YTN; PAM sequence: TTA
  source 1..20: mol_type = other DNA
gtaccttcccatcttctctg

SEQ ID NO: 30378 - DNA, 20 bp, synthetic construct
  misc_feature 1..20: note = Description of Artificial Sequence: Synthetic oligonucleotide
  misc_feature 1..20: note = Target: FXN; (+) strand; PAM type: YTN; PAM sequence: CTT
  source 1..20: mol_type = other DNA
cccatcttctctgccatgga

SEQ ID NO: 30379 - DNA, 20 bp, synthetic construct
  misc_feature 1..20: note = Description of Artificial Sequence: Synthetic oligonucleotide
  misc_feature 1..20: note = Target: FXN; (+) strand; PAM type: YTN; PAM sequence: TTC
  source 1..20: mol_type = other DNA
ccatcttctctgccatggaa

SEQ ID NO: 30380 - DNA, 20 bp, synthetic construct
  misc_feature 1..20: note = Description of Artificial Sequence: Synthetic oligonucleotide
  misc_feature 1..20: note = Target: FXN; (+) strand; PAM type: YTN; PAM sequence: CTT
  source 1..20: mol_type = other DNA
ctctgccatggaaagtgtac

SEQ ID NO: 30381 - DNA, 20 bp, synthetic construct
  misc_feature 1..20: note = Description of Artificial Sequence: Synthetic oligonucleotide
  misc_feature 1..20: note = Target: FXN; (+) strand; PAM type: YTN; PAM sequence: TTC
  source 1..20: mol_type = other DNA
tctgccatggaaagtgtaca

SEQ ID NO: 30382 - DNA, 20 bp, synthetic construct
  misc_feature 1..20: note = Description of Artificial Sequence: Synthetic oligonucleotide
  misc_feature 1..20: note = Target: FXN; (+) strand; PAM type: YTN; PAM sequence: CTC
  source 1..20: mol_type = other DNA
tgccatggaaagtgtacaca

SEQ ID NO: 30383 - DNA, 20 bp, synthetic construct
  misc_feature 1..20: note = Description of Artificial Sequence: Synthetic oligonucleotide
  misc_feature 1..20: note = Target: FXN; (+) strand; PAM type: YTN; PAM sequence: CTG
  source 1..20: mol_type = other DNA
ccatggaaagtgtacacaac

SEQ ID NO: 30384 - DNA, 20 bp, synthetic construct
  misc_feature 1..20: note = Description of Artificial Sequence: Synthetic oligonucleotide
  misc_feature 1..20: note = Target: FXN; (+) strand; PAM type: YTN; PAM sequence: CTG
  source 1..20: mol_type = other DNA
acattttctttttttttaag

SEQ ID NO: 30385 - DNA, 20 bp, synthetic construct
  misc_feature 1..20: note = Description of Artificial Sequence: Synthetic oligonucleotide
  misc_feature 1..20: note = Target: FXN; (+) strand; PAM type: YTN; PAM sequence: TTT
  source 1..20: mol_type = other DNA
tctttttttttaagacagta

SEQ ID NO: 30386 - DNA, 20 bp, synthetic construct
  misc_feature 1..20: note = Description of Artificial Sequence: Synthetic oligonucleotide
  misc_feature 1..20: note = Target: FXN; (+) strand; PAM type: YTN; PAM sequence: TTT
  source 1..20: mol_type = other DNA
ctttttttttaagacagtat

SEQ ID NO: 30387 - DNA, 20 bp, synthetic construct
  misc_feature 1..20: note = Description of Artificial Sequence: Synthetic oligonucleotide
  misc_feature 1..20: note = Target: FXN; (+) strand; PAM type: YTN; PAM sequence: TTC
  source 1..20: mol_type = other DNA
tttttttttaagacagtatc

SEQ ID NO: 30388 - DNA, 20 bp, synthetic construct
  misc_feature 1..20: note = Description of Artificial Sequence: Synthetic oligonucleotide
  misc_feature 1..20: note = Target: FXN; (+) strand; PAM type: YTN; PAM sequence: CTT
  source 1..20: mol_type = other DNA
tttttttaagacagtatctt

SEQ ID NO: 30389 - DNA, 20 bp, synthetic construct
  misc_feature 1..20: note = Description of Artificial Sequence: Synthetic oligonucleotide
  misc_feature 1..20: note = Target: FXN; (+) strand; PAM type: YTN; PAM sequence: TTT
  source 1..20: mol_type = other DNA
ttttttaagacagtatcttg

SEQ ID NO: 30390 - DNA, 20 bp, synthetic construct
  misc_feature 1..20: note = Description of Artificial Sequence: Synthetic oligonucleotide
  misc_feature 1..20: note = Target: FXN; (+) strand; PAM type: YTN; PAM sequence: TTT
  source 1..20: mol_type = other DNA
tttttaagacagtatcttgc

SEQ ID NO: 30391 - DNA, 20 bp, synthetic construct
  misc_feature 1..20: note = Description of Artificial Sequence: Synthetic oligonucleotide
  misc_feature 1..20: note = Target: FXN; (+) strand; PAM type: YTN; PAM sequence: TTT
  source 1..20: mol_type = other DNA
ttttaagacagtatcttgct

SEQ ID NO: 30392 - DNA, 20 bp, synthetic construct
  misc_feature 1..20: note = Description of Artificial Sequence: Synthetic oligonucleotide
  misc_feature 1..20: note = Target: FXN; (+) strand; PAM type: YTN; PAM sequence: TTT
  source 1..20: mol_type = other DNA
tttaagacagtatcttgcta

SEQ ID NO: 30393 - DNA, 20 bp, synthetic construct
  misc_feature 1..20: note = Description of Artificial Sequence: Synthetic oligonucleotide
  misc_feature 1..20: note = Target: FXN; (+) strand; PAM type: YTN; PAM sequence: TTT
  source 1..20: mol_type = other DNA
ttaagacagtatcttgctat

SEQ ID NO: 30394 - DNA, 20 bp, synthetic construct
  misc_feature 1..20: note = Description of Artificial Sequence: Synthetic oligonucleotide
  misc_feature 1..20: note = Target: FXN; (+) strand; PAM type: YTN; PAM sequence: TTT
  source 1..20: mol_type = other DNA
taagacagtatcttgctatg

SEQ ID NO: 30395 - DNA, 20 bp, synthetic construct
  misc_feature 1..20: note = Description of Artificial Sequence: Synthetic oligonucleotide
  misc_feature 1..20: note = Target: FXN; (+) strand; PAM type: YTN; PAM sequence: TTT
  source 1..20: mol_type = other DNA
aagacagtatcttgctatga

SEQ ID NO: 30396 - DNA, 20 bp, synthetic construct
  misc_feature 1..20: note = Description of Artificial Sequence: Synthetic oligonucleotide
  misc_feature 1..20: note = Target: FXN; (+) strand; PAM type: YTN; PAM sequence: TTA
  source 1..20: mol_type = other DNA
agacagtatcttgctatgat

SEQ ID NO: 30397 - DNA, 20 bp, synthetic construct
  misc_feature 1..20: note = Description of Artificial Sequence: Synthetic oligonucleotide
  misc_feature 1..20: note = Target: FXN; (+) strand; PAM type: YTN; PAM sequence: CTT
  source 1..20: mol_type = other DNA
gctatgatggccgggctgga

SEQ ID NO: 30398 - DNA, 20 bp, synthetic construct
  misc_feature 1..20: note = Description of Artificial Sequence: Synthetic oligonucleotide
  misc_feature 1..20: note = Target: FXN; (+) strand; PAM type: YTN; PAM sequence: TTG
  source 1..20: mol_type = other DNA
ctatgatggccgggctggaa

SEQ ID NO: 30399 - DNA, 20 bp, synthetic construct
  misc_feature 1..20: note = Description of Artificial Sequence: Synthetic oligonucleotide
  misc_feature 1..20: note = Target: FXN; (+) strand; PAM type: YTN; PAM sequence: CTA
  source 1..20: mol_type = other DNA
tgatggccgggctggaatgc

SEQ ID NO: 30400 - DNA, 20 bp, synthetic construct
  misc_feature 1..20: note = Description of Artificial Sequence: Synthetic oligonucleotide
  misc_feature 1..20: note = Target: FXN; (+) strand; PAM type: YTN; PAM sequence: CTG
  source 1..20: mol_type = other DNA
gaatgctgtggctattcaca

SEQ ID NO: 30401 - DNA, 20 bp, synthetic construct
  misc_feature 1..20: note = Description of Artificial Sequence: Synthetic oligonucleotide
  misc_feature 1..20: note = Target: FXN; (+) strand; PAM type: YTN; PAM sequence: CTG
  source 1..20: mol_type = other DNA
tggctattcacaggcacaat

SEQ ID NO: 30402 - DNA, 20 bp, synthetic construct
  misc_feature 1..20: note = Description of Artificial Sequence: Synthetic oligonucleotide
  misc_feature 1..20: note = Target: FXN; (+) strand; PAM type: YTN; PAM sequence: CTA
  source 1..20: mol_type = other DNA
ttcacaggcacaatcatagc

SEQ ID NO: 30403 - DNA, 20 bp, synthetic construct
  misc_feature 1..20: note = Description of Artificial Sequence: Synthetic oligonucleotide
  misc_feature 1..20: note = Target: FXN; (+) strand; PAM type: YTN; PAM sequence: TTC
  source 1..20: mol_type = other DNA
acaggcacaatcatagctca

SEQ ID NO: 30404 - DNA, 20 bp, synthetic construct
  misc_feature 1..20: note = Description of Artificial Sequence: Synthetic oligonucleotide
  misc_feature 1..20: note = Target: FXN; (+) strand; PAM type: YTN; PAM sequence: CTC
  source 1..20: mol_type = other DNA
actgcagccttgagctccca

SEQ ID NO: 30405 - DNA, 20 bp, synthetic construct
  misc_feature 1..20: note = Description of Artificial Sequence: Synthetic oligonucleotide
  misc_feature 1..20: note = Target: FXN; (+) strand; PAM type: YTN; PAM sequence: CTG
  source 1..20: mol_type = other DNA
cagccttgagctcccaggct

SEQ ID NO: 30406 - DNA, 20 bp, synthetic construct
  misc_feature 1..20: note = Description of Artificial Sequence: Synthetic oligonucleotide
  misc_feature 1..20: note = Target: FXN; (+) strand; PAM type: YTN; PAM sequence: CTT
  source 1..20: mol_type = other DNA
gagctcccaggctcaagtga

SEQ ID NO: 30407 - DNA, 20 bp, synthetic construct
  misc_feature 1..20: note = Description of Artificial Sequence: Synthetic oligonucleotide
  misc_feature 1..20: note = Target: FXN; (+) strand; PAM type: YTN; PAM sequence: TTG
  source 1..20: mol_type = other DNA
agctcccaggctcaagtgat

SEQ ID NO: 30408 - DNA, 20 bp, synthetic construct
  misc_feature 1..20: note = Description of Artificial Sequence: Synthetic oligonucleotide
  misc_feature 1..20: note = Target: FXN; (+) strand; PAM type: YTN; PAM sequence: CTC
  source 1..20: mol_type = other DNA
ccaggctcaagtgatcctcc

SEQ ID NO: 30409 - DNA, 20 bp, synthetic construct
  misc_feature 1..20: note = Description of Artificial Sequence: Synthetic oligonucleotide
  misc_feature 1..20: note = Target: FXN; (+) strand; PAM type: YTN; PAM sequence: CTC
  source 1..20: mol_type = other DNA
aagtgatcctcccgcctcag

SEQ ID NO: 30410 - DNA, 20 bp, synthetic construct
  misc_feature 1..20: note = Description of Artificial Sequence: Synthetic oligonucleotide
  misc_feature 1..20: note = Target: FXN; (+) strand; PAM type: YTN; PAM sequence: CTC
  source 1..20: mol_type = other DNA
ccgcctcagcctcctgagta

SEQ ID NO: 30411 - DNA, 20 bp, synthetic construct
  misc_feature 1..20: note = Description of Artificial Sequence: Synthetic oligonucleotide
  misc_feature 1..20: note = Target: FXN; (+) strand; PAM type: YTN; PAM sequence: CTC
  source 1..20: mol_type = other DNA
agcctcctgagtagctgaga

SEQ ID NO: 30412 - DNA, 20 bp, synthetic construct
  misc_feature 1..20: note = Description of Artificial Sequence: Synthetic oligonucleotide
  misc_feature 1..20: note = Target: FXN; (+) strand; PAM type: YTN; PAM sequence: CTC
  source 1..20: mol_type = other DNA
ctgagtagctgagatcacag

SEQ ID NO: 30413 - DNA, 20 bp, synthetic construct
  misc_feature 1..20: note = Description of Artificial Sequence: Synthetic oligonucleotide
  misc_feature 1..20: note = Target: FXN; (+) strand; PAM type: YTN; PAM sequence: CTG
  source 1..20: mol_type = other DNA
agtagctgagatcacaggca

SEQ ID NO: 30414 - DNA, 20 bp, synthetic construct
  misc_feature 1..20: note = Description of Artificial Sequence: Synthetic oligonucleotide
  misc_feature 1..20: note = Target: FXN; (+) strand; PAM type: YTN; PAM sequence: CTG
  source 1..20: mol_type = other DNA
agatcacaggcatgcactac

SEQ ID NO: 30415 - DNA, 20 bp, synthetic construct
  misc_feature 1..20: note = Description of Artificial Sequence: Synthetic oligonucleotide
  misc_feature 1..20: note = Target: FXN; (+) strand; PAM type: YTN; PAM sequence: CTA
  source 1..20: mol_type = other DNA
ccacactcggctcacatttg

SEQ ID NO: 30416 - DNA, 20 bp, synthetic construct
  misc_feature 1..20: note = Description of Artificial Sequence: Synthetic oligonucleotide
  misc_feature 1..20: note = Target: FXN; (+) strand; PAM type: YTN; PAM sequence: CTC
  source 1..20: mol_type = other DNA
ggctcacatttgacatcctc

SEQ ID NO: 30417 - DNA, 20 bp, synthetic construct
  misc_feature 1..20: note = Description of Artificial Sequence: Synthetic oligonucleotide
  misc_feature 1..20: note = Target: FXN; (+) strand; PAM type: YTN; PAM sequence: CTC
  source 1..20: mol_type = other DNA
acatttgacatcctctaaag

SEQ ID NO: 30418 - DNA, 20 bp, synthetic construct
  misc_feature 1..20: note = Description of Artificial Sequence: Synthetic oligonucleotide
  misc_feature 1..20: note = Target: FXN; (+) strand; PAM type: YTN; PAM sequence: TTT
  source 1..20: mol_type = other DNA
gacatcctctaaagcatata

SEQ ID NO: 30419 - DNA, 20 bp, synthetic construct
  misc_feature 1..20: note = Description of Artificial Sequence: Synthetic oligonucleotide
  misc_feature 1..20: note = Target: FXN; (+) strand; PAM type: YTN; PAM sequence: TTG
  source 1..20: mol_type = other DNA
acatcctctaaagcatatat

SEQ ID NO: 30420 - DNA, 20 bp, synthetic construct
  misc_feature 1..20: note = Description of Artificial Sequence: Synthetic oligonucleotide
  misc_feature 1..20: note = Target: FXN; (+) strand; PAM type: YTN; PAM sequence: CTC
  source 1..20: mol_type = other DNA
taaagcatatataaaatgtg

SEQ ID NO: 30421 - DNA, 20 bp, synthetic construct
  misc_feature 1..20: note = Description of Artificial Sequence: Synthetic oligonucleotide
  misc_feature 1..20: note = Target: FXN; (+) strand; PAM type: YTN; PAM sequence: CTA
  source 1..20: mol_type = other DNA
aagcatatataaaatgtgaa

SEQ ID NO: 30422 - DNA, 20 bp, synthetic construct
  misc_feature 1..20: note = Description of Artificial Sequence: Synthetic oligonucleotide
  misc_feature 1..20: note = Target: FXN; (+) strand; PAM type: YTN; PAM sequence: CTT
  source 1..20: mol_type = other DNA
tcacaatttgcatccctttg

SEQ ID NO: 30423 - DNA, 20 bp, synthetic construct
  misc_feature 1..20: note = Description of Artificial Sequence: Synthetic oligonucleotide
  misc_feature 1..20: note = Target: FXN; (+) strand; PAM type: YTN; PAM sequence: TTT
  source 1..20: mol_type = other DNA
cacaatttgcatccctttgt

SEQ ID NO: 30424 - DNA, 20 bp, synthetic construct
  misc_feature 1..20: note = Description of Artificial Sequence: Synthetic oligonucleotide
  misc_feature 1..20: note = Target: FXN; (+) strand; PAM type: YTN; PAM sequence: TTC
  source 1..20: mol_type = other DNA
acaatttgcatccctttgta

SEQ ID NO: 30425 - DNA, 20 bp, synthetic construct
  misc_feature 1..20: note = Description of Artificial Sequence: Synthetic oligonucleotide
  misc_feature 1..20: note = Target: FXN; (+) strand; PAM type: YTN; PAM sequence: TTT
  source 1..20: mol_type = other DNA
gcatccctttgtaatatgta

SEQ ID NO: 30426 - DNA, 20 bp, synthetic construct
  misc_feature 1..20: note = Description of Artificial Sequence: Synthetic oligonucleotide
  misc_feature 1..20: note = Target: FXN; (+) strand; PAM type: YTN; PAM sequence: TTG
  source 1..20: mol_type = other DNA
catccctttgtaatatgtaa

SEQ ID NO: 30427 - DNA, 20 bp, synthetic construct
  misc_feature 1..20: note = Description of Artificial Sequence: Synthetic oligonucleotide
  misc_feature 1..20: note = Target: FXN; (+) strand; PAM type: YTN; PAM sequence: CTT
  source 1..20: mol_type = other DNA
tgtaatatgtaacagaaata

SEQ ID NO: 30428 - DNA, 20 bp, synthetic construct
  misc_feature 1..20: note = Description of Artificial Sequence: Synthetic oligonucleotide
  misc_feature 1..20: note = Target: FXN; (+) strand; PAM type: YTN; PAM sequence: TTT
  source 1..20: mol_type = other DNA
gtaatatgtaacagaaataa

SEQ ID NO: 30429 - DNA, 20 bp, synthetic construct
  misc_feature 1..20: note = Description of Artificial Sequence: Synthetic oligonucleotide
  misc_feature 1..20: note = Target: FXN; (+) strand; PAM type: YTN; PAM sequence: TTG
  source 1..20: mol_type = other DNA
taatatgtaacagaaataaa

SEQ ID NO: 30430 - DNA, 20 bp, synthetic construct
  misc_feature 1..20: note = Description of Artificial Sequence: Synthetic oligonucleotide
  misc_feature 1..20: note = Target: FXN; (+) strand; PAM type: YTN; PAM sequence: TTC
  source 1..20: mol_type = other DNA
tcttttaaaatctatcaaca

SEQ ID NO: 30431 - DNA, 20 bp, synthetic construct
  misc_feature 1..20: note = Description of Artificial Sequence: Synthetic oligonucleotide
  misc_feature 1..20: note = Target: FXN; (+) strand; PAM type: YTN; PAM sequence: CTC
  source 1..20: mol_type = other DNA
ttttaaaatctatcaacaat

SEQ ID NO: 30432 - DNA, 20 bp, synthetic construct
  misc_feature 1..20: note = Description of Artificial Sequence: Synthetic oligonucleotide
  misc_feature 1..20: note = Target: FXN; (+) strand; PAM type: YTN; PAM sequence: CTT
  source 1..20: mol_type = other DNA
ttaaaatctatcaacaatag

SEQ ID NO: 30433 - DNA, 20 bp, synthetic construct
  misc_feature 1..20: note = Description of Artificial Sequence: Synthetic oligonucleotide
  misc_feature 1..20: note = Target: FXN; (+) strand; PAM type: YTN; PAM sequence: TTT
  source 1..20: mol_type = other DNA
taaaatctatcaacaatagg

SEQ ID NO: 30434 - DNA, 20 bp, synthetic construct
  misc_feature 1..20: note = Description of Artificial Sequence: Synthetic oligonucleotide
  misc_feature 1..20: note = Target: FXN; (+) strand; PAM type: YTN; PAM sequence: TTT
  source 1..20: mol_type = other DNA
aaaatctatcaacaataggc

SEQ ID NO: 30435 - DNA, 20 bp, synthetic construct
  misc_feature 1..20: note = Description of Artificial Sequence: Synthetic oligonucleotide
  misc_feature 1..20: note = Target: FXN; (+) strand; PAM type: YTN; PAM sequence: TTA
  source 1..20: mol_type = other DNA
aaatctatcaacaataggca

SEQ ID NO: 30436 - DNA, 20 bp, synthetic construct
  misc_feature 1..20: note = Description of Artificial Sequence: Synthetic oligonucleotide
  misc_feature 1..20: note = Target: FXN; (+) strand; PAM type: YTN; PAM sequence: CTA
  source 1..20: mol_type = other DNA
tcaacaataggcaaggcacg

SEQ ID NO: 30437 - DNA, 20 bp, synthetic construct
  misc_feature 1..20: note = Description of Artificial Sequence: Synthetic oligonucleotide
  misc_feature 1..20: note = Target: FXN; (+) strand; PAM type: YTN; PAM sequence: CTC
  source 1..20: mol_type = other DNA
acgcctgtcgtctcagcact

SEQ ID NO: 30438 - DNA, 20 bp, synthetic construct
  misc_feature 1..20: note = Description of Artificial Sequence: Synthetic oligonucleotide
  misc_feature 1..20: note = Target: FXN; (+) strand; PAM type: YTN; PAM sequence: CTG
  source 1..20: mol_type = other DNA
tcgtctcagcactttgtgag

SEQ ID NO: 30439 - DNA, 20 bp, synthetic construct
  misc_feature 1..20: note = Description of Artificial Sequence: Synthetic oligonucleotide
  misc_feature 1..20: note = Target: FXN; (+) strand; PAM type: YTN; PAM sequence: CTC
  source 1..20: mol_type = other DNA
agcactttgtgaggcccagg

SEQ ID NO: 30440 - DNA, 20 bp, synthetic construct
  misc_feature 1..20: note = Description of Artificial Sequence: Synthetic oligonucleotide
  misc_feature 1..20: note = Target: FXN; (+) strand; PAM type: YTN; PAM sequence: CTT
  source 1..20: mol_type = other DNA
tgtgaggcccaggcgggcag

SEQ ID NO: 30441 - DNA, 20 bp, synthetic construct
  misc_feature 1..20: note = Description of Artificial Sequence: Synthetic oligonucleotide
  misc_feature 1..20: note = Target: FXN; (+) strand; PAM type: YTN; PAM sequence: TTT
  source 1..20: mol_type = other DNA
gtgaggcccaggcgggcaga

SEQ ID NO: 30442 - DNA, 20 bp, synthetic construct
  misc_feature 1..20: note = Description of Artificial Sequence: Synthetic oligonucleotide
  misc_feature 1..20: note = Target: FXN; (+) strand; PAM type: YTN; PAM sequence: TTG
  source 1..20: mol_type = other DNA
tgaggcccaggcgggcagat

SEQ ID NO: 30443 - DNA, 20 bp, synthetic construct
  misc_feature 1..20: note = Description of Artificial Sequence: Synthetic oligonucleotide
  misc_feature 1..20: note = Target: FXN; (+) strand; PAM type: YTN; PAM sequence: TTT
  source 1..20: mol_type = other DNA
gagcctagaagttcaagacc

SEQ ID NO: 30444 - DNA, 20 bp, synthetic construct
  misc_feature 1..20: note = Description of Artificial Sequence: Synthetic oligonucleotide
  misc_feature 1..20: note = Target: FXN; (+) strand; PAM type: YTN; PAM sequence: TTG
  source 1..20: mol_type = other DNA
agcctagaagttcaagacca

SEQ ID NO: 30445 - DNA, 20 bp, synthetic construct
  misc_feature 1..20: note = Description of Artificial Sequence: Synthetic oligonucleotide
  misc_feature 1..20: note = Target: FXN; (+) strand; PAM type: YTN; PAM sequence: CTA
  source 1..20: mol_type = other DNA
gaagttcaagaccaccctgg

SEQ ID NO: 30446 - DNA, 20 bp, synthetic construct
  misc_feature 1..20: note = Description of Artificial Sequence: Synthetic oligonucleotide
  misc_feature 1..20: note = Target: FXN; (+) strand; PAM type: YTN; PAM sequence: TTC
  source 1..20: mol_type = other DNA
aagaccaccctgggcaacat

SEQ ID NO: 30447 - DNA, 20 bp, synthetic construct
  misc_feature 1..20: note = Description of Artificial Sequence: Synthetic oligonucleotide
  misc_feature 1..20: note = Target: FXN; (+) strand; PAM type: YTN; PAM sequence: CTG
  source 1..20: mol_type = other DNA
ggcaacatagcgaaaccccc

SEQ ID NO: 30448 - DNA, 20 bp, synthetic construct
  misc_feature 1..20: note = Description of Artificial Sequence: Synthetic oligonucleotide
  misc_feature 1..20: note = Target: FXN; (+) strand; PAM type: YTN; PAM sequence: CTT
  source 1..20: mol_type = other DNA
tctacaaaaaatacaaaaac

SEQ ID NO: 30449 - DNA, 20 bp, synthetic construct
  misc_feature 1..20: note = Description of Artificial Sequence: Synthetic oligonucleotide
  misc_feature 1..20: note = Target: FXN; (+) strand; PAM type: YTN; PAM sequence: TTT
  source 1..20: mol_type = other DNA
ctacaaaaaatacaaaaact

SEQ ID NO: 30450 - DNA, 20 bp, synthetic construct
  misc_feature 1..20: note = Description of Artificial Sequence: Synthetic oligonucleotide
  misc_feature 1..20: note = Target: FXN; (+) strand; PAM type: YTN; PAM sequence: TTC
  source 1..20: mol_type = other DNA
tacaaaaaatacaaaaacta

SEQ ID NO: 30451 - DNA, 20 bp, synthetic construct
  misc_feature 1..20: note = Description of Artificial Sequence: Synthetic oligonucleotide
  misc_feature 1..20: note = Target: FXN; (+) strand; PAM type: YTN; PAM sequence: CTA
  source 1..20: mol_type = other DNA
caaaaaatacaaaaactagc

SEQ ID NO: 30452 - DNA, 20 bp, synthetic construct
  misc_feature 1..20: note = Description of Artificial Sequence: Synthetic oligonucleotide
  misc_feature 1..20: note = Target: FXN; (+) strand; PAM type: YTN; PAM sequence: CTA
  source 1..20: mol_type = other DNA
gctgggtgtggtggtgcaca

SEQ ID NO: 30453 - DNA, 20 bp, synthetic construct
  misc_feature 1..20: note = Description of Artificial Sequence: Synthetic oligonucleotide
  misc_feature 1..20: note = Target: FXN; (+) strand; PAM type: YTN; PAM sequence: CTG
  source 1..20: mol_type = other DNA
ggtgtggtggtgcacacctg

SEQ ID NO: 30454 - DNA, 20 bp, synthetic construct
  misc_feature 1..20: note = Description of Artificial Sequence: Synthetic oligonucleotide
  misc_feature 1..20: note = Target: FXN; (+) strand; PAM type: YTN; PAM sequence: CTG
  source 1..20: mol_type = other DNA
tagtcccagctacttggaag

SEQ ID NO: 30455 - DNA, 20 bp, synthetic construct
  misc_feature 1..20: note = Description of Artificial Sequence: Synthetic oligonucleotide
  misc_feature 1..20: note = Target: FXN; (+) strand; PAM type: YTN; PAM sequence: CTA
  source 1..20: mol_type = other DNA
cttggaaggctgaaatggga

SEQ ID NO: 30456 - DNA, 20 bp, synthetic construct
  misc_feature 1..20: note = Description of Artificial Sequence: Synthetic oligonucleotide
  misc_feature 1..20: note = Target: FXN; (+) strand; PAM type: YTN; PAM sequence: CTT
  source 1..20: mol_type = other DNA
ggaaggctgaaatgggaaga

SEQ ID NO: 30457 - DNA, 20 bp, synthetic construct
  misc_feature 1..20: note = Description of Artificial Sequence: Synthetic oligonucleotide
  misc_feature 1..20: note = Target: FXN; (+) strand; PAM type: YTN; PAM sequence: TTG
  source 1..20: mol_type = other DNA
gaaggctgaaatgggaagac

SEQ ID NO: 30458 - DNA, 20 bp, synthetic construct
  misc_feature 1..20: note = Description of Artificial Sequence: Synthetic oligonucleotide
  misc_feature 1..20: note = Target: FXN; (+) strand; PAM type: YTN; PAM sequence: CTG
  source 1..20: mol_type = other DNA
aaatgggaagactgcttgag

SEQ ID NO: 30459 - DNA, 20 bp, synthetic construct
  misc_feature 1..20: note = Description of Artificial Sequence: Synthetic oligonucleotide
  misc_feature 1..20: note = Target: FXN; (+) strand; PAM type: YTN; PAM sequence: CTG
  source 1..20: mol_type = other DNA
cttgagcccgggagggagaa

SEQ ID NO: 30460 - DNA, 20 bp, synthetic construct
  misc_feature 1..20: note = Description of Artificial Sequence: Synthetic oligonucleotide
  misc_feature 1..20: note = Target: FXN; (+) strand; PAM type: YTN; PAM sequence: CTT
  source 1..20: mol_type = other DNA
gagcccgggagggagaagtt

SEQ ID NO: 30461 - DNA, 20 bp, synthetic construct
  misc_feature 1..20: note = Description of Artificial Sequence: Synthetic oligonucleotide
  misc_feature 1..20: note = Target: FXN; (+) strand; PAM type: YTN; PAM sequence: TTG
  source 1..20: mol_type = other DNA
agcccgggagggagaagttg

SEQ ID NO: 30462 - DNA, 20 bp, synthetic construct
  misc_feature 1..20: note = Description of Artificial Sequence: Synthetic oligonucleotide
  misc_feature 1..20: note = Target: FXN; (+) strand; PAM type: YTN; PAM sequence: TTG
  source 1..20: mol_type = other DNA
cagtaagccaggaccacacc

SEQ ID NO: 30463 - DNA, 20 bp, synthetic construct
  misc_feature 1..20: note = Description of Artificial Sequence: Synthetic oligonucleotide
  misc_feature 1..20: note = Target: FXN; (+) strand; PAM type: YTN; PAM sequence: CTG
  source 1..20: mol_type = other DNA
cactccagcctgggcaacag

SEQ ID NO: 30464 - DNA, 20 bp, synthetic construct
  misc_feature 1..20: note = Description of Artificial Sequence: Synthetic oligonucleotide
  misc_feature 1..20: note = Target: FXN; (+) strand; PAM type: YTN; PAM sequence: CTC
  source 1..20: mol_type = other DNA
cagcctgggcaacagagtga

SEQ ID NO: 30465 - DNA, 20 bp, synthetic construct
  misc_feature 1..20: note = Description of Artificial Sequence: Synthetic oligonucleotide
  misc_feature 1..20: note = Target: FXN; (+) strand; PAM type: YTN; PAM sequence: CTG
  source 1..20: mol_type = other DNA
ggcaacagagtgagactctg

SEQ ID NO: 30466 - DNA, 20 bp, synthetic construct
  misc_feature 1..20: note = Description of Artificial Sequence: Synthetic oligonucleotide
  misc_feature 1..20: note = Target: FXN; (+) strand; PAM type: YTN; PAM sequence: CTC
  source 1..20: mol_type = other DNA
tgtctcaaacaaacaaataa

SEQ ID NO: 30467 - DNA, 20 bp, synthetic construct
  misc_feature 1..20: note = Description of Artificial Sequence: Synthetic oligonucleotide
  misc_feature 1..20: note = Target: FXN; (+) strand; PAM type: YTN; PAM sequence: CTG
  source 1..20: mol_type = other DNA
tctcaaacaaacaaataaat

SEQ ID NO: 30468 - DNA, 20 bp, synthetic construct
  misc_feature 1..20: note = Description of Artificial Sequence: Synthetic oligonucleotide
  misc_feature 1..20: note = Target: FXN; (+) strand; PAM type: YTN; PAM sequence: CTC
  source 1..20: mol_type = other DNA
aaacaaacaaataaatgagg

SEQ ID NO: 30469 - DNA, 20 bp, synthetic construct
  misc_feature 1..20: note = Description of Artificial Sequence: Synthetic oligonucleotide
  misc_feature 1..20: note = Target: FXN; (+) strand; PAM type: YTN; PAM sequence: CTG
  source 1..20: mol_type = other DNA
gctaacacggtgaaacccgt

SEQ ID NO: 30470 - DNA, 20 bp, synthetic construct
  misc_feature 1..20: note = Description of Artificial Sequence: Synthetic oligonucleotide
  misc_feature 1..20: note = Target: FXN; (+) strand; PAM type: YTN; PAM sequence: CTA
  source 1..20: mol_type = other DNA
acacggtgaaacccgtctct

SEQ ID NO: 30471 - DNA, 20 bp, synthetic construct
  misc_feature 1..20: note = Description of Artificial Sequence: Synthetic oligonucleotide
  misc_feature 1..20: note = Target: FXN; (+) strand; PAM type: YTN; PAM sequence: CTC
  source 1..20: mol_type = other DNA
tactaaaaaaaaaaaaaaat

SEQ ID NO: 30472 - DNA, 20 bp, synthetic construct
  misc_feature 1..20: note = Description of Artificial Sequence: Synthetic oligonucleotide
  misc_feature 1..20: note = Target: FXN; (+) strand; PAM type: YTN; PAM sequence: CTA
  source 1..20: mol_type = other DNA
ctaaaaaaaaaaaaaaatac

SEQ ID NO: 30473 - DNA, 20 bp, synthetic construct
  misc_feature 1..20: note = Description of Artificial Sequence: Synthetic oligonucleotide
  misc_feature 1..20: note = Target: FXN; (+) strand; PAM type: YTN; PAM sequence: CTA
  source 1..20: mol_type = other DNA
aaaaaaaaaaaaaatacaaa

SEQ ID NO: 30474 - DNA, 20 bp, synthetic construct
  misc_feature 1..20: note = Description of Artificial Sequence: Synthetic oligonucleotide
  misc_feature 1..20: note = Target: FXN; (+) strand; PAM type: YTN; PAM sequence: TTA
  source 1..20: mol_type = other DNA
gccaggcatggtggcgggcg

SEQ ID NO: 30475 - DNA, 20 bp, synthetic construct
  misc_feature 1..20: note = Description of Artificial Sequence: Synthetic oligonucleotide
  misc_feature 1..20: note = Target: FXN; (+) strand; PAM type: YTN; PAM sequence: CTG
  source 1..20: mol_type = other DNA
tagtcccagttactcgggag

SEQ ID NO: 30476 - DNA, 20 bp, synthetic construct
  misc_feature 1..20: note = Description of Artificial Sequence: Synthetic oligonucleotide
  misc_feature 1..20: note = Target: FXN; (+) strand; PAM type: YTN; PAM sequence: TTA
  source 1..20: mol_type = other DNA
ctcgggaggctgaggcagga

SEQ ID NO: 30477 - DNA, 20 bp, synthetic construct
  misc_feature 1..20: note = Description of Artificial Sequence: Synthetic oligonucleotide
  misc_feature 1..20: note = Target: FXN; (+) strand; PAM type: YTN; PAM sequence: CTC
  source 1..20: mol_type = other DNA
gggaggctgaggcaggagaa

SEQ ID NO: 30478 - DNA, 20 bp, synthetic construct
  misc_feature 1..20: note = Description of Artificial Sequence: Synthetic oligonucleotide
  misc_feature 1..20: note = Target: FXN; (+) strand; PAM type: YTN; PAM sequence: CTG
  source 1..20: mol_type = other DNA
aggcaggagaatggcgtgaa

SEQ ID NO: 30479 - DNA, 20 bp, synthetic construct
  misc_feature 1..20: note = Description of Artificial Sequence: Synthetic oligonucleotide
  misc_feature 1..20: note = Target: FXN; (+) strand; PAM type: YTN; PAM sequence: CTT
  source 1..20: mol_type = other DNA
gcagtgagccgagatcgcac

SEQ ID NO: 30480 - DNA, 20 bp, synthetic construct
  misc_feature 1..20: note = Description of Artificial Sequence: Synthetic oligonucleotide
  misc_feature 1..20: note = Target: FXN; (+) strand; PAM type: YTN; PAM sequence: TTG
  source 1..20: mol_type = other DNA
cagtgagccgagatcgcacc

SEQ ID NO: 30481 - DNA, 20 bp, synthetic construct
  misc_feature 1..20: note = Description of Artificial Sequence: Synthetic oligonucleotide
  misc_feature 1..20: note = Target: FXN; (+) strand; PAM type: YTN; PAM sequence: CTG
  source 1..20: mol_type = other DNA
ccctccagcctgggcgacag

SEQ ID NO: 30482 - DNA, 20 bp, synthetic construct
  misc_feature 1..20: note = Description of Artificial Sequence: Synthetic oligonucleotide
  misc_feature 1..20: note = Target: FXN; (+) strand; PAM type: YTN; PAM sequence: CTC
  source 1..20: mol_type = other DNA
cagcctgggcgacagagcga

SEQ ID NO: 30483 - DNA, 20 bp, synthetic construct
  misc_feature 1..20: note = Description of Artificial Sequence: Synthetic oligonucleotide
  misc_feature 1..20: note = Target: FXN; (+) strand; PAM type: YTN; PAM sequence: CTG
  source 1..20: mol_type = other DNA
ggcgacagagcgagactccg

SEQ ID NO: 30484 - DNA, 20 bp, synthetic construct
  misc_feature 1..20: note = Description of Artificial Sequence: Synthetic oligonucleotide
  misc_feature 1..20: note = Target: FXN; (+) strand; PAM type: YTN; PAM sequence: CTC
  source 1..20: mol_type = other DNA
cgtctcaatcaatcaatcaa

SEQ ID NO: 30485 - DNA, 20 bp, synthetic construct
  misc_feature 1..20: note = Description of Artificial Sequence: Synthetic oligonucleotide
  misc_feature 1..20: note = Target: FXN; (+) strand; PAM type: YTN; PAM sequence: CTC
  source 1..20: mol_type = other DNA
aatcaatcaatcaatcaata

SEQ ID NO: 30486 - DNA, 20 bp, synthetic construct
  misc_feature 1..20: note = Description of Artificial Sequence: Synthetic oligonucleotide
  misc_feature 1..20: note = Target: FXN; (+) strand; PAM type: YTN; PAM sequence: CTA
  source 1..20: mol_type = other DNA
ttaacaatatttattgtgca

SEQ ID NO: 30487 - DNA, 20 bp, synthetic construct
  misc_feature 1..20: note = Description of Artificial Sequence: Synthetic oligonucleotide
  misc_feature 1..20: note = Target: FXN; (+) strand; PAM type: YTN; PAM sequence: TTA
  source 1..20: mol_type = other DNA
acaatatttattgtgcactt

SEQ ID NO: 30488 - DNA, 20 bp, synthetic construct
  misc_feature 1..20: note = Description of Artificial Sequence: Synthetic oligonucleotide
  misc_feature 1..20: note = Target: FXN; (+) strand; PAM type: YTN; PAM sequence: TTT
  source 1..20: mol_type = other DNA
attgtgcacttaacaggaac

SEQ ID NO: 30489 - DNA, 20 bp, synthetic construct
  misc_feature 1..20: note = Description of Artificial Sequence: Synthetic oligonucleotide
  misc_feature 1..20: note = Target: FXN; (+) strand; PAM type: YTN; PAM sequence: TTA
  source 1..20: mol_type = other DNA
ttgtgcacttaacaggaaca

SEQ ID NO: 30490 - DNA, 20 bp, synthetic construct
  misc_feature 1..20: note = Description of Artificial Sequence: Synthetic oligonucleotide
  misc_feature 1..20: note = Target: FXN; (+) strand; PAM type: YTN; PAM sequence: TTG
  source 1..20: mol_type = other DNA
tgcacttaacaggaacatgc

SEQ ID NO: 30491 - DNA, 20 bp, synthetic construct
  misc_feature 1..20: note = Description of Artificial Sequence: Synthetic oligonucleotide
  misc_feature 1..20: note = Target: FXN; (+) strand; PAM type: YTN; PAM sequence: CTT
  source 1..20: mol_type = other DNA
aacaggaacatgccctgtcc

SEQ ID NO: 30492 - DNA, 20 bp, synthetic construct
  misc_feature 1..20: note = Description of Artificial Sequence: Synthetic oligonucleotide
  misc_feature 1..20: note = Target: FXN; (+) strand; PAM type: YTN; PAM sequence: TTA
  source 1..20: mol_type = other DNA
acaggaacatgccctgtcca

SEQ ID NO: 30493 - DNA, 20 bp, synthetic construct
  misc_feature 1..20: note = Description of Artificial Sequence: Synthetic oligonucleotide
  misc_feature 1..20: note = Target: FXN; (+) strand; PAM type: YTN; PAM sequence: CTG
  source 1..20: mol_type = other DNA
tccaaaaaaaactttacagg

SEQ ID NO: 30494 - DNA, 20 bp, synthetic construct
  misc_feature 1..20: note = Description of Artificial Sequence: Synthetic oligonucleotide
  misc_feature 1..20: note = Target: FXN; (+) strand; PAM type: YTN; PAM sequence: CTT
  source 1..20: mol_type = other DNA
tacagggcttaactcatttt

SEQ ID NO: 30495 - DNA, 20 bp, synthetic construct
  misc_feature 1..20: note = Description of Artificial Sequence: Synthetic oligonucleotide
  misc_feature 1..20: note = Target: FXN; (+) strand; PAM type: YTN; PAM sequence: TTT
  source 1..20: mol_type = other DNA
acagggcttaactcatttta

SEQ ID NO: 30496 - DNA, 20 bp, synthetic construct
  misc_feature 1..20: note = Description of Artificial Sequence: Synthetic oligonucleotide
  misc_feature 1..20: note = Target: FXN; (+) strand; PAM type: YTN; PAM sequence: TTA
  source 1..20: mol_type = other DNA
cagggcttaactcattttat

SEQ ID NO: 30497 - DNA, 20 bp, synthetic construct
  misc_feature 1..20: note = Description of Artificial Sequence: Synthetic oligonucleotide
  misc_feature 1..20: note = Target: FXN; (+) strand; PAM type: YTN; PAM sequence: CTT
  source 1..20: mol_type = other DNA
aactcattttatccttacca

SEQ ID NO: 30498 - DNA, 20 bp, synthetic construct
  misc_feature 1..20: note = Description of Artificial Sequence: Synthetic oligonucleotide
  misc_feature 1..20: note = Target: FXN; (+) strand; PAM type: YTN; PAM sequence: TTA
  source 1..20: mol_type = other DNA
actcattttatccttaccac

SEQ ID NO: 30499 - DNA, 20 bp, synthetic construct
  misc_feature 1..20: note = Description of Artificial Sequence: Synthetic oligonucleotide
  misc_feature 1..20: note = Target: FXN; (+) strand; PAM type: YTN; PAM sequence: CTC
  source 1..20: mol_type = other DNA
attttatccttaccacaatc

SEQ ID NO: 30500 - DNA, 20 bp, synthetic construct
  misc_feature 1..20: note = Description of Artificial Sequence: Synthetic oligonucleotide
  misc_feature 1..20: note = Target: FXN; (+) strand; PAM type: YTN; PAM sequence: TTT
  source 1..20: mol_type = other DNA
tatccttaccacaatcctat

SEQ ID NO: 30501 - DNA, 20 bp, synthetic construct
  misc_feature 1..20: note = Description of Artificial Sequence: Synthetic oligonucleotide
  misc_feature 1..20: note = Target: FXN; (+) strand; PAM type: YTN; PAM sequence: TTT
  source 1..20: mol_type = other DNA
atccttaccacaatcctatg

SEQ ID NO: 30502 - DNA, 20 bp, synthetic construct
  misc_feature 1..20: note = Description of Artificial Sequence: Synthetic oligonucleotide
  misc_feature 1..20: note = Target: FXN; (+) strand; PAM type: YTN; PAM sequence: TTA
  source 1..20: mol_type = other DNA
tccttaccacaatcctatga

SEQ ID NO: 30503 - DNA, 20 bp, synthetic construct
  misc_feature 1..20: note = Description of Artificial Sequence: Synthetic oligonucleotide
  misc_feature 1..20: note = Target: FXN; (+) strand; PAM type: YTN; PAM sequence: CTT
  source 1..20: mol_type = other DNA
accacaatcctatgaagtag

SEQ ID NO: 30504 - DNA, 20 bp, synthetic construct
  misc_feature 1..20: note = Description of Artificial Sequence: Synthetic oligonucleotide
  misc_feature 1..20: note = Target: FXN; (+) strand; PAM type: YTN; PAM sequence: TTA
  source 1..20: mol_type = other DNA
ccacaatcctatgaagtagg

SEQ ID NO: 30505 - DNA, 20 bp, synthetic construct
  misc_feature 1..20: note = Description of Artificial Sequence: Synthetic oligonucleotide
  misc_feature 1..20: note = Target: FXN; (+) strand; PAM type: YTN; PAM sequence: CTA
  source 1..20: mol_type = other DNA
tgaagtaggaacttttataa

SEQ ID NO: 30506 - DNA, 20 bp, synthetic construct
  misc_feature 1..20: note = Description of Artificial Sequence: Synthetic oligonucleotide
  misc_feature 1..20: note = Target: FXN; (+) strand; PAM type: YTN; PAM sequence: CTT
  source 1..20: mol_type = other DNA
ttataaaacgcattttataa

SEQ ID NO: 30507 - DNA, 20 bp, synthetic construct
  misc_feature 1..20: note = Description of Artificial Sequence: Synthetic oligonucleotide
  misc_feature 1..20: note = Target: FXN; (+) strand; PAM type: YTN; PAM sequence: TTT
  source 1..20: mol_type = other DNA
tataaaacgcattttataaa

SEQ ID NO: 30508 - DNA, 20 bp, synthetic construct
  misc_feature 1..20: note = Description of Artificial Sequence: Synthetic oligonucleotide
  misc_feature 1..20: note = Target: FXN; (+) strand; PAM type: YTN; PAM sequence: TTT
  source 1..20: mol_type = other DNA
ataaaacgcattttataaac

SEQ ID NO: 30509 - DNA, 20 bp, synthetic construct
  misc_feature 1..20: note = Description of Artificial Sequence: Synthetic oligonucleotide
  misc_feature 1..20: note = Target: FXN; (+) strand; PAM type: YTN; PAM sequence: TTA
  source 1..20: mol_type = other DNA
taaaacgcattttataaaca

SEQ ID NO: 30510 - DNA, 20 bp, synthetic construct
  misc_feature 1..20: note = Description of Artificial Sequence: Synthetic oligonucleotide
  misc_feature 1..20: note = Target: FXN; (+) strand; PAM type: YTN; PAM sequence: TTT
  source 1..20: mol_type = other DNA
tataaacaaggcacagagag

SEQ ID NO: 30511 - DNA, 20 bp, synthetic construct
  misc_feature 1..20: note = Description of Artificial Sequence: Synthetic oligonucleotide
  misc_feature 1..20: note = Target: FXN; (+) strand; PAM type: YTN; PAM sequence: TTT
  source 1..20: mol_type = other DNA
ataaacaaggcacagagagg

SEQ ID NO: 30512 - DNA, 20 bp, synthetic construct
  misc_feature 1..20: note = Description of Artificial Sequence: Synthetic oligonucleotide
  misc_feature 1..20: note = Target: FXN; (+) strand; PAM type: YTN; PAM sequence: TTA
  source 1..20: mol_type = other DNA
taaacaaggcacagagaggt

SEQ ID NO: 30513 - DNA, 20 bp, synthetic construct
  misc_feature 1..20: note = Description of Artificial Sequence: Synthetic oligonucleotide
  misc_feature 1..20: note = Target: FXN; (+) strand; PAM type: YTN; PAM sequence: TTA
  source 1..20: mol_type = other DNA
attaacttgccctctggtca

SEQ ID NO: 30514 - DNA, 20 bp, synthetic construct
  misc_feature 1..20: note = Description of Artificial Sequence: Synthetic oligonucleotide
  misc_feature 1..20: note = Target: FXN; (+) strand; PAM type: YTN; PAM sequence: TTA
  source 1..20: mol_type = other DNA
acttgccctctggtcacaca

SEQ ID NO: 30515 - DNA, 20 bp, synthetic construct
  misc_feature 1..20: note = Description of Artificial Sequence: Synthetic oligonucleotide
  misc_feature 1..20: note = Target: FXN; (+) strand; PAM type: YTN; PAM sequence: CTT
  source 1..20: mol_type = other DNA
gccctctggtcacacagcta

SEQ ID NO: 30516 - DNA, 20 bp, synthetic construct
  misc_feature 1..20: note = Description of Artificial Sequence: Synthetic oligonucleotide
  misc_feature 1..20: note = Target: FXN; (+) strand; PAM type: YTN; PAM sequence: TTG
  source 1..20: mol_type = other DNA
ccctctggtcacacagctag

SEQ ID NO: 30517 - DNA, 20 bp, synthetic construct
  misc_feature 1..20: note = Description of Artificial Sequence: Synthetic oligonucleotide
  misc_feature 1..20: note = Target: FXN; (+) strand; PAM type: YTN; PAM sequence: CTC
  source 1..20: mol_type = other DNA
tggtcacacagctaggaagt

SEQ ID NO: 30518 - DNA, 20 bp, synthetic construct
  misc_feature 1..20: note = Description of Artificial Sequence: Synthetic oligonucleotide
  misc_feature 1..20: note = Target: FXN; (+) strand; PAM type: YTN; PAM sequence: CTG
  source 1..20: mol_type = other DNA
gtcacacagctaggaagtgg

SEQ ID NO: 30519 - DNA, 20 bp, synthetic construct
  misc_feature 1..20: note = Description of Artificial Sequence: Synthetic oligonucleotide
  misc_feature 1..20: note = Target: FXN; (+) strand; PAM type: YTN; PAM sequence: CTA
  source 1..20: mol_type = other DNA
ggaagtgggcagagtacaga

SEQ ID NO: 30520 - DNA, 20 bp, synthetic construct
  misc_feature 1..20: note = Description of Artificial Sequence: Synthetic oligonucleotide
  misc_feature 1..20: note = Target: FXN; (+) strand; PAM type: YTN; PAM sequence: TTT
  source 1..20: mol_type = other DNA
acacaaggcatccgtctcct

SEQ ID NO: 30521 - DNA, 20 bp, synthetic construct
  misc_feature 1..20: note = Description of Artificial Sequence: Synthetic oligonucleotide
  misc_feature 1..20: note = Target: FXN; (+) strand; PAM type: YTN; PAM sequence: TTA
  source 1..20: mol_type = other DNA
cacaaggcatccgtctcctg

SEQ ID NO: 30522 - DNA, 20 bp, synthetic construct
  misc_feature 1..20: note = Description of Artificial Sequence: Synthetic oligonucleotide
  misc_feature 1..20: note = Target: FXN; (+) strand; PAM type: YTN; PAM sequence: CTC
  source 1..20: mol_type = other DNA
ctggccccacatacccaact

SEQ ID NO: 30523 - DNA, 20 bp, synthetic construct
  misc_feature 1..20: note = Description of Artificial Sequence: Synthetic oligonucleotide
  misc_feature 1..20: note = Target: FXN; (+) strand; PAM type: YTN; PAM sequence: CTG
  source 1..20: mol_type = other DNA
gccccacatacccaactgct

SEQ ID NO: 30524 - DNA, 20 bp, synthetic construct
  misc_feature 1..20: note = Description of Artificial Sequence: Synthetic oligonucleotide
  misc_feature 1..20: note = Target: FXN; (+) strand; PAM type: YTN; PAM sequence: CTG
  source 1..20: mol_type = other DNA
ctgtaaacccataccggcgg

SEQ ID NO: 30525 - DNA, 20 bp, synthetic construct
  misc_feature 1..20: note = Description of Artificial Sequence: Synthetic oligonucleotide
  misc_feature 1..20: note = Target: FXN; (+) strand; PAM type: YTN; PAM sequence: CTG
  source 1..20: mol_type = other DNA
taaacccataccggcggcca

SEQ ID NO: 30526 - DNA, 20 bp, synthetic construct
  misc_feature 1..20: note = Description of Artificial Sequence: Synthetic oligonucleotide
  misc_feature 1..20: note = Target: FXN; (+) strand; PAM type: YTN; PAM sequence: CTC
  source 1..20: mol_type = other DNA
aatttgtgcatgcacccact

SEQ ID NO: 30527 - DNA, 20 bp, synthetic construct
  misc_feature 1..20: note = Description of Artificial Sequence: Synthetic oligonucleotide
  misc_feature 1..20: note = Target: FXN; (+) strand; PAM type: YTN; PAM sequence: TTT
  source 1..20: mol_type = other DNA
gtgcatgcacccacttccca

SEQ ID NO: 30528 - DNA, 20 bp, synthetic construct
  misc_feature 1..20: note = Description of Artificial Sequence: Synthetic oligonucleotide
  misc_feature 1..20: note = Target: FXN; (+) strand; PAM type: YTN; PAM sequence: TTG
  source 1..20: mol_type = other DNA
tgcatgcacccacttcccag

SEQ ID NO: 30529 - DNA, 20 bp, synthetic construct
  misc_feature 1..20: note = Description of Artificial Sequence: Synthetic oligonucleotide
  misc_feature 1..20: note = Target: FXN; (+) strand; PAM type: YTN; PAM sequence: CTT
  source 1..20: mol_type = other DNA
cccagcaagacagcagctcc

SEQ ID NO: 30530 - DNA, 20 bp, synthetic construct
  misc_feature 1..20: note = Description of Artificial Sequence: Synthetic oligonucleotide
  misc_feature 1..20: note = Target: FXN; (+) strand; PAM type: YTN; PAM sequence: TTC
  source 1..20: mol_type = other DNA
ccagcaagacagcagctccc

SEQ ID NO: 30531 - DNA, 20 bp, synthetic construct
  misc_feature 1..20: note = Description of Artificial Sequence: Synthetic oligonucleotide
  misc_feature 1..20: note = Target: FXN; (+) strand; PAM type: YTN; PAM sequence: CTC
  source 1..20: mol_type = other DNA
ccaagttcctcctgtttaga

SEQ ID NO: 30532 - DNA, 20 bp, synthetic construct
  misc_feature 1..20: note = Description of Artificial Sequence: Synthetic oligonucleotide
  misc_feature 1..20: note = Target: FXN; (+) strand; PAM type: YTN; PAM sequence: TTC
  source 1..20: mol_type = other DNA
ctcctgtttagaattttaga

SEQ ID NO: 30533 - DNA, 20 bp, synthetic construct
  misc_feature 1..20: note = Description of Artificial Sequence: Synthetic oligonucleotide
  misc_feature 1..20: note = Target: FXN; (+) strand; PAM type: YTN; PAM sequence: CTC
  source 1..20: mol_type = other DNA
ctgtttagaattttagaagc

SEQ ID NO: 30534 - DNA, 20 bp, synthetic construct
  misc_feature 1..20: note = Description of Artificial Sequence: Synthetic oligonucleotide
  misc_feature 1..20: note = Target: FXN; (+) strand; PAM type: YTN; PAM sequence: CTG
  source 1..20: mol_type = other DNA
tttagaattttagaagcggc

SEQ ID NO: 30535 - DNA, 20 bp, synthetic construct
  misc_feature 1..20: note = Description of Artificial Sequence: Synthetic oligonucleotide
  misc_feature 1..20: note = Target: FXN; (+) strand; PAM type: YTN; PAM sequence: TTT
  source 1..20: mol_type = other DNA
agaattttagaagcggcggg

SEQ ID NO: 30536 - DNA, 20 bp, synthetic construct
  misc_feature 1..20: note = Description of Artificial Sequence: Synthetic oligonucleotide
  misc_feature 1..20: note = Target: FXN; (+) strand; PAM type: YTN; PAM sequence: TTA
  source 1..20: mol_type = other DNA
gaattttagaagcggcgggc

SEQ ID NO: 30537 - DNA, 20 bp, synthetic construct
  misc_feature 1..20: note = Description of Artificial Sequence: Synthetic oligonucleotide
  misc_feature 1..20: note = Target: FXN; (+) strand; PAM type: YTN; PAM sequence: TTT
  source 1..20: mol_type = other DNA
tagaagcggcgggccaccag

SEQ ID NO: 30538 - DNA, 20 bp, synthetic construct
  misc_feature 1..20: note = Description of Artificial Sequence: Synthetic oligonucleotide
  misc_feature 1..20: note = Target: FXN; (+) strand; PAM type: YTN; PAM sequence: TTT
  source 1..20: mol_type = other DNA
agaagcggcgggccaccagg

SEQ ID NO: 30539 - DNA, 20 bp, synthetic construct
  misc_feature 1..20: note = Description of Artificial Sequence: Synthetic oligonucleotide
  misc_feature 1..20: note = Target: FXN; (+) strand; PAM type: YTN; PAM sequence: TTA
  source 1..20: mol_type = other DNA
gaagcggcgggccaccaggc

SEQ ID NO: 30540 - DNA, 20 bp, synthetic construct
  misc_feature 1..20: note = Description of Artificial Sequence: Synthetic oligonucleotide
  misc_feature 1..20: note = Target: FXN; (+) strand; PAM type: YTN; PAM sequence: CTG
  source 1..20: mol_type = other DNA
cagtctcccttgggtcaggg

SEQ ID NO: 30541 - DNA, 20 bp, synthetic construct
  misc_feature 1..20: note = Description of Artificial Sequence: Synthetic oligonucleotide
  misc_feature 1..20: note = Target: FXN; (+) strand; PAM type: YTN; PAM sequence: CTC
  source 1..20: mol_type = other DNA
ccttgggtcaggggtcctgg

SEQ ID NO: 30542 - DNA, 20 bp, synthetic construct
  misc_feature 1..20: note = Description of Artificial Sequence: Synthetic oligonucleotide
  misc_feature 1..20: note = Target: FXN; (+) strand; PAM type: YTN; PAM sequence: CTT
  source 1..20: mol_type = other DNA
gggtcaggggtcctggttgc

SEQ ID NO: 30543 - DNA, 20 bp, synthetic construct
  misc_feature 1..20: note = Description of Artificial Sequence: Synthetic oligonucleotide
  misc_feature 1..20: note = Target: FXN; (+) strand; PAM type: YTN; PAM sequence: TTG
  source 1..20: mol_type = other DNA
ggtcaggggtcctggttgca

SEQ ID NO: 30544 - DNA, 20 bp, synthetic construct
  misc_feature 1..20: note = Description of Artificial Sequence: Synthetic oligonucleotide
  misc_feature 1..20: note = Target: FXN; (+) strand; PAM type: YTN; PAM sequence: CTG
  source 1..20: mol_type = other DNA
gttgcactccgtgctttgca

SEQ ID NO: 30545 - DNA, 20 bp, synthetic construct
  misc_feature 1..20: note = Description of Artificial Sequence: Synthetic oligonucleotide
  misc_feature 1..20: note = Target: FXN; (+) strand; PAM type: YTN; PAM sequence: TTG
  source 1..20: mol_type = other DNA
cactccgtgctttgcacaaa

SEQ ID NO: 30546 - DNA, 20 bp, synthetic construct
  misc_feature 1..20: note = Description of Artificial Sequence: Synthetic oligonucleotide
  misc_feature 1..20: note = Target: FXN; (+) strand; PAM type: YTN; PAM sequence: CTC
  source 1..20: mol_type = other DNA
cgtgctttgcacaaagcagg

SEQ ID NO: 30547 - DNA, 20 bp, synthetic construct
  misc_feature 1..20: note = Description of Artificial Sequence: Synthetic oligonucleotide
  misc_feature 1..20: note = Target: FXN; (+) strand; PAM type: YTN; PAM sequence: CTT
  source 1..20: mol_type = other DNA
tgcacaaagcaggctctcca

SEQ ID NO: 30548 - DNA, 20 bp, synthetic construct
  misc_feature 1..20: note = Description of Artificial Sequence: Synthetic oligonucleotide
  misc_feature 1..20: note = Target: FXN; (+) strand; PAM type: YTN; PAM sequence: TTT
  source 1..20: mol_type = other DNA
gcacaaagcaggctctccat

SEQ ID NO: 30549 - DNA, 20 bp, synthetic construct
  misc_feature 1..20: note = Description of Artificial Sequence: Synthetic oligonucleotide
  misc_feature 1..20: note = Target: FXN; (+) strand; PAM type: YTN; PAM sequence: TTG
  source 1..20: mol_type = other DNA
cacaaagcaggctctccatt

SEQ ID NO: 30550 - DNA, 20 bp, synthetic construct
  misc_feature 1..20: note = Description of Artificial Sequence: Synthetic oligonucleotide
  misc_feature 1..20: note = Target: FXN; (+) strand; PAM type: YTN; PAM sequence: CTC
  source 1..20: mol_type = other DNA
tccatttttgttaaatgcac

SEQ ID NO: 30551 - DNA, 20 bp, synthetic construct
  misc_feature 1..20: note = Description of Artificial Sequence: Synthetic oligonucleotide
  misc_feature 1..20: note = Target: FXN; (+) strand; PAM type: YTN; PAM sequence: CTC
  source 1..20: mol_type = other DNA
catttttgttaaatgcacga

SEQ ID NO: 30552 - DNA, 20 bp, synthetic construct
  misc_feature 1..20: note = Description of Artificial Sequence: Synthetic oligonucleotide
  misc_feature 1..20: note = Target: FXN; (+) strand; PAM type: YTN; PAM sequence: TTT
  source 1..20: mol_type = other DNA
ttgttaaatgcacgaatagt

SEQ ID NO: 30553 - DNA, 20 bp, synthetic construct
  misc_feature 1..20: note = Description of Artificial Sequence: Synthetic oligonucleotide
  misc_feature 1..20: note = Target: FXN; (+) strand; PAM type: YTN; PAM sequence: TTT
  source 1..20: mol_type = other DNA
tgttaaatgcacgaatagtg

SEQ ID NO: 30554 - DNA, 20 bp, synthetic construct
  misc_feature 1..20: note = Description of Artificial Sequence: Synthetic oligonucleotide
  misc_feature 1..20: note = Target: FXN; (+) strand; PAM type: YTN; PAM sequence: TTT
  source 1..20: mol_type = other DNA
gttaaatgcacgaatagtgc

SEQ ID NO: 30555 - DNA, 20 bp, synthetic construct
  misc_feature 1..20: note = Description of Artificial Sequence: Synthetic oligonucleotide
  misc_feature 1..20: note = Target: FXN; (+) strand; PAM type: YTN; PAM sequence: TTG
  source 1..20: mol_type = other DNA
ttaaatgcacgaatagtgct

SEQ ID NO: 30556 - DNA, 20 bp, synthetic construct
  misc_feature 1..20: note = Description of Artificial Sequence: Synthetic oligonucleotide
  misc_feature 1..20: note = Target: FXN; (+) strand; PAM type: YTN; PAM sequence: TTA
  source 1..20: mol_type = other DNA
aatgcacgaatagtgctaag

SEQ ID NO: 30557 - DNA, 20 bp, synthetic construct
  misc_feature 1..20: note = Description of Artificial Sequence: Synthetic oligonucleotide
  misc_feature 1..20: note = Target: FXN; (+) strand; PAM type: YTN; PAM sequence: CTA
  source 1..20: mol_type = other DNA
agctgggaagttcttcctga

SEQ ID NO: 30558 - DNA, 20 bp, synthetic construct
  misc_feature 1..20: note = Description of Artificial Sequence: Synthetic oligonucleotide
  misc_feature 1..20: note = Target: FXN; (+) strand; PAM type: YTN; PAM sequence: CTG
  source 1..20: mol_type = other DNA
ggaagttcttcctgaggtct

SEQ ID NO: 30559 - DNA, 20 bp, synthetic construct
  misc_feature 1..20: note = Description of Artificial Sequence: Synthetic oligonucleotide
  misc_feature 1..20: note = Target: FXN; (+) strand; PAM type: YTN; PAM sequence: TTC
  source 1..20: mol_type = other DNA
ttcctgaggtctaacctcta

SEQ ID NO: 30560 - DNA, 20 bp, synthetic construct
  misc_feature 1..20: note = Description of Artificial Sequence: Synthetic oligonucleotide
  misc_feature 1..20: note = Target: FXN; (+) strand; PAM type: YTN; PAM sequence: CTT
  source 1..20: mol_type = other DNA
cctgaggtctaacctctagc

SEQ ID NO: 30561 - DNA, 20 bp, synthetic construct
  misc_feature 1..20: note = Description of Artificial Sequence: Synthetic oligonucleotide
  misc_feature 1..20: note = Target: FXN; (+) strand; PAM type: YTN; PAM sequence: TTC
  source 1..20: mol_type = other DNA
ctgaggtctaacctctagct

SEQ ID NO: 30562 - DNA, 20 bp, synthetic construct
  misc_feature 1..20: note = Description of Artificial Sequence: Synthetic oligonucleotide
  misc_feature 1..20: note = Target: FXN; (+) strand; PAM type: YTN; PAM sequence: CTG
  source 1..20: mol_type = other DNA
aggtctaacctctagctgct

SEQ ID NO: 30563 - DNA, 20 bp, synthetic construct
  misc_feature 1..20: note = Description of Artificial Sequence: Synthetic oligonucleotide
  misc_feature 1..20: note = Target: FXN; (+) strand; PAM type: YTN; PAM sequence: CTA
  source 1..20: mol_type = other DNA
acctctagctgctcccccac

SEQ ID NO: 30564 - DNA, 20 bp, synthetic construct
  misc_feature 1..20: note = Description of Artificial Sequence: Synthetic oligonucleotide
  misc_feature 1..20: note = Target: FXN; (+) strand; PAM type: YTN; PAM sequence: CTC
  source 1..20: mol_type = other DNA
tagctgctcccccacagaag

SEQ ID NO: 30565 - DNA, 20 bp, synthetic construct
  misc_feature 1..20: note = Description of Artificial Sequence: Synthetic oligonucleotide
  misc_feature 1..20: note = Target: FXN; (+) strand; PAM type: YTN; PAM sequence: CTA
  source 1..20: mol_type = other DNA
gctgctcccccacagaagag

SEQ ID NO: 30566 - DNA, 20 bp, synthetic construct
  misc_feature 1..20: note = Description of Artificial Sequence: Synthetic oligonucleotide
  misc_feature 1..20: note = Target: FXN; (+) strand; PAM type: YTN; PAM sequence: CTG
  source 1..20: mol_type = other DNA
ctcccccacagaagagtgcc

SEQ ID NO: 30567 - DNA, 20 bp, synthetic construct
  misc_feature 1..20: note = Description of Artificial Sequence: Synthetic oligonucleotide
  misc_feature 1..20: note = Target: FXN; (+) strand; PAM type: YTN; PAM sequence: CTC
  source 1..20: mol_type = other DNA
ccccacagaagagtgcctgc

SEQ ID NO: 30568 - DNA, 20 bp, synthetic construct
  misc_feature 1..20: note = Description of Artificial Sequence: Synthetic oligonucleotide
  misc_feature 1..20: note = Target: FXN; (+) strand; PAM type: YTN; PAM sequence: CTG
  source 1..20: mol_type = other DNA
cggccagtggccaccagggg

SEQ ID NO: 30569 - DNA, 20 bp, synthetic construct
  misc_feature 1..20: note = Description of Artificial Sequence: Synthetic oligonucleotide
  misc_feature 1..20: note = Target: FXN; (+) strand; PAM type: YTN; PAM sequence: CTG
  source 1..20: mol_type = other DNA
gagggcggagcgggcggcag

SEQ ID NO: 30570 - DNA, 20 bp, synthetic construct
  misc_feature 1..20: note = Description of Artificial Sequence: Synthetic oligonucleotide
  misc_feature 1..20: note = Target: FXN; (+) strand; PAM type: YTN; PAM sequence: CTC
  source 1..20: mol_type = other DNA
tcgggcgccgcgcagtagcc

SEQ ID NO: 30571 - DNA, 20 bp, synthetic construct
  misc_feature 1..20: note = Description of Artificial Sequence: Synthetic oligonucleotide
  misc_feature 1..20: note = Target: FXN; (+) strand; PAM type: YTN; PAM sequence: CTC
  source 1..20: mol_type = other DNA
gggcgccgcgcagtagccgg

SEQ ID NO: 30572 - DNA, 20 bp, synthetic construct
  misc_feature 1..20: note = Description of Artificial Sequence: Synthetic oligonucleotide
  misc_feature 1..20: note = Target: FXN; (+) strand; PAM type: YTN; PAM sequence: CTC
  source 1..20: mol_type = other DNA
ctggcgtcacccagcccagc

SEQ ID NO: 30573 - DNA, 20 bp, synthetic construct
  misc_feature 1..20: note = Description of Artificial Sequence: Synthetic oligonucleotide
  misc_feature 1..20: note = Target: FXN; (+) strand; PAM type: YTN; PAM sequence: CTG
  source 1..20: mol_type = other DNA
gcgtcacccagcccagccca

SEQ ID NO: 30574 - DNA, 20 bp, synthetic construct
  misc_feature 1..20: note = Description of Artificial Sequence: Synthetic oligonucleotide
  misc_feature 1..20: note = Target: FXN; (+) strand; PAM type: YTN; PAM sequence: CTC
  source 1..20: mol_type = other DNA
acccgggtcccgcggccggc

SEQ ID NO: 30575 - DNA, 20 bp, synthetic construct
  misc_feature 1..20: note = Description of Artificial Sequence: Synthetic oligonucleotide
  misc_feature 1..20: note = Target: FXN; (+) strand; PAM type: YTN; PAM sequence: TTG
  source 1..20: mol_type = other DNA
gccccactctgcggccgccg

SEQ ID NO: 30576 - DNA, 20 bp, synthetic construct
  misc_feature 1..20: note = Description of Artificial Sequence: Synthetic oligonucleotide
  misc_feature 1..20: note = Target: FXN; (+) strand; PAM type: YTN; PAM sequence: CTC
  source 1..20: mol_type = other DNA
tgcggccgccgtggcctgcg

SEQ ID NO: 30577 - DNA, 20 bp, synthetic construct
  misc_feature 1..20: note = Description of Artificial Sequence: Synthetic oligonucleotide
  misc_feature 1..20: note = Target: FXN; (+) strand; PAM type: YTN; PAM sequence: CTG
  source 1..20: mol_type = other DNA
cggccgccgtggcctgcgca

SEQ ID NO: 30578 - DNA, 20 bp, synthetic construct
  misc_feature 1..20: note = Description of Artificial Sequence: Synthetic oligonucleotide
  misc_feature 1..20: note = Target: FXN; (+) strand; PAM type: YTN; PAM sequence: CTG
  source 1..20: mol_type = other DNA
cgcaccgacatcgatgcgac

SEQ ID NO: 30579 - DNA, 20 bp, synthetic construct
  misc_feature 1..20: note = Description of Artificial Sequence: Synthetic oligonucleotide
  misc_feature 1..20: note = Target: FXN; (+) strand; PAM type: YTN; PAM sequence: CTG
  source 1..20: mol_type = other DNA
cacgccccgccgcgcagtaa

SEQ ID NO: 30580 - DNA, 20 bp, synthetic construct
  misc_feature 1..20: note = Description of Artificial Sequence: Synthetic oligonucleotide
  misc_feature 1..20: note = Target: FXN; (+) strand; PAM type: YTN; PAM sequence: CTG
  source 1..20: mol_type = other DNA
cgcagggaggcgccgcgcac

SEQ ID NO: 30581 - DNA, 20 bp, synthetic construct
  misc_feature 1..20: note = Description of Artificial Sequence: Synthetic oligonucleotide
  misc_feature 1..20: note = Target: FXN; (+) strand; PAM type: YTN; PAM sequence: CTC
  source 1..20: mol_type = other DNA
cgggtacgcgcgctggacta

SEQ ID NO: 30582 - DNA, 20 bp, synthetic construct
  misc_feature 1..20: note = Description of Artificial Sequence: Synthetic oligonucleotide
  misc_feature 1..20: note = Target: FXN; (+) strand; PAM type: YTN; PAM sequence: CTG
  source 1..20: mol_type = other DNA
gactagctcaccccgctcct

SEQ ID NO: 30583 - DNA, 20 bp, synthetic construct
  misc_feature 1..20: note = Description of Artificial Sequence: Synthetic oligonucleotide
  misc_feature 1..20: note = Target: FXN; (+) strand; PAM type: YTN; PAM sequence: CTA
  source 1..20: mol_type = other DNA
gctcaccccgctccttctca

SEQ ID NO: 30584 - DNA, 20 bp, synthetic construct
  misc_feature 1..20: note = Description of Artificial Sequence: Synthetic oligonucleotide
  misc_feature 1..20: note = Target: FXN; (+) strand; PAM type: YTN; PAM sequence: CTC
  source 1..20: mol_type = other DNA
accccgctccttctcagggc

SEQ ID NO: 30585 - DNA, 20 bp, synthetic construct
  misc_feature 1..20: note = Description of Artificial Sequence: Synthetic oligonucleotide
  misc_feature 1..20: note = Target: FXN; (+) strand; PAM type: YTN; PAM sequence: CTC
  source 1..20: mol_type = other DNA
cttctcagggcggcccggcg

SEQ ID NO: 30586 - DNA, 20 bp, synthetic construct
  misc_feature 1..20: note = Description of Artificial Sequence: Synthetic oligonucleotide
  misc_feature 1..20: note = Target: FXN; (+) strand; PAM type: YTN; PAM sequence: CTT
  source 1..20: mol_type = other DNA
ctcagggcggcccggcggaa

SEQ ID NO: 30587 - DNA, 20 bp, synthetic construct
  misc_feature 1..20: note = Description of Artificial Sequence: Synthetic oligonucleotide
  misc_feature 1..20: note = Target: FXN; (+) strand; PAM type: YTN; PAM sequence: TTC
  source 1..20: mol_type = other DNA
tcagggcggcccggcggaag

SEQ ID NO: 30588 - DNA, 20 bp, synthetic construct
  misc_feature 1..20: note = Description of Artificial Sequence: Synthetic oligonucleotide
  misc_feature 1..20: note = Target: FXN; (+) strand; PAM type: YTN; PAM sequence: CTC
  source 1..20: mol_type = other DNA
agggcggcccggcggaagcg

SEQ ID NO: 30589 - DNA, 20 bp, synthetic construct
  misc_feature 1..20: note = Description of Artificial Sequence: Synthetic oligonucleotide
  misc_feature 1..20: note = Target: FXN; (+) strand; PAM type: YTN; PAM sequence: CTT
  source 1..20: mol_type = other DNA
gcaactcccttctctggttc

SEQ ID NO: 30590 - DNA, 20 bp, synthetic construct
  misc_feature 1..20: note = Description of Artificial Sequence: Synthetic oligonucleotide
  misc_feature 1..20: note = Target: FXN; (+) strand; PAM type: YTN; PAM sequence: TTG
  source 1..20: mol_type = other DNA
caactcccttctctggttct

SEQ ID NO: 30591 - DNA, 20 bp, synthetic construct
  misc_feature 1..20: note = Description of Artificial Sequence: Synthetic oligonucleotide
  misc_feature 1..20: note = Target: FXN; (+) strand; PAM type: YTN; PAM sequence: CTC
  source 1..20: mol_type = other DNA
ccttctctggttctcccggt

SEQ ID NO: 30592 - DNA, 20 bp, synthetic construct
  misc_feature 1..20: note = Description of Artificial Sequence: Synthetic oligonucleotide
  misc_feature 1..20: note = Target: FXN; (+) strand; PAM type: YTN; PAM sequence: CTT
  source 1..20: mol_type = other DNA
ctctggttctcccggttgca

SEQ ID NO: 30593 - DNA, 20 bp, synthetic construct
  misc_feature 1..20: note = Description of Artificial Sequence: Synthetic oligonucleotide
  misc_feature 1..20: note = Target: FXN; (+) strand; PAM type: YTN; PAM sequence: TTC
  source 1..20: mol_type = other DNA
tctggttctcccggttgcat

SEQ ID NO: 30594 - DNA, 20 bp, synthetic construct
  misc_feature 1..20: note = Description of Artificial Sequence: Synthetic oligonucleotide
  misc_feature 1..20: note = Target: FXN; (+) strand; PAM type: YTN; PAM sequence: CTC
  source 1..20: mol_type = other DNA
tggttctcccggttgcattt

SEQ ID NO: 30595 - DNA, 20 bp, synthetic construct
  misc_feature 1..20: note = Description of Artificial Sequence: Synthetic oligonucleotide
  misc_feature 1..20: note = Target: FXN; (+) strand; PAM type: YTN; PAM sequence: CTG
  source 1..20: mol_type = other DNA
gttctcccggttgcatttac

SEQ ID NO: 30596 - DNA, 20 bp, synthetic construct
  misc_feature 1..20: note = Description of Artificial Sequence: Synthetic oligonucleotide
  misc_feature 1..20: note = Target: FXN; (+) strand; PAM type: YTN; PAM sequence: TTC
  source 1..20: mol_type = other DNA
tcccggttgcatttacactg

SEQ ID NO: 30597 - DNA, 20 bp, synthetic construct
  misc_feature 1..20: note = Description of Artificial Sequence: Synthetic oligonucleotide
  misc_feature 1..20: note = Target: FXN; (+) strand; PAM type: YTN; PAM sequence: CTC
  source 1..20: mol_type = other DNA
ccggttgcatttacactggc

SEQ ID NO: 30598 - DNA, 20 bp, synthetic construct
  misc_feature 1..20: note = Description of Artificial Sequence: Synthetic oligonucleotide
  misc_feature 1..20: note = Target: FXN; (+) strand; PAM type: YTN; PAM sequence: TTG
  source 1..20: mol_type = other DNA
catttacactggcttctgct

SEQ ID NO: 30599 - DNA, 20 bp, synthetic construct
  misc_feature 1..20: note = Description of Artificial Sequence: Synthetic oligonucleotide
  misc_feature 1..20: note = Target: FXN; (+) strand; PAM type: YTN; PAM sequence: TTT
  source 1..20: mol_type = other DNA
acactggcttctgctttccg

SEQ ID NO: 30600 - DNA, 20 bp, synthetic construct
  misc_feature 1..20: note = Description of Artificial Sequence: Synthetic oligonucleotide
  misc_feature 1..20: note = Target: FXN; (+) strand; PAM type: YTN; PAM sequence: TTA
  source 1..20: mol_type = other DNA
cactggcttctgctttccga

SEQ ID NO: 30601 - DNA, 20 bp, synthetic construct
  misc_feature 1..20: note = Description of Artificial Sequence: Synthetic oligonucleotide
  misc_feature 1..20: note = Target: FXN; (+) strand; PAM type: YTN; PAM sequence: CTG
  source 1..20: mol_type = other DNA
gcttctgctttccgaaggaa

SEQ ID NO: 30602 - DNA, 20 bp, synthetic construct
  misc_feature 1..20: note = Description of Artificial Sequence: Synthetic oligonucleotide
  misc_feature 1..20: note = Target: FXN; (+) strand; PAM type: YTN; PAM sequence: CTT
  source 1..20: mol_type = other DNA
ctgctttccgaaggaaaagg

SEQ ID NO: 30603 - DNA, 20 bp, synthetic construct
  misc_feature 1..20: note = Description of Artificial Sequence: Synthetic oligonucleotide
  misc_feature 1..20: note = Target: FXN; (+) strand; PAM type: YTN; PAM sequence: TTC
  source 1..20: mol_type = other DNA
tgctttccgaaggaaaaggg

SEQ ID NO: 30604 - DNA, 20 bp, synthetic construct
  misc_feature 1..20: note = Description of Artificial Sequence: Synthetic oligonucleotide
  misc_feature 1..20: note = Target: FXN; (+) strand; PAM type: YTN; PAM sequence: CTG
  source 1..20: mol_type = other DNA
ctttccgaaggaaaagggga

SEQ ID NO: 30605 - DNA, 20 bp, synthetic construct
  misc_feature 1..20: note = Description of Artificial Sequence: Synthetic oligonucleotide
  misc_feature 1..20: note = Target: FXN; (+) strand; PAM type: YTN; PAM sequence: CTT
  source 1..20: mol_type = other DNA
tccgaaggaaaaggggacat

SEQ ID NO: 30606 - DNA, 20 bp, synthetic construct
  misc_feature 1..20: note = Description of Artificial Sequence: Synthetic oligonucleotide
  misc_feature 1..20: note = Target: FXN; (+) strand; PAM type: YTN; PAM sequence: TTT
  source 1..20: mol_type = other DNA
ccgaaggaaaaggggacatt

SEQ ID NO: 30607 - DNA, 20 bp, synthetic construct
  misc_feature 1..20: note = Description of Artificial Sequence: Synthetic oligonucleotide
  misc_feature 1..20: note = Target: FXN; (+) strand; PAM type: YTN; PAM sequence: TTC
  source 1..20: mol_type = other DNA
cgaaggaaaaggggacattt

SEQ ID NO: 30608 - DNA, 20 bp, synthetic construct
  misc_feature 1..20: note = Description of Artificial Sequence: Synthetic oligonucleotide
  misc_feature 1..20: note = Target: FXN; (+) strand; PAM type: YTN; PAM sequence: TTT
  source 1..20: mol_type = other DNA
tgtcctgcggtgcgactgcg

SEQ ID NO: 30609 - DNA, 20 bp, synthetic construct
  misc_feature 1..20: note = Description of Artificial Sequence: Synthetic oligonucleotide
  misc_feature 1..20: note = Target: FXN; (+) strand; PAM type: YTN; PAM sequence: TTT
  source 1..20: mol_type = other DNA
gtcctgcggtgcgactgcgg

SEQ ID NO: 30610 - DNA, 20 bp, synthetic construct
  misc_feature 1..20: note = Description of Artificial Sequence: Synthetic oligonucleotide
  misc_feature 1..20: note = Target: FXN; (+) strand; PAM type: YTN; PAM sequence: TTG
  source 1..20: mol_type = other DNA
tcctgcggtgcgactgcggg

SEQ ID NO: 30611 - DNA, 20 bp, synthetic construct
  misc_feature 1..20: note = Description of Artificial Sequence: Synthetic oligonucleotide
  misc_feature 1..20: note = Target: FXN; (+) strand; PAM type: YTN; PAM sequence: CTG
  source 1..20: mol_type = other DNA
cggtgcgactgcgggtcaag

SEQ ID NO: 30612 - DNA, 20 bp, synthetic construct
  misc_feature 1..20: note = Description of Artificial Sequence: Synthetic oligonucleotide
  misc_feature 1..20: note = Target: FXN; (+) strand; PAM type: YTN; PAM sequence: CTG
  source 1..20: mol_type = other DNA
cgggtcaaggcacgggcgaa

SEQ ID NO: 30613 - DNA, 20 bp, synthetic construct
  misc_feature 1..20: note = Description of Artificial Sequence: Synthetic oligonucleotide
  misc_feature 1..20: note = Target: FXN; (+) strand; PAM type: YTN; PAM sequence: CTG
  source 1..20: mol_type = other DNA
gtggaggggaccggttccga

SEQ ID NO: 30614 - DNA, 20 bp, synthetic construct
  misc_feature 1..20: note = Description of Artificial Sequence: Synthetic oligonucleotide
  misc_feature 1..20: note = Target: FXN; (+) strand; PAM type: YTN; PAM sequence: TTC
  source 1..20: mol_type = other DNA
cgaggggtgtgcggctgtct

SEQ ID NO: 30615 - DNA, 20 bp, synthetic construct
  misc_feature 1..20: note = Description of Artificial Sequence: Synthetic oligonucleotide
  misc_feature 1..20: note = Target: FXN; (+) strand; PAM type: YTN; PAM sequence: CTG
  source 1..20: mol_type = other DNA
tctccatgcttgtcacttct

SEQ ID NO: 30616 - DNA, 20 bp, synthetic construct
  misc_feature 1..20: note = Description of Artificial Sequence: Synthetic oligonucleotide
  misc_feature 1..20: note = Target: FXN; (+) strand; PAM type: YTN; PAM sequence: CTC
  source 1..20: mol_type = other DNA
catgcttgtcacttctctgc

SEQ ID NO: 30617 - DNA, 20 bp, synthetic construct
  misc_feature 1..20: note = Description of Artificial Sequence: Synthetic oligonucleotide
  misc_feature 1..20: note = Target: FXN; (+) strand; PAM type: YTN; PAM sequence: CTT
  source 1..20: mol_type = other DNA
gtcacttctctgcgataact

SEQ ID NO: 30618 - DNA, 20 bp, synthetic construct
  misc_feature 1..20: note = Description of Artificial Sequence: Synthetic oligonucleotide
  misc_feature 1..20: note = Target: FXN; (+) strand; PAM type: YTN; PAM sequence: TTG
  source 1..20: mol_type = other DNA
tcacttctctgcgataactt

SEQ ID NO: 30619 - DNA, 20 bp, synthetic construct
  misc_feature 1..20: note = Description of Artificial Sequence: Synthetic oligonucleotide
  misc_feature 1..20: note = Target: FXN; (+) strand; PAM type: YTN; PAM sequence: CTT
  source 1..20: mol_type = other DNA
ctctgcgataacttgtttca

SEQ ID NO: 30620 - DNA, 20 bp, synthetic construct
  misc_feature 1..20: note = Description of Artificial Sequence: Synthetic oligonucleotide
  misc_feature 1..20: note = Target: FXN; (+) strand; PAM type: YTN; PAM sequence: TTC
  source 1..20: mol_type = other DNA
tctgcgataacttgtttcag

SEQ ID NO: 30621 - DNA, 20 bp, synthetic construct
  misc_feature 1..20: note = Description of Artificial Sequence: Synthetic oligonucleotide
  misc_feature 1..20: note = Target: FXN; (+) strand; PAM type: YTN; PAM sequence: CTC
  source 1..20: mol_type = other DNA
tgcgataacttgtttcagta

SEQ ID NO: 30622 - DNA, 20 bp, synthetic construct
  misc_feature 1..20: note = Description of Artificial Sequence: Synthetic oligonucleotide
  misc_feature 1..20: note = Target: FXN; (+) strand; PAM type: YTN; PAM sequence: CTG
  source 1..20: mol_type = other DNA
cgataacttgtttcagtaat

SEQ ID NO: 30623 - DNA, 20 bp, synthetic construct
  misc_feature 1..20: note = Description of Artificial Sequence: Synthetic oligonucleotide
  misc_feature 1..20: note = Target: FXN; (+) strand; PAM type: YTN; PAM sequence: CTT
  source 1..20: mol_type = other DNA
gtttcagtaatattaataga

SEQ ID NO: 30624 - DNA, 20 bp, synthetic construct
  misc_feature 1..20: note = Description of Artificial Sequence: Synthetic oligonucleotide
  misc_feature 1..20: note = Target: FXN; (+) strand; PAM type: YTN; PAM sequence: TTG
  source 1..20: mol_type = other DNA
tttcagtaatattaatagat

SEQ ID NO: 30625 - DNA, 20 bp, synthetic construct
  misc_feature 1..20: note = Description of Artificial Sequence: Synthetic oligonucleotide
  misc_feature 1..20: note = Target: FXN; (+) strand; PAM type: YTN; PAM sequence: TTT
  source 1..20: mol_type = other DNA
cagtaatattaatagatggt

SEQ ID NO: 30626 - DNA, 20 bp, synthetic construct
  misc_feature 1..20: note = Description of Artificial Sequence: Synthetic oligonucleotide
  misc_feature 1..20: note = Target: FXN; (+) strand; PAM type: YTN; PAM sequence: TTC
  source 1..20: mol_type = other DNA
agtaatattaatagatggta

SEQ ID NO: 30627 - DNA, 20 bp, synthetic construct
  misc_feature 1..20: note = Description of Artificial Sequence: Synthetic oligonucleotide
  misc_feature 1..20: note = Target: FXN; (+) strand; PAM type: YTN; PAM sequence: TTA
  source 1..20: mol_type = other DNA
atagatggtatctgctagta

SEQ ID NO: 30628 - DNA, 20 bp, synthetic construct
  misc_feature 1..20: note = Description of Artificial Sequence: Synthetic oligonucleotide
  misc_feature 1..20: note = Target: FXN; (+) strand; PAM type: YTN; PAM sequence: CTG
  source 1..20: mol_type = other DNA
ctagtatatacatacacata

SEQ ID NO: 30629 - DNA, 20 bp, synthetic construct
  misc_feature 1..20: note = Description of Artificial Sequence: Synthetic oligonucleotide
  misc_feature 1..20: note = Target: FXN; (+) strand; PAM type: YTN; PAM sequence: CTA
  source 1..20: mol_type = other DNA
gtatatacatacacataatg

SEQ ID NO: 30630 - DNA, 20 bp, synthetic construct
  misc_feature 1..20: note = Description of Artificial Sequence: Synthetic oligonucleotide
  misc_feature 1..20: note = Target: FXN; (+) strand; PAM type: YTN; PAM sequence: CTG
  source 1..20: mol_type = other DNA
tgtgtatctgtatatagcgt

SEQ ID NO: 30631 - DNA, 20 bp, synthetic construct
  misc_feature 1..20: note = Description of Artificial Sequence: Synthetic oligonucleotide
  misc_feature 1..20: note = Target: FXN; (+) strand; PAM type: YTN; PAM sequence: CTG
  source 1..20: mol_type = other DNA
tatatagcgtgtgtgttgtg

SEQ ID NO: 30632 - DNA, 20 bp, synthetic construct
  misc_feature 1..20: note = Description of Artificial Sequence: Synthetic oligonucleotide
  misc_feature 1..20: note = Target: FXN; (+) strand; PAM type: YTN; PAM sequence: TTG
  source 1..20: mol_type = other DNA
tgtgtgtgtgtttgcgcgca

SEQ ID NO: 30633 - DNA, 20 bp, synthetic construct
  misc_feature 1..20: note = Description of Artificial Sequence: Synthetic oligonucleotide
  misc_feature 1..20: note = Target: FXN; (+) strand; PAM type: YTN; PAM sequence: TTT
  source 1..20: mol_type = other DNA
gcgcgcacgggcgcgcgcac

SEQ ID NO: 30634 - DNA, 20 bp, synthetic construct
  misc_feature 1..20: note = Description of Artificial Sequence: Synthetic oligonucleotide
  misc_feature 1..20: note = Target: FXN; (+) strand; PAM type: YTN; PAM sequence: TTG
  source 1..20: mol_type = other DNA
cgcgcacgggcgcgcgcaca

SEQ ID NO: 30635 - DNA, 20 bp, synthetic construct
  misc_feature 1..20: note = Description of Artificial Sequence: Synthetic oligonucleotide
  misc_feature 1..20: note = Target: FXN; (+) strand; PAM type: YTN; PAM sequence: CTA
  source 1..20: mol_type = other DNA
atattttcaaggctggattt

SEQ ID NO: 30636 - DNA, 20 bp, synthetic construct
  misc_feature 1..20: note = Description of Artificial Sequence: Synthetic oligonucleotide
  misc_feature 1..20: note = Target: FXN; (+) strand; PAM type: YTN; PAM sequence: TTT
  source 1..20: mol_type = other DNA
tcaaggctggatttttttga

SEQ ID NO: 30637 - DNA, 20 bp, synthetic construct
  misc_feature 1..20: note = Description of Artificial Sequence: Synthetic oligonucleotide
  misc_feature 1..20: note = Target: FXN; (+) strand; PAM type: YTN; PAM sequence: TTT
  source 1..20: mol_type = other DNA
caaggctggatttttttgaa

SEQ ID NO: 30638 - DNA, 20 bp, synthetic construct
  misc_feature 1..20: note = Description of Artificial Sequence: Synthetic oligonucleotide
  misc_feature 1..20: note = Target: FXN; (+) strand; PAM type: YTN; PAM sequence: TTC
  source 1..20: mol_type = other DNA
aaggctggatttttttgaac

SEQ ID NO: 30639 - DNA, 20 bp, synthetic construct
  misc_feature 1..20: note = Description of Artificial Sequence: Synthetic oligonucleotide
  misc_feature 1..20: note = Target: FXN; (+) strand; PAM type: YTN; PAM sequence: CTG
  source 1..20: mol_type = other DNA
gatttttttgaacgaaatgc

SEQ ID NO: 30640 - DNA, 20 bp, synthetic construct
  misc_feature 1..20: note = Description of Artificial Sequence: Synthetic oligonucleotide
  misc_feature 1..20: note = Target: FXN; (+) strand; PAM type: YTN; PAM sequence: TTT
  source 1..20: mol_type = other DNA
ttttgaacgaaatgctttcc

SEQ ID NO: 30641 - DNA, 20 bp, synthetic construct
  misc_feature 1..20: note = Description of Artificial Sequence: Synthetic oligonucleotide
  misc_feature 1..20: note = Target: FXN; (+) strand; PAM type: YTN; PAM sequence: TTT
  source 1..20: mol_type = other DNA
tttgaacgaaatgctttcct

SEQ ID NO: 30642 - DNA, 20 bp, synthetic construct
  misc_feature 1..20: note = Description of Artificial Sequence: Synthetic oligonucleotide
  misc_feature 1..20: note = Target: FXN; (+) strand; PAM type: YTN; PAM sequence: TTT
  source 1..20: mol_type = other DNA
ttgaacgaaatgctttcctg

SEQ ID NO: 30643 - DNA, 20 bp, synthetic construct
  misc_feature 1..20: note = Description of Artificial Sequence: Synthetic oligonucleotide
  misc_feature 1..20: note = Target: FXN; (+) strand; PAM type: YTN; PAM sequence: TTT
  source 1..20: mol_type = other DNA
tgaacgaaatgctttcctgg

SEQ ID NO: 30644 - DNA, 20 bp, synthetic construct
  misc_feature 1..20: note = Description of Artificial Sequence: Synthetic oligonucleotide
  misc_feature 1..20: note = Target: FXN; (+) strand; PAM type: YTN; PAM sequence: TTT
  source 1..20: mol_type = other DNA
gaacgaaatgctttcctgga

SEQ ID NO: 30645 - DNA, 20 bp, synthetic construct
  misc_feature 1..20: note = Description of Artificial Sequence: Synthetic oligonucleotide
  misc_feature 1..20: note = Target: FXN; (+) strand; PAM type: YTN; PAM sequence: TTG
  source 1..20: mol_type = other DNA
aacgaaatgctttcctggaa

SEQ ID NO: 30646 - DNA, 20 bp, synthetic construct
  misc_feature 1..20: note = Description of Artificial Sequence: Synthetic oligonucleotide
  misc_feature 1..20: note = Target: FXN; (+) strand; PAM type: YTN; PAM sequence: CTT
  source 1..20: mol_type = other DNA
tcctggaacgaggtgaaact

SEQ ID NO: 30647 - DNA, 20 bp, synthetic construct
  misc_feature 1..20: note = Description of Artificial Sequence: Synthetic oligonucleotide
  misc_feature 1..20: note = Target: FXN; (+) strand; PAM type: YTN; PAM sequence: TTT
  source 1..20: mol_type = other DNA
cctggaacgaggtgaaactt

SEQ ID NO: 30648 - DNA, 20 bp, synthetic construct
  misc_feature 1..20: note = Description of Artificial Sequence: Synthetic oligonucleotide
  misc_feature 1..20: note = Target: FXN; (+) strand; PAM type: YTN; PAM sequence: TTC
  source 1..20: mol_type = other DNA
ctggaacgaggtgaaacttt

SEQ ID NO: 30649 - DNA, 20 bp, synthetic construct
  misc_feature 1..20: note = Description of Artificial Sequence: Synthetic oligonucleotide
  misc_feature 1..20: note = Target: FXN; (+) strand; PAM type: YTN; PAM sequence: CTG
  source 1..20: mol_type = other DNA
gaacgaggtgaaactttcag

SEQ ID NO: 30650 - DNA, 20 bp, synthetic construct
  misc_feature 1..20: note = Description of Artificial Sequence: Synthetic oligonucleotide
  misc_feature 1..20: note = Target: FXN; (+) strand; PAM type: YTN; PAM sequence: CTT
  source 1..20: mol_type = other DNA
tcagagctgcagaatagcta

SEQ ID NO: 30651 - DNA, 20 bp, synthetic construct
  misc_feature 1..20: note = Description of Artificial Sequence: Synthetic oligonucleotide
  misc_feature 1..20: note = Target: FXN; (+) strand; PAM type: YTN; PAM sequence: TTT
  source 1..20: mol_type = other DNA
cagagctgcagaatagctag

SEQ ID NO: 30652 - DNA, 20 bp, synthetic construct
  misc_feature 1..20: note = Description of Artificial Sequence: Synthetic oligonucleotide
  misc_feature 1..20: note = Target: FXN; (+) strand; PAM type: YTN; PAM sequence: TTC
  source 1..20: mol_type = other DNA
agagctgcagaatagctaga

SEQ ID NO: 30653 - DNA, 20 bp, synthetic construct
  misc_feature 1..20: note = Description of Artificial Sequence: Synthetic oligonucleotide
  misc_feature 1..20: note = Target: FXN; (+) strand; PAM type: YTN; PAM sequence: CTG
  source 1..20: mol_type = other DNA
cagaatagctagagcagcag

SEQ ID NO: 30654 - DNA, 20 bp, synthetic construct
  misc_feature 1..20: note = Description of Artificial Sequence: Synthetic oligonucleotide
  misc_feature 1..20: note = Target: FXN; (+) strand; PAM type: YTN; PAM sequence: CTA
  source 1..20: mol_type = other DNA
gagcagcaggggccctggct

SEQ ID NO: 30655 - DNA, 20 bp, synthetic construct
  misc_feature 1..20: note = Description of Artificial Sequence: Synthetic oligonucleotide
  misc_feature 1..20: note = Target: FXN; (+) strand; PAM type: YTN; PAM sequence: CTG
  source 1..20: mol_type = other DNA
gcttttggaaactgacccga

SEQ ID NO: 30656 - DNA, 20 bp, synthetic construct
  misc_feature 1..20: note = Description of Artificial Sequence: Synthetic oligonucleotide
  misc_feature 1..20: note = Target: FXN; (+) strand; PAM type: YTN; PAM sequence: CTT
  source 1..20: mol_type = other DNA
ttggaaactgacccgacctt

SEQ ID NO: 30657 - DNA, 20 bp, synthetic construct
  misc_feature 1..20: note = Description of Artificial Sequence: Synthetic oligonucleotide
  misc_feature 1..20: note = Target: FXN; (+) strand; PAM type: YTN; PAM sequence: TTT
  source 1..20: mol_type = other DNA
tggaaactgacccgaccttt

SEQ ID NO: 30658 - DNA, 20 bp, synthetic construct
  misc_feature 1..20: note = Description of Artificial Sequence: Synthetic oligonucleotide
  misc_feature 1..20: note = Target: FXN; (+) strand; PAM type: YTN; PAM sequence: TTT
  source 1..20: mol_type = other DNA
ggaaactgacccgaccttta

SEQ ID NO: 30659 - DNA, 20 bp, synthetic construct
  misc_feature 1..20: note = Description of Artificial Sequence: Synthetic oligonucleotide
  misc_feature 1..20: note = Target: FXN; (+) strand; PAM type: YTN; PAM sequence: TTG
  source 1..20: mol_type = other DNA
gaaactgacccgacctttat

SEQ ID NO: 30660 - DNA, 20 bp, synthetic construct
  misc_feature 1..20: note = Description of Artificial Sequence: Synthetic oligonucleotide
  misc_feature 1..20: note = Target: FXN; (+) strand; PAM type: YTN; PAM sequence: CTG
  source 1..20: mol_type = other DNA
acccgacctttattccagat

SEQ ID NO: 30661 - DNA, 20 bp, synthetic construct
  misc_feature 1..20: note = Description of Artificial Sequence: Synthetic oligonucleotide
  misc_feature 1..20: note = Target: FXN; (+) strand; PAM type: YTN; PAM sequence: CTT
  source 1..20: mol_type = other DNA
tattccagattctgccccac

SEQ ID NO: 30662 - DNA, 20 bp, synthetic construct
  misc_feature 1..20: note = Description of Artificial Sequence: Synthetic oligonucleotide
  misc_feature 1..20: note = Target: FXN; (+) strand; PAM type: YTN; PAM sequence: TTT
  source 1..20: mol_type = other DNA
attccagattctgccccact

SEQ ID NO: 30663 - DNA, 20 bp, synthetic construct
  misc_feature 1..20: note = Description of Artificial Sequence: Synthetic oligonucleotide
  misc_feature 1..20: note = Target: FXN; (+) strand; PAM type: YTN; PAM sequence: TTA
  source 1..20: mol_type = other DNA
ttccagattctgccccactc

SEQ ID NO: 30664 - DNA, 20 bp, synthetic construct
  misc_feature 1..20: note = Description of Artificial Sequence: Synthetic oligonucleotide
  misc_feature 1..20: note = Target: FXN; (+) strand; PAM type: YTN; PAM sequence: TTC
  source 1..20: mol_type = other DNA
cagattctgccccactccgc

SEQ ID NO: 30665 - DNA, 20 bp, synthetic construct
  misc_feature 1..20: note = Description of Artificial Sequence: Synthetic oligonucleotide
  misc_feature 1..20: note = Target: FXN; (+) strand; PAM type: YTN; PAM sequence: TTC
  source 1..20: mol_type = other DNA
tgccccactccgcagagctg

SEQ ID NO: 30666 - DNA, 20 bp, synthetic construct
  misc_feature 1..20: note = Description of Artificial Sequence: Synthetic oligonucleotide
  misc_feature 1..20: note = Target: FXN; (+) strand; PAM type: YTN; PAM sequence: CTG
  source 1..20: mol_type = other DNA
ccccactccgcagagctgtg

SEQ ID NO: 30667 - DNA, 20 bp, synthetic construct
  misc_feature 1..20: note = Description of Artificial Sequence: Synthetic oligonucleotide
  misc_feature 1..20: note = Target: FXN; (+) strand; PAM type: YTN; PAM sequence: CTC
  source 1..20: mol_type = other DNA
cgcagagctgtgtgaccttg

SEQ ID NO: 30668 - DNA, 20 bp, synthetic construct
  misc_feature 1..20: note = Description of Artificial Sequence: Synthetic oligonucleotide
  misc_feature 1..20: note = Target: FXN; (+) strand; PAM type: YTN; PAM sequence: CTG
  source 1..20: mol_type = other DNA
tgtgaccttgggggattccc

SEQ ID NO: 30669 - DNA, 20 bp, synthetic construct
  misc_feature 1..20: note = Description of Artificial Sequence: Synthetic oligonucleotide
  misc_feature 1..20: note = Target: FXN; (+) strand; PAM type: YTN; PAM sequence: CTT
  source 1..20: mol_type = other DNA
gggggattcccctaacctct

SEQ ID NO: 30670 - DNA, 20 bp, synthetic construct
  misc_feature 1..20: note = Description of Artificial Sequence: Synthetic oligonucleotide
  misc_feature 1..20: note = Target: FXN; (+) strand; PAM type: YTN; PAM sequence: TTG
  source 1..20: mol_type = other DNA
ggggattcccctaacctctc

SEQ ID NO: 30671 - DNA, 20 bp, synthetic construct
  misc_feature 1..20: note = Description of Artificial Sequence: Synthetic oligonucleotide
  misc_feature 1..20: note = Target: FXN; (+) strand; PAM type: YTN; PAM sequence: TTC
  source 1..20: mol_type = other DNA
ccctaacctctctgagacgt

SEQ ID NO: 30672 - DNA, 20 bp, synthetic construct
  misc_feature 1..20: note = Description of Artificial Sequence: Synthetic oligonucleotide
  misc_feature 1..20: note = Target: FXN; (+) strand; PAM type: YTN; PAM sequence: CTA
  source 1..20: mol_type = other DNA
acctctctgagacgtggctt

SEQ ID NO: 30673 - DNA, 20 bp, synthetic construct
  misc_feature 1..20: note = Description of Artificial Sequence: Synthetic oligonucleotide
  misc_feature 1..20: note = Target: FXN; (+) strand; PAM type: YTN; PAM sequence: CTC
  source 1..20: mol_type = other DNA
tctgagacgtggctttgttt

SEQ ID NO: 30674 - DNA, 20 bp, synthetic construct
  misc_feature 1..20: note = Description of Artificial Sequence: Synthetic oligonucleotide
  misc_feature 1..20: note = Target: FXN; (+) strand; PAM type: YTN; PAM sequence: CTC
  source 1..20: mol_type = other DNA
tgagacgtggctttgttttc

SEQ ID NO: 30675 - DNA, 20 bp, synthetic construct
  misc_feature 1..20: note = Description of Artificial Sequence: Synthetic oligonucleotide
  misc_feature 1..20: note = Target: FXN; (+) strand; PAM type: YTN; PAM sequence: CTG
  source 1..20: mol_type = other DNA
agacgtggctttgttttctg

SEQ ID NO: 30676 - DNA, 20 bp, synthetic construct
  misc_feature 1..20: note = Description of Artificial Sequence: Synthetic oligonucleotide
  misc_feature 1..20: note = Target: FXN; (+) strand; PAM type: YTN; PAM sequence: CTT
  source 1..20: mol_type = other DNA
tgttttctgtagggagaaga

SEQ ID NO: 30677 - DNA, 20 bp, synthetic construct
  misc_feature 1..20: note = Description of Artificial Sequence: Synthetic oligonucleotide
  misc_feature 1..20: note = Target: FXN; (+) strand; PAM type: YTN; PAM sequence: TTT
  source 1..20: mol_type = other DNA
gttttctgtagggagaagat

SEQ ID NO: 30678 - DNA, 20 bp, synthetic construct
  misc_feature 1..20: note = Description of Artificial Sequence: Synthetic oligonucleotide
  misc_feature 1..20: note = Target: FXN; (+) strand; PAM type: YTN; PAM sequence: TTG
  source 1..20: mol_type = other DNA
ttttctgtagggagaagata

SEQ ID NO: 30679 - DNA, 20 bp, synthetic construct
  misc_feature 1..20: note = Description of Artificial Sequence: Synthetic oligonucleotide
  misc_feature 1..20: note = Target: FXN; (+) strand; PAM type: YTN; PAM sequence: TTT
  source 1..20: mol_type = other DNA
tctgtagggagaagataaag

SEQ ID NO: 30680 - DNA, 20 bp, synthetic construct
  misc_feature 1..20: note = Description of Artificial Sequence: Synthetic oligonucleotide
  misc_feature 1..20: note = Target: FXN; (+) strand; PAM type: YTN; PAM sequence: TTT
  source 1..20: mol_type = other DNA
ctgtagggagaagataaagg

SEQ ID NO: 30681 - DNA, 20 bp, synthetic construct
  misc_feature 1..20: note = Description of Artificial Sequence: Synthetic oligonucleotide
  misc_feature 1..20: note = Target: FXN; (+) strand; PAM type: YTN; PAM sequence: TTC
  source 1..20: mol_type = other DNA
tgtagggagaagataaaggt

SEQ ID NO: 30682 - DNA, 20 bp, synthetic construct
  misc_feature 1..20: note = Description of Artificial Sequence: Synthetic oligonucleotide
  misc_feature 1..20: note = Target: FXN; (+) strand; PAM type: YTN; PAM sequence: CTG
  source 1..20: mol_type = other DNA
tagggagaagataaaggtga

SEQ ID NO: 30683 - DNA, 20 bp, synthetic construct
  misc_feature 1..20: note = Description of Artificial Sequence: Synthetic oligonucleotide
  misc_feature 1..20: note = Target: FXN; (+) strand; PAM type: YTN; PAM sequence: TTT
  source 1..20: mol_type = other DNA
tgcggacctggtgtgaggat

SEQ ID NO: 30684 - DNA, 20 bp, synthetic construct
  misc_feature 1..20: note = Description of Artificial Sequence: Synthetic oligonucleotide
  misc_feature 1..20: note = Target: FXN; (+) strand; PAM type: YTN; PAM sequence: TTT
  source 1..20: mol_type = other DNA
gcggacctggtgtgaggatt

SEQ ID NO: 30685 - DNA, 20 bp, synthetic construct
  misc_feature 1..20: note = Description of Artificial Sequence: Synthetic oligonucleotide
  misc_feature 1..20: note = Target: FXN; (+) strand; PAM type: YTN; PAM sequence: TTG
  source 1..20: mol_type = other DNA
cggacctggtgtgaggatta

SEQ ID NO: 30686 - DNA, 20 bp, synthetic construct
  misc_feature 1..20: note = Description of Artificial Sequence: Synthetic oligonucleotide
  misc_feature 1..20: note = Target: FXN; (+) strand; PAM type: YTN; PAM sequence: CTG
  source 1..20: mol_type = other DNA
gtgtgaggattaaatgggaa

SEQ ID NO: 30687 - DNA, 20 bp, synthetic construct
  misc_feature 1..20: note = Description of Artificial Sequence: Synthetic oligonucleotide
  misc_feature 1..20: note = Target: FXN; (+) strand; PAM type: YTN; PAM sequence: TTA
  source 1..20: mol_type = other DNA
aatgggaataacatagataa

SEQ ID NO: 30688 - DNA, 20 bp, synthetic construct
  misc_feature 1..20: note = Description of Artificial Sequence: Synthetic oligonucleotide
  misc_feature 1..20: note = Target: FXN; (+) strand; PAM type: YTN; PAM sequence: CTT
  source 1..20: mol_type = other DNA
cagaacttcaaattagttcc

SEQ ID NO: 30689 - DNA, 20 bp, synthetic construct
  misc_feature 1..20: note = Description of Artificial Sequence: Synthetic oligonucleotide
  misc_feature 1..20: note = Target: FXN; (+) strand; PAM type: YTN; PAM sequence: TTC
  source 1..20: mol_type = other DNA
agaacttcaaattagttccc

SEQ ID NO: 30690 - DNA, 20 bp, synthetic construct
  misc_feature 1..20: note = Description of Artificial Sequence: Synthetic oligonucleotide
  misc_feature 1..20: note = Target: FXN; (+) strand; PAM type: YTN; PAM sequence: CTT
  source 1..20: mol_type = other DNA
caaattagttcccctttctt

SEQ ID NO: 30691 - DNA, 20 bp, synthetic construct
  misc_feature 1..20: note = Description of Artificial Sequence: Synthetic oligonucleotide
  misc_feature 1..20: note = Target: FXN; (+) strand; PAM type: YTN; PAM sequence: TTC
  source 1..20: mol_type = other DNA
aaattagttcccctttcttc

SEQ ID NO: 30692 - DNA, 20 bp, synthetic construct
  misc_feature 1..20: note = Description of Artificial Sequence: Synthetic oligonucleotide
  misc_feature 1..20: note = Target: FXN; (+) strand; PAM type: YTN; PAM sequence: TTA
  source 1..20: mol_type = other DNA
gttcccctttcttcctttgg

SEQ ID NO: 30693 - DNA, 20 bp, synthetic construct
  misc_feature 1..20: note = Description of Artificial Sequence: Synthetic oligonucleotide
  misc_feature 1..20: note = Target: FXN; (+) strand; PAM type: YTN; PAM sequence: TTC
  source 1..20: mol_type = other DNA
ccctttcttcctttgggggg

SEQ ID NO: 30694 - DNA, 20 bp, synthetic construct
  misc_feature 1..20: note = Description of Artificial Sequence: Synthetic oligonucleotide
  misc_feature 1..20: note = Target: FXN; (+) strand; PAM type: YTN; PAM sequence: CTT
  source 1..20: mol_type = other DNA
tcttcctttggggggtacaa

SEQ ID NO: 30695 - DNA, 20 bp, synthetic construct
  misc_feature 1..20: note = Description of Artificial Sequence: Synthetic oligonucleotide
  misc_feature 1..20: note = Target: FXN; (+) strand; PAM type: YTN; PAM sequence: TTT
  source 1..20: mol_type = other DNA
cttcctttggggggtacaaa

SEQ ID NO: 30696 - DNA, 20 bp, synthetic construct
  misc_feature 1..20: note = Description of Artificial Sequence: Synthetic oligonucleotide
  misc_feature 1..20: note = Target: FXN; (+) strand; PAM type: YTN; PAM sequence: TTC
  source 1..20: mol_type = other DNA
ttcctttggggggtacaaag

SEQ ID NO: 30697 - DNA, 20 bp, synthetic construct
  misc_feature 1..20: note = Description of Artificial Sequence: Synthetic oligonucleotide
  misc_feature 1..20: note = Target: FXN; (+) strand; PAM type: YTN; PAM sequence: CTT
  source 1..20: mol_type = other DNA
cctttggggggtacaaagaa

SEQ ID NO: 30698 - DNA, 20 bp, synthetic construct
  misc_feature 1..20: note = Description of Artificial Sequence: Synthetic oligonucleotide
  misc_feature 1..20: note = Target: FXN; (+) strand; PAM type: YTN; PAM sequence: TTC
  source 1..20: mol_type = other DNA
ctttggggggtacaaagaaa

SEQ ID NO: 30699 - DNA, 20 bp, synthetic construct
  misc_feature 1..20: note = Description of Artificial Sequence: Synthetic oligonucleotide
  misc_feature 1..20: note = Target: FXN; (+) strand; PAM type: YTN; PAM sequence: CTT
  source 1..20: mol_type = other DNA
tggggggtacaaagaaatat

SEQ ID NO: 30700 - DNA, 20 bp, synthetic construct
  misc_feature 1..20: note = Description of Artificial Sequence: Synthetic oligonucleotide
  misc_feature 1..20: note = Target: FXN; (+) strand; PAM type: YTN; PAM sequence: TTT
  source 1..20: mol_type = other DNA
ggggggtacaaagaaatatc

SEQ ID NO: 30701 - DNA, 20 bp, synthetic construct
  misc_feature 1..20: note = Description of Artificial Sequence: Synthetic oligonucleotide
  misc_feature 1..20: note = Target: FXN; (+) strand; PAM type: YTN; PAM sequence: TTG
  source 1..20: mol_type = other DNA
gggggtacaaagaaatatct

SEQ ID NO: 30702 - DNA, 20 bp, synthetic construct
  misc_feature 1..20: note = Description of Artificial Sequence: Synthetic oligonucleotide
  misc_feature 1..20: note = Target: FXN; (+) strand; PAM type: YTN; PAM sequence: CTG
  source 1..20: mol_type = other DNA
acccagttacgccacggctt

SEQ ID NO: 30703 - DNA, 20 bp, synthetic construct
  misc_feature 1..20: note = Description of Artificial Sequence: Synthetic oligonucleotide
  misc_feature 1..20: note = Target: FXN; (+) strand; PAM type: YTN; PAM sequence: TTA
  source 1..20: mol_type = other DNA
cgccacggcttgaaaggagg

SEQ ID NO: 30704 - DNA, 20 bp, synthetic construct
  misc_feature 1..20: note = Description of Artificial Sequence: Synthetic oligonucleotide
  misc_feature 1..20: note = Target: FXN; (+) strand; PAM type: YTN; PAM sequence: CTT
  source 1..20: mol_type = other DNA
gaaaggaggaaacccaaaga

SEQ ID NO: 30705 - DNA, 20 bp, synthetic construct
  misc_feature 1..20: note = Description of Artificial Sequence: Synthetic oligonucleotide
  misc_feature 1..20: note = Target: FXN; (+) strand; PAM type: YTN; PAM sequence: TTG
  source 1..20: mol_type = other DNA
aaaggaggaaacccaaagaa

SEQ ID NO: 30706 - DNA, 20 bp, synthetic construct
  misc_feature 1..20: note = Description of Artificial Sequence: Synthetic oligonucleotide
  misc_feature 1..20: note = Target: FXN; (+) strand; PAM type: YTN; PAM sequence: CTG
  source 1..20: mol_type = other DNA
tggggatgaggaagattcct

SEQ ID NO: 30707 - DNA, 20 bp, synthetic construct
  misc_feature 1..20: note = Description of Artificial Sequence: Synthetic oligonucleotide
  misc_feature 1..20: note = Target: FXN; (+) strand; PAM type: YTN; PAM sequence: TTC
  source 1..20: mol_type = other DNA
ctcaaggggaggacatggta

SEQ ID NO: 30708 - DNA, 20 bp, synthetic construct
  misc_feature 1..20: note = Description of Artificial Sequence: Synthetic oligonucleotide
  misc_feature 1..20: note = Target: FXN; (+) strand; PAM type: YTN; PAM sequence: CTC
  source 1..20: mol_type = other DNA
aaggggaggacatggtattt

SEQ ID NO: 30709 - DNA, 20 bp, synthetic construct
  misc_feature 1..20: note = Description of Artificial Sequence: Synthetic oligonucleotide
  misc_feature 1..20: note = Target: FXN; (+) strand; PAM type: YTN; PAM sequence: TTT
  source 1..20: mol_type = other DNA
aatgagggtcttgaagatgc

SEQ ID NO: 30710 - DNA, 20 bp, synthetic construct
  misc_feature 1..20: note = Description of Artificial Sequence: Synthetic oligonucleotide
  misc_feature 1..20: note = Target: FXN; (+) strand; PAM type: YTN; PAM sequence: TTA
  source 1..20: mol_type = other DNA
atgagggtcttgaagatgcc

SEQ ID NO: 30711 - DNA, 20 bp, synthetic construct
  misc_feature 1..20: note = Description of Artificial Sequence: Synthetic oligonucleotide
  misc_feature 1..20: note = Target: FXN; (+) strand; PAM type: YTN; PAM sequence: CTT
  source 1..20: mol_type = other DNA
gaagatgccaaggaagtggt

SEQ ID NO: 30712 - DNA, 20 bp, synthetic construct
  misc_feature 1..20: note = Description of Artificial Sequence: Synthetic oligonucleotide
  misc_feature 1..20: note = Target: FXN; (+) strand; PAM type: YTN; PAM sequence: TTG
  source 1..20: mol_type = other DNA
aagatgccaaggaagtggta

SEQ ID NO: 30713 - DNA, 20 bp, synthetic construct
  misc_feature 1..20: note = Description of Artificial Sequence: Synthetic oligonucleotide
  misc_feature 1..20: note = Target: FXN; (+) strand; PAM type: YTN; PAM sequence: TTT
  source 1..20: mol_type = other DNA
cacgaggagggaaccgtctg

SEQ ID NO: 30714 - DNA, 20 bp, synthetic construct
  misc_feature 1..20: note = Description of Artificial Sequence: Synthetic oligonucleotide
  misc_feature 1..20: note = Target: FXN; (+) strand; PAM type: YTN; PAM sequence: TTC
  source 1..20: mol_type = other DNA
acgaggagggaaccgtctgg

SEQ ID NO: 30715 - DNA, 20 bp, synthetic construct
  misc_feature 1..20: note = Description of Artificial Sequence: Synthetic oligonucleotide
  misc_feature 1..20: note = Target: FXN; (+) strand; PAM type: YTN; PAM sequence: CTG
  source 1..20: mol_type = other DNA
ggcaaaggccaggaaggcgg

SEQ ID NO: 30716 - DNA, 20 bp, synthetic construct
  misc_feature 1..20: note = Description of Artificial Sequence: Synthetic oligonucleotide
  misc_feature 1..20: note = Target: FXN; (+) strand; PAM type: YTN; PAM sequence: CTT
  source 1..20: mol_type = other DNA
cagagtggctggtacgccgc

SEQ ID NO: 30717 - DNA, 20 bp, synthetic construct
  misc_feature 1..20: note = Description of Artificial Sequence: Synthetic oligonucleotide
  misc_feature 1..20: note = Target: FXN; (+) strand; PAM type: YTN; PAM sequence: TTC
  source 1..20: mol_type = other DNA
agagtggctggtacgccgca

SEQ ID NO: 30718 - DNA, 20 bp, synthetic construct
  misc_feature 1..20: note = Description of Artificial Sequence: Synthetic oligonucleotide
  misc_feature 1..20: note = Target: FXN; (+) strand; PAM type: YTN; PAM sequence: CTG
  source 1..20: mol_type = other DNA
gtacgccgcatgtattaggg

SEQ ID NO: 30719 - DNA, 20 bp, synthetic construct
  misc_feature 1..20: note = Description of Artificial Sequence: Synthetic oligonucleotide
  misc_feature 1..20: note = Target: FXN; (+) strand; PAM type: YTN; PAM sequence: TTA
  source 1..20: mol_type = other DNA
ggggagatgaaagaggcagg

SEQ ID NO: 30720 - DNA, 20 bp, synthetic construct
  misc_feature 1..20: note = Description of Artificial Sequence: Synthetic oligonucleotide
  misc_feature 1..20: note = Target: FXN; (+) strand; PAM type: YTN; PAM sequence: TTT
  source 1..20: mol_type = other DNA
gtgttgctctccggagtttg

SEQ ID NO: 30721 - DNA, 20 bp, synthetic construct
  misc_feature 1..20: note = Description of Artificial Sequence: Synthetic oligonucleotide
  misc_feature 1..20: note = Target: FXN; (+) strand; PAM type: YTN; PAM sequence: TTG
  source 1..20: mol_type = other DNA
tgttgctctccggagtttgt

SEQ ID NO: 30722 - DNA, 20 bp, synthetic construct
  misc_feature 1..20: note = Description of Artificial Sequence: Synthetic oligonucleotide
  misc_feature 1..20: note = Target: FXN; (+) strand; PAM type: YTN; PAM sequence: TTG
  source 1..20: mol_type = other DNA
ctctccggagtttgtacttt

SEQ ID NO: 30723 - DNA, 20 bp, synthetic construct
  misc_feature 1..20: note = Description of Artificial Sequence: Synthetic oligonucleotide
  misc_feature 1..20: note = Target: FXN; (+) strand; PAM type: YTN; PAM sequence: CTC
  source 1..20: mol_type = other DNA
tccggagtttgtactttagg

SEQ ID NO: 30724 - DNA, 20 bp, synthetic construct
  misc_feature 1..20: note = Description of Artificial Sequence: Synthetic oligonucleotide
  misc_feature 1..20: note = Target: FXN; (+) strand; PAM type: YTN; PAM sequence: CTC
  source 1..20: mol_type = other DNA
cggagtttgtactttaggct

SEQ ID NO: 30725 - DNA, 20 bp, synthetic construct
  misc_feature 1..20: note = Description of Artificial Sequence: Synthetic oligonucleotide
  misc_feature 1..20: note = Target: FXN; (+) strand; PAM type: YTN; PAM sequence: TTT
  source 1..20: mol_type = other DNA
gtactttaggcttgaacttc

SEQ ID NO: 30726 - DNA, 20 bp, synthetic construct
  misc_feature 1..20: note = Description of Artificial Sequence: Synthetic oligonucleotide
  misc_feature 1..20: note = Target: FXN; (+) strand; PAM type: YTN; PAM sequence: TTG
  source 1..20: mol_type = other DNA
tactttaggcttgaacttcc

SEQ ID NO: 30727 - DNA, 20 bp, synthetic construct
  misc_feature 1..20: note = Description of Artificial Sequence: Synthetic oligonucleotide
  misc_feature 1..20: note = Target: FXN; (+) strand; PAM type: YTN; PAM sequence: CTT
  source 1..20: mol_type = other DNA
taggcttgaacttcccacac

SEQ ID NO: 30728 - DNA, 20 bp, synthetic construct
  misc_feature 1..20: note = Description of Artificial Sequence: Synthetic oligonucleotide
  misc_feature 1..20: note = Target: FXN; (+) strand; PAM type: YTN; PAM sequence: TTT
  source 1..20: mol_type = other DNA
aggcttgaacttcccacacg

SEQ ID NO: 30729 - DNA, 20 bp, synthetic construct
  misc_feature 1..20: note = Description of Artificial Sequence: Synthetic oligonucleotide
  misc_feature 1..20: note = Target: FXN; (+) strand; PAM type: YTN; PAM sequence: TTA
  source 1..20: mol_type = other DNA
ggcttgaacttcccacacgt

SEQ ID NO: 30730 - DNA, 20 bp, synthetic construct
  misc_feature 1..20: note = Description of Artificial Sequence: Synthetic oligonucleotide
  misc_feature 1..20: note = Target: FXN; (+) strand; PAM type: YTN; PAM sequence: CTT
  source 1..20: mol_type = other DNA
gaacttcccacacgtgttat

SEQ ID NO: 30731 - DNA, 20 bp, synthetic construct
  misc_feature 1..20: note = Description of Artificial Sequence: Synthetic oligonucleotide
  misc_feature 1..20: note = Target: FXN; (+) strand; PAM type: YTN; PAM sequence: TTG
  source 1..20: mol_type = other DNA
aacttcccacacgtgttatt

SEQ ID NO: 30732 - DNA, 20 bp, synthetic construct
  misc_feature 1..20: note = Description of Artificial Sequence: Synthetic oligonucleotide
  misc_feature 1..20: note = Target: FXN; (+) strand; PAM type: YTN; PAM sequence: CTT
  source 1..20: mol_type = other DNA
cccacacgtgttatttggcc

SEQ ID NO: 30733 - DNA, 20 bp, synthetic construct
  misc_feature 1..20: note = Description of Artificial Sequence: Synthetic oligonucleotide
  misc_feature 1..20: note = Target: FXN; (+) strand; PAM type: YTN; PAM sequence: TTC
  source 1..20: mol_type = other DNA
ccacacgtgttatttggccc

SEQ ID NO: 30734 - DNA, 20 bp, synthetic construct
  misc_feature 1..20: note = Description of Artificial Sequence: Synthetic oligonucleotide
  misc_feature 1..20: note = Target: FXN; (+) strand; PAM type: YTN; PAM sequence: TTA
  source 1..20: mol_type = other DNA
tttggcccacattgtgtttg

SEQ ID NO: 30735 - DNA, 20 bp, synthetic construct
  misc_feature 1..20: note = Description of Artificial Sequence: Synthetic oligonucleotide
  misc_feature 1..20: note = Target: FXN; (+) strand; PAM type: YTN; PAM sequence: TTT
  source 1..20: mol_type = other DNA
ggcccacattgtgtttgaag

SEQ ID NO: 30736 - DNA, 20 bp, synthetic construct
  misc_feature 1..20: note = Description of Artificial Sequence: Synthetic oligonucleotide
  misc_feature 1..20: note = Target: FXN; (+) strand; PAM type: YTN; PAM sequence: TTG
  source 1..20: mol_type = other DNA
gcccacattgtgtttgaaga

SEQ ID NO: 30737 - DNA, 20 bp, synthetic construct
  misc_feature 1..20: note = Description of Artificial Sequence: Synthetic oligonucleotide
  misc_feature 1..20: note = Target: FXN; (+) strand; PAM type: YTN; PAM sequence: TTG
  source 1..20: mol_type = other DNA
tgtttgaagaaactttggga

SEQ ID NO: 30738 - DNA, 20 bp, synthetic construct
  misc_feature 1..20: note = Description of Artificial Sequence: Synthetic oligonucleotide
  misc_feature 1..20: note = Target: FXN; (+) strand; PAM type: YTN; PAM sequence: TTT
  source 1..20: mol_type = other DNA
gaagaaactttgggattggt

SEQ ID NO: 30739 - DNA, 20 bp, synthetic construct
  misc_feature 1..20: note = Description of Artificial Sequence: Synthetic oligonucleotide
  misc_feature 1..20: note = Target: FXN; (+) strand; PAM type: YTN; PAM sequence: TTG
  source 1..20: mol_type = other DNA
aagaaactttgggattggtt

SEQ ID NO: 30740 - DNA, 20 bp, synthetic construct
  misc_feature 1..20: note = Description of Artificial Sequence: Synthetic oligonucleotide
  misc_feature 1..20: note = Target: FXN; (+) strand; PAM type: YTN; PAM sequence: CTT
  source 1..20: mol_type = other DNA
tgggattggttgccagtgct

SEQ ID NO: 30741 - DNA, 20 bp, synthetic construct
  misc_feature 1..20: note = Description of Artificial Sequence: Synthetic oligonucleotide
  misc_feature 1..20: note = Target: FXN; (+) strand; PAM type: YTN; PAM sequence: TTT
  source 1..20: mol_type = other DNA
gggattggttgccagtgctt

SEQ ID NO: 30742 - DNA, 20 bp, synthetic construct
  misc_feature 1..20: note = Description of Artificial Sequence: Synthetic oligonucleotide
  misc_feature 1..20: note = Target: FXN; (+) strand; PAM type: YTN; PAM sequence: TTG
  source 1..20: mol_type = other DNA
ggattggttgccagtgctta

SEQ ID NO: 30743 - DNA, 20 bp, synthetic construct
  misc_feature 1..20: note = Description of Artificial Sequence: Synthetic oligonucleotide
  misc_feature 1..20: note = Target: FXN; (+) strand; PAM type: YTN; PAM sequence: TTG
  source 1..20: mol_type = other DNA
gttgccagtgcttaaaagtt

SEQ ID NO: 30744 - DNA, 20 bp, synthetic construct
  misc_feature 1..20: note = Description of Artificial Sequence: Synthetic oligonucleotide
  misc_feature 1..20: note = Target: FXN; (+) strand; PAM type: YTN; PAM sequence: TTG
  source 1..20: mol_type = other DNA
ccagtgcttaaaagttagga

SEQ ID NO: 30745 - DNA, 20 bp, synthetic construct
  misc_feature 1..20: note = Description of Artificial Sequence: Synthetic oligonucleotide
  misc_feature 1..20: note = Target: FXN; (+) strand; PAM type: YTN; PAM sequence: CTT
  source 1..20: mol_type = other DNA
aaaagttaggacttagaaaa

SEQ ID NO: 30746 - DNA, 20 bp, synthetic construct
  misc_feature 1..20: note = Description of Artificial Sequence: Synthetic oligonucleotide
  misc_feature 1..20: note = Target: FXN; (+) strand; PAM type: YTN; PAM sequence: TTA
  source 1..20: mol_type = other DNA
aaagttaggacttagaaaat

SEQ ID NO: 30747 - DNA, 20 bp, synthetic construct
  misc_feature 1..20: note = Description of Artificial Sequence: Synthetic oligonucleotide
  misc_feature 1..20: note = Target: FXN; (+) strand; PAM type: YTN; PAM sequence: TTA
  source 1..20: mol_type = other DNA
ggacttagaaaatggatttc

SEQ ID NO: 30748 - DNA, 20 bp, synthetic construct
  misc_feature 1..20: note = Description of Artificial Sequence: Synthetic oligonucleotide
  misc_feature 1..20: note = Target: FXN; (+) strand; PAM type: YTN; PAM sequence: CTT
  source 1..20: mol_type = other DNA
agaaaatggatttcctggca

SEQ ID NO: 30749 - DNA, 20 bp, synthetic construct
  misc_feature 1..20: note = Description of Artificial Sequence: Synthetic oligonucleotide
  misc_feature 1..20: note = Target: FXN; (+) strand; PAM type: YTN; PAM sequence: TTA
  source 1..20: mol_type = other DNA
gaaaatggatttcctggcag

SEQ ID NO: 30750 - DNA, 20 bp, synthetic construct
  misc_feature 1..20: note = Description of Artificial Sequence: Synthetic oligonucleotide
  misc_feature 1..20: note = Target: FXN; (+) strand; PAM type: YTN; PAM sequence: TTT
  source 1..20: mol_type = other DNA
cctggcaggacgcggtggct

SEQ ID NO: 30751 - DNA, 20 bp, synthetic construct
  misc_feature 1..20: note = Description of Artificial Sequence: Synthetic oligonucleotide
  misc_feature 1..20: note = Target: FXN; (+) strand; PAM type: YTN; PAM sequence: TTC
  source 1..20: mol_type = other DNA
ctggcaggacgcggtggctc

SEQ ID NO: 30752 - DNA, 20 bp, synthetic construct
  misc_feature 1..20: note = Description of Artificial Sequence: Synthetic oligonucleotide
  misc_feature 1..20: note = Target: FXN; (+) strand; PAM type: YTN; PAM sequence: CTG
  source 1..20: mol_type = other DNA
gcaggacgcggtggctcatg

SEQ ID NO: 30753 - DNA, 20 bp, synthetic construct
  misc_feature 1..20: note = Description of Artificial Sequence: Synthetic oligonucleotide
  misc_feature 1..20: note = Target: FXN; (+) strand; PAM type: YTN; PAM sequence: CTC
  source 1..20: mol_type = other DNA
atgcccataatctcagcact

SEQ ID NO: 30754 - DNA, 20 bp, synthetic construct
  misc_feature 1..20: note = Description of Artificial Sequence: Synthetic oligonucleotide
  misc_feature 1..20: note = Target: FXN; (+) strand; PAM type: YTN; PAM sequence: CTC
  source 1..20: mol_type = other DNA
agcactttgggaggcctagg

SEQ ID NO: 30755 - DNA, 20 bp, synthetic construct
  misc_feature 1..20: note = Description of Artificial Sequence: Synthetic oligonucleotide
  misc_feature 1..20: note = Target: FXN; (+) strand; PAM type: YTN; PAM sequence: CTT
  source 1..20: mol_type = other DNA
tgggaggcctaggaaggtgg

SEQ ID NO: 30756 - DNA, 20 bp, synthetic construct
  misc_feature 1..20: note = Description of Artificial Sequence: Synthetic oligonucleotide
  misc_feature 1..20: note = Target: FXN; (+) strand; PAM type: YTN; PAM sequence: TTT
  source 1..20: mol_type = other DNA
gggaggcctaggaaggtgga

SEQ ID NO: 30757 - DNA, 20 bp, synthetic construct
  misc_feature 1..20: note = Description of Artificial Sequence: Synthetic oligonucleotide
  misc_feature 1..20: note = Target: FXN; (+) strand; PAM type: YTN; PAM sequence: TTG
  source 1..20: mol_type = other DNA
ggaggcctaggaaggtggat

SEQ ID NO: 30758 - DNA, 20 bp, synthetic construct
  misc_feature 1..20: note = Description of Artificial Sequence: Synthetic oligonucleotide
  misc_feature 1..20: note = Target: FXN; (+) strand; PAM type: YTN; PAM sequence: CTA
  source 1..20: mol_type = other DNA
ggaaggtggatcacctgagg

SEQ ID NO: 30759 - DNA, 20 bp, synthetic construct
  misc_feature 1..20: note = Description of Artificial Sequence: Synthetic oligonucleotide
  misc_feature 1..20: note = Target: FXN; (+) strand; PAM type: YTN; PAM sequence: CTG
  source 1..20: mol_type = other DNA
aggtccggagttcaagacta

SEQ ID NO: 30760 - DNA, 20 bp, synthetic construct
  misc_feature 1..20: note = Description of Artificial Sequence: Synthetic oligonucleotide
  misc_feature 1..20: note = Target: FXN; (+) strand; PAM type: YTN; PAM sequence: TTC
  source 1..20: mol_type = other DNA
aagactaacctggccaacat

SEQ ID NO: 30761 - DNA, 20 bp, synthetic construct
  misc_feature 1..20: note = Description of Artificial Sequence: Synthetic oligonucleotide
  misc_feature 1..20: note = Target: FXN; (+) strand; PAM type: YTN; PAM sequence: CTA
  source 1..20: mol_type = other DNA
acctggccaacatggtgaaa

SEQ ID NO: 30762 - DNA, 20 bp, synthetic construct
  misc_feature 1..20: note = Description of Artificial Sequence: Synthetic oligonucleotide
  misc_feature 1..20: note = Target: FXN; (+) strand; PAM type: YTN; PAM sequence: CTG
  source 1..20: mol_type = other DNA
gccaacatggtgaaacccag

SEQ ID NO: 30763 - DNA, 20 bp, synthetic construct
  misc_feature 1..20: note = Description of Artificial Sequence: Synthetic oligonucleotide
  misc_feature 1..20: note = Target: FXN; (+) strand; PAM type: YTN; PAM sequence: CTA
  source 1..20: mol_type = other DNA
ctaaaaaatacaaaaaaaaa

SEQ ID NO: 30764 - DNA, 20 bp, synthetic construct
  misc_feature 1..20: note = Description of Artificial Sequence: Synthetic oligonucleotide
  misc_feature 1..20: note = Target: FXN; (+) strand; PAM type: YTN; PAM sequence: CTA
  source 1..20: mol_type = other DNA
aaaaatacaaaaaaaaaaaa

SEQ ID NO: 30765 - DNA, 20 bp, synthetic construct
  misc_feature 1..20: note = Description of Artificial Sequence: Synthetic oligonucleotide
  misc_feature 1..20: note = Target: FXN; (+) strand; PAM type: YTN; PAM sequence: TTA
  source 1..20: mol_type = other DNA
gccgggcgtggtgtcgcgcg

SEQ ID NO: 30766 - DNA, 20 bp, synthetic construct
  misc_feature 1..20: note = Description of Artificial Sequence: Synthetic oligonucleotide
  misc_feature 1..20: note = Target: FXN; (+) strand; PAM type: YTN; PAM sequence: CTG
  source 1..20: mol_type = other DNA
taatcccagctactccagag

SEQ ID NO: 30767 - DNA, 20 bp, synthetic construct
  misc_feature 1..20: note = Description of Artificial Sequence: Synthetic oligonucleotide
  misc_feature 1..20: note = Target: FXN; (+) strand; PAM type: YTN; PAM sequence: CTA
  source 1..20: mol_type = other DNA
ctccagaggctgcggcagga

SEQ ID NO: 30768 - DNA, 20 bp, synthetic construct
  misc_feature 1..20: note = Description of Artificial Sequence: Synthetic oligonucleotide
  misc_feature 1..20: note = Target: FXN; (+) strand; PAM type: YTN; PAM sequence: CTC
  source 1..20: mol_type = other DNA
cagaggctgcggcaggagaa

SEQ ID NO: 30769 - DNA, 20 bp, synthetic construct
  misc_feature 1..20: note = Description of Artificial Sequence: Synthetic oligonucleotide
  misc_feature 1..20: note = Target: FXN; (+) strand; PAM type: YTN; PAM sequence: CTG
  source 1..20: mol_type = other DNA
cggcaggagaatcgcttgag

SEQ ID NO: 30770 - DNA, 20 bp, synthetic construct
  misc_feature 1..20: note = Description of Artificial Sequence: Synthetic oligonucleotide
  misc_feature 1..20: note = Target: FXN; (+) strand; PAM type: YTN; PAM sequence: CTT
  source 1..20: mol_type = other DNA
gagcccgggaggcagaggtt

SEQ ID NO: 30771 - DNA, 20 bp, synthetic construct
  misc_feature 1..20: note = Description of Artificial Sequence: Synthetic oligonucleotide
  misc_feature 1..20: note = Target: FXN; (+) strand; PAM type: YTN; PAM sequence: TTG
  source 1..20: mol_type = other DNA
agcccgggaggcagaggttg

SEQ ID NO: 30772 - DNA, 20 bp, synthetic construct
  misc_feature 1..20: note = Description of Artificial Sequence: Synthetic oligonucleotide
  misc_feature 1..20: note = Target: FXN; (+) strand; PAM type: YTN; PAM sequence: TTG
  source 1..20: mol_type = other DNA
cattaagccaagatcgccca

SEQ ID NO: 30773 - DNA, 20 bp, synthetic construct
  misc_feature 1..20: note = Description of Artificial Sequence: Synthetic oligonucleotide
  misc_feature 1..20: note = Target: FXN; (+) strand; PAM type: YTN; PAM sequence: TTA
  source 1..20: mol_type = other DNA
agccaagatcgcccaatgca

SEQ ID NO: 30774 - DNA, 20 bp, synthetic construct
  misc_feature 1..20: note = Description of Artificial Sequence: Synthetic oligonucleotide
  misc_feature 1..20: note = Target: FXN; (+) strand; PAM type: YTN; PAM sequence: CTC
  source 1..20: mol_type = other DNA
cggcctgggcgacagagcaa

SEQ ID NO: 30775 - DNA, 20 bp, synthetic construct
  misc_feature 1..20: note = Description of Artificial Sequence: Synthetic oligonucleotide
  misc_feature 1..20: note = Target: FXN; (+) strand; PAM type: YTN; PAM sequence: CTG
  source 1..20: mol_type = other DNA
ggcgacagagcaagactccg

SEQ ID NO: 30776 - DNA, 20 bp, synthetic construct
  misc_feature 1..20: note = Description of Artificial Sequence: Synthetic oligonucleotide
  misc_feature 1..20: note = Target: FXN; (+) strand; PAM type: YTN; PAM sequence: CTC
  source 1..20: mol_type = other DNA
cgtctcaaaaaataataata

SEQ ID NO: 30777 - DNA, 20 bp, synthetic construct
  misc_feature 1..20: note = Description of Artificial Sequence: Synthetic oligonucleotide
  misc_feature 1..20: note = Target: FXN; (+) strand; PAM type: YTN; PAM sequence: CTC
  source 1..20: mol_type = other DNA
aaaaaataataataataaat

SEQ ID NO: 30778 - DNA, 20 bp, synthetic construct
  misc_feature 1..20: note = Description of Artificial Sequence: Synthetic oligonucleotide
  misc_feature 1..20: note = Target: FXN; (+) strand; PAM type: YTN; PAM sequence: TTT
  source 1..20: mol_type = other DNA
cccagcatctctggaaaaat

SEQ ID NO: 30779 - DNA, 20 bp, synthetic construct
  misc_feature 1..20: note = Description of Artificial Sequence: Synthetic oligonucleotide
  misc_feature 1..20: note = Target: FXN; (+) strand; PAM type: YTN; PAM sequence: TTC
  source 1..20: mol_type = other DNA
ccagcatctctggaaaaata

SEQ ID NO: 30780 - DNA, 20 bp, synthetic construct
  misc_feature 1..20: note = Description of Artificial Sequence: Synthetic oligonucleotide
  misc_feature 1..20: note = Target: FXN; (+) strand; PAM type: YTN; PAM sequence: CTC
  source 1..20: mol_type = other DNA
tggaaaaataggcaagtgtg

SEQ ID NO: 30781 - DNA, 20 bp, synthetic construct
  misc_feature 1..20: note = Description of Artificial Sequence: Synthetic oligonucleotide
  misc_feature 1..20: note = Target: FXN; (+) strand; PAM type: YTN; PAM sequence: CTG
  source 1..20: mol_type = other DNA
gaaaaataggcaagtgtggc

SEQ ID NO: 30782 - DNA, 20 bp, synthetic construct
  misc_feature 1..20: note = Description of Artificial Sequence: Synthetic oligonucleotide
  misc_feature 1..20: note = Target: FXN; (+) strand; PAM type: YTN; PAM sequence: CTT
  source 1..20: mol_type = other DNA
agatctcctctaggaaagca

SEQ ID NO: 30783 - DNA, 20 bp, synthetic construct
  misc_feature 1..20: note = Description of Artificial Sequence: Synthetic oligonucleotide
  misc_feature 1..20: note = Target: FXN; (+) strand; PAM type: YTN; PAM sequence: TTA
  source 1..20: mol_type = other DNA
gatctcctctaggaaagcag

SEQ ID NO: 30784 - DNA, 20 bp, synthetic construct
  misc_feature 1..20: note = Description of Artificial Sequence: Synthetic oligonucleotide
  misc_feature 1..20: note = Target: FXN; (+) strand; PAM type: YTN; PAM sequence: CTC
  source 1..20: mol_type = other DNA
ctctaggaaagcagacattt

SEQ ID NO: 30785 - DNA, 20 bp, synthetic construct
  misc_feature 1..20: note = Description of Artificial Sequence: Synthetic oligonucleotide
  misc_feature 1..20: note = Target: FXN; (+) strand; PAM type: YTN; PAM sequence: CTC
  source 1..20: mol_type = other DNA
taggaaagcagacatttatt

SEQ ID NO: 30786 - DNA, 20 bp, synthetic construct
  misc_feature 1..20: note = Description of Artificial Sequence: Synthetic oligonucleotide
  misc_feature 1..20: note = Target: FXN; (+) strand; PAM type: YTN; PAM sequence: CTA
  source 1..20: mol_type = other DNA
ggaaagcagacatttattac

SEQ ID NO: 30787 - DNA, 20 bp, synthetic construct
  misc_feature 1..20: note = Description of Artificial Sequence: Synthetic oligonucleotide
  misc_feature 1..20: note = Target: FXN; (+) strand; PAM type: YTN; PAM sequence: TTT
  source 1..20: mol_type = other DNA
attacttggcttctgtgcac

SEQ ID NO: 30788 - DNA, 20 bp, synthetic construct
  misc_feature 1..20: note = Description of Artificial Sequence: Synthetic oligonucleotide
  misc_feature 1..20: note = Target: FXN; (+) strand; PAM type: YTN; PAM sequence: TTA
  source 1..20: mol_type = other DNA
ttacttggcttctgtgcact

SEQ ID NO: 30789 - DNA, 20 bp, synthetic construct
  misc_feature 1..20: note = Description of Artificial Sequence: Synthetic oligonucleotide
  misc_feature 1..20: note = Target: FXN; (+) strand; PAM type: YTN; PAM sequence: TTA
  source 1..20: mol_type = other DNA
cttggcttctgtgcactatc

SEQ ID NO: 30790 - DNA, 20 bp, synthetic construct
  misc_feature 1..20: note = Description of Artificial Sequence: Synthetic oligonucleotide
  misc_feature 1..20: note = Target: FXN; (+) strand; PAM type: YTN; PAM sequence: CTT
  source 1..20: mol_type = other DNA
ggcttctgtgcactatctga

SEQ ID NO: 30791 - DNA, 20 bp, synthetic construct
  misc_feature 1..20: note = Description of Artificial Sequence: Synthetic oligonucleotide
  misc_feature 1..20: note = Target: FXN; (+) strand; PAM type: YTN; PAM sequence: TTG
  source 1..20: mol_type = other DNA
gcttctgtgcactatctgag

SEQ ID NO: 30792 - DNA, 20 bp, synthetic construct
  misc_feature 1..20: note = Description of Artificial Sequence: Synthetic oligonucleotide
  misc_feature 1..20: note = Target: FXN; (+) strand; PAM type: YTN; PAM sequence: CTT
  source 1..20: mol_type = other DNA
ctgtgcactatctgagctgc

SEQ ID NO: 30793 - DNA, 20 bp, synthetic construct
  misc_feature 1..20: note = Description of Artificial Sequence: Synthetic oligonucleotide
  misc_feature 1..20: note = Target: FXN; (+) strand; PAM type: YTN; PAM sequence: TTC
  source 1..20: mol_type = other DNA
tgtgcactatctgagctgcc

SEQ ID NO: 30794 - DNA, 20 bp, synthetic construct
  misc_feature 1..20: note = Description of Artificial Sequence: Synthetic oligonucleotide
  misc_feature 1..20: note = Target: FXN; (+) strand; PAM type: YTN; PAM sequence: CTG
  source 1..20: mol_type = other DNA
tgcactatctgagctgccac

SEQ ID NO: 30795 - DNA, 20 bp, synthetic construct
  misc_feature 1..20: note = Description of Artificial Sequence: Synthetic oligonucleotide
  misc_feature 1..20: note = Target: FXN; (+) strand; PAM type: YTN; PAM sequence: CTA
  source 1..20: mol_type = other DNA
tctgagctgccacgtattgg

SEQ ID NO: 30796 - DNA, 20 bp, synthetic construct
  misc_feature 1..20: note = Description of Artificial Sequence: Synthetic oligonucleotide
  misc_feature 1..20: note = Target: FXN; (+) strand; PAM type: YTN; PAM sequence: CTG
  source 1..20: mol_type = other DNA
agctgccacgtattgggctt

SEQ ID NO: 30797 - DNA, 20 bp, synthetic construct
  misc_feature 1..20: note = Description of Artificial Sequence: Synthetic oligonucleotide
  misc_feature 1..20: note = Target: FXN; (+) strand; PAM type: YTN; PAM sequence: CTG
  source 1..20: mol_type = other DNA
ccacgtattgggcttccacc

SEQ ID NO: 30798 - DNA, 20 bp, synthetic construct
  misc_feature 1..20: note = Description of Artificial Sequence: Synthetic oligonucleotide
  misc_feature 1..20: note = Target: FXN; (+) strand; PAM type: YTN; PAM sequence: TTG
  source 1..20: mol_type = other DNA
ggcttccacccctgcctgtg

SEQ ID NO: 30799 - DNA, 20 bp, synthetic construct
  misc_feature 1..20: note = Description of Artificial Sequence: Synthetic oligonucleotide
  misc_feature 1..20: note = Target: FXN; (+) strand; PAM type: YTN; PAM sequence: CTT
  source 1..20: mol_type = other DNA
ccacccctgcctgtgtggac

SEQ ID NO: 30800 - DNA, 20 bp, synthetic construct
  misc_feature 1..20: note = Description of Artificial Sequence: Synthetic oligonucleotide
  misc_feature 1..20: note = Target: FXN; (+) strand; PAM type: YTN; PAM sequence: TTC
  source 1..20: mol_type = other DNA
cacccctgcctgtgtggaca

SEQ ID NO: 30801 - DNA, 20 bp, synthetic construct
  misc_feature 1..20: note = Description of Artificial Sequence: Synthetic oligonucleotide
  misc_feature 1..20: note = Target: FXN; (+) strand; PAM type: YTN; PAM sequence: CTG
  source 1..20: mol_type = other DNA
cctgtgtggacagcatgggt

SEQ ID NO: 30802 - DNA, 20 bp, synthetic construct
  misc_feature 1..20: note = Description of Artificial Sequence: Synthetic oligonucleotide
  misc_feature 1..20: note = Target: FXN; (+) strand; PAM type: YTN; PAM sequence: CTG
  source 1..20: mol_type = other DNA
tgtggacagcatgggttgtc

SEQ ID NO: 30803 - DNA, 20 bp, synthetic construct
  misc_feature 1..20: note = Description of Artificial Sequence: Synthetic oligonucleotide
  misc_feature 1..20: note = Target: FXN; (+) strand; PAM type: YTN; PAM sequence: TTG
  source 1..20: mol_type = other DNA
tcagcagagttgtgttttgt

SEQ ID NO: 30804 - DNA, 20 bp, synthetic construct
  misc_feature 1..20: note = Description of Artificial Sequence: Synthetic oligonucleotide
  misc_feature 1..20: note = Target: FXN; (+) strand; PAM type: YTN; PAM sequence: TTG
  source 1..20: mol_type = other DNA
tgttttgttttgtttttttg

SEQ ID NO: 30805 - DNA, 20 bp, synthetic construct
  misc_feature 1..20: note = Description of Artificial Sequence: Synthetic oligonucleotide
  misc_feature 1..20: note = Target: FXN; (+) strand; PAM type: YTN; PAM sequence: TTT
  source 1..20: mol_type = other DNA
tgttttgtttttttgagaca

SEQ ID NO: 30806 - DNA, 20 bp, synthetic construct
  misc_feature 1..20: note = Description of Artificial Sequence: Synthetic oligonucleotide
  misc_feature 1..20: note = Target: FXN; (+) strand; PAM type: YTN; PAM sequence: TTT
  source 1..20: mol_type = other DNA
gttttgtttttttgagacag

SEQ ID NO: 30807 - DNA, 20 bp, synthetic construct
  misc_feature 1..20: note = Description of Artificial Sequence: Synthetic oligonucleotide
  misc_feature 1..20: note = Target: FXN; (+) strand; PAM type: YTN; PAM sequence: TTG
  source 1..20: mol_type = other DNA
ttttgtttttttgagacaga

SEQ ID NO: 30808 - DNA, 20 bp, synthetic construct
  misc_feature 1..20: note = Description of Artificial Sequence: Synthetic oligonucleotide
  misc_feature 1..20: note = Target: FXN; (+) strand; PAM type: YTN; PAM sequence: TTT
  source 1..20: mol_type = other DNA
tgtttttttgagacagagtt

SEQ ID NO: 30809 - DNA, 20 bp, synthetic construct
  misc_feature 1..20: note = Description of Artificial Sequence: Synthetic oligonucleotide
  misc_feature 1..20: note = Target: FXN; (+) strand; PAM type: YTN; PAM sequence: TTT
  source 1..20: mol_type = other DNA
gtttttttgagacagagttt

SEQ ID NO: 30810 - DNA, 20 bp, synthetic construct
  misc_feature 1..20: note = Description of Artificial Sequence: Synthetic oligonucleotide
  misc_feature 1..20: note = Target: FXN; (+) strand; PAM type: YTN; PAM sequence: TTG
  source 1..20: mol_type = other DNA
tttttttgagacagagtttc

SEQ ID NO: 30811 - DNA, 20 bp, synthetic construct
  misc_feature 1..20: note = Description of Artificial Sequence: Synthetic oligonucleotide
  misc_feature 1..20: note = Target: FXN; (+) strand; PAM type: YTN; PAM sequence: TTT
  source 1..20: mol_type = other DNA
ttttgagacagagtttccct

SEQ ID NO: 30812 - DNA, 20 bp, synthetic construct
  misc_feature 1..20: note = Description of Artificial Sequence: Synthetic oligonucleotide
  misc_feature 1..20: note = Target: FXN; (+) strand; PAM type: YTN; PAM sequence: TTT
  source 1..20: mol_type = other DNA
tttgagacagagtttccctc

SEQ ID NO: 30813 - DNA, 20 bp, synthetic construct
  misc_feature 1..20: note = Description of Artificial Sequence: Synthetic oligonucleotide
  misc_feature 1..20: note = Target: FXN; (+) strand; PAM type: YTN; PAM sequence: TTT
  source 1..20: mol_type = other DNA
ttgagacagagtttccctct

SEQ ID NO: 30814 - DNA, 20 bp, synthetic construct
  misc_feature 1..20: note = Description of Artificial Sequence: Synthetic oligonucleotide
  misc_feature 1..20: note = Target: FXN; (+) strand; PAM type: YTN; PAM sequence: TTT
  source 1..20: mol_type = other DNA
tgagacagagtttccctctt

SEQ ID NO: 30815 - DNA, 20 bp, synthetic construct
  misc_feature 1..20: note = Description of Artificial Sequence: Synthetic oligonucleotide
  misc_feature 1..20: note = Target: FXN; (+) strand; PAM type: YTN; PAM sequence: TTT
  source 1..20: mol_type = other DNA
gagacagagtttccctcttg

SEQ ID NO: 30816 - DNA, 20 bp, synthetic construct
  misc_feature 1..20: note = Description of Artificial Sequence: Synthetic oligonucleotide
  misc_feature 1..20: note = Target: FXN; (+) strand; PAM type: YTN; PAM sequence: TTG
  source 1..20: mol_type = other DNA
agacagagtttccctcttgt

SEQ ID NO: 30817 - DNA, 20 bp, synthetic construct
  misc_feature 1..20: note = Description of Artificial Sequence: Synthetic oligonucleotide
  misc_feature 1..20: note = Target: FXN; (+) strand; PAM type: YTN; PAM sequence: TTT
  source 1..20: mol_type = other DNA
ccctcttgttgcccaggctg

SEQ ID NO: 30818 - DNA, 20 bp, synthetic construct
  misc_feature 1..20: note = Description of Artificial Sequence: Synthetic oligonucleotide
  misc_feature 1..20: note = Target: FXN; (+) strand; PAM type: YTN; PAM sequence: TTC
  source 1..20: mol_type = other DNA
cctcttgttgcccaggctgg

SEQ ID NO: 30819 - DNA, 20 bp, synthetic construct
  misc_feature 1..20: note = Description of Artificial Sequence: Synthetic oligonucleotide
  misc_feature 1..20: note = Target: FXN; (+) strand; PAM type: YTN; PAM sequence: CTC
  source 1..20: mol_type = other DNA
ttgttgcccaggctggagtg

SEQ ID NO: 30820 - DNA, 20 bp, synthetic construct
  misc_feature 1..20: note = Description of Artificial Sequence: Synthetic oligonucleotide
  misc_feature 1..20: note = Target: FXN; (+) strand; PAM type: YTN; PAM sequence: CTT
  source 1..20: mol_type = other DNA
gttgcccaggctggagtgca

SEQ ID NO: 30821 - DNA, 20 bp, synthetic construct
  misc_feature 1..20: note = Description of Artificial Sequence: Synthetic oligonucleotide
  misc_feature 1..20: note = Target: FXN; (+) strand; PAM type: YTN; PAM sequence: TTG
  source 1..20: mol_type = other DNA
ttgcccaggctggagtgcag

SEQ ID NO: 30822 - DNA, 20 bp, synthetic construct
  misc_feature 1..20: note = Description of Artificial Sequence: Synthetic oligonucleotide
  misc_feature 1..20: note = Target: FXN; (+) strand; PAM type: YTN; PAM sequence: TTG
  source 1..20: mol_type = other DNA
cccaggctggagtgcagtgg

SEQ ID NO: 30823 - DNA, 20 bp, synthetic construct
  misc_feature 1..20: note = Description of Artificial Sequence: Synthetic oligonucleotide
  misc_feature 1..20: note = Target: FXN; (+) strand; PAM type: YTN; PAM sequence: CTG
  source 1..20: mol_type = other DNA
gagtgcagtggctcagtctc

SEQ ID NO: 30824 - DNA, 20 bp, synthetic construct
  misc_feature 1..20: note = Description of Artificial Sequence: Synthetic oligonucleotide
  misc_feature 1..20: note = Target: FXN; (+) strand; PAM type: YTN; PAM sequence: CTC
  source 1..20: mol_type = other DNA
agtctcagctcactgcaacc

SEQ ID NO: 30825 - DNA, 20 bp, synthetic construct
  misc_feature 1..20: note = Description of Artificial Sequence: Synthetic oligonucleotide
  misc_feature 1..20: note = Target: FXN; (+) strand; PAM type: YTN; PAM sequence: CTC
  source 1..20: mol_type = other DNA
agctcactgcaacctctgcc

SEQ ID NO: 30826 - DNA, 20 bp, synthetic construct
  misc_feature 1..20: note = Description of Artificial Sequence: Synthetic oligonucleotide
  misc_feature 1..20: note = Target: FXN; (+) strand; PAM type: YTN; PAM sequence: CTC
  source 1..20: mol_type = other DNA
actgcaacctctgcctcctg

SEQ ID NO: 30827 - DNA, 20 bp, synthetic construct
  misc_feature 1..20: note = Description of Artificial Sequence: Synthetic oligonucleotide
  misc_feature 1..20: note = Target: FXN; (+) strand; PAM type: YTN; PAM sequence: CTG
  source 1..20: mol_type = other DNA
caacctctgcctcctgggtt

SEQ ID NO: 30828 - DNA, 20 bp, synthetic construct
  misc_feature 1..20: note = Description of Artificial Sequence: Synthetic oligonucleotide
  misc_feature 1..20: note = Target: FXN; (+) strand; PAM type: YTN; PAM sequence: CTC
  source 1..20: mol_type = other DNA
tgcctcctgggttcaagtga

SEQ ID NO: 30829 - DNA, 20 bp, synthetic construct
  misc_feature 1..20: note = Description of Artificial Sequence: Synthetic oligonucleotide
  misc_feature 1..20: note = Target: FXN; (+) strand; PAM type: YTN; PAM sequence: CTG
  source 1..20: mol_type = other DNA
cctcctgggttcaagtgatt

SEQ ID NO: 30830 - DNA, 20 bp, synthetic construct
  misc_feature 1..20: note = Description of Artificial Sequence: Synthetic oligonucleotide
  misc_feature 1..20: note = Target: FXN; (+) strand; PAM type: YTN; PAM sequence: CTC
  source 1..20: mol_type = other DNA
ctgggttcaagtgattctcc

SEQ ID NO: 30831 - DNA, 20 bp, synthetic construct
  misc_feature 1..20: note = Description of Artificial Sequence: Synthetic oligonucleotide
  misc_feature 1..20: note = Target: FXN; (+) strand; PAM type: YTN; PAM sequence: CTG
  source 1..20: mol_type = other DNA
ggttcaagtgattctcctgc

SEQ ID NO: 30832 - DNA, 20 bp, synthetic construct
  misc_feature 1..20: note = Description of Artificial Sequence: Synthetic oligonucleotide
  misc_feature 1..20: note = Target: FXN; (+) strand; PAM type: YTN; PAM sequence: TTC
  source 1..20: mol_type = other DNA
aagtgattctcctgcctcag

SEQ ID NO: 30833 - DNA, 20 bp, synthetic construct
  misc_feature 1..20: note = Description of Artificial Sequence: Synthetic oligonucleotide
  misc_feature 1..20: note = Target: FXN; (+) strand; PAM type: YTN; PAM sequence: TTC
  source 1..20: mol_type = other DNA
tcctgcctcagcctcccgag

SEQ ID NO: 30834 - DNA, 20 bp, synthetic construct
  misc_feature 1..20: note = Description of Artificial Sequence: Synthetic oligonucleotide
  misc_feature 1..20: note = Target: FXN; (+) strand; PAM type: YTN; PAM sequence: CTC
  source 1..20: mol_type = other DNA
ctgcctcagcctcccgagta

SEQ ID NO: 30835 - DNA, 20 bp, synthetic construct
  misc_feature 1..20: note = Description of Artificial Sequence: Synthetic oligonucleotide
  misc_feature 1..20: note = Target: FXN; (+) strand; PAM type: YTN; PAM sequence: CTG
  source 1..20: mol_type = other DNA
cctcagcctcccgagtagct

SEQ ID NO: 30836 - DNA, 20 bp, synthetic construct
  misc_feature 1..20: note = Description of Artificial Sequence: Synthetic oligonucleotide
  misc_feature 1..20: note = Target: FXN; (+) strand; PAM type: YTN; PAM sequence: CTC
  source 1..20: mol_type = other DNA
agcctcccgagtagctggga

SEQ ID NO: 30837 - DNA, 20 bp, synthetic construct
  misc_feature 1..20: note = Description of Artificial Sequence: Synthetic oligonucleotide
  misc_feature 1..20: note = Target: FXN; (+) strand; PAM type: YTN; PAM sequence: CTC
  source 1..20: mol_type = other DNA
ccgagtagctgggattatcg

SEQ ID NO: 30838 - DNA, 20 bp, synthetic construct
  misc_feature 1..20: note = Description of Artificial Sequence: Synthetic oligonucleotide
  misc_feature 1..20: note = Target: FXN; (+) strand; PAM type: YTN; PAM sequence: CTG
  source 1..20: mol_type = other DNA
ggattatcggctaattttgt

SEQ ID NO: 30839 - DNA, 20 bp, synthetic construct
  misc_feature 1..20: note = Description of Artificial Sequence: Synthetic oligonucleotide
  misc_feature 1..20: note = Target: FXN; (+) strand; PAM type: YTN; PAM sequence: TTA
  source 1..20: mol_type = other DNA
tcggctaattttgtattttt

SEQ ID NO: 30840 - DNA, 20 bp, synthetic construct
  misc_feature 1..20: note = Description of Artificial Sequence: Synthetic oligonucleotide
  misc_feature 1..20: note = Target: FXN; (+) strand; PAM type: YTN; PAM sequence: CTA
  source 1..20: mol_type = other DNA
attttgtatttttagtagag

SEQ ID NO: 30841 - DNA, 20 bp, synthetic construct
  misc_feature 1..20: note = Description of Artificial Sequence: Synthetic oligonucleotide
  misc_feature 1..20: note = Target: FXN; (+) strand; PAM type: YTN; PAM sequence: TTT
  source 1..20: mol_type = other DNA
tgtatttttagtagagacag

SEQ ID NO: 30842 - DNA, 20 bp, synthetic construct
  misc_feature 1..20: note = Description of Artificial Sequence: Synthetic oligonucleotide
  misc_feature 1..20: note = Target: FXN; (+) strand; PAM type: YTN; PAM sequence: TTT
  source 1..20: mol_type = other DNA
gtatttttagtagagacaga

SEQ ID NO: 30843 - DNA, 20 bp, synthetic construct
  misc_feature 1..20: note = Description of Artificial Sequence: Synthetic oligonucleotide
  misc_feature 1..20: note = Target: FXN; (+) strand; PAM type: YTN; PAM sequence: TTG
  source 1..20: mol_type = other DNA
tatttttagtagagacagat

SEQ ID NO: 30844 - DNA, 20 bp, synthetic construct
  misc_feature 1..20: note = Description of Artificial Sequence: Synthetic oligonucleotide
  misc_feature 1..20: note = Target: FXN; (+) strand; PAM type: YTN; PAM sequence: TTT
  source 1..20: mol_type = other DNA
ttagtagagacagatttctc

SEQ ID NO: 30845 - DNA, 20 bp, synthetic construct
  misc_feature 1..20: note = Description of Artificial Sequence: Synthetic oligonucleotide
  misc_feature 1..20: note = Target: FXN; (+) strand; PAM type: YTN; PAM sequence: TTT
  source 1..20: mol_type = other DNA
tagtagagacagatttctcc

SEQ ID NO: 30846 - DNA, 20 bp, synthetic construct
  misc_feature 1..20: note = Description of Artificial Sequence: Synthetic oligonucleotide
  misc_feature 1..20: note = Target: FXN; (+) strand; PAM type: YTN; PAM sequence: TTT
  source 1..20: mol_type = other DNA
agtagagacagatttctcca

SEQ ID NO: 30847 - DNA, 20 bp, synthetic construct
  misc_feature 1..20: note = Description of Artificial Sequence: Synthetic oligonucleotide
  misc_feature 1..20: note = Target: FXN; (+) strand; PAM type: YTN; PAM sequence: TTA
  source 1..20: mol_type = other DNA
gtagagacagatttctccat

SEQ ID NO: 30848 - DNA, 20 bp, synthetic construct
  misc_feature 1..20: note = Description of Artificial Sequence: Synthetic oligonucleotide
  misc_feature 1..20: note = Target: FXN; (+) strand; PAM type: YTN; PAM sequence: TTT
  source 1..20: mol_type = other DNA
ctccatgttggtcaggctgg

SEQ ID NO: 30849 - DNA, 20 bp, synthetic construct
  misc_feature 1..20: note = Description of Artificial Sequence: Synthetic oligonucleotide
  misc_feature 1..20: note = Target: FXN; (+) strand; PAM type: YTN; PAM sequence: TTC
  source 1..20: mol_type = other DNA
tccatgttggtcaggctggt

SEQ ID NO: 30850 - DNA, 20 bp, synthetic construct
  misc_feature 1..20: note = Description of Artificial Sequence: Synthetic oligonucleotide
  misc_feature 1..20: note = Target: FXN; (+) strand; PAM type: YTN; PAM sequence: CTC
  source 1..20: mol_type = other DNA
catgttggtcaggctggtct

SEQ ID NO: 30851 - DNA, 20 bp, synthetic construct
  misc_feature 1..20: note = Description of Artificial Sequence: Synthetic oligonucleotide
  misc_feature 1..20: note = Target: FXN; (+) strand; PAM type: YTN; PAM sequence: TTG
  source 1..20: mol_type = other DNA
gtcaggctggtctcgaactc

SEQ ID NO: 30852 - DNA, 20 bp, synthetic construct
  misc_feature 1..20: note = Description of Artificial Sequence: Synthetic oligonucleotide
  misc_feature 1..20: note = Target: FXN; (+) strand; PAM type: YTN; PAM sequence: CTG
  source 1..20: mol_type = other DNA
gtctcgaactcccaacctca

SEQ ID NO: 30853 - DNA, 20 bp, synthetic construct
  misc_feature 1..20: note = Description of Artificial Sequence: Synthetic oligonucleotide
  misc_feature 1..20: note = Target: FXN; (+) strand; PAM type: YTN; PAM sequence: CTC
  source 1..20: mol_type = other DNA
gaactcccaacctcaggtga

SEQ ID NO: 30854 - DNA, 20 bp, synthetic construct
  misc_feature 1..20: note = Description of Artificial Sequence: Synthetic oligonucleotide
  misc_feature 1..20: note = Target: FXN; (+) strand; PAM type: YTN; PAM sequence: CTC
  source 1..20: mol_type = other DNA
ccaacctcaggtgatccgcc

SEQ ID NO: 30855 - DNA, 20 bp, synthetic construct
  misc_feature 1..20: note = Description of Artificial Sequence: Synthetic oligonucleotide
  misc_feature 1..20: note = Target: FXN; (+) strand; PAM type: YTN; PAM sequence: CTC
  source 1..20: mol_type = other DNA
aggtgatccgcccacctcgc

SEQ ID NO: 30856 - DNA, 20 bp, synthetic construct
  misc_feature 1..20: note = Description of Artificial Sequence: Synthetic oligonucleotide
  misc_feature 1..20: note = Target: FXN; (+) strand; PAM type: YTN; PAM sequence: CTC
  source 1..20: mol_type = other DNA
gccctcccaaagtgctggaa

SEQ ID NO: 30857 - DNA, 20 bp, synthetic construct
  misc_feature 1..20: note = Description of Artificial Sequence: Synthetic oligonucleotide
  misc_feature 1..20: note = Target: FXN; (+) strand; PAM type: YTN; PAM sequence: CTC
  source 1..20: mol_type = other DNA
ccaaagtgctggaattacag

SEQ ID NO: 30858 - DNA, 20 bp, synthetic construct
  misc_feature 1..20: note = Description of Artificial Sequence: Synthetic oligonucleotide
  misc_feature 1..20: note = Target: FXN; (+) strand; PAM type: YTN; PAM sequence: CTG
  source 1..20: mol_type = other DNA
gaattacaggcgtgagccac

SEQ ID NO: 30859 - DNA, 20 bp, synthetic construct
  misc_feature 1..20: note = Description of Artificial Sequence: Synthetic oligonucleotide
  misc_feature 1..20: note = Target: FXN; (+) strand; PAM type: YTN; PAM sequence: TTA
  source 1..20: mol_type = other DNA
caggcgtgagccaccgcgtc

SEQ ID NO: 30860 - DNA, 20 bp, synthetic construct
  misc_feature 1..20: note = Description of Artificial Sequence: Synthetic oligonucleotide
  misc_feature 1..20: note = Target: FXN; (+) strand; PAM type: YTN; PAM sequence: CTG
  source 1..20: mol_type = other DNA
gccatcagcagagtttttaa

SEQ ID NO: 30861 - DNA, 20 bp, synthetic construct
  misc_feature 1..20: note = Description of Artificial Sequence: Synthetic oligonucleotide
  misc_feature 1..20: note = Target: FXN; (+) strand; PAM type: YTN; PAM sequence: TTT
  source 1..20: mol_type = other DNA
ttaatttaggagaatgacaa

SEQ ID NO: 30862 - DNA, 20 bp, synthetic construct
  misc_feature 1..20: note = Description of Artificial Sequence: Synthetic oligonucleotide
  misc_feature 1..20: note = Target: FXN; (+) strand; PAM type: YTN; PAM sequence: TTT
  source 1..20: mol_type = other DNA
taatttaggagaatgacaag

SEQ ID NO: 30863 - DNA, 20 bp, synthetic construct
  misc_feature 1..20: note = Description of Artificial Sequence: Synthetic oligonucleotide
  misc_feature 1..20: note = Target: FXN; (+) strand; PAM type: YTN; PAM sequence: TTT
  source 1..20: mol_type = other DNA
aatttaggagaatgacaaga

SEQ ID NO: 30864 - DNA, 20 bp, synthetic construct
  misc_feature 1..20: note = Description of Artificial Sequence: Synthetic oligonucleotide
  misc_feature 1..20: note = Target: FXN; (+) strand; PAM type: YTN; PAM sequence: TTA
  source 1..20: mol_type = other DNA
atttaggagaatgacaagag

SEQ ID NO: 30865 - DNA, 20 bp, synthetic construct
  misc_feature 1..20: note = Description of Artificial Sequence: Synthetic oligonucleotide
  misc_feature 1..20: note = Target: FXN; (+) strand; PAM type: YTN; PAM sequence: TTT
  source 1..20: mol_type = other DNA
aggagaatgacaagaggtgg

SEQ ID NO: 30866 - DNA, 20 bp, synthetic construct
  misc_feature 1..20: note = Description of Artificial Sequence: Synthetic oligonucleotide
  misc_feature 1..20: note = Target: FXN; (+) strand; PAM type: YTN; PAM sequence: TTA
  source 1..20: mol_type = other DNA
ggagaatgacaagaggtggt

SEQ ID NO: 30867 - DNA, 20 bp, synthetic construct
  misc_feature 1..20: note = Description of Artificial Sequence: Synthetic oligonucleotide
  misc_feature 1..20: note = Target: FXN; (+) strand; PAM type: YTN; PAM sequence: TTT
  source 1..20: mol_type = other DNA
tttagatggtacctggtggc

SEQ ID NO: 30868 - DNA, 20 bp, synthetic construct
  misc_feature 1..20: note = Description of Artificial Sequence: Synthetic oligonucleotide
  misc_feature 1..20: note = Target: FXN; (+) strand; PAM type: YTN; PAM sequence: TTT
  source 1..20: mol_type = other DNA
ttagatggtacctggtggct

SEQ ID NO: 30869 - DNA, 20 bp, synthetic construct
  misc_feature 1..20: note = Description of Artificial Sequence: Synthetic oligonucleotide
  misc_feature 1..20: note = Target: FXN; (+) strand; PAM type: YTN; PAM sequence: TTT
  source 1..20: mol_type = other DNA
tagatggtacctggtggctg

SEQ ID NO: 30870 - DNA, 20 bp, synthetic construct
  misc_feature 1..20: note = Description of Artificial Sequence: Synthetic oligonucleotide
  misc_feature 1..20: note = Target: FXN; (+) strand; PAM type: YTN; PAM sequence: TTT
  source 1..20: mol_type = other DNA
agatggtacctggtggctgt

SEQ ID NO: 30871 - DNA, 20 bp, synthetic construct
  misc_feature 1..20: note = Description of Artificial Sequence: Synthetic oligonucleotide
  misc_feature 1..20: note = Target: FXN; (+) strand; PAM type: YTN; PAM sequence: TTA
  source 1..20: mol_type = other DNA
gatggtacctggtggctgtt

SEQ ID NO: 30872 - DNA, 20 bp, synthetic construct
  misc_feature 1..20: note = Description of Artificial Sequence: Synthetic oligonucleotide
  misc_feature 1..20: note = Target: FXN; (+) strand; PAM type: YTN; PAM sequence: CTG
  source 1..20: mol_type = other DNA
gtggctgttaagggctattg

SEQ ID NO: 30873 - DNA, 20 bp, synthetic construct
  misc_feature 1..20: note = Description of Artificial Sequence: Synthetic oligonucleotide
  misc_feature 1..20: note = Target: FXN; (+) strand; PAM type: YTN; PAM sequence: CTG
  source 1..20: mol_type = other DNA
ttaagggctattgactgaca

SEQ ID NO: 30874 - DNA, 20 bp, synthetic construct
  misc_feature 1..20: note = Description of Artificial Sequence: Synthetic oligonucleotide
  misc_feature 1..20: note = Target: FXN; (+) strand; PAM type: YTN; PAM sequence: TTA
  source 1..20: mol_type = other DNA
agggctattgactgacaaac

SEQ ID NO: 30875 - DNA, 20 bp, synthetic construct
  misc_feature 1..20: note = Description of Artificial Sequence: Synthetic oligonucleotide
  misc_feature 1..20: note = Target: FXN; (+) strand; PAM type: YTN; PAM sequence: CTA
  source 1..20: mol_type = other DNA
ttgactgacaaacacaccca

SEQ ID NO: 30876 - DNA, 20 bp, synthetic construct
  misc_feature 1..20: note = Description of Artificial Sequence: Synthetic oligonucleotide
  misc_feature 1..20: note = Target: FXN; (+) strand; PAM type: YTN; PAM sequence: TTG
  source 1..20: mol_type = other DNA
actgacaaacacacccaact

SEQ ID NO: 30877 - DNA, 20 bp, synthetic construct
  misc_feature 1..20: note = Description of Artificial Sequence: Synthetic oligonucleotide
  misc_feature 1..20: note = Target: FXN; (+) strand; PAM type: YTN; PAM sequence: CTG
  source 1..20: mol_type = other DNA
acaaacacacccaacttggc

SEQ ID NO: 30878 - DNA, 20 bp, synthetic construct
  misc_feature 1..20: note = Description of Artificial Sequence: Synthetic oligonucleotide
  misc_feature 1..20: note = Target: FXN; (+) strand; PAM type: YTN; PAM sequence: CTT
  source 1..20: mol_type = other DNA
ggcgctgccgcccaggaggt

SEQ ID NO: 30879 - DNA, 20 bp, synthetic construct
  misc_feature 1..20: note = Description of Artificial Sequence: Synthetic oligonucleotide
  misc_feature 1..20: note = Target: FXN; (+) strand; PAM type: YTN; PAM sequence: TTG
  source 1..20: mol_type = other DNA
gcgctgccgcccaggaggtg

SEQ ID NO: 30880 - DNA, 20 bp, synthetic construct
  misc_feature 1..20: note = Description of Artificial Sequence: Synthetic oligonucleotide
  misc_feature 1..20: note = Target: FXN; (+) strand; PAM type: YTN; PAM sequence: CTG
  source 1..20: mol_type = other DNA
ccgcccaggaggtggacact

SEQ ID NO: 30881 - DNA, 20 bp, synthetic construct
  misc_feature 1..20: note = Description of Artificial Sequence: Synthetic oligonucleotide
  misc_feature 1..20: note = Target: FXN; (+) strand; PAM type: YTN; PAM sequence: CTG
  source 1..20: mol_type = other DNA
ggtttctggatagatggtta

SEQ ID NO: 30882 - DNA, 20 bp, synthetic construct
  misc_feature 1..20: note = Description of Artificial Sequence: Synthetic oligonucleotide
  misc_feature 1..20: note = Target: FXN; (+) strand; PAM type: YTN; PAM sequence: TTT
  source 1..20: mol_type = other DNA
ctggatagatggttagcaac

SEQ ID NO: 30883 - DNA, 20 bp, synthetic construct
  misc_feature 1..20: note = Description of Artificial Sequence: Synthetic oligonucleotide
  misc_feature 1..20: note = Target: FXN; (+) strand; PAM type: YTN; PAM sequence: TTC
  source 1..20: mol_type = other DNA
tggatagatggttagcaacc

SEQ ID NO: 30884 - DNA, 20 bp, synthetic construct
  misc_feature 1..20: note = Description of Artificial Sequence: Synthetic oligonucleotide
  misc_feature 1..20: note = Target: FXN; (+) strand; PAM type: YTN; PAM sequence: CTG
  source 1..20: mol_type = other DNA
gatagatggttagcaacctc

SEQ ID NO: 30885 - DNA, 20 bp, synthetic construct
  misc_feature 1..20: note = Description of Artificial Sequence: Synthetic oligonucleotide
  misc_feature 1..20: note = Target: FXN; (+) strand; PAM type: YTN; PAM sequence: TTA
  source 1..20: mol_type = other DNA
gcaacctctgtcaccagctg

SEQ ID NO: 30886 - DNA, 20 bp, synthetic construct
  misc_feature 1..20: note = Description of Artificial Sequence: Synthetic oligonucleotide
  misc_feature 1..20: note = Target: FXN; (+) strand; PAM type: YTN; PAM sequence: CTC
  source 1..20: mol_type = other DNA
tgtcaccagctgggcctctt

SEQ ID NO: 30887 - DNA, 20 bp, synthetic construct
  misc_feature 1..20: note = Description of Artificial Sequence: Synthetic oligonucleotide
  misc_feature 1..20: note = Target: FXN; (+) strand; PAM type: YTN; PAM sequence: CTG
  source 1..20: mol_type = other DNA
tcaccagctgggcctctttt

SEQ ID NO: 30888 - DNA, 20 bp, synthetic construct
  misc_feature 1..20: note = Description of Artificial Sequence: Synthetic oligonucleotide
  misc_feature 1..20: note = Target: FXN; (+) strand; PAM type: YTN; PAM sequence: CTG
  source 1..20: mol_type = other DNA
ggcctctttttttctatact

SEQ ID NO: 30889 - DNA, 20 bp, synthetic construct
  misc_feature 1..20: note = Description of Artificial Sequence: Synthetic oligonucleotide
  misc_feature 1..20: note = Target: FXN; (+) strand; PAM type: YTN; PAM sequence: CTC
  source 1..20: mol_type = other DNA
tttttttctatactgaatta

SEQ ID NO: 30890 - DNA, 20 bp, synthetic construct
  misc_feature 1..20: note = Description of Artificial Sequence: Synthetic oligonucleotide
  misc_feature 1..20: note = Target: FXN; (+) strand; PAM type: YTN; PAM sequence: CTT
  source 1..20: mol_type = other DNA
tttttctatactgaattaat

SEQ ID NO: 30891 - DNA, 20 bp, synthetic construct
  misc_feature 1..20: note = Description of Artificial Sequence: Synthetic oligonucleotide
  misc_feature 1..20: note = Target: FXN; (+) strand; PAM type: YTN; PAM sequence: TTT
  source 1..20: mol_type = other DNA
ttttctatactgaattaatc

SEQ ID NO: 30892 - DNA, 20 bp, synthetic construct
  misc_feature 1..20: note = Description of Artificial Sequence: Synthetic oligonucleotide
  misc_feature 1..20: note = Target: FXN; (+) strand; PAM type: YTN; PAM sequence: TTT
  source 1..20: mol_type = other DNA
tttctatactgaattaatca

SEQ ID NO: 30893 - DNA, 20 bp, synthetic construct
  misc_feature 1..20: note = Description of Artificial Sequence: Synthetic oligonucleotide
  misc_feature 1..20: note = Target: FXN; (+) strand; PAM type: YTN; PAM sequence: TTT
  source 1..20: mol_type = other DNA
ttctatactgaattaatcac

SEQ ID NO: 30894 - DNA, 20 bp, synthetic construct
  misc_feature 1..20: note = Description of Artificial Sequence: Synthetic oligonucleotide
  misc_feature 1..20: note = Target: FXN; (+) strand; PAM type: YTN; PAM sequence: TTT
  source 1..20: mol_type = other DNA
tctatactgaattaatcaca

SEQ ID NO: 30895 - DNA, 20 bp, synthetic construct
  misc_feature 1..20: note = Description of Artificial Sequence: Synthetic oligonucleotide
  misc_feature 1..20: note = Target: FXN; (+) strand; PAM type: YTN; PAM sequence: TTT
  source 1..20: mol_type = other DNA
ctatactgaattaatcacat

SEQ ID NO: 30896 - DNA, 20 bp, synthetic construct
  misc_feature 1..20: note = Description of Artificial Sequence: Synthetic oligonucleotide
  misc_feature 1..20: note = Target: FXN; (+) strand; PAM type: YTN; PAM sequence: TTC
  source 1..20: mol_type = other DNA
tatactgaattaatcacatt

SEQ ID NO: 30897 - DNA, 20 bp, synthetic construct
  misc_feature 1..20: note = Description of Artificial Sequence: Synthetic oligonucleotide
  misc_feature 1..20: note = Target: FXN; (+) strand; PAM type: YTN; PAM sequence: CTA
  source 1..20: mol_type = other DNA
tactgaattaatcacatttg

SEQ ID NO: 30898 - DNA, 20 bp, synthetic construct
  misc_feature 1..20: note = Description of Artificial Sequence: Synthetic oligonucleotide
  misc_feature 1..20: note = Target: FXN; (+) strand; PAM type: YTN; PAM sequence: CTG
  source 1..20: mol_type = other DNA
aattaatcacatttgtttaa

SEQ ID NO: 30899 - DNA, 20 bp, synthetic construct
  misc_feature 1..20: note = Description of Artificial Sequence: Synthetic oligonucleotide
  misc_feature 1..20: note = Target: FXN; (+) strand; PAM type: YTN; PAM sequence: TTA
  source 1..20: mol_type = other DNA
atcacatttgtttaacctgt

SEQ ID NO: 30900 - DNA, 20 bp, synthetic construct
  misc_feature 1..20: note = Description of Artificial Sequence: Synthetic oligonucleotide
  misc_feature 1..20: note = Target: FXN; (+) strand; PAM type: YTN; PAM sequence: TTT
  source 1..20: mol_type = other DNA
gtttaacctgtctgttccat

SEQ ID NO: 30901 - DNA, 20 bp, synthetic construct
  misc_feature 1..20: note = Description of Artificial Sequence: Synthetic oligonucleotide
  misc_feature 1..20: note = Target: FXN; (+) strand; PAM type: YTN; PAM sequence: TTG
  source 1..20: mol_type = other DNA
tttaacctgtctgttccata

SEQ ID NO: 30902 - DNA, 20 bp, synthetic construct
  misc_feature 1..20: note = Description of Artificial Sequence: Synthetic oligonucleotide
  misc_feature 1..20: note = Target: FXN; (+) strand; PAM type: YTN; PAM sequence: TTT
  source 1..20: mol_type = other DNA
aacctgtctgttccatagtt

SEQ ID NO: 30903 - DNA, 20 bp, synthetic construct
  misc_feature 1..20: note = Description of Artificial Sequence: Synthetic oligonucleotide
  misc_feature 1..20: note = Target: FXN; (+) strand; PAM type: YTN; PAM sequence: TTA
  source 1..20: mol_type = other DNA
acctgtctgttccatagttc

SEQ ID NO: 30904 - DNA, 20 bp, synthetic construct
  misc_feature 1..20: note = Description of Artificial Sequence: Synthetic oligonucleotide
  misc_feature 1..20: note = Target: FXN; (+) strand; PAM type: YTN; PAM sequence: CTG
  source 1..20: mol_type = other DNA
tctgttccatagttcccttg

SEQ ID NO: 30905 - DNA, 20 bp, synthetic construct
  misc_feature 1..20: note = Description of Artificial Sequence: Synthetic oligonucleotide
  misc_feature 1..20: note = Target: FXN; (+) strand; PAM type: YTN; PAM sequence: CTG
  source 1..20: mol_type = other DNA
ttccatagttcccttgcaca

SEQ ID NO: 30906 - DNA, 20 bp, synthetic construct
  misc_feature 1..20: note = Description of Artificial Sequence: Synthetic oligonucleotide
  misc_feature 1..20: note = Target: FXN; (+) strand; PAM type: YTN; PAM sequence: TTC
  source 1..20: mol_type = other DNA
catagttcccttgcacatct

SEQ ID NO: 30907 - DNA, 20 bp, synthetic construct
  misc_feature 1..20: note = Description of Artificial Sequence: Synthetic oligonucleotide
  misc_feature 1..20: note = Target: FXN; (+) strand; PAM type: YTN; PAM sequence: TTC
  source 1..20: mol_type = other DNA
ccttgcacatcttgggtatt

SEQ ID NO: 30908 - DNA, 20 bp, synthetic construct
  misc_feature 1..20: note = Description of Artificial Sequence: Synthetic oligonucleotide
  misc_feature 1..20: note = Target: FXN; (+) strand; PAM type: YTN; PAM sequence: CTT
  source 1..20: mol_type = other DNA
gcacatcttgggtatttgag

SEQ ID NO: 30909 - DNA, 20 bp, synthetic construct
  misc_feature 1..20: note = Description of Artificial Sequence: Synthetic oligonucleotide
  misc_feature 1..20: note = Target: FXN; (+) strand; PAM type: YTN; PAM sequence: TTG
  source 1..20: mol_type = other DNA
cacatcttgggtatttgagg

SEQ ID NO: 30910 - DNA, 20 bp, synthetic construct
  misc_feature 1..20: note = Description of Artificial Sequence: Synthetic oligonucleotide
  misc_feature 1..20: note = Target: FXN; (+) strand; PAM type: YTN; PAM sequence: CTT
  source 1..20: mol_type = other DNA
gggtatttgaggagttgggt

SEQ ID NO: 30911 - DNA, 20 bp, synthetic construct
  misc_feature 1..20: note = Description of Artificial Sequence: Synthetic oligonucleotide
  misc_feature 1..20: note = Target: FXN; (+) strand; PAM type: YTN; PAM sequence: TTG
  source 1..20: mol_type = other DNA
ggtatttgaggagttgggtg

SEQ ID NO: 30912 - DNA, 20 bp, synthetic construct
  misc_feature 1..20: note = Description of Artificial Sequence: Synthetic oligonucleotide
  misc_feature 1..20: note = Target: FXN; (+) strand; PAM type: YTN; PAM sequence: TTT
  source 1..20: mol_type = other DNA
gaggagttgggtgggtggca

SEQ ID NO: 30913 - DNA, 20 bp, synthetic construct
  misc_feature 1..20: note = Description of Artificial Sequence: Synthetic oligonucleotide
  misc_feature 1..20: note = Target: FXN; (+) strand; PAM type: YTN; PAM sequence: TTG
  source 1..20: mol_type = other DNA
aggagttgggtgggtggcag

SEQ ID NO: 30914 - DNA, 20 bp, synthetic construct
  misc_feature 1..20: note = Description of Artificial Sequence: Synthetic oligonucleotide
  misc_feature 1..20: note = Target: FXN; (+) strand; PAM type: YTN; PAM sequence: TTG
  source 1..20: mol_type = other DNA
ggtgggtggcagtggcaact

SEQ ID NO: 30915 - DNA, 20 bp, synthetic construct
  misc_feature 1..20: note = Description of Artificial Sequence: Synthetic oligonucleotide
  misc_feature 1..20: note = Target: FXN; (+) strand; PAM type: YTN; PAM sequence: CTG
  source 1..20: mol_type = other DNA
gggccaccatcctgtttaat

SEQ ID NO: 30916 - DNA, 20 bp, synthetic construct
  misc_feature 1..20: note = Description of Artificial Sequence: Synthetic oligonucleotide
  misc_feature 1..20: note = Target: FXN; (+) strand; PAM type: YTN; PAM sequence: CTG
  source 1..20: mol_type = other DNA
tttaattattttaaagccct

SEQ ID NO: 30917 - DNA, 20 bp, synthetic construct
  misc_feature 1..20: note = Description of Artificial Sequence: Synthetic oligonucleotide
  misc_feature 1..20: note = Target: FXN; (+) strand; PAM type: YTN; PAM sequence: TTT
  source 1..20: mol_type = other DNA
aattattttaaagccctgac

SEQ ID NO: 30918 - DNA, 20 bp, synthetic construct
  misc_feature 1..20: note = Description of Artificial Sequence: Synthetic oligonucleotide
  misc_feature 1..20: note = Target: FXN; (+) strand; PAM type: YTN; PAM sequence: TTA
  source 1..20: mol_type = other DNA
attattttaaagccctgact

SEQ ID NO: 30919 - DNA, 20 bp, synthetic construct
  misc_feature 1..20: note = Description of Artificial Sequence: Synthetic oligonucleotide
  misc_feature 1..20: note = Target: FXN; (+) strand; PAM type: YTN; PAM sequence: TTA
  source 1..20: mol_type = other DNA
ttttaaagccctgactgtcc

SEQ ID NO: 30920 - DNA, 20 bp, synthetic construct
  misc_feature 1..20: note = Description of Artificial Sequence: Synthetic oligonucleotide
  misc_feature 1..20: note = Target: FXN; (+) strand; PAM type: YTN; PAM sequence: TTT
  source 1..20: mol_type = other DNA
taaagccctgactgtcctgg

SEQ ID NO: 30921 - DNA, 20 bp, synthetic construct
  misc_feature 1..20: note = Description of Artificial Sequence: Synthetic oligonucleotide
  misc_feature 1..20: note = Target: FXN; (+) strand; PAM type: YTN; PAM sequence: TTT
  source 1..20: mol_type = other DNA
aaagccctgactgtcctgga

SEQ ID NO: 30922 - DNA, 20 bp, synthetic construct
  misc_feature 1..20: note = Description of Artificial Sequence: Synthetic oligonucleotide
  misc_feature 1..20: note = Target: FXN; (+) strand; PAM type: YTN; PAM sequence: TTA
  source 1..20: mol_type = other DNA
aagccctgactgtcctggat

SEQ ID NO: 30923 - DNA, 20 bp, synthetic construct
  misc_feature 1..20: note = Description of Artificial Sequence: Synthetic oligonucleotide
  misc_feature 1..20: note = Target: FXN; (+) strand; PAM type: YTN; PAM sequence: CTG
  source 1..20: mol_type = other DNA
actgtcctggattgacccta

SEQ ID NO: 30924 - DNA, 20 bp, synthetic construct
  misc_feature 1..20: note = Description of Artificial Sequence: Synthetic oligonucleotide
  misc_feature 1..20: note = Target: FXN; (+) strand; PAM type: YTN; PAM sequence: CTG
  source 1..20: mol_type = other DNA
tcctggattgaccctaagct

SEQ ID NO: 30925 - DNA, 20 bp, synthetic construct
  misc_feature 1..20: note = Description of Artificial Sequence: Synthetic oligonucleotide
  misc_feature 1..20: note = Target: FXN; (+) strand; PAM type: YTN; PAM sequence: CTG
  source 1..20: mol_type = other DNA
gattgaccctaagctccccc

SEQ ID NO: 30926 - DNA, 20 bp, synthetic construct
  misc_feature 1..20: note = Description of Artificial Sequence: Synthetic oligonucleotide
  misc_feature 1..20: note = Target: FXN; (+) strand; PAM type: YTN; PAM sequence: TTG
  source 1..20: mol_type = other DNA
accctaagctccccctggtc

SEQ ID NO: 30927 - DNA, 20 bp, synthetic construct
  misc_feature 1..20: note = Description of Artificial Sequence: Synthetic oligonucleotide
  misc_feature 1..20: note = Target: FXN; (+) strand; PAM type: YTN; PAM sequence: CTA
  source 1..20: mol_type = other DNA
agctccccctggtctccaaa

SEQ ID NO: 30928 - DNA, 20 bp, synthetic construct
  misc_feature 1..20: note = Description of Artificial Sequence: Synthetic oligonucleotide
  misc_feature 1..20: note = Target: FXN; (+) strand; PAM type: YTN; PAM sequence: CTC
  source 1..20: mol_type = other DNA
cccctggtctccaaaattca

SEQ ID NO: 30929 - DNA, 20 bp, synthetic construct
  misc_feature 1..20: note = Description of Artificial Sequence: Synthetic oligonucleotide
  misc_feature 1..20: note = Target: FXN; (+) strand; PAM type: YTN; PAM sequence: CTG
  source 1..20: mol_type = other DNA
gtctccaaaattcatcagaa

SEQ ID NO: 30930 - DNA, 20 bp, synthetic construct
  misc_feature 1..20: note = Description of Artificial Sequence: Synthetic oligonucleotide
  misc_feature 1..20: note = Target: FXN; (+) strand; PAM type: YTN; PAM sequence: CTC
  source 1..20: mol_type = other DNA
caaaattcatcagaaactga

SEQ ID NO: 30931 - DNA, 20 bp, synthetic construct
  misc_feature 1..20: note = Description of Artificial Sequence: Synthetic oligonucleotide
  misc_feature 1..20: note = Target: FXN; (+) strand; PAM type: YTN; PAM sequence: TTC
  source 1..20: mol_type = other DNA
atcagaaactgagttcactt

SEQ ID NO: 30932 - DNA, 20 bp, synthetic construct
  misc_feature 1..20: note = Description of Artificial Sequence: Synthetic oligonucleotide
  misc_feature 1..20: note = Target: FXN; (+) strand; PAM type: YTN; PAM sequence: CTG
  source 1..20: mol_type = other DNA
agttcacttgaaggcctctt

SEQ ID NO: 30933 - DNA, 20 bp, synthetic construct
  misc_feature 1..20: note = Description of Artificial Sequence: Synthetic oligonucleotide
  misc_feature 1..20: note = Target: FXN; (+) strand; PAM type: YTN; PAM sequence: TTC
  source 1..20: mol_type = other DNA
acttgaaggcctcttcccca

SEQ ID NO: 30934 - DNA, 20 bp, synthetic construct
  misc_feature 1..20: note = Description of Artificial Sequence: Synthetic oligonucleotide
  misc_feature 1..20: note = Target: FXN; (+) strand; PAM type: YTN; PAM sequence: CTT
  source 1..20: mol_type = other DNA
gaaggcctcttccccaccct

SEQ ID NO: 30935 - DNA, 20 bp, synthetic construct
  misc_feature 1..20: note = Description of Artificial Sequence: Synthetic oligonucleotide
  misc_feature 1..20: note = Target: FXN; (+) strand; PAM type: YTN; PAM sequence: TTG
  source 1..20: mol_type = other DNA
aaggcctcttccccaccctt

SEQ ID NO: 30936 - DNA, 20 bp, synthetic construct
  misc_feature 1..20: note = Description of Artificial Sequence: Synthetic oligonucleotide
  misc_feature 1..20: note = Target: FXN; (+) strand; PAM type: YTN; PAM sequence: CTC
  source 1..20: mol_type = other DNA
ttccccacccttttctccac

SEQ ID NO: 30937 - DNA, 20 bp, synthetic construct
  misc_feature 1..20: note = Description of Artificial Sequence: Synthetic oligonucleotide
  misc_feature 1..20: note = Target: FXN; (+) strand; PAM type: YTN; PAM sequence: CTT
  source 1..20: mol_type = other DNA
ccccacccttttctccaccc

SEQ ID NO: 30938 - DNA, 20 bp, synthetic construct
  misc_feature 1..20: note = Description of Artificial Sequence: Synthetic oligonucleotide
  misc_feature 1..20: note = Target: FXN; (+) strand; PAM type: YTN; PAM sequence: TTC
  source 1..20: mol_type = other DNA
cccacccttttctccacccc

SEQ ID NO: 30939 - DNA, 20 bp, synthetic construct
  misc_feature 1..20: note = Description of Artificial Sequence: Synthetic oligonucleotide
  misc_feature 1..20: note = Target: FXN; (+) strand; PAM type: YTN; PAM sequence: CTT
  source 1..20: mol_type = other DNA
ttctccaccccttgcatcta

SEQ ID NO: 30940 - DNA, 20 bp, synthetic construct
  misc_feature 1..20: note = Description of Artificial Sequence: Synthetic oligonucleotide
  misc_feature 1..20: note = Target: FXN; (+) strand; PAM type: YTN; PAM sequence: TTT
  source 1..20: mol_type = other DNA
tctccaccccttgcatctac

SEQ ID NO: 30941 - DNA, 20 bp, synthetic construct
  misc_feature 1..20: note = Description of Artificial Sequence: Synthetic oligonucleotide
  misc_feature 1..20: note = Target: FXN; (+) strand; PAM type: YTN; PAM sequence: TTT
  source 1..20: mol_type = other DNA
ctccaccccttgcatctact

SEQ ID NO: 30942 - DNA, 20 bp, synthetic construct
  misc_feature 1..20: note = Description of Artificial Sequence: Synthetic oligonucleotide
  misc_feature 1..20: note = Target: FXN; (+) strand; PAM type: YTN; PAM sequence: TTC
  source 1..20: mol_type = other DNA
tccaccccttgcatctactt

SEQ ID NO: 30943 - DNA, 20 bp, synthetic construct
  misc_feature 1..20: note = Description of Artificial Sequence: Synthetic oligonucleotide
  misc_feature 1..20: note = Target: FXN; (+) strand; PAM type: YTN; PAM sequence: CTC
  source 1..20: mol_type = other DNA
caccccttgcatctacttct

SEQ ID NO: 30944 - DNA, 20 bp, synthetic construct
  misc_feature 1..20: note = Description of Artificial Sequence: Synthetic oligonucleotide
  misc_feature 1..20: note = Target: FXN; (+) strand; PAM type: YTN; PAM sequence: CTT
  source 1..20: mol_type = other DNA
gcatctacttctaaagcagc

SEQ ID NO: 30945 - DNA, 20 bp, synthetic construct
  misc_feature 1..20: note = Description of Artificial Sequence: Synthetic oligonucleotide
  misc_feature 1..20: note = Target: FXN; (+) strand; PAM type: YTN; PAM sequence: TTG
  source 1..20: mol_type = other DNA
catctacttctaaagcagct

SEQ ID NO: 30946 - DNA, 20 bp, synthetic construct
  misc_feature 1..20: note = Description of Artificial Sequence: Synthetic oligonucleotide
  misc_feature 1..20: note = Target: FXN; (+) strand; PAM type: YTN; PAM sequence: CTA
  source 1..20: mol_type = other DNA
cttctaaagcagctgttcaa

SEQ ID NO: 30947 - DNA, 20 bp, synthetic construct
  misc_feature 1..20: note = Description of Artificial Sequence: Synthetic oligonucleotide
  misc_feature 1..20: note = Target: FXN; (+) strand; PAM type: YTN; PAM sequence: CTT
  source 1..20: mol_type = other DNA
ctaaagcagctgttcaacag

SEQ ID NO: 30948 - DNA, 20 bp, synthetic construct
  misc_feature 1..20: note = Description of Artificial Sequence: Synthetic oligonucleotide
  misc_feature 1..20: note = Target: FXN; (+) strand; PAM type: YTN; PAM sequence: TTC
  source 1..20: mol_type = other DNA
taaagcagctgttcaacaga

SEQ ID NO: 30949 - DNA, 20 bp, synthetic construct
  misc_feature 1..20: note = Description of Artificial Sequence: Synthetic oligonucleotide
  misc_feature 1..20: note = Target: FXN; (+) strand; PAM type: YTN; PAM sequence: CTA
  source 1..20: mol_type = other DNA
aagcagctgttcaacagaaa

SEQ ID NO: 30950 - DNA, 20 bp, synthetic construct
  misc_feature 1..20: note = Description of Artificial Sequence: Synthetic oligonucleotide
  misc_feature 1..20: note = Target: FXN; (+) strand; PAM type: YTN; PAM sequence: CTG
  source 1..20: mol_type = other DNA
ttcaacagaaacagaatggg

SEQ ID NO: 30951 - DNA, 20 bp, synthetic construct
  misc_feature 1..20: note = Description of Artificial Sequence: Synthetic oligonucleotide
  misc_feature 1..20: note = Target: FXN; (+) strand; PAM type: YTN; PAM sequence: TTC
  source 1..20: mol_type = other DNA
aacagaaacagaatgggagc

SEQ ID NO: 30952 - DNA, 20 bp, synthetic construct
  misc_feature 1..20: note = Description of Artificial Sequence: Synthetic oligonucleotide
  misc_feature 1..20: note = Target: FXN; (+) strand; PAM type: YTN; PAM sequence: TTC
  source 1..20: mol_type = other DNA
tacattttctagttaaaaag

SEQ ID NO: 30953 - DNA, 20 bp, synthetic construct
  misc_feature 1..20: note = Description of Artificial Sequence: Synthetic oligonucleotide
  misc_feature 1..20: note = Target: FXN; (+) strand; PAM type: YTN; PAM sequence: CTA
  source 1..20: mol_type = other DNA
cattttctagttaaaaagaa

SEQ ID NO: 30954 - DNA, 20 bp, synthetic construct
  misc_feature 1..20: note = Description of Artificial Sequence: Synthetic oligonucleotide
  misc_feature 1..20: note = Target: FXN; (+) strand; PAM type: YTN; PAM sequence: TTT
  source 1..20: mol_type = other DNA
tctagttaaaaagaaaaaaa

SEQ ID NO: 30955 - DNA, 20 bp, synthetic construct
  misc_feature 1..20: note = Description of Artificial Sequence: Synthetic oligonucleotide
  misc_feature 1..20: note = Target: FXN; (+) strand; PAM type: YTN; PAM sequence: TTT
  source 1..20: mol_type = other DNA
ctagttaaaaagaaaaaaaa

SEQ ID NO: 30956 - DNA, 20 bp, synthetic construct
  misc_feature 1..20: note = Description of Artificial Sequence: Synthetic oligonucleotide
  misc_feature 1..20: note = Target: FXN; (+) strand; PAM type: YTN; PAM sequence: TTC
  source 1..20: mol_type = other DNA
tagttaaaaagaaaaaaaaa

SEQ ID NO: 30957 - DNA, 20 bp, synthetic construct
  misc_feature 1..20: note = Description of Artificial Sequence: Synthetic oligonucleotide
  misc_feature 1..20: note = Target: FXN; (+) strand; PAM type: YTN; PAM sequence: CTA
  source 1..20: mol_type = other DNA
gttaaaaagaaaaaaaaatc

SEQ ID NO: 30958 - DNA, 20 bp, synthetic construct
  misc_feature 1..20: note = Description of Artificial Sequence: Synthetic oligonucleotide
  misc_feature 1..20: note = Target: FXN; (+) strand; PAM type: YTN; PAM sequence: TTA
  source 1..20: mol_type = other DNA
aaaagaaaaaaaaatcattt

SEQ ID NO: 30959 - DNA, 20 bp, synthetic construct
  misc_feature 1..20: note = Description of Artificial Sequence: Synthetic oligonucleotide
  misc_feature 1..20: note = Target: FXN; (+) strand; PAM type: YTN; PAM sequence: TTT
  source 1..20: mol_type = other DNA
tcaacaatatatttattcaa

SEQ ID NO: 30960 - DNA, 20 bp, synthetic construct
  misc_feature 1..20: note = Description of Artificial Sequence: Synthetic oligonucleotide
  misc_feature 1..20: note = Target: FXN; (+) strand; PAM type: YTN; PAM sequence: TTT
  source 1..20: mol_type = other DNA
caacaatatatttattcaac

SEQ ID NO: 30961 - DNA, 20 bp, synthetic construct
  misc_feature 1..20: note = Description of Artificial Sequence: Synthetic oligonucleotide
  misc_feature 1..20: note = Target: FXN; (+) strand; PAM type: YTN; PAM sequence: TTC
  source 1..20: mol_type = other DNA
aacaatatatttattcaacc

SEQ ID NO: 30962 - DNA, 20 bp, synthetic construct
  misc_feature 1..20: note = Description of Artificial Sequence: Synthetic oligonucleotide
  misc_feature 1..20: note = Target: FXN; (+) strand; PAM type: YTN; PAM sequence: TTT
  source 1..20: mol_type = other DNA
attcaacctagtacatacaa

SEQ ID NO: 30963 - DNA, 20 bp, synthetic construct
  misc_feature 1..20: note = Description of Artificial Sequence: Synthetic oligonucleotide
  misc_feature 1..20: note = Target: FXN; (+) strand; PAM type: YTN; PAM sequence: TTA
  source 1..20: mol_type = other DNA
ttcaacctagtacatacaaa

SEQ ID NO: 30964 - DNA, 20 bp, synthetic construct
  misc_feature 1..20: note = Description of Artificial Sequence: Synthetic oligonucleotide
  misc_feature 1..20: note = Target: FXN; (+) strand; PAM type: YTN; PAM sequence: TTC
  source 1..20: mol_type = other DNA
aacctagtacatacaaaata

SEQ ID NO: 30965 - DNA, 20 bp, synthetic construct
  misc_feature 1..20: note = Description of Artificial Sequence: Synthetic oligonucleotide
  misc_feature 1..20: note = Target: FXN; (+) strand; PAM type: YTN; PAM sequence: CTA
  source 1..20: mol_type = other DNA
gtacatacaaaatattatca

SEQ ID NO: 30966 - DNA, 20 bp, synthetic construct
  misc_feature 1..20: note = Description of Artificial Sequence: Synthetic oligonucleotide
  misc_feature 1..20: note = Target: FXN; (+) strand; PAM type: YTN; PAM sequence: TTA
  source 1..20: mol_type = other DNA
tcattccaacatgtaatcag

SEQ ID NO: 30967 - DNA, 20 bp, synthetic construct
  misc_feature 1..20: note = Description of Artificial Sequence: Synthetic oligonucleotide
  misc_feature 1..20: note = Target: FXN; (+) strand; PAM type: YTN; PAM sequence: TTC
  source 1..20: mol_type = other DNA
caacatgtaatcagtatttt

SEQ ID NO: 30968 - DNA, 20 bp, synthetic construct
  misc_feature 1..20: note = Description of Artificial Sequence: Synthetic oligonucleotide
  misc_feature 1..20: note = Target: FXN; (+) strand; PAM type: YTN; PAM sequence: TTT
  source 1..20: mol_type = other DNA
taaaaatcagtaatgagacc

SEQ ID NO: 30969 - DNA, 20 bp, synthetic construct
  misc_feature 1..20: note = Description of Artificial Sequence: Synthetic oligonucleotide
  misc_feature 1..20: note = Target: FXN; (+) strand; PAM type: YTN; PAM sequence: TTT
  source 1..20: mol_type = other DNA
aaaaatcagtaatgagacca

SEQ ID NO: 30970 - DNA, 20 bp, synthetic construct
  misc_feature 1..20: note = Description of Artificial Sequence: Synthetic oligonucleotide
  misc_feature 1..20: note = Target: FXN; (+) strand; PAM type: YTN; PAM sequence: TTA
  source 1..20: mol_type = other DNA
aaaatcagtaatgagaccag

SEQ ID NO: 30971 - DNA, 20 bp, synthetic construct
  misc_feature 1..20: note = Description of Artificial Sequence: Synthetic oligonucleotide
  misc_feature 1..20: note = Target: FXN; (+) strand; PAM type: YTN; PAM sequence: CTC
  source 1..20: mol_type = other DNA
acgactgtaatcccaggact

SEQ ID NO: 30972 - DNA, 20 bp, synthetic construct
  misc_feature 1..20: note = Description of Artificial Sequence: Synthetic oligonucleotide
  misc_feature 1..20: note = Target: FXN; (+) strand; PAM type: YTN; PAM sequence: CTG
  source 1..20: mol_type = other DNA
taatcccaggactttgggag

SEQ ID NO: 30973 - DNA, 20 bp, synthetic construct
  misc_feature 1..20: note = Description of Artificial Sequence: Synthetic oligonucleotide
  misc_feature 1..20: note = Target: FXN; (+) strand; PAM type: YTN; PAM sequence: CTT
  source 1..20: mol_type = other DNA
tgggaggccgaggcgagtgg

SEQ ID NO: 30974 - DNA, 20 bp, synthetic construct
  misc_feature 1..20: note = Description of Artificial Sequence: Synthetic oligonucleotide
  misc_feature 1..20: note = Target: FXN; (+) strand; PAM type: YTN; PAM sequence: TTT
  source 1..20: mol_type = other DNA
gggaggccgaggcgagtgga

SEQ ID NO: 30975 - DNA, 20 bp, synthetic construct
  misc_feature 1..20: note = Description of Artificial Sequence: Synthetic oligonucleotide
  misc_feature 1..20: note = Target: FXN; (+) strand; PAM type: YTN; PAM sequence: TTG
  source 1..20: mol_type = other DNA
ggaggccgaggcgagtggat

SEQ ID NO: 30976 - DNA, 20 bp, synthetic construct
  misc_feature 1..20: note = Description of Artificial Sequence: Synthetic oligonucleotide
  misc_feature 1..20: note = Target: FXN; (+) strand; PAM type: YTN; PAM sequence: CTG
  source 1..20: mol_type = other DNA
agatcaggagttcaagacca

SEQ ID NO: 30977 - DNA, 20 bp, synthetic construct
  misc_feature 1..20: note = Description of Artificial Sequence: Synthetic oligonucleotide
  misc_feature 1..20: note = Target: FXN; (+) strand; PAM type: YTN; PAM sequence: TTC
  source 1..20: mol_type = other DNA
aagaccagcctggccaacat

SEQ ID NO: 30978 - DNA, 20 bp, synthetic construct
  misc_feature 1..20: note = Description of Artificial Sequence: Synthetic oligonucleotide
  misc_feature 1..20: note = Target: FXN; (+) strand; PAM type: YTN; PAM sequence: CTG
  source 1..20: mol_type = other DNA
gccaacatggtgaaacccca

SEQ ID NO: 30979 - DNA, 20 bp, synthetic construct
  misc_feature 1..20: note = Description of Artificial Sequence: Synthetic oligonucleotide
  misc_feature 1..20: note = Target: FXN; (+) strand; PAM type: YTN; PAM sequence: CTC
  source 1..20: mol_type = other DNA
tactaaaaactagctcagca

SEQ ID NO: 30980 - DNA, 20 bp, synthetic construct
  misc_feature 1..20: note = Description of Artificial Sequence: Synthetic oligonucleotide
  misc_feature 1..20: note = Target: FXN; (+) strand; PAM type: YTN; PAM sequence: CTA
  source 1..20: mol_type = other DNA
ctaaaaactagctcagcatg

SEQ ID NO: 30981 - DNA, 20 bp, synthetic construct
  misc_feature 1..20: note = Description of Artificial Sequence: Synthetic oligonucleotide
  misc_feature 1..20: note = Target: FXN; (+) strand; PAM type: YTN; PAM sequence: CTA
  source 1..20: mol_type = other DNA
aaaactagctcagcatggtg

SEQ ID NO: 30982 - DNA, 20 bp, synthetic construct
  misc_feature 1..20: note = Description of Artificial Sequence: Synthetic oligonucleotide
  misc_feature 1..20: note = Target: FXN; (+) strand; PAM type: YTN; PAM sequence: CTA
  source 1..20: mol_type = other DNA
gctcagcatggtggtgggtg

SEQ ID NO: 30983 - DNA, 20 bp, synthetic construct
  misc_feature 1..20: note = Description of Artificial Sequence: Synthetic oligonucleotide
  misc_feature 1..20: note = Target: FXN; (+) strand; PAM type: YTN; PAM sequence: CTC
  source 1..20: mol_type = other DNA
agcatggtggtgggtgcctg

SEQ ID NO: 30984 - DNA, 20 bp, synthetic construct
  misc_feature 1..20: note = Description of Artificial Sequence: Synthetic oligonucleotide
  misc_feature 1..20: note = Target: FXN; (+) strand; PAM type: YTN; PAM sequence: CTG
  source 1..20: mol_type = other DNA
tagtcccagctactcgggag

SEQ ID NO: 30985 - DNA, 20 bp, synthetic construct
  misc_feature 1..20: note = Description of Artificial Sequence: Synthetic oligonucleotide
  misc_feature 1..20: note = Target: FXN; (+) strand; PAM type: YTN; PAM sequence: CTA
  source 1..20: mol_type = other DNA
ctcgggaggctgaggcatga

SEQ ID NO: 30986 - DNA, 20 bp, synthetic construct
  misc_feature 1..20: note = Description of Artificial Sequence: Synthetic oligonucleotide
  misc_feature 1..20: note = Target: FXN; (+) strand; PAM type: YTN; PAM sequence: CTC
  source 1..20: mol_type = other DNA
gggaggctgaggcatgagaa

SEQ ID NO: 30987 - DNA, 20 bp, synthetic construct
  misc_feature 1..20: note = Description of Artificial Sequence: Synthetic oligonucleotide
  misc_feature 1..20: note = Target: FXN; (+) strand; PAM type: YTN; PAM sequence: CTG
  source 1..20: mol_type = other DNA
aggcatgagaatcacttgag

SEQ ID NO: 30988 - DNA, 20 bp, synthetic construct
  misc_feature 1..20: note = Description of Artificial Sequence: Synthetic oligonucleotide
  misc_feature 1..20: note = Target: FXN; (+) strand; PAM type: YTN; PAM sequence: CTT
  source 1..20: mol_type = other DNA
gagcccaggaggcagaggtt

SEQ ID NO: 30989 - DNA, 20 bp, synthetic construct
  misc_feature 1..20: note = Description of Artificial Sequence: Synthetic oligonucleotide
  misc_feature 1..20: note = Target: FXN; (+) strand; PAM type: YTN; PAM sequence: TTG
  source 1..20: mol_type = other DNA
agcccaggaggcagaggttg

SEQ ID NO: 30990 - DNA, 20 bp, synthetic construct
  misc_feature 1..20: note = Description of Artificial Sequence: Synthetic oligonucleotide
  misc_feature 1..20: note = Target: FXN; (+) strand; PAM type: YTN; PAM sequence: TTG
  source 1..20: mol_type = other DNA
cagtgagccaagattttggg

SEQ ID NO: 30991 - DNA, 20 bp, synthetic construct
  misc_feature 1..20: note = Description of Artificial Sequence: Synthetic oligonucleotide
  misc_feature 1..20: note = Target: FXN; (+) strand; PAM type: YTN; PAM sequence: TTT
  source 1..20: mol_type = other DNA
tgggggattctgtgacatac

SEQ ID NO: 30992 - DNA, 20 bp, synthetic construct
  misc_feature 1..20: note = Description of Artificial Sequence: Synthetic oligonucleotide
  misc_feature 1..20: note = Target: FXN; (+) strand; PAM type: YTN; PAM sequence: TTT
  source 1..20: mol_type = other DNA
gggggattctgtgacataca

SEQ ID NO: 30993 - DNA, 20 bp, synthetic construct
  misc_feature 1..20: note = Description of Artificial Sequence: Synthetic oligonucleotide
  misc_feature 1..20: note = Target: FXN; (+) strand; PAM type: YTN; PAM sequence: TTG
  source 1..20: mol_type = other DNA
ggggattctgtgacatacaa

SEQ ID NO: 30994 - DNA, 20 bp, synthetic construct
  misc_feature 1..20: note = Description of Artificial Sequence: Synthetic oligonucleotide
  misc_feature 1..20: note = Target: FXN; (+) strand; PAM type: YTN; PAM sequence: TTC
  source 1..20: mol_type = other DNA
tgtgacatacaaaaaaaatc

SEQ ID NO: 30995 - DNA, 20 bp, synthetic construct
  misc_feature 1..20: note = Description of Artificial Sequence: Synthetic oligonucleotide
  misc_feature 1..20: note = Target: FXN; (+) strand; PAM type: YTN; PAM sequence: CTG
  source 1..20: mol_type = other DNA
tgacatacaaaaaaaatcag

SEQ ID NO: 30996 - DNA, 20 bp, synthetic construct
  misc_feature 1..20: note = Description of Artificial Sequence: Synthetic oligonucleotide
  misc_feature 1..20: note = Target: FXN; (+) strand; PAM type: YTN; PAM sequence: CTT
  source 1..20: mol_type = other DNA
gcatactcttttcgtactca

SEQ ID NO: 30997 - DNA, 20 bp, synthetic construct
  misc_feature 1..20: note = Description of Artificial Sequence: Synthetic oligonucleotide
  misc_feature 1..20: note = Target: FXN; (+) strand; PAM type: YTN; PAM sequence: TTG
  source 1..20: mol_type = other DNA
catactcttttcgtactcat

SEQ ID NO: 30998 - DNA, 20 bp, synthetic construct
  misc_feature 1..20: note = Description of Artificial Sequence: Synthetic oligonucleotide
  misc_feature 1..20: note = Target: FXN; (+) strand; PAM type: YTN; PAM sequence: CTC
  source 1..20: mol_type = other DNA
ttttcgtactcatatacttc

SEQ ID NO: 30999 - DNA, 20 bp, synthetic construct
  misc_feature 1..20: note = Description of Artificial Sequence: Synthetic oligonucleotide
  misc_feature 1..20: note = Target: FXN; (+) strand; PAM type: YTN; PAM sequence: CTT
  source 1..20: mol_type = other DNA
ttcgtactcatatacttcca

SEQ ID NO: 31000 - DNA, 20 bp, synthetic construct
  misc_feature 1..20: note = Description of Artificial Sequence: Synthetic oligonucleotide
  misc_feature 1..20: note = Target: FXN; (+) strand; PAM type: YTN; PAM sequence: TTT
  source 1..20: mol_type = other DNA
tcgtactcatatacttccag

SEQ ID NO: 31001 - DNA, 20 bp, synthetic construct
  misc_feature 1..20: note = Description of Artificial Sequence: Synthetic oligonucleotide
  misc_feature 1..20: note = Target: FXN; (+) strand; PAM type: YTN; PAM sequence: TTT
  source 1..20: mol_type = other DNA
cgtactcatatacttccagc

SEQ ID NO: 31002 - DNA, 20 bp, synthetic construct
  misc_feature 1..20: note = Description of Artificial Sequence: Synthetic oligonucleotide
  misc_feature 1..20: note = Target: FXN; (+) strand; PAM type: YTN; PAM sequence: TTC
  source 1..20: mol_type = other DNA
gtactcatatacttccagca

SEQ ID NO: 31003 - DNA, 20 bp, synthetic construct
  misc_feature 1..20: note = Description of Artificial Sequence: Synthetic oligonucleotide
  misc_feature 1..20: note = Target: FXN; (+) strand; PAM type: YTN; PAM sequence: CTC
  source 1..20: mol_type = other DNA
atatacttccagcatatctc

SEQ ID NO: 31004 - DNA, 20 bp, synthetic construct
  misc_feature 1..20: note = Description of Artificial Sequence: Synthetic oligonucleotide
  misc_feature 1..20: note = Target: FXN; (+) strand; PAM type: YTN; PAM sequence: CTT
  source 1..20: mol_type = other DNA
ccagcatatctcaattcaca

SEQ ID NO: 31005 - DNA, 20 bp, synthetic construct
  misc_feature 1..20: note = Description of Artificial Sequence: Synthetic oligonucleotide
  misc_feature 1..20: note = Target: FXN; (+) strand; PAM type: YTN; PAM sequence: TTC
  source 1..20: mol_type = other DNA
cagcatatctcaattcacaa

SEQ ID NO: 31006 - DNA, 20 bp, synthetic construct
  misc_feature 1..20: note = Description of Artificial Sequence: Synthetic oligonucleotide
  misc_feature 1..20: note = Target: FXN; (+) strand; PAM type: YTN; PAM sequence: CTC
  source 1..20: mol_type = other DNA
aattcacaatttctaagtaa

SEQ ID NO: 31007 - DNA, 20 bp, synthetic construct
  misc_feature 1..20: note = Description of Artificial Sequence: Synthetic oligonucleotide
  misc_feature 1..20: note = Target: FXN; (+) strand; PAM type: YTN; PAM sequence: TTC
  source 1..20: mol_type = other DNA
acaatttctaagtaaatgct

SEQ ID NO: 31008 - DNA, 20 bp, synthetic construct
  misc_feature 1..20: note = Description of Artificial Sequence: Synthetic oligonucleotide
  misc_feature 1..20: note = Target: FXN; (+) strand; PAM type: YTN; PAM sequence: TTT
  source 1..20: mol_type = other DNA
ctaagtaaatgctctatctg

SEQ ID NO: 31009 - DNA, 20 bp, synthetic construct
  misc_feature 1..20: note = Description of Artificial Sequence: Synthetic oligonucleotide
  misc_feature 1..20: note = Target: FXN; (+) strand; PAM type: YTN; PAM sequence: TTC
  source 1..20: mol_type = other DNA
taagtaaatgctctatctgt

SEQ ID NO: 31010 - DNA, 20 bp, synthetic construct
  misc_feature 1..20: note = Description of Artificial Sequence: Synthetic oligonucleotide
  misc_feature 1..20: note = Target: FXN; (+) strand; PAM type: YTN; PAM sequence: CTA
  source 1..20: mol_type = other DNA
agtaaatgctctatctgtat

SEQ ID NO: 31011 - DNA, 20 bp, synthetic construct
  misc_feature 1..20: note = Description of Artificial Sequence: Synthetic oligonucleotide
  misc_feature 1..20: note = Target: FXN; (+) strand; PAM type: YTN; PAM sequence: CTC
  source 1..20: mol_type = other DNA
tatctgtatttacttttata

SEQ ID NO: 31012 - DNA, 20 bp, synthetic construct
  misc_feature 1..20: note = Description of Artificial Sequence: Synthetic oligonucleotide
  misc_feature 1..20: note = Target: FXN; (+) strand; PAM type: YTN; PAM sequence: CTA
  source 1..20: mol_type = other DNA
tctgtatttacttttataaa

SEQ ID NO: 31013 - DNA, 20 bp, synthetic construct
  misc_feature 1..20: note = Description of Artificial Sequence: Synthetic oligonucleotide
  misc_feature 1..20: note = Target: FXN; (+) strand; PAM type: YTN; PAM sequence: CTG
  source 1..20: mol_type = other DNA
tatttacttttataaaattc

SEQ ID NO: 31014 - DNA, 20 bp, synthetic construct
  misc_feature 1..20: note = Description of Artificial Sequence: Synthetic oligonucleotide
  misc_feature 1..20: note = Target: FXN; (+) strand; PAM type: YTN; PAM sequence: TTT
  source 1..20: mol_type = other DNA
acttttataaaattcacaat

SEQ ID NO: 31015 - DNA, 20 bp, synthetic construct
  misc_feature 1..20: note = Description of Artificial Sequence: Synthetic oligonucleotide
  misc_feature 1..20: note = Target: FXN; (+) strand; PAM type: YTN; PAM sequence: TTA
  source 1..20: mol_type = other DNA
cttttataaaattcacaatt

SEQ ID NO: 31016 - DNA, 20 bp, synthetic construct
  misc_feature 1..20: note = Description of Artificial Sequence: Synthetic oligonucleotide
  misc_feature 1..20: note = Target: FXN; (+) strand; PAM type: YTN; PAM sequence: CTT
  source 1..20: mol_type = other DNA
ttataaaattcacaattaaa

SEQ ID NO: 31017 - DNA, 20 bp, synthetic construct
  misc_feature 1..20: note = Description of Artificial Sequence: Synthetic oligonucleotide
  misc_feature 1..20: note = Target: FXN; (+) strand; PAM type: YTN; PAM sequence: TTT
  source 1..20: mol_type = other DNA
tataaaattcacaattaaaa

SEQ ID NO: 31018 - DNA, 20 bp, synthetic construct
  misc_feature 1..20: note = Description of Artificial Sequence: Synthetic oligonucleotide
  misc_feature 1..20: note = Target: FXN; (+) strand; PAM type: YTN; PAM sequence: TTT
  source 1..20: mol_type = other DNA
ataaaattcacaattaaaaa

SEQ ID NO: 31019 - DNA, 20 bp, synthetic construct
  misc_feature 1..20: note = Description of Artificial Sequence: Synthetic oligonucleotide
  misc_feature 1..20: note = Target: FXN; (+) strand; PAM type: YTN; PAM sequence: TTA
  source 1..20: mol_type = other DNA
taaaattcacaattaaaaat

SEQ ID NO: 31020 - DNA, 20 bp, synthetic construct
  misc_feature 1..20: note = Description of Artificial Sequence: Synthetic oligonucleotide
  misc_feature 1..20: note = Target: FXN; (+) strand; PAM type: YTN; PAM sequence: TTC
  source 1..20: mol_type = other DNA
acaattaaaaatgaaggttc

SEQ ID NO: 31021 - DNA, 20 bp, synthetic construct
  misc_feature 1..20: note = Description of Artificial Sequence: Synthetic oligonucleotide
  misc_feature 1..20: note = Target: FXN; (+) strand; PAM type: YTN; PAM sequence: TTA
  source 1..20: mol_type = other DNA
aaaatgaaggttcacatagt

SEQ ID NO: 31022 - DNA, 20 bp, synthetic construct
  misc_feature 1..20: note = Description of Artificial Sequence: Synthetic oligonucleotide
  misc_feature 1..20: note = Target: FXN; (+) strand; PAM type: YTN; PAM sequence: TTC
  source 1..20: mol_type = other DNA
acatagtcaagttgttccaa

SEQ ID NO: 31023 - DNA, 20 bp, synthetic construct
  misc_feature 1..20: note = Description of Artificial Sequence: Synthetic oligonucleotide
  misc_feature 1..20: note = Target: FXN; (+) strand; PAM type: YTN; PAM sequence: TTG
  source 1..20: mol_type = other DNA
ttccaaacacacttaaatgt

SEQ ID NO: 31024 - DNA, 20 bp, synthetic construct
  misc_feature 1..20: note = Description of Artificial Sequence: Synthetic oligonucleotide
  misc_feature 1..20: note = Target: FXN; (+) strand; PAM type: YTN; PAM sequence: TTC
  source 1..20: mol_type = other DNA
caaacacacttaaatgtctc

SEQ ID NO: 31025 - DNA, 20 bp, synthetic construct
  misc_feature 1..20: note = Description of Artificial Sequence: Synthetic oligonucleotide
  misc_feature 1..20: note = Target: FXN; (+) strand; PAM type: YTN; PAM sequence: CTT
  source 1..20: mol_type = other DNA
aaatgtctcctaggctgggt

SEQ ID NO: 31026 - DNA, 20 bp, synthetic construct
  misc_feature 1..20: note = Description of Artificial Sequence: Synthetic oligonucleotide
  misc_feature 1..20: note = Target: FXN; (+) strand; PAM type: YTN; PAM sequence: TTA
  source 1..20: mol_type = other DNA
aatgtctcctaggctgggtg

SEQ ID NO: 31027 - DNA, 20 bp, synthetic construct
  misc_feature 1..20: note = Description of Artificial Sequence: Synthetic oligonucleotide
  misc_feature 1..20: note = Target: FXN; (+) strand; PAM type: YTN; PAM sequence: CTC
  source 1..20: mol_type = other DNA
ctaggctgggtgtggttgct

SEQ ID NO: 31028 - DNA, 20 bp, synthetic construct
  misc_feature 1..20: note = Description of Artificial Sequence: Synthetic oligonucleotide
  misc_feature 1..20: note = Target: FXN; (+) strand; PAM type: YTN; PAM sequence: CTA
  source 1..20: mol_type = other DNA
ggctgggtgtggttgctcac

SEQ ID NO: 31029 - DNA, 20 bp, synthetic construct
  misc_feature 1..20: note = Description of Artificial Sequence: Synthetic oligonucleotide
  misc_feature 1..20: note = Target: FXN; (+) strand; PAM type: YTN; PAM sequence: CTG
  source 1..20: mol_type = other DNA
ggtgtggttgctcacacctg

SEQ ID NO: 31030 - DNA, 20 bp, synthetic construct
  misc_feature 1..20: note = Description of Artificial Sequence: Synthetic oligonucleotide
  misc_feature 1..20: note = Target: FXN; (+) strand; PAM type: YTN; PAM sequence: TTG
  source 1..20: mol_type = other DNA
ctcacacctgtaatcccagc

SEQ ID NO: 31031 - DNA, 20 bp, synthetic construct
  misc_feature 1..20: note = Description of Artificial Sequence: Synthetic oligonucleotide
  misc_feature 1..20: note = Target: FXN; (+) strand; PAM type: YTN; PAM sequence: CTC
  source 1..20: mol_type = other DNA
acacctgtaatcccagcact

SEQ ID NO: 31032 - DNA, 20 bp, synthetic construct
  misc_feature 1..20: note = Description of Artificial Sequence: Synthetic oligonucleotide
  misc_feature 1..20: note = Target: FXN; (+) strand; PAM type: YTN; PAM sequence: CTG
  source 1..20: mol_type = other DNA
taatcccagcactttgggag

SEQ ID NO: 31033 - DNA, 20 bp, synthetic construct
  misc_feature 1..20: note = Description of Artificial Sequence: Synthetic oligonucleotide
  misc_feature 1..20: note = Target: FXN; (+) strand; PAM type: YTN; PAM sequence: CTT
  source 1..20: mol_type = other DNA
tgggaggctgagatgggcgg

SEQ ID NO: 31034 - DNA, 20 bp, synthetic construct
  misc_feature 1..20: note = Description of Artificial Sequence: Synthetic oligonucleotide
  misc_feature 1..20: note = Target: FXN; (+) strand; PAM type: YTN; PAM sequence: TTT
  source 1..20: mol_type = other DNA
gggaggctgagatgggcgga

SEQ ID NO: 31035 - DNA, 20 bp, synthetic construct
  misc_feature 1..20: note = Description of Artificial Sequence: Synthetic oligonucleotide
  misc_feature 1..20: note = Target: FXN; (+) strand; PAM type: YTN; PAM sequence: TTG
  source 1..20: mol_type = other DNA
ggaggctgagatgggcggat

SEQ ID NO: 31036 - DNA, 20 bp, synthetic construct
  misc_feature 1..20: note = Description of Artificial Sequence: Synthetic oligonucleotide
  misc_feature 1..20: note = Target: FXN; (+) strand; PAM type: YTN; PAM sequence: CTG
  source 1..20: mol_type = other DNA
agatgggcggatcacctgag

SEQ ID NO: 31037 - DNA, 20 bp, synthetic construct
  misc_feature 1..20: note = Description of Artificial Sequence: Synthetic oligonucleotide
  misc_feature 1..20: note = Target: FXN; (+) strand; PAM type: YTN; PAM sequence: CTG
  source 1..20: mol_type = other DNA
aggtcaggagtttgagacca

SEQ ID NO: 31038 - DNA, 20 bp, synthetic construct
  misc_feature 1..20: note = Description of Artificial Sequence: Synthetic oligonucleotide
  misc_feature 1..20: note = Target: FXN; (+) strand; PAM type: YTN; PAM sequence: TTT
  source 1..20: mol_type = other DNA
gagaccagcctggccaacat

SEQ ID NO: 31039 - DNA, 20 bp, synthetic construct
  misc_feature 1..20: note = Description of Artificial Sequence: Synthetic oligonucleotide
  misc_feature 1..20: note = Target: FXN; (+) strand; PAM type: YTN; PAM sequence: TTG
  source 1..20: mol_type = other DNA
agaccagcctggccaacatg

SEQ ID NO: 31040 - DNA, 20 bp, synthetic construct
  misc_feature 1..20: note = Description of Artificial Sequence: Synthetic oligonucleotide
  misc_feature 1..20: note = Target: FXN; (+) strand; PAM type: YTN; PAM sequence: CTG
  source 1..20: mol_type = other DNA
gccaacatggtgaaaccccg

SEQ ID NO: 31041 - DNA, 20 bp, synthetic construct
  misc_feature 1..20: note = Description of Artificial Sequence: Synthetic oligonucleotide
  misc_feature 1..20: note = Target: FXN; (+) strand; PAM type: YTN; PAM sequence: CTC
  source 1..20: mol_type = other DNA
tactaaaaatacaaaaatta

SEQ ID NO: 31042 - DNA, 20 bp, synthetic construct
  misc_feature 1..20: note = Description of Artificial Sequence: Synthetic oligonucleotide
  misc_feature 1..20: note = Target: FXN; (+) strand; PAM type: YTN; PAM sequence: CTA
  source 1..20: mol_type = other DNA
ctaaaaatacaaaaattagc

SEQ ID NO: 31043 - DNA, 20 bp, synthetic construct
  misc_feature 1..20: note = Description of Artificial Sequence: Synthetic oligonucleotide
  misc_feature 1..20: note = Target: FXN; (+) strand; PAM type: YTN; PAM sequence: CTA
  source 1..20: mol_type = other DNA
aaaatacaaaaattagctgg

SEQ ID NO: 31044 - DNA, 20 bp, synthetic construct
  misc_feature 1..20: note = Description of Artificial Sequence: Synthetic oligonucleotide
  misc_feature 1..20: note = Target: FXN; (+) strand; PAM type: YTN; PAM sequence: TTA
  source 1..20: mol_type = other DNA
gctggatgtggtggcactca

SEQ ID NO: 31045 - DNA, 20 bp, synthetic construct
  misc_feature 1..20: note = Description of Artificial Sequence: Synthetic oligonucleotide
  misc_feature 1..20: note = Target: FXN; (+) strand; PAM type: YTN; PAM sequence: CTG
  source 1..20: mol_type = other DNA
gatgtggtggcactcacctg

SEQ ID NO: 31046 - DNA, 20 bp, synthetic construct
  misc_feature 1..20: note = Description of Artificial Sequence: Synthetic oligonucleotide
  misc_feature 1..20: note = Target: FXN; (+) strand; PAM type: YTN; PAM sequence: CTC
  source 1..20: mol_type = other DNA
acctgtaatcccagctactc

SEQ ID NO: 31047 - DNA, 20 bp, synthetic construct
  misc_feature 1..20: note = Description of Artificial Sequence: Synthetic oligonucleotide
  misc_feature 1..20: note = Target: FXN; (+) strand; PAM type: YTN; PAM sequence: CTG
  source 1..20: mol_type = other DNA
taatcccagctactcaggag

SEQ ID NO: 31048 - DNA, 20 bp, synthetic construct
  misc_feature 1..20: note = Description of Artificial Sequence: Synthetic oligonucleotide
  misc_feature 1..20: note = Target: FXN; (+) strand; PAM type: YTN; PAM sequence: CTA
  source 1..20: mol_type = other DNA
ctcaggaggctgaggcagga

SEQ ID NO: 31049 - DNA, 20 bp, synthetic construct
  misc_feature 1..20: note = Description of Artificial Sequence: Synthetic oligonucleotide
  misc_feature 1..20: note = Target: FXN; (+) strand; PAM type: YTN; PAM sequence: CTC
  source 1..20: mol_type = other DNA
aggaggctgaggcaggataa

SEQ ID NO: 31050 - DNA, 20 bp, synthetic construct
  misc_feature 1..20: note = Description of Artificial Sequence: Synthetic oligonucleotide
  misc_feature 1..20: note = Target: FXN; (+) strand; PAM type: YTN; PAM sequence: CTG
  source 1..20: mol_type = other DNA
aggcaggataattgcttgaa

SEQ ID NO: 31051 - DNA, 20 bp, synthetic construct
  misc_feature 1..20: note = Description of Artificial Sequence: Synthetic oligonucleotide
  misc_feature 1..20: note = Target: FXN; (+) strand; PAM type: YTN; PAM sequence: TTG
  source 1..20: mol_type = other DNA
cttgaacccgggaggtggtg

SEQ ID NO: 31052 - DNA, 20 bp, synthetic construct
  misc_feature 1..20: note = Description of Artificial Sequence: Synthetic oligonucleotide
  misc_feature 1..20: note = Target: FXN; (+) strand; PAM type: YTN; PAM sequence: CTT
  source 1..20: mol_type = other DNA
gaacccgggaggtggtggag

SEQ ID NO: 31053 - DNA, 20 bp, synthetic construct
  misc_feature 1..20: note = Description of Artificial Sequence: Synthetic oligonucleotide
  misc_feature 1..20: note = Target: FXN; (+) strand; PAM type: YTN; PAM sequence: TTG
  source 1..20: mol_type = other DNA
aacccgggaggtggtggagg

SEQ ID NO: 31054 - DNA, 20 bp, synthetic construct
  misc_feature 1..20: note = Description of Artificial Sequence: Synthetic oligonucleotide
  misc_feature 1..20: note = Target: FXN; (+) strand; PAM type: YTN; PAM sequence: TTG
  source 1..20: mol_type = other DNA
cagtgagccgagatcgcacc

SEQ ID NO: 31055 - DNA, 20 bp, synthetic construct
  misc_feature 1..20: note = Description of Artificial Sequence: Synthetic oligonucleotide
  misc_feature 1..20: note = Target: FXN; (+) strand; PAM type: YTN; PAM sequence: CTG
  source 1..20: mol_type = other DNA
ccttccaacctgggcgacag

SEQ ID NO: 31056 - DNA, 20 bp, synthetic construct
  misc_feature 1..20: note = Description of Artificial Sequence: Synthetic oligonucleotide
  misc_feature 1..20: note = Target: FXN; (+) strand; PAM type: YTN; PAM sequence: CTT
  source 1..20: mol_type = other DNA
ccaacctgggcgacagagcg

SEQ ID NO: 31057 - DNA, 20 bp, synthetic construct
  misc_feature 1..20: note = Description of Artificial Sequence: Synthetic oligonucleotide
  misc_feature 1..20: note = Target: FXN; (+) strand; PAM type: YTN; PAM sequence: TTC
  source 1..20: mol_type = other DNA
caacctgggcgacagagcga

SEQ ID NO: 31058 - DNA, 20 bp, synthetic construct
  misc_feature 1..20: note = Description of Artificial Sequence: Synthetic oligonucleotide
  misc_feature 1..20: note = Target: FXN; (+) strand; PAM type: YTN; PAM sequence: CTG
  source 1..20: mol_type = other DNA
ggcgacagagcgagactccg

SEQ ID NO: 31059 - DNA, 20 bp, synthetic construct
  misc_feature 1..20: note = Description of Artificial Sequence: Synthetic oligonucleotide
  misc_feature 1..20: note = Target: FXN; (+) strand; PAM type: YTN; PAM sequence: CTC
  source 1..20: mol_type = other DNA
cgtctcaaaaaaaaaaaaaa

SEQ ID NO: 31060 - DNA, 20 bp, synthetic construct
  misc_feature 1..20: note = Description of Artificial Sequence: Synthetic oligonucleotide
  misc_feature 1..20: note = Target: FXN; (+) strand; PAM type: YTN; PAM sequence: CTC
  source 1..20: mol_type = other DNA
aaaaaaaaaaaaaaggctcc

SEQ ID NO: 31061 - DNA, 20 bp, synthetic construct
  misc_feature 1..20: note = Description of Artificial Sequence: Synthetic oligonucleotide
  misc_feature 1..20: note = Target: FXN; (+) strand; PAM type: YTN; PAM sequence: CTC
  source 1..20: mol_type = other DNA
ctaataactttattacttta

SEQ ID NO: 31062 - DNA, 20 bp, synthetic construct
  misc_feature 1..20: note = Description of Artificial Sequence: Synthetic oligonucleotide
  misc_feature 1..20: note = Target: FXN; (+) strand; PAM type: YTN; PAM sequence: CTA
  source 1..20: mol_type = other DNA
ataactttattactttatta

SEQ ID NO: 31063 - DNA, 20 bp, synthetic construct
  misc_feature 1..20: note = Description of Artificial Sequence: Synthetic oligonucleotide
  misc_feature 1..20: note = Target: FXN; (+) strand; PAM type: YTN; PAM sequence: CTT
  source 1..20: mol_type = other DNA
tattactttattatcacctc

SEQ ID NO: 31064 - DNA, 20 bp, synthetic construct
  misc_feature 1..20: note = Description of Artificial Sequence: Synthetic oligonucleotide
  misc_feature 1..20: note = Target: FXN; (+) strand; PAM type: YTN; PAM sequence: TTT
  source 1..20: mol_type = other DNA
attactttattatcacctca

SEQ ID NO: 31065 - DNA, 20 bp, synthetic construct
  misc_feature 1..20: note = Description of Artificial Sequence: Synthetic oligonucleotide
  misc_feature 1..20: note = Target: FXN; (+) strand; PAM type: YTN; PAM sequence: TTA
  source 1..20: mol_type = other DNA
ttactttattatcacctcaa

SEQ ID NO: 31066 - DNA, 20 bp, synthetic construct
  misc_feature 1..20: note = Description of Artificial Sequence: Synthetic oligonucleotide
  misc_feature 1..20: note = Target: FXN; (+) strand; PAM type: YTN; PAM sequence: TTA
  source 1..20: mol_type = other DNA
ctttattatcacctcaaata

SEQ ID NO: 31067 - DNA, 20 bp, synthetic construct
  misc_feature 1..20: note = Description of Artificial Sequence: Synthetic oligonucleotide
  misc_feature 1..20: note = Target: FXN; (+) strand; PAM type: YTN; PAM sequence: CTT
  source 1..20: mol_type = other DNA
tattatcacctcaaataatt

SEQ ID NO: 31068 - DNA, 20 bp, synthetic construct
  misc_feature 1..20: note = Description of Artificial Sequence: Synthetic oligonucleotide
  misc_feature 1..20: note = Target: FXN; (+) strand; PAM type: YTN; PAM sequence: TTT
  source 1..20: mol_type = other DNA
attatcacctcaaataatta

SEQ ID NO: 31069 - DNA, 20 bp, synthetic construct
  misc_feature 1..20: note = Description of Artificial Sequence: Synthetic oligonucleotide
  misc_feature 1..20: note = Target: FXN; (+) strand; PAM type: YTN; PAM sequence: TTA
  source 1..20: mol_type = other DNA
ttatcacctcaaataattaa

SEQ ID NO: 31070 - DNA, 20 bp, synthetic construct
  misc_feature 1..20: note = Description of Artificial Sequence: Synthetic oligonucleotide
  misc_feature 1..20: note = Target: FXN; (+) strand; PAM type: YTN; PAM sequence: TTA
  source 1..20: mol_type = other DNA
tcacctcaaataattaaaat

SEQ ID NO: 31071 - DNA, 20 bp, synthetic construct
  misc_feature 1..20: note = Description of Artificial Sequence: Synthetic oligonucleotide
  misc_feature 1..20: note = Target: FXN; (+) strand; PAM type: YTN; PAM sequence: CTC
  source 1..20: mol_type = other DNA
aaataattaaaattaaatga

SEQ ID NO: 31072 - DNA, 20 bp, synthetic construct
  misc_feature 1..20: note = Description of Artificial Sequence: Synthetic oligonucleotide
  misc_feature 1..20: note = Target: FXN; (+) strand; PAM type: YTN; PAM sequence: TTA
  source 1..20: mol_type = other DNA
aaattaaatgaagttgaaaa

SEQ ID NO: 31073 - DNA, 20 bp, synthetic construct
  misc_feature 1..20: note = Description of Artificial Sequence: Synthetic oligonucleotide
  misc_feature 1..20: note = Target: FXN; (+) strand; PAM type: YTN; PAM sequence: TTA
  source 1..20: mol_type = other DNA
aatgaagttgaaaatccagg

SEQ ID NO: 31074 - DNA, 20 bp, synthetic construct
  misc_feature 1..20: note = Description of Artificial Sequence: Synthetic oligonucleotide
  misc_feature 1..20: note = Target: FXN; (+) strand; PAM type: YTN; PAM sequence: TTG
  source 1..20: mol_type = other DNA
aaaatccaggtcctcagtcc

SEQ ID NO: 31075 - DNA, 20 bp, synthetic construct
  misc_feature 1..20: note = Description of Artificial Sequence: Synthetic oligonucleotide
  misc_feature 1..20: note = Target: FXN; (+) strand; PAM type: YTN; PAM sequence: CTC
  source 1..20: mol_type = other DNA
agtcccattagccacatttc

SEQ ID NO: 31076 - DNA, 20 bp, synthetic construct
  misc_feature 1..20: note = Description of Artificial Sequence: Synthetic oligonucleotide
  misc_feature 1..20: note = Target: FXN; (+) strand; PAM type: YTN; PAM sequence: TTA
  source 1..20: mol_type = other DNA
gccacatttctagtgctcag

SEQ ID NO: 31077 - DNA, 20 bp, synthetic construct
  misc_feature 1..20: note = Description of Artificial Sequence: Synthetic oligonucleotide
  misc_feature 1..20: note = Target: FXN; (+) strand; PAM type: YTN; PAM sequence: TTT
  source 1..20: mol_type = other DNA
ctagtgctcagtagccacgg

SEQ ID NO: 31078 - DNA, 20 bp, synthetic construct
  misc_feature 1..20: note = Description of Artificial Sequence: Synthetic oligonucleotide
  misc_feature 1..20: note = Target: FXN; (+) strand; PAM type: YTN; PAM sequence: TTC
  source 1..20: mol_type = other DNA
tagtgctcagtagccacggg

SEQ ID NO: 31079 - DNA, 20 bp, synthetic construct
  misc_feature 1..20: note = Description of Artificial Sequence: Synthetic oligonucleotide
  misc_feature 1..20: note = Target: FXN; (+) strand; PAM type: YTN; PAM sequence: CTA
  source 1..20: mol_type = other DNA
gtgctcagtagccacggggg

SEQ ID NO: 31080 - DNA, 20 bp, synthetic construct
  misc_feature 1..20: note = Description of Artificial Sequence: Synthetic oligonucleotide
  misc_feature 1..20: note = Target: FXN; (+) strand; PAM type: YTN; PAM sequence: CTC
  source 1..20: mol_type = other DNA
agtagccacgggggctggtg

SEQ ID NO: 31081 - DNA, 20 bp, synthetic construct
  misc_feature 1..20: note = Description of Artificial Sequence: Synthetic oligonucleotide
  misc_feature 1..20: note = Target: FXN; (+) strand; PAM type: YTN; PAM sequence: CTG
  source 1..20: mol_type = other DNA
gtgaccaccacatgggacag

SEQ ID NO: 31082 - DNA, 20 bp, synthetic construct
  misc_feature 1..20: note = Description of Artificial Sequence: Synthetic oligonucleotide
  misc_feature 1..20: note = Target: FXN; (+) strand; PAM type: YTN; PAM sequence: TTT
  source 1..20: mol_type = other DNA
agtacctgatcattggttct

SEQ ID NO: 31083 - DNA, 20 bp, synthetic construct
  misc_feature 1..20: note = Description of Artificial Sequence: Synthetic oligonucleotide
  misc_feature 1..20: note = Target: FXN; (+) strand; PAM type: YTN; PAM sequence: TTA
  source 1..20: mol_type = other DNA
gtacctgatcattggttctc

SEQ ID NO: 31084 - DNA, 20 bp, synthetic construct
  misc_feature 1..20: note = Description of Artificial Sequence: Synthetic oligonucleotide
  misc_feature 1..20: note = Target: FXN; (+) strand; PAM type: YTN; PAM sequence: CTG
  source 1..20: mol_type = other DNA
atcattggttctcagatctg

SEQ ID NO: 31085 - DNA, 20 bp, synthetic construct
  misc_feature 1..20: note = Description of Artificial Sequence: Synthetic oligonucleotide
  misc_feature 1..20: note = Target: FXN; (+) strand; PAM type: YTN; PAM sequence: TTG
  source 1..20: mol_type = other DNA
gttctcagatctggctactc

SEQ ID NO: 31086 - DNA, 20 bp, synthetic construct
  misc_feature 1..20: note = Description of Artificial Sequence: Synthetic oligonucleotide
  misc_feature 1..20: note = Target: FXN; (+) strand; PAM type: YTN; PAM sequence: TTC
  source 1..20: mol_type = other DNA
tcagatctggctactcagca

SEQ ID NO: 31087 - DNA, 20 bp, synthetic construct
  misc_feature 1..20: note = Description of Artificial Sequence: Synthetic oligonucleotide
  misc_feature 1..20: note = Target: FXN; (+) strand; PAM type: YTN; PAM sequence: CTC
  source 1..20: mol_type = other DNA
agatctggctactcagcaga

SEQ ID NO: 31088 - DNA, 20 bp, synthetic construct
  misc_feature 1..20: note = Description of Artificial Sequence: Synthetic oligonucleotide
  misc_feature 1..20: note = Target: FXN; (+) strand; PAM type: YTN; PAM sequence: CTG
  source 1..20: mol_type = other DNA
gctactcagcagaaccaaga

SEQ ID NO: 31089 - DNA, 20 bp, synthetic construct
  misc_feature 1..20: note = Description of Artificial Sequence: Synthetic oligonucleotide
  misc_feature 1..20: note = Target: FXN; (+) strand; PAM type: YTN; PAM sequence: CTA
  source 1..20: mol_type = other DNA
ctcagcagaaccaagaatcc

SEQ ID NO: 31090 - DNA, 20 bp, synthetic construct
  misc_feature 1..20: note = Description of Artificial Sequence: Synthetic oligonucleotide
  misc_feature 1..20: note = Target: FXN; (+) strand; PAM type: YTN; PAM sequence: CTC
  source 1..20: mol_type = other DNA
agcagaaccaagaatccaca

SEQ ID NO: 31091 - DNA, 20 bp, synthetic construct
  misc_feature 1..20: note = Description of Artificial Sequence: Synthetic oligonucleotide
  misc_feature 1..20: note = Target: FXN; (+) strand; PAM type: YTN; PAM sequence: CTT
  source 1..20: mol_type = other DNA
ttaaaagcacagccccacag

SEQ ID NO: 31092 - DNA, 20 bp, synthetic construct
  misc_feature 1..20: note = Description of Artificial Sequence: Synthetic oligonucleotide
  misc_feature 1..20: note = Target: FXN; (+) strand; PAM type: YTN; PAM sequence: TTT
  source 1..20: mol_type = other DNA
taaaagcacagccccacagc

SEQ ID NO: 31093 - DNA, 20 bp, synthetic construct
  misc_feature 1..20: note = Description of Artificial Sequence: Synthetic oligonucleotide
  misc_feature 1..20: note = Target: FXN; (+) strand; PAM type: YTN; PAM sequence: TTT
  source 1..20: mol_type = other DNA
aaaagcacagccccacagcc

SEQ ID NO: 31094 - DNA, 20 bp, synthetic construct
  misc_feature 1..20: note = Description of Artificial Sequence: Synthetic oligonucleotide
  misc_feature 1..20: note = Target: FXN; (+) strand; PAM type: YTN; PAM sequence: TTA
  source 1..20: mol_type = other DNA
aaagcacagccccacagccc

SEQ ID NO: 31095 - DNA, 20 bp, synthetic construct
  misc_feature 1..20: note = Description of Artificial Sequence: Synthetic oligonucleotide
  misc_feature 1..20: note = Target: FXN; (+) strand; PAM type: YTN; PAM sequence: CTT
  source 1..20: mol_type = other DNA
acctacctggaggctgggaa

SEQ ID NO: 31096 - DNA, 20 bp, synthetic construct
  misc_feature 1..20: note = Description of Artificial Sequence: Synthetic oligonucleotide
  misc_feature 1..20: note = Target: FXN; (+) strand; PAM type: YTN; PAM sequence: TTA
  source 1..20: mol_type = other DNA
cctacctggaggctgggaag

SEQ ID NO: 31097 - DNA, 20 bp, synthetic construct
  misc_feature 1..20: note = Description of Artificial Sequence: Synthetic oligonucleotide
  misc_feature 1..20: note = Target: FXN; (+) strand; PAM type: YTN; PAM sequence: CTA
  source 1..20: mol_type = other DNA
cctggaggctgggaaggact

SEQ ID NO: 31098 - DNA, 20 bp, synthetic construct
  misc_feature 1..20: note = Description of Artificial Sequence: Synthetic oligonucleotide
  misc_feature 1..20: note = Target: FXN; (+) strand; PAM type: YTN; PAM sequence: CTG
  source 1..20: mol_type = other DNA
gaggctgggaaggactctga

SEQ ID NO: 31099 - DNA, 20 bp, synthetic construct
  misc_feature 1..20: note = Description of Artificial Sequence: Synthetic oligonucleotide
  misc_feature 1..20: note = Target: FXN; (+) strand; PAM type: YTN; PAM sequence: CTG
  source 1..20: mol_type = other DNA
ggaaggactctgattccacg

SEQ ID NO: 31100 - DNA, 20 bp, synthetic construct
  misc_feature 1..20: note = Description of Artificial Sequence: Synthetic oligonucleotide
  misc_feature 1..20: note = Target: FXN; (+) strand; PAM type: YTN; PAM sequence: CTC
  source 1..20: mol_type = other DNA
tgattccacgaggcagccta

SEQ ID NO: 31101 - DNA, 20 bp, synthetic construct
  misc_feature 1..20: note = Description of Artificial Sequence: Synthetic oligonucleotide
  misc_feature 1..20: note = Target: FXN; (+) strand; PAM type: YTN; PAM sequence: CTG
  source 1..20: mol_type = other DNA
attccacgaggcagcctatg

SEQ ID NO: 31102 - DNA, 20 bp, synthetic construct
  misc_feature 1..20: note = Description of Artificial Sequence: Synthetic oligonucleotide
  misc_feature 1..20: note = Target: FXN; (+) strand; PAM type: YTN; PAM sequence: TTC
  source 1..20: mol_type = other DNA
cacgaggcagcctatgtttt

SEQ ID NO: 31103 - DNA, 20 bp, synthetic construct
  misc_feature 1..20: note = Description of Artificial Sequence: Synthetic oligonucleotide
  misc_feature 1..20: note = Target: FXN; (+) strand; PAM type: YTN; PAM sequence: CTA
  source 1..20: mol_type = other DNA
tgttttttgatggagggatg

SEQ ID NO: 31104 - DNA, 20 bp, synthetic construct
  misc_feature 1..20: note = Description of Artificial Sequence: Synthetic oligonucleotide
  misc_feature 1..20: note = Target: FXN; (+) strand; PAM type: YTN; PAM sequence: TTT
  source 1..20: mol_type = other DNA
tttgatggagggatgtgaca

SEQ ID NO: 31105 - DNA, 20 bp, synthetic construct
  misc_feature 1..20: note = Description of Artificial Sequence: Synthetic oligonucleotide
  misc_feature 1..20: note = Target: FXN; (+) strand; PAM type: YTN; PAM sequence: TTT
  source 1..20: mol_type = other DNA
ttgatggagggatgtgacag

SEQ ID NO: 31106 - DNA, 20 bp, synthetic construct
  misc_feature 1..20: note = Description of Artificial Sequence: Synthetic oligonucleotide
  misc_feature 1..20: note = Target: FXN; (+) strand; PAM type: YTN; PAM sequence: TTT
  source 1..20: mol_type = other DNA
tgatggagggatgtgacagg

SEQ ID NO: 31107 - DNA, 20 bp, synthetic construct
  misc_feature 1..20: note = Description of Artificial Sequence: Synthetic oligonucleotide
  misc_feature 1..20: note = Target: FXN; (+) strand; PAM type: YTN; PAM sequence: TTT
  source 1..20: mol_type = other DNA
gatggagggatgtgacaggg

SEQ ID NO: 31108 - DNA, 20 bp, synthetic construct
  misc_feature 1..20: note = Description of Artificial Sequence: Synthetic oligonucleotide
  misc_feature 1..20: note = Target: FXN; (+) strand; PAM type: YTN; PAM sequence: TTG
  source 1..20: mol_type = other DNA
atggagggatgtgacagggg

SEQ ID NO: 31109 - DNA, 20 bp, synthetic construct
  misc_feature 1..20: note = Description of Artificial Sequence: Synthetic oligonucleotide
  misc_feature 1..20: note = Target: FXN; (+) strand; PAM type: YTN; PAM sequence: CTG
  source 1..20: mol_type = other DNA
catctttaacgtttcctctt

SEQ ID NO: 31110 - DNA, 20 bp, synthetic construct
  misc_feature 1..20: note = Description of Artificial Sequence: Synthetic oligonucleotide
  misc_feature 1..20: note = Target: FXN; (+) strand; PAM type: YTN; PAM sequence: CTT
  source 1..20: mol_type = other DNA
taacgtttcctcttaaatac

SEQ ID NO: 31111 - DNA, 20 bp, synthetic construct
  misc_feature 1..20: note = Description of Artificial Sequence: Synthetic oligonucleotide
  misc_feature 1..20: note = Target: FXN; (+) strand; PAM type: YTN; PAM sequence: TTT
  source 1..20: mol_type = other DNA
aacgtttcctcttaaatact

SEQ ID NO: 31112 - DNA, 20 bp, synthetic construct
  misc_feature 1..20: note = Description of Artificial Sequence: Synthetic oligonucleotide
  misc_feature 1..20: note = Target: FXN; (+) strand; PAM type: YTN; PAM sequence: TTA
  source 1..20: mol_type = other DNA
acgtttcctcttaaatactg

SEQ ID NO: 31113 - DNA, 20 bp, synthetic construct
  misc_feature 1..20: note = Description of Artificial Sequence: Synthetic oligonucleotide
  misc_feature 1..20: note = Target: FXN; (+) strand; PAM type: YTN; PAM sequence: TTT
  source 1..20: mol_type = other DNA
cctcttaaatactggagaca

SEQ ID NO: 31114 - DNA, 20 bp, synthetic construct
  misc_feature 1..20: note = Description of Artificial Sequence: Synthetic oligonucleotide
  misc_feature 1..20: note = Target: FXN; (+) strand; PAM type: YTN; PAM sequence: TTC
  source 1..20: mol_type = other DNA
ctcttaaatactggagacag

SEQ ID NO: 31115 - DNA, 20 bp, synthetic construct
  misc_feature 1..20: note = Description of Artificial Sequence: Synthetic oligonucleotide
  misc_feature 1..20: note = Target: FXN; (+) strand; PAM type: YTN; PAM sequence: CTC
  source 1..20: mol_type = other DNA
ttaaatactggagacagctt

SEQ ID NO: 31116 - DNA, 20 bp, synthetic construct
  misc_feature 1..20: note = Description of Artificial Sequence: Synthetic oligonucleotide
  misc_feature 1..20: note = Target: FXN; (+) strand; PAM type: YTN; PAM sequence: CTT
  source 1..20: mol_type = other DNA
aaatactggagacagcttcg

SEQ ID NO: 31117 - DNA, 20 bp, synthetic construct
  misc_feature 1..20: note = Description of Artificial Sequence: Synthetic oligonucleotide
  misc_feature 1..20: note = Target: FXN; (+) strand; PAM type: YTN; PAM sequence: TTA
  source 1..20: mol_type = other DNA
aatactggagacagcttcga

SEQ ID NO: 31118 - DNA, 20 bp, synthetic construct
  misc_feature 1..20: note = Description of Artificial Sequence: Synthetic oligonucleotide
  misc_feature 1..20: note = Target: FXN; (+) strand; PAM type: YTN; PAM sequence: CTG
  source 1..20: mol_type = other DNA
gagacagcttcgaggaggag

SEQ ID NO: 31119 - DNA, 20 bp, synthetic construct
  misc_feature 1..20: note = Description of Artificial Sequence: Synthetic oligonucleotide
  misc_feature 1..20: note = Target: FXN; (+) strand; PAM type: YTN; PAM sequence: CTT
  source 1..20: mol_type = other DNA
cgaggaggagataactggat

SEQ ID NO: 31120 - DNA, 20 bp, synthetic construct
  misc_feature 1..20: note = Description of Artificial Sequence: Synthetic oligonucleotide
  misc_feature 1..20: note = Target: FXN; (+) strand; PAM type: YTN; PAM sequence: TTC
  source 1..20: mol_type = other DNA
gaggaggagataactggatg

SEQ ID NO: 31121 - DNA, 20 bp, synthetic construct
  misc_feature 1..20: note = Description of Artificial Sequence: Synthetic oligonucleotide
  misc_feature 1..20: note = Target: FXN; (+) strand; PAM type: YTN; PAM sequence: CTG
  source 1..20: mol_type = other DNA
gatgtgtcttagtccatttg

SEQ ID NO: 31122 - DNA, 20 bp, synthetic construct
  misc_feature 1..20: note = Description of Artificial Sequence: Synthetic oligonucleotide
  misc_feature 1..20: note = Target: FXN; (+) strand; PAM type: YTN; PAM sequence: CTT
  source 1..20: mol_type = other DNA
agtccatttgatggagggat

SEQ ID NO: 31123 - DNA, 20 bp, synthetic construct
  misc_feature 1..20: note = Description of Artificial Sequence: Synthetic oligonucleotide
  misc_feature 1..20: note = Target: FXN; (+) strand; PAM type: YTN; PAM sequence: TTA
  source 1..20: mol_type = other DNA
gtccatttgatggagggatg

SEQ ID NO: 31124 - DNA, 20 bp, synthetic construct
  misc_feature 1..20: note = Description of Artificial Sequence: Synthetic oligonucleotide
  misc_feature 1..20: note = Target: FXN; (+) strand; PAM type: YTN; PAM sequence: TTT
  source 1..20: mol_type = other DNA
gatggagggatgtgacgggg

SEQ ID NO: 31125 - DNA, 20 bp, synthetic construct
  misc_feature 1..20: note = Description of Artificial Sequence: Synthetic oligonucleotide
  misc_feature 1..20: note = Target: FXN; (+) strand; PAM type: YTN; PAM sequence: TTG
  source 1..20: mol_type = other DNA
atggagggatgtgacggggc

SEQ ID NO: 31126 - DNA, 20 bp, synthetic construct
  misc_feature 1..20: note = Description of Artificial Sequence: Synthetic oligonucleotide
  misc_feature 1..20: note = Target: FXN; (+) strand; PAM type: YTN; PAM sequence: CTG
  source 1..20: mol_type = other DNA
cgtctttaacgtttcctctt

SEQ ID NO: 31127 - DNA, 20 bp, synthetic construct
  misc_feature 1..20: note = Description of Artificial Sequence: Synthetic oligonucleotide
  misc_feature 1..20: note = Target: FXN; (+) strand; PAM type: YTN; PAM sequence: CTT
  source 1..20: mol_type = other DNA
taacgtttcctcttaaatac

SEQ ID NO: 31128 - DNA, 20 bp, synthetic construct
  misc_feature 1..20: note = Description of Artificial Sequence: Synthetic oligonucleotide
  misc_feature 1..20: note = Target: FXN; (+) strand; PAM type: YTN; PAM sequence: TTT
  source 1..20: mol_type = other DNA
aacgtttcctcttaaatacc

SEQ ID NO: 31129 - DNA, 20 bp, synthetic construct
  misc_feature 1..20: note = Description of Artificial Sequence: Synthetic oligonucleotide
  misc_feature 1..20: note = Target: FXN; (+) strand; PAM type: YTN; PAM sequence: TTA
  source 1..20: mol_type = other DNA
acgtttcctcttaaataccg

SEQ ID NO: 31130 - DNA, 20 bp, synthetic construct
  misc_feature 1..20: note = Description of Artificial Sequence: Synthetic oligonucleotide
  misc_feature 1..20: note = Target: FXN; (+) strand; PAM type: YTN; PAM sequence: TTT
  source 1..20: mol_type = other DNA
cctcttaaataccggagaca

SEQ ID NO: 31131 - DNA, 20 bp, synthetic construct
  misc_feature 1..20: note = Description of Artificial Sequence: Synthetic oligonucleotide
  misc_feature 1..20: note = Target: FXN; (+) strand; PAM type: YTN; PAM sequence: TTC
  source 1..20: mol_type = other DNA
ctcttaaataccggagacag

SEQ ID NO: 31132 - DNA, 20 bp, synthetic construct
  misc_feature 1..20: note = Description of Artificial Sequence: Synthetic oligonucleotide
  misc_feature 1..20: note = Target: FXN; (+) strand; PAM type: YTN; PAM sequence: CTC
  source 1..20: mol_type = other DNA
ttaaataccggagacagctt

SEQ ID NO: 31133 - DNA, 20 bp, synthetic construct
  misc_feature 1..20: note = Description of Artificial Sequence: Synthetic oligonucleotide
  misc_feature 1..20: note = Target: FXN; (+) strand; PAM type: YTN; PAM sequence: CTT
  source 1..20: mol_type = other DNA
aaataccggagacagcttcg

SEQ ID NO: 31134 - DNA, 20 bp, synthetic construct
  misc_feature 1..20: note = Description of Artificial Sequence: Synthetic oligonucleotide
  misc_feature 1..20: note = Target: FXN; (+) strand; PAM type: YTN; PAM sequence: TTA
  source 1..20: mol_type = other DNA
aataccggagacagcttcga

SEQ ID NO: 31135 - DNA, 20 bp, synthetic construct
  misc_feature 1..20: note = Description of Artificial Sequence: Synthetic oligonucleotide
  misc_feature 1..20: note = Target: FXN; (+) strand; PAM type: YTN; PAM sequence: CTT
  source 1..20: mol_type = other DNA
cgagaaggagataactggat

SEQ ID NO: 31136 - DNA, 20 bp, synthetic construct
  misc_feature 1..20: note = Description of Artificial Sequence: Synthetic oligonucleotide
  misc_feature 1..20: note = Target: FXN; (+) strand; PAM type: YTN; PAM sequence: TTC
  source 1..20: mol_type = other DNA
gagaaggagataactggatg

SEQ ID NO: 31137 - DNA, 20 bp, synthetic construct
  misc_feature 1..20: note = Description of Artificial Sequence: Synthetic oligonucleotide
  misc_feature 1..20: note = Target: FXN; (+) strand; PAM type: YTN; PAM sequence: CTG
  source 1..20: mol_type = other DNA
gatgtttcttagtccatttt

SEQ ID NO: 31138 - DNA, 20 bp, synthetic construct
  misc_feature 1..20: note = Description of Artificial Sequence: Synthetic oligonucleotide
  misc_feature 1..20: note = Target: FXN; (+) strand; PAM type: YTN; PAM sequence: TTT
  source 1..20: mol_type = other DNA
cttagtccattttctgttgc

SEQ ID NO: 31139 - DNA, 20 bp, synthetic construct
  misc_feature 1..20: note = Description of Artificial Sequence: Synthetic oligonucleotide
  misc_feature 1..20: note = Target: FXN; (+) strand; PAM type: YTN; PAM sequence: TTC
  source 1..20: mol_type = other DNA
ttagtccattttctgttgct

SEQ ID NO: 31140 - DNA, 20 bp, synthetic construct
  misc_feature 1..20: note = Description of Artificial Sequence: Synthetic oligonucleotide
  misc_feature 1..20: note = Target: FXN; (+) strand; PAM type: YTN; PAM sequence: CTT
  source 1..20: mol_type = other DNA
agtccattttctgttgcttg

SEQ ID NO: 31141 - DNA, 20 bp, synthetic construct
  misc_feature 1..20: note = Description of Artificial Sequence: Synthetic oligonucleotide
  misc_feature 1..20: note = Target: FXN; (+) strand; PAM type: YTN; PAM sequence: TTA
  source 1..20: mol_type = other DNA
gtccattttctgttgcttgt

SEQ ID NO: 31142 - DNA, 20 bp, synthetic construct
  misc_feature 1..20: note = Description of Artificial Sequence: Synthetic oligonucleotide
  misc_feature 1..20: note = Target: FXN; (+) strand; PAM type: YTN; PAM sequence: TTT
  source 1..20: mol_type = other DNA
tctgttgcttgtgacagaat

SEQ ID NO: 31143 - DNA, 20 bp, synthetic construct
  misc_feature 1..20: note = Description of Artificial Sequence: Synthetic oligonucleotide
  misc_feature 1..20: note = Target: FXN; (+) strand; PAM type: YTN; PAM sequence: TTT
  source 1..20: mol_type = other DNA
ctgttgcttgtgacagaata

SEQ ID NO: 31144 - DNA, 20 bp, synthetic construct
  misc_feature 1..20: note = Description of Artificial Sequence: Synthetic oligonucleotide
  misc_feature 1..20: note = Target: FXN; (+) strand; PAM type: YTN; PAM sequence: TTC
  source 1..20: mol_type = other DNA
tgttgcttgtgacagaatac

SEQ ID NO: 31145 - DNA, 20 bp, synthetic construct
  misc_feature 1..20: note = Description of Artificial Sequence: Synthetic oligonucleotide
  misc_feature 1..20: note = Target: FXN; (+) strand; PAM type: YTN; PAM sequence: CTG
  source 1..20: mol_type = other DNA
ttgcttgtgacagaatacct

SEQ ID NO: 31146 - DNA, 20 bp, synthetic construct
  misc_feature 1..20: note = Description of Artificial Sequence: Synthetic oligonucleotide
  misc_feature 1..20: note = Target: FXN; (+) strand; PAM type: YTN; PAM sequence: TTG
  source 1..20: mol_type = other DNA
cttgtgacagaatacctgaa

SEQ ID NO: 31147 - DNA, 20 bp, synthetic construct
  misc_feature 1..20: note = Description of Artificial Sequence: Synthetic oligonucleotide
  misc_feature 1..20: note = Target: FXN; (+) strand; PAM type: YTN; PAM sequence: CTT
  source 1..20: mol_type = other DNA
gtgacagaatacctgaaact

SEQ ID NO: 31148 - DNA, 20 bp, synthetic construct
  misc_feature 1..20: note = Description of Artificial Sequence: Synthetic oligonucleotide
  misc_feature 1..20: note = Target: FXN; (+) strand; PAM type: YTN; PAM sequence: TTG
  source 1..20: mol_type = other DNA
tgacagaatacctgaaactg

SEQ ID NO: 31149 - DNA, 20 bp, synthetic construct
  misc_feature 1..20: note = Description of Artificial Sequence: Synthetic oligonucleotide
  misc_feature 1..20: note = Target: FXN; (+) strand; PAM type: YTN; PAM sequence: CTG
  source 1..20: mol_type = other DNA
aaactgggcaatttatatgg

SEQ ID NO: 31150 - DNA, 20 bp, synthetic construct
  misc_feature 1..20: note = Description of Artificial Sequence: Synthetic oligonucleotide
  misc_feature 1..20: note = Target: FXN; (+) strand; PAM type: YTN; PAM sequence: CTG
  source 1..20: mol_type = other DNA
ggcaatttatatggtaaaaa

SEQ ID NO: 31151 - DNA, 20 bp, synthetic construct
  misc_feature 1..20: note = Description of Artificial Sequence: Synthetic oligonucleotide
  misc_feature 1..20: note = Target: FXN; (+) strand; PAM type: YTN; PAM sequence: TTT
  source 1..20: mol_type = other DNA
atatggtaaaaaattttctt

SEQ ID NO: 31152 - DNA, 20 bp, synthetic construct
  misc_feature 1..20: note = Description of Artificial Sequence: Synthetic oligonucleotide
  misc_feature 1..20: note = Target: FXN; (+) strand; PAM type: YTN; PAM sequence: TTA
  source 1..20: mol_type = other DNA
tatggtaaaaaattttcttc

SEQ ID NO: 31153 - DNA, 20 bp, synthetic construct
  misc_feature 1..20: note = Description of Artificial Sequence: Synthetic oligonucleotide
  misc_feature 1..20: note = Target: FXN; (+) strand; PAM type: YTN; PAM sequence: TTT
  source 1..20: mol_type = other DNA
tcttcttactgctctggagg

SEQ ID NO: 31154 - DNA, 20 bp, synthetic construct
  misc_feature 1..20: note = Description of Artificial Sequence: Synthetic oligonucleotide
  misc_feature 1..20: note = Target: FXN; (+) strand; PAM type: YTN; PAM sequence: TTT
  source 1..20: mol_type = other DNA
cttcttactgctctggaggc

SEQ ID NO: 31155 - DNA, 20 bp, synthetic construct
  misc_feature 1..20: note = Description of Artificial Sequence: Synthetic oligonucleotide
  misc_feature 1..20: note = Target: FXN; (+) strand; PAM type: YTN; PAM sequence: TTC
  source 1..20: mol_type = other DNA
ttcttactgctctggaggct

SEQ ID NO: 31156 - DNA, 20 bp, synthetic construct
  misc_feature 1..20: note = Description of Artificial Sequence: Synthetic oligonucleotide
  misc_feature 1..20: note = Target: FXN; (+) strand; PAM type: YTN; PAM sequence: CTT
  source 1..20: mol_type = other DNA
cttactgctctggaggctga

SEQ ID NO: 31157 - DNA, 20 bp, synthetic construct
  misc_feature 1..20: note = Description of Artificial Sequence: Synthetic oligonucleotide
  misc_feature 1..20: note = Target: FXN; (+) strand; PAM type: YTN; PAM sequence: TTC
  source 1..20: mol_type = other DNA
ttactgctctggaggctgag

SEQ ID NO: 31158 - DNA, 20 bp, synthetic construct
  misc_feature 1..20: note = Description of Artificial Sequence: Synthetic oligonucleotide
  misc_feature 1..20: note = Target: FXN; (+) strand; PAM type: YTN; PAM sequence: CTT
  source 1..20: mol_type = other DNA
actgctctggaggctgagaa

SEQ ID NO: 31159 - DNA, 20 bp, synthetic construct
  misc_feature 1..20: note = Description of Artificial Sequence: Synthetic oligonucleotide
  misc_feature 1..20: note = Target: FXN; (+) strand; PAM type: YTN; PAM sequence: TTA
  source 1..20: mol_type = other DNA
ctgctctggaggctgagaag

SEQ ID NO: 31160 - DNA, 20 bp, synthetic construct
  misc_feature 1..20: note = Description of Artificial Sequence: Synthetic oligonucleotide
  misc_feature 1..20: note = Target: FXN; (+) strand; PAM type: YTN; PAM sequence: CTG
  source 1..20: mol_type = other DNA
ctctggaggctgagaagtcc

SEQ ID NO: 31161 - DNA, 20 bp, synthetic construct
  misc_feature 1..20: note = Description of Artificial Sequence: Synthetic oligonucleotide
  misc_feature 1..20: note = Target: FXN; (+) strand; PAM type: YTN; PAM sequence: CTC
  source 1..20: mol_type = other DNA
tggaggctgagaagtccaaa

SEQ ID NO: 31162 - DNA, 20 bp, synthetic construct
  misc_feature 1..20: note = Description of Artificial Sequence: Synthetic oligonucleotide
  misc_feature 1..20: note = Target: FXN; (+) strand; PAM type: YTN; PAM sequence: CTG
  source 1..20: mol_type = other DNA
gaggctgagaagtccaaagt

SEQ ID NO: 31163 - DNA, 20 bp, synthetic construct
  misc_feature 1..20: note = Description of Artificial Sequence: Synthetic oligonucleotide
  misc_feature 1..20: note = Target: FXN; (+) strand; PAM type: YTN; PAM sequence: CTG
  source 1..20: mol_type = other DNA
agaagtccaaagtcaagtcc

SEQ ID NO: 31164 - DNA, 20 bp, synthetic construct
  misc_feature 1..20: note = Description of Artificial Sequence: Synthetic oligonucleotide
  misc_feature 1..20: note = Target: FXN; (+) strand; PAM type: YTN; PAM sequence: CTT
  source 1..20: mol_type = other DNA
cttgctggtggggactttgc

SEQ ID NO: 31165 - DNA, 20 bp, synthetic construct
  misc_feature 1..20: note = Description of Artificial Sequence: Synthetic oligonucleotide
  misc_feature 1..20: note = Target: FXN; (+) strand; PAM type: YTN; PAM sequence: TTC
  source 1..20: mol_type = other DNA
ttgctggtggggactttgca

SEQ ID NO: 31166 - DNA, 20 bp, synthetic construct
  misc_feature 1..20: note = Description of Artificial Sequence: Synthetic oligonucleotide
  misc_feature 1..20: note = Target: FXN; (+) strand; PAM type: YTN; PAM sequence: CTT
  source 1..20: mol_type = other DNA
gctggtggggactttgcaga

SEQ ID NO: 31167 - DNA, 20 bp, synthetic construct
  misc_feature 1..20: note = Description of Artificial Sequence: Synthetic oligonucleotide
  misc_feature 1..20: note = Target: FXN; (+) strand; PAM type: YTN; PAM sequence: TTG
  source 1..20: mol_type = other DNA
ctggtggggactttgcagag

SEQ ID NO: 31168 - DNA, 20 bp, synthetic construct
  misc_feature 1..20: note = Description of Artificial Sequence: Synthetic oligonucleotide
  misc_feature 1..20: note = Target: FXN; (+) strand; PAM type: YTN; PAM sequence: CTG
  source 1..20: mol_type = other DNA
gtggggactttgcagagtat

SEQ ID NO: 31169 - DNA, 20 bp, synthetic construct
  misc_feature 1..20: note = Description of Artificial Sequence: Synthetic oligonucleotide
  misc_feature 1..20: note = Target: FXN; (+) strand; PAM type: YTN; PAM sequence: CTT
  source 1..20: mol_type = other DNA
tgcagagtattgaggcggca

SEQ ID NO: 31170 - DNA, 20 bp, synthetic construct
  misc_feature 1..20: note = Description of Artificial Sequence: Synthetic oligonucleotide
  misc_feature 1..20: note = Target: FXN; (+) strand; PAM type: YTN; PAM sequence: TTT
  source 1..20: mol_type = other DNA
gcagagtattgaggcggcac

SEQ ID NO: 31171 - DNA, 20 bp, synthetic construct
  misc_feature 1..20: note = Description of Artificial Sequence: Synthetic oligonucleotide
  misc_feature 1..20: note = Target: FXN; (+) strand; PAM type: YTN; PAM sequence: TTG
  source 1..20: mol_type = other DNA
cagagtattgaggcggcacc

SEQ ID NO: 31172 - DNA, 20 bp, synthetic construct
  misc_feature 1..20: note = Description of Artificial Sequence: Synthetic oligonucleotide
  misc_feature 1..20: note = Target: FXN; (+) strand; PAM type: YTN; PAM sequence: TTG
  source 1..20: mol_type = other DNA
aggcggcaccgggcgtcata

SEQ ID NO: 31173 - DNA, 20 bp, synthetic construct
  misc_feature 1..20: note = Description of Artificial Sequence: Synthetic oligonucleotide
  misc_feature 1..20: note = Target: FXN; (+) strand; PAM type: YTN; PAM sequence: CTG
  source 1..20: mol_type = other DNA
agtgtgctacctcaggtgtc

SEQ ID NO: 31174 - DNA, 20 bp, synthetic construct
  misc_feature 1..20: note = Description of Artificial Sequence: Synthetic oligonucleotide
  misc_feature 1..20: note = Target: FXN; (+) strand; PAM type: YTN; PAM sequence: CTA
  source 1..20: mol_type = other DNA
cctcaggtgtctttttcttt

SEQ ID NO: 31175 - DNA, 20 bp, synthetic construct
  misc_feature 1..20: note = Description of Artificial Sequence: Synthetic oligonucleotide
  misc_feature 1..20: note = Target: FXN; (+) strand; PAM type: YTN; PAM sequence: CTC
  source 1..20: mol_type = other DNA
aggtgtctttttcttttctt

SEQ ID NO: 31176 - DNA, 20 bp, synthetic construct
  misc_feature 1..20: note = Description of Artificial Sequence: Synthetic oligonucleotide
  misc_feature 1..20: note = Target: FXN; (+) strand; PAM type: YTN; PAM sequence: CTT
  source 1..20: mol_type = other DNA
tttcttttcttataaagcct

SEQ ID NO: 31177 - DNA, 20 bp, synthetic construct
  misc_feature 1..20: note = Description of Artificial Sequence: Synthetic oligonucleotide
  misc_feature 1..20: note = Target: FXN; (+) strand; PAM type: YTN; PAM sequence: TTT
  source 1..20: mol_type = other DNA
ttcttttcttataaagccta

SEQ ID NO: 31178 - DNA, 20 bp, synthetic construct
  misc_feature 1..20: note = Description of Artificial Sequence: Synthetic oligonucleotide
  misc_feature 1..20: note = Target: FXN; (+) strand; PAM type: YTN; PAM sequence: TTT
  source 1..20: mol_type = other DNA
tcttttcttataaagcctaa

SEQ ID NO: 31179 - DNA, 20 bp, synthetic construct
  misc_feature 1..20: note = Description of Artificial Sequence: Synthetic oligonucleotide
  misc_feature 1..20: note = Target: FXN; (+) strand; PAM type: YTN; PAM sequence: TTT
  source 1..20: mol_type = other DNA
cttttcttataaagcctaac

SEQ ID NO: 31180 - DNA, 20 bp, synthetic construct
  misc_feature 1..20: note = Description of Artificial Sequence: Synthetic oligonucleotide
  misc_feature 1..20: note = Target: FXN; (+) strand; PAM type: YTN; PAM sequence: TTC
  source 1..20: mol_type = other DNA
ttttcttataaagcctaact

SEQ ID NO: 31181 - DNA, 20 bp, synthetic construct
  misc_feature 1..20: note = Description of Artificial Sequence: Synthetic oligonucleotide
  misc_feature 1..20: note = Target: FXN; (+) strand; PAM type: YTN; PAM sequence: CTT
  source 1..20: mol_type = other DNA
ttcttataaagcctaactag

SEQ ID NO: 31182 - DNA, 20 bp, synthetic construct
  misc_feature 1..20: note = Description of Artificial Sequence: Synthetic oligonucleotide
  misc_feature 1..20: note = Target: FXN; (+) strand; PAM type: YTN; PAM sequence: TTT
  source 1..20: mol_type = other DNA
tcttataaagcctaactagt

SEQ ID NO: 31183 - DNA, 20 bp, synthetic construct
  misc_feature 1..20: note = Description of Artificial Sequence: Synthetic oligonucleotide
  misc_feature 1..20: note = Target: FXN; (+) strand; PAM type: YTN; PAM sequence: TTT
  source 1..20: mol_type = other DNA
cttataaagcctaactagtt

SEQ ID NO: 31184 - DNA, 20 bp, synthetic construct
  misc_feature 1..20: note = Description of Artificial Sequence: Synthetic oligonucleotide
  misc_feature 1..20: note = Target: FXN; (+) strand; PAM type: YTN; PAM sequence: TTC
  source 1..20: mol_type = other DNA
ttataaagcctaactagttt

SEQ ID NO: 31185 - DNA, 20 bp, synthetic construct
  misc_feature 1..20: note = Description of Artificial Sequence: Synthetic oligonucleotide
  misc_feature 1..20: note = Target: FXN; (+) strand; PAM type: YTN; PAM sequence: CTT
  source 1..20: mol_type = other DNA
ataaagcctaactagtttca

SEQ ID NO: 31186 - DNA, 20 bp, synthetic construct
  misc_feature 1..20: note = Description of Artificial Sequence: Synthetic oligonucleotide
  misc_feature 1..20: note = Target: FXN; (+) strand; PAM type: YTN; PAM sequence: TTA
  source 1..20: mol_type = other DNA
taaagcctaactagtttcac

SEQ ID NO: 31187 - DNA, 20 bp, synthetic construct
  misc_feature 1..20: note = Description of Artificial Sequence: Synthetic oligonucleotide
  misc_feature 1..20: note = Target: FXN; (+) strand; PAM type: YTN; PAM sequence: CTA
  source 1..20: mol_type = other DNA
actagtttcactcccatgat

SEQ ID NO: 31188 - DNA, 20 bp, synthetic construct
  misc_feature 1..20: note = Description of Artificial Sequence: Synthetic oligonucleotide
  misc_feature 1..20: note = Target: FXN; (+) strand; PAM type: YTN; PAM sequence: CTA
  source 1..20: mol_type = other DNA
gtttcactcccatgataacc

SEQ ID NO: 31189 - DNA, 20 bp, synthetic construct
  misc_feature 1..20: note = Description of Artificial Sequence: Synthetic oligonucleotide
  misc_feature 1..20: note = Target: FXN; (+) strand; PAM type: YTN; PAM sequence: TTT
  source 1..20: mol_type = other DNA
cactcccatgataacccatt

SEQ ID NO: 31190 - DNA, 20 bp, synthetic construct
  misc_feature 1..20: note = Description of Artificial Sequence: Synthetic oligonucleotide
  misc_feature 1..20: note = Target: FXN; (+) strand; PAM type: YTN; PAM sequence: TTC
  source 1..20: mol_type = other DNA
actcccatgataacccatta

SEQ ID NO: 31191 - DNA, 20 bp, synthetic construct
  misc_feature 1..20: note = Description of Artificial Sequence: Synthetic oligonucleotide
  misc_feature 1..20: note = Target: FXN; (+) strand; PAM type: YTN; PAM sequence: CTC
  source 1..20: mol_type = other DNA
ccatgataacccattaatct

SEQ ID NO: 31192 - DNA, 20 bp, synthetic construct
  misc_feature 1..20: note = Description of Artificial Sequence: Synthetic oligonucleotide
  misc_feature 1..20: note = Target: FXN; (+) strand; PAM type: YTN; PAM sequence: TTA
  source 1..20: mol_type = other DNA
atctatgaatggattaatcc

SEQ ID NO: 31193 - DNA, 20 bp, synthetic construct
  misc_feature 1..20: note = Description of Artificial Sequence: Synthetic oligonucleotide
  misc_feature 1..20: note = Target: FXN; (+) strand; PAM type: YTN; PAM sequence: CTA
  source 1..20: mol_type = other DNA
tgaatggattaatccattat

SEQ ID NO: 31194 - DNA, 20 bp, synthetic construct
  misc_feature 1..20: note = Description of Artificial Sequence: Synthetic oligonucleotide
  misc_feature 1..20: note = Target: FXN; (+) strand; PAM type: YTN; PAM sequence: TTA
  source 1..20: mol_type = other DNA
atccattattgagggaagaa

SEQ ID NO: 31195 - DNA, 20 bp, synthetic construct
  misc_feature 1..20: note = Description of Artificial Sequence: Synthetic oligonucleotide
  misc_feature 1..20: note = Target: FXN; (+) strand; PAM type: YTN; PAM sequence: TTA
  source 1..20: mol_type = other DNA
ttgagggaagaaccttcatg

SEQ ID NO: 31196 - DNA, 20 bp, synthetic construct
  misc_feature 1..20: note = Description of Artificial Sequence: Synthetic oligonucleotide
  misc_feature 1..20: note = Target: FXN; (+) strand; PAM type: YTN; PAM sequence: TTG
  source 1..20: mol_type = other DNA
agggaagaaccttcatgacc

SEQ ID NO: 31197 - DNA, 20 bp, synthetic construct
  misc_feature 1..20: note = Description of Artificial Sequence: Synthetic oligonucleotide
  misc_feature 1..20: note = Target: FXN; (+) strand; PAM type: YTN; PAM sequence: CTT
  source 1..20: mol_type = other DNA
catgacccagtcaccgctta

SEQ ID NO: 31198 - DNA, 20 bp, synthetic construct
  misc_feature 1..20: note = Description of Artificial Sequence: Synthetic oligonucleotide
  misc_feature 1..20: note = Target: FXN; (+) strand; PAM type: YTN; PAM sequence: TTC
  source 1..20: mol_type = other DNA
atgacccagtcaccgcttaa

SEQ ID NO: 31199 - DNA, 20 bp, synthetic construct
  misc_feature 1..20: note = Description of Artificial Sequence: Synthetic oligonucleotide
  misc_feature 1..20: note = Target: FXN; (+) strand; PAM type: YTN; PAM sequence: CTT
  source 1..20: mol_type = other DNA
aaaggccccacctctcaata

SEQ ID NO: 31200 - DNA, 20 bp, synthetic construct
  misc_feature 1..20: note = Description of Artificial Sequence: Synthetic oligonucleotide
  misc_feature 1..20: note = Target: FXN; (+) strand; PAM type: YTN; PAM sequence: TTA
  source 1..20: mol_type = other DNA
aaggccccacctctcaatac

SEQ ID NO: 31201 - DNA, 20 bp, synthetic construct
  misc_feature 1..20: note = Description of Artificial Sequence: Synthetic oligonucleotide
  misc_feature 1..20: note = Target: FXN; (+) strand; PAM type: YTN; PAM sequence: CTC
  source 1..20: mol_type = other DNA
tcaatactgccacatcggga

SEQ ID NO: 31202 - DNA, 20 bp, synthetic construct
  misc_feature 1..20: note = Description of Artificial Sequence: Synthetic oligonucleotide
  misc_feature 1..20: note = Target: FXN; (+) strand; PAM type: YTN; PAM sequence: CTC
  source 1..20: mol_type = other DNA
aatactgccacatcgggaat

SEQ ID NO: 31203 - DNA, 20 bp, synthetic construct
  misc_feature 1..20: note = Description of Artificial Sequence: Synthetic oligonucleotide
  misc_feature 1..20: note = Target: FXN; (+) strand; PAM type: YTN; PAM sequence: CTG
  source 1..20: mol_type = other DNA
ccacatcgggaattaagttt

SEQ ID NO: 31204 - DNA, 20 bp, synthetic construct
  misc_feature 1..20: note = Description of Artificial Sequence: Synthetic oligonucleotide
  misc_feature 1..20: note = Target: FXN; (+) strand; PAM type: YTN; PAM sequence: TTA
  source 1..20: mol_type = other DNA
agtttcaacatgagtttcgg

SEQ ID NO: 31205 - DNA, 20 bp, synthetic construct
  misc_feature 1..20: note = Description of Artificial Sequence: Synthetic oligonucleotide
  misc_feature 1..20: note = Target: FXN; (+) strand; PAM type: YTN; PAM sequence: TTT
  source 1..20: mol_type = other DNA
caacatgagtttcggaggtg

SEQ ID NO: 31206 - DNA, 20 bp, synthetic construct
  misc_feature 1..20: note = Description of Artificial Sequence: Synthetic oligonucleotide
  misc_feature 1..20: note = Target: FXN; (+) strand; PAM type: YTN; PAM sequence: TTC
  source 1..20: mol_type = other DNA
aacatgagtttcggaggtga

SEQ ID NO: 31207 - DNA, 20 bp, synthetic construct
  misc_feature 1..20: note = Description of Artificial Sequence: Synthetic oligonucleotide
  misc_feature 1..20: note = Target: FXN; (+) strand; PAM type: YTN; PAM sequence: TTT
  source 1..20: mol_type = other DNA
cggaggtgacaaacattcaa

SEQ ID NO: 31208 - DNA, 20 bp, synthetic construct
  misc_feature 1..20: note = Description of Artificial Sequence: Synthetic oligonucleotide
  misc_feature 1..20: note = Target: FXN; (+) strand; PAM type: YTN; PAM sequence: TTC
  source 1..20: mol_type = other DNA
ggaggtgacaaacattcaaa

SEQ ID NO: 31209 - DNA, 20 bp, synthetic construct
  misc_feature 1..20: note = Description of Artificial Sequence: Synthetic oligonucleotide
  misc_feature 1..20: note = Target: FXN; (+) strand; PAM type: YTN; PAM sequence: TTC
  source 1..20: mol_type = other DNA
aaaccatagcatgctgtctc

SEQ ID NO: 31210 - DNA, 20 bp, synthetic construct
  misc_feature 1..20: note = Description of Artificial Sequence: Synthetic oligonucleotide
  misc_feature 1..20: note = Target: FXN; (+) strand; PAM type: YTN; PAM sequence: CTG
  source 1..20: mol_type = other DNA
tctcttaaatgactcaataa

SEQ ID NO: 31211 - DNA, 20 bp, synthetic construct
  misc_feature 1..20: note = Description of Artificial Sequence: Synthetic oligonucleotide
  misc_feature 1..20: note = Target: FXN; (+) strand; PAM type: YTN; PAM sequence: CTC
  source 1..20: mol_type = other DNA
ttaaatgactcaataagctc

SEQ ID NO: 31212 - DNA, 20 bp, synthetic construct
  misc_feature 1..20: note = Description of Artificial Sequence: Synthetic oligonucleotide
  misc_feature 1..20: note = Target: FXN; (+) strand; PAM type: YTN; PAM sequence: CTT
  source 1..20: mol_type = other DNA
aaatgactcaataagctcct

SEQ ID NO: 31213 - DNA, 20 bp, synthetic construct
  misc_feature 1..20: note = Description of Artificial Sequence: Synthetic oligonucleotide
  misc_feature 1..20: note = Target: FXN; (+) strand; PAM type: YTN; PAM sequence: TTA
  source 1..20: mol_type = other DNA
aatgactcaataagctcctg

SEQ ID NO: 31214 - DNA, 20 bp, synthetic construct
  misc_feature 1..20: note = Description of Artificial Sequence: Synthetic oligonucleotide
  misc_feature 1..20: note = Target: FXN; (+) strand; PAM type: YTN; PAM sequence: CTC
  source 1..20: mol_type = other DNA
aataagctcctgtggcatcc

SEQ ID NO: 31215 - DNA, 20 bp, synthetic construct
  misc_feature 1..20: note = Description of Artificial Sequence: Synthetic oligonucleotide
  misc_feature 1..20: note = Target: FXN; (+) strand; PAM type: YTN; PAM sequence: CTC
  source 1..20: mol_type = other DNA
ctgtggcatccacttctgca

SEQ ID NO: 31216 - DNA, 20 bp, synthetic construct
  misc_feature 1..20: note = Description of Artificial Sequence: Synthetic oligonucleotide
  misc_feature 1..20: note = Target: FXN; (+) strand; PAM type: YTN; PAM sequence: CTG
  source 1..20: mol_type = other DNA
tggcatccacttctgcatgc

SEQ ID NO: 31217 - DNA, 20 bp, synthetic construct
  misc_feature 1..20: note = Description of Artificial Sequence: Synthetic oligonucleotide
  misc_feature 1..20: note = Target: FXN; (+) strand; PAM type: YTN; PAM sequence: CTT
  source 1..20: mol_type = other DNA
ctgcatgccttgggcagctt

SEQ ID NO: 31218 - DNA, 20 bp, synthetic construct
  misc_feature 1..20: note = Description of Artificial Sequence: Synthetic oligonucleotide
  misc_feature 1..20: note = Target: FXN; (+) strand; PAM type: YTN; PAM sequence: TTC
  source 1..20: mol_type = other DNA
tgcatgccttgggcagcttt

SEQ ID NO: 31219 - DNA, 20 bp, synthetic construct
  misc_feature 1..20: note = Description of Artificial Sequence: Synthetic oligonucleotide
  misc_feature 1..20: note = Target: FXN; (+) strand; PAM type: YTN; PAM sequence: CTG
  source 1..20: mol_type = other DNA
catgccttgggcagctttta

SEQ ID NO: 31220 - DNA, 20 bp, synthetic construct
  misc_feature 1..20: note = Description of Artificial Sequence: Synthetic oligonucleotide
  misc_feature 1..20: note = Target: FXN; (+) strand; PAM type: YTN; PAM sequence: CTT
  source 1..20: mol_type = other DNA
gggcagcttttagacatctg

SEQ ID NO: 31221 - DNA, 20 bp, synthetic construct
  misc_feature 1..20: note = Description of Artificial Sequence: Synthetic oligonucleotide
  misc_feature 1..20: note = Target: FXN; (+) strand; PAM type: YTN; PAM sequence: TTG
  source 1..20: mol_type = other DNA
ggcagcttttagacatctgt

SEQ ID NO: 31222 - DNA, 20 bp, synthetic construct
  misc_feature 1..20: note = Description of Artificial Sequence: Synthetic oligonucleotide
  misc_feature 1..20: note = Target: FXN; (+) strand; PAM type: YTN; PAM sequence: CTT
  source 1..20: mol_type = other DNA
ttagacatctgtccattttc

SEQ ID NO: 31223 - DNA, 20 bp, synthetic construct
  misc_feature 1..20: note = Description of Artificial Sequence: Synthetic oligonucleotide
  misc_feature 1..20: note = Target: FXN; (+) strand; PAM type: YTN; PAM sequence: TTT
  source 1..20: mol_type = other DNA
tagacatctgtccattttcc

SEQ ID NO: 31224 - DNA, 20 bp, synthetic construct
  misc_feature 1..20: note = Description of Artificial Sequence: Synthetic oligonucleotide
  misc_feature 1..20: note = Target: FXN; (+) strand; PAM type: YTN; PAM sequence: TTT
  source 1..20: mol_type = other DNA
agacatctgtccattttcct

SEQ ID NO: 31225 - DNA, 20 bp, synthetic construct
  misc_feature 1..20: note = Description of Artificial Sequence: Synthetic oligonucleotide
  misc_feature 1..20: note = Target: FXN; (+) strand; PAM type: YTN; PAM sequence: TTA
  source 1..20: mol_type = other DNA
gacatctgtccattttccta

SEQ ID NO: 31226 - DNA, 20 bp, synthetic construct
  misc_feature 1..20: note = Description of Artificial Sequence: Synthetic oligonucleotide
  misc_feature 1..20: note = Target: FXN; (+) strand; PAM type: YTN; PAM sequence: CTG
  source 1..20: mol_type = other DNA
tccattttcctagagggaca

SEQ ID NO: 31227 - DNA, 20 bp, synthetic construct
  misc_feature 1..20: note = Description of Artificial Sequence: Synthetic oligonucleotide
  misc_feature 1..20: note = Target: FXN; (+) strand; PAM type: YTN; PAM sequence: TTT
  source 1..20: mol_type = other DNA
tcctagagggacaagaccac

SEQ ID NO: 31228 - DNA, 20 bp, synthetic construct
  misc_feature 1..20: note = Description of Artificial Sequence: Synthetic oligonucleotide
  misc_feature 1..20: note = Target: FXN; (+) strand; PAM type: YTN; PAM sequence: TTT
  source 1..20: mol_type = other DNA
cctagagggacaagaccacc

SEQ ID NO: 31229 - DNA, 20 bp, synthetic construct
  misc_feature 1..20: note = Description of Artificial Sequence: Synthetic oligonucleotide
  misc_feature 1..20: note = Target: FXN; (+) strand; PAM type: YTN; PAM sequence: TTC
  source 1..20: mol_type = other DNA
ctagagggacaagaccacca

SEQ ID NO: 31230 - DNA, 20 bp, synthetic construct
  misc_feature 1..20: note = Description of Artificial Sequence: Synthetic oligonucleotide
  misc_feature 1..20: note = Target: FXN; (+) strand; PAM type: YTN; PAM sequence: CTA
  source 1..20: mol_type = other DNA
gagggacaagaccaccacct

SEQ ID NO: 31231 - DNA, 20 bp, synthetic construct
  misc_feature 1..20: note = Description of Artificial Sequence: Synthetic oligonucleotide
  misc_feature 1..20: note = Target: FXN; (+) strand; PAM type: YTN; PAM sequence: CTG
  source 1..20: mol_type = other DNA
tgatcctatgaccttttggc

SEQ ID NO: 31232 - DNA, 20 bp, synthetic construct
  misc_feature 1..20: note = Description of Artificial Sequence: Synthetic oligonucleotide
  misc_feature 1..20: note = Target: FXN; (+) strand; PAM type: YTN; PAM sequence: CTA
  source 1..20: mol_type = other DNA
tgaccttttggctttaggcc

SEQ ID NO: 31233 - DNA, 20 bp, synthetic construct
  misc_feature 1..20: note = Description of Artificial Sequence: Synthetic oligonucleotide
  misc_feature 1..20: note = Target: FXN; (+) strand; PAM type: YTN; PAM sequence: CTT
  source 1..20: mol_type = other DNA
ttggctttaggcctaacaag

SEQ ID NO: 31234 - DNA, 20 bp, synthetic construct
  misc_feature 1..20: note = Description of Artificial Sequence: Synthetic oligonucleotide
  misc_feature 1..20: note = Target: FXN; (+) strand; PAM type: YTN; PAM sequence: TTT
  source 1..20: mol_type = other DNA
tggctttaggcctaacaagc

SEQ ID NO: 31235 - DNA, 20 bp, synthetic construct
  misc_feature 1..20: note = Description of Artificial Sequence: Synthetic oligonucleotide
  misc_feature 1..20: note = Target: FXN; (+) strand; PAM type: YTN; PAM sequence: TTT
  source 1..20: mol_type = other DNA
ggctttaggcctaacaagca

SEQ ID NO: 31236 - DNA, 20 bp, synthetic construct
  misc_feature 1..20: note = Description of Artificial Sequence: Synthetic oligonucleotide
  misc_feature 1..20: note = Target: FXN; (+) strand; PAM type: YTN; PAM sequence: TTG
  source 1..20: mol_type = other DNA
gctttaggcctaacaagcag

SEQ ID NO: 31237 - DNA, 20 bp, synthetic construct
  misc_feature 1..20: note = Description of Artificial Sequence: Synthetic oligonucleotide
  misc_feature 1..20: note = Target: FXN; (+) strand; PAM type: YTN; PAM sequence: CTT
  source 1..20: mol_type = other DNA
taggcctaacaagcaggtta

SEQ ID NO: 31238 - DNA, 20 bp, synthetic construct
  misc_feature 1..20: note = Description of Artificial Sequence: Synthetic oligonucleotide
  misc_feature 1..20: note = Target: FXN; (+) strand; PAM type: YTN; PAM sequence: TTT
  source 1..20: mol_type = other DNA
aggcctaacaagcaggttat

SEQ ID NO: 31239 - DNA, 20 bp, synthetic construct
  misc_feature 1..20: note = Description of Artificial Sequence: Synthetic oligonucleotide
  misc_feature 1..20: note = Target: FXN; (+) strand; PAM type: YTN; PAM sequence: TTA
  source 1..20: mol_type = other DNA
ggcctaacaagcaggttata

SEQ ID NO: 31240 - DNA, 20 bp, synthetic construct
  misc_feature 1..20: note = Description of Artificial Sequence: Synthetic oligonucleotide
  misc_feature 1..20: note = Target: FXN; (+) strand; PAM type: YTN; PAM sequence: CTA
  source 1..20: mol_type = other DNA
acaagcaggttataccctca

SEQ ID NO: 31241 - DNA, 20 bp, synthetic construct
  misc_feature 1..20: note = Description of Artificial Sequence: Synthetic oligonucleotide
  misc_feature 1..20: note = Target: FXN; (+) strand; PAM type: YTN; PAM sequence: TTA
  source 1..20: mol_type = other DNA
taccctcactcactttcaaa

SEQ ID NO: 31242 - DNA, 20 bp, synthetic construct
  misc_feature 1..20: note = Description of Artificial Sequence: Synthetic oligonucleotide
  misc_feature 1..20: note = Target: FXN; (+) strand; PAM type: YTN; PAM sequence: CTC
  source 1..20: mol_type = other DNA
actcactttcaaatcatttt

SEQ ID NO: 31243 - DNA, 20 bp, synthetic construct
  misc_feature 1..20: note = Description of Artificial Sequence: Synthetic oligonucleotide
  misc_feature 1..20: note = Target: FXN; (+) strand; PAM type: YTN; PAM sequence: CTC
  source 1..20: mol_type = other DNA
actttcaaatcatttttatt

SEQ ID NO: 31244 - DNA, 20 bp, synthetic construct
  misc_feature 1..20: note = Description of Artificial Sequence: Synthetic oligonucleotide
  misc_feature 1..20: note = Target: FXN; (+) strand; PAM type: YTN; PAM sequence: CTT
  source 1..20: mol_type = other DNA
tcaaatcatttttattgtct

SEQ ID NO: 31245 - DNA, 20 bp, synthetic construct
  misc_feature 1..20: note = Description of Artificial Sequence: Synthetic oligonucleotide
  misc_feature 1..20: note = Target: FXN; (+) strand; PAM type: YTN; PAM sequence: TTT
  source 1..20: mol_type = other DNA
caaatcatttttattgtctt

SEQ ID NO: 31246 - DNA, 20 bp, synthetic construct
  misc_feature 1..20: note = Description of Artificial Sequence: Synthetic oligonucleotide
  misc_feature 1..20: note = Target: FXN; (+) strand; PAM type: YTN; PAM sequence: TTC
  source 1..20: mol_type = other DNA
aaatcatttttattgtcttg

SEQ ID NO: 31247 - DNA, 20 bp, synthetic construct
  misc_feature 1..20: note = Description of Artificial Sequence: Synthetic oligonucleotide
  misc_feature 1..20: note = Target: FXN; (+) strand; PAM type: YTN; PAM sequence: TTT
  source 1..20: mol_type = other DNA
ttattgtcttgcagacaatt

SEQ ID NO: 31248 - DNA, 20 bp, synthetic construct
  misc_feature 1..20: note = Description of Artificial Sequence: Synthetic oligonucleotide
  misc_feature 1..20: note = Target: FXN; (+) strand; PAM type: YTN; PAM sequence: TTT
  source 1..20: mol_type = other DNA
tattgtcttgcagacaattt

SEQ ID NO: 31249 - DNA, 20 bp, synthetic construct
  misc_feature 1..20: note = Description of Artificial Sequence: Synthetic oligonucleotide
  misc_feature 1..20: note = Target: FXN; (+) strand; PAM type: YTN; PAM sequence: TTT
  source 1..20: mol_type = other DNA
attgtcttgcagacaattta

SEQ ID NO: 31250 - DNA, 20 bp, synthetic construct
  misc_feature 1..20: note = Description of Artificial Sequence: Synthetic oligonucleotide
  misc_feature 1..20: note = Target: FXN; (+) strand; PAM type: YTN; PAM sequence: TTA
  source 1..20: mol_type = other DNA
ttgtcttgcagacaatttac

SEQ ID NO: 31251 - DNA, 20 bp, synthetic construct
  misc_feature 1..20: note = Description of Artificial Sequence: Synthetic oligonucleotide
  misc_feature 1..20: note = Target: FXN; (+) strand; PAM type: YTN; PAM sequence: TTG
  source 1..20: mol_type = other DNA
tcttgcagacaatttacaca

SEQ ID NO: 31252 - DNA, 20 bp, synthetic construct
  misc_feature 1..20: note = Description of Artificial Sequence: Synthetic oligonucleotide
  misc_feature 1..20: note = Target: FXN; (+) strand; PAM type: YTN; PAM sequence: CTT
  source 1..20: mol_type = other DNA
gcagacaatttacacaagtt

SEQ ID NO: 31253 - DNA, 20 bp, synthetic construct
  misc_feature 1..20: note = Description of Artificial Sequence: Synthetic oligonucleotide
  misc_feature 1..20: note = Target: FXN; (+) strand; PAM type: YTN; PAM sequence: TTG
  source 1..20: mol_type = other DNA
cagacaatttacacaagttt

SEQ ID NO: 31254 - DNA, 20 bp, synthetic construct
  misc_feature 1..20: note = Description of Artificial Sequence: Synthetic oligonucleotide
  misc_feature 1..20: note = Target: FXN; (+) strand; PAM type: YTN; PAM sequence: TTT
  source 1..20: mol_type = other DNA
acacaagtttacacatagaa

SEQ ID NO: 31255 - DNA, 20 bp, synthetic construct
  misc_feature 1..20: note = Description of Artificial Sequence: Synthetic oligonucleotide
  misc_feature 1..20: note = Target: FXN; (+) strand; PAM type: YTN; PAM sequence: TTA
  source 1..20: mol_type = other DNA
cacaagtttacacatagaaa

SEQ ID NO: 31256 - DNA, 20 bp, synthetic construct
  misc_feature 1..20: note = Description of Artificial Sequence: Synthetic oligonucleotide
  misc_feature 1..20: note = Target: FXN; (+) strand; PAM type: YTN; PAM sequence: TTT
  source 1..20: mol_type = other DNA
acacatagaaaaggatatgt

SEQ ID NO: 31257 - DNA, 20 bp, synthetic construct
  misc_feature 1..20: note = Description of Artificial Sequence: Synthetic oligonucleotide
  misc_feature 1..20: note = Target: FXN; (+) strand; PAM type: YTN; PAM sequence: TTA
  source 1..20: mol_type = other DNA
cacatagaaaaggatatgta

SEQ ID NO: 31258 - DNA, 20 bp, synthetic construct
  misc_feature 1..20: note = Description of Artificial Sequence: Synthetic oligonucleotide
  misc_feature 1..20: note = Target: FXN; (+) strand; PAM type: YTN; PAM sequence: TTT
  source 1..20: mol_type = other DNA
atacgctgccgggcgcggtg

SEQ ID NO: 31259 - DNA, 20 bp, synthetic construct
  misc_feature 1..20: note = Description of Artificial Sequence: Synthetic oligonucleotide
  misc_feature 1..20: note = Target: FXN; (+) strand; PAM type: YTN; PAM sequence: TTA
  source 1..20: mol_type = other DNA
tacgctgccgggcgcggtgg

SEQ ID NO: 31260 - DNA, 20 bp, synthetic construct
  misc_feature 1..20: note = Description of Artificial Sequence: Synthetic oligonucleotide
  misc_feature 1..20: note = Target: FXN; (+) strand; PAM type: YTN; PAM sequence: CTG
  source 1..20: mol_type = other DNA
ccgggcgcggtggctcacgc

SEQ ID NO: 31261 - DNA, 20 bp, synthetic construct
  misc_feature 1..20: note = Description of Artificial Sequence: Synthetic oligonucleotide
  misc_feature 1..20: note = Target: FXN; (+) strand; PAM type: YTN; PAM sequence: CTC
  source 1..20: mol_type = other DNA
acgcctgtaatcccagcact

SEQ ID NO: 31262 - DNA, 20 bp, synthetic construct
  misc_feature 1..20: note = Description of Artificial Sequence: Synthetic oligonucleotide
  misc_feature 1..20: note = Target: FXN; (+) strand; PAM type: YTN; PAM sequence: CTG
  source 1..20: mol_type = other DNA
taatcccagcactttgggag

SEQ ID NO: 31263 - DNA, 20 bp, synthetic construct
  misc_feature 1..20: note = Description of Artificial Sequence: Synthetic oligonucleotide
  misc_feature 1..20: note = Target: FXN; (+) strand; PAM type: YTN; PAM sequence: CTT
  source 1..20: mol_type = other DNA
tgggaggccgaggcaggtgg

SEQ ID NO: 31264 - DNA, 20 bp, synthetic construct
  misc_feature 1..20: note = Description of Artificial Sequence: Synthetic oligonucleotide
  misc_feature 1..20: note = Target: FXN; (+) strand; PAM type: YTN; PAM sequence: TTT
  source 1..20: mol_type = other DNA
gggaggccgaggcaggtgga

SEQ ID NO: 31265 - DNA, 20 bp, synthetic construct
  misc_feature 1..20: note = Description of Artificial Sequence: Synthetic oligonucleotide
  misc_feature 1..20: note = Target: FXN; (+) strand; PAM type: YTN; PAM sequence: TTG
  source 1..20: mol_type = other DNA
ggaggccgaggcaggtggat

SEQ ID NO: 31266 - DNA, 20 bp, synthetic construct
  misc_feature 1..20: note = Description of Artificial Sequence: Synthetic oligonucleotide
  misc_feature 1..20: note = Target: FXN; (+) strand; PAM type: YTN; PAM sequence: TTC
  source 1..20: mol_type = other DNA
aggagatggagaccatcctg

SEQ ID NO: 31267 - DNA, 20 bp, synthetic construct
  misc_feature 1..20: note = Description of Artificial Sequence: Synthetic oligonucleotide
  misc_feature 1..20: note = Target: FXN; (+) strand; PAM type: YTN; PAM sequence: CTG
  source 1..20: mol_type = other DNA
gctaatacgatgaaacccca

SEQ ID NO: 31268 - DNA, 20 bp, synthetic construct
  misc_feature 1..20: note = Description of Artificial Sequence: Synthetic oligonucleotide
  misc_feature 1..20: note = Target: FXN; (+) strand; PAM type: YTN; PAM sequence: CTA
  source 1..20: mol_type = other DNA
atacgatgaaaccccatctc

SEQ ID NO: 31269 - DNA, 20 bp, synthetic construct
  misc_feature 1..20: note = Description of Artificial Sequence: Synthetic oligonucleotide
  misc_feature 1..20: note = Target: FXN; (+) strand; PAM type: YTN; PAM sequence: CTC
  source 1..20: mol_type = other DNA
tactaaaaatacaaaaaatt

SEQ ID NO: 31270 - DNA, 20 bp, synthetic construct
  misc_feature 1..20: note = Description of Artificial Sequence: Synthetic oligonucleotide
  misc_feature 1..20: note = Target: FXN; (+) strand; PAM type: YTN; PAM sequence: CTA
  source 1..20: mol_type = other DNA
ctaaaaatacaaaaaattag

SEQ ID NO: 31271 - DNA, 20 bp, synthetic construct
  misc_feature 1..20: note = Description of Artificial Sequence: Synthetic oligonucleotide
  misc_feature 1..20: note = Target: FXN; (+) strand; PAM type: YTN; PAM sequence: CTA
  source 1..20: mol_type = other DNA
aaaatacaaaaaattagccg

SEQ ID NO: 31272 - DNA, 20 bp, synthetic construct
  misc_feature 1..20: note = Description of Artificial Sequence: Synthetic oligonucleotide
  misc_feature 1..20: note = Target: FXN; (+) strand; PAM type: YTN; PAM sequence: TTA
  source 1..20: mol_type = other DNA
gccgggcgtggtgacgggtg

SEQ ID NO: 31273 - DNA, 20 bp, synthetic construct
  misc_feature 1..20: note = Description of Artificial Sequence: Synthetic oligonucleotide
  misc_feature 1..20: note = Target: FXN; (+) strand; PAM type: YTN; PAM sequence: CTG
  source 1..20: mol_type = other DNA
tagtccccactactcgggac

SEQ ID NO: 31274 - DNA, 20 bp, synthetic construct
  misc_feature 1..20: note = Description of Artificial Sequence: Synthetic oligonucleotide
  misc_feature 1..20: note = Target: FXN; (+) strand; PAM type: YTN; PAM sequence: CTA
  source 1..20: mol_type = other DNA
ctcgggacgctgaggcagga

SEQ ID NO: 31275 - DNA, 20 bp, synthetic construct
  misc_feature 1..20: note = Description of Artificial Sequence: Synthetic oligonucleotide
  misc_feature 1..20: note = Target: FXN; (+) strand; PAM type: YTN; PAM sequence: CTC
  source 1..20: mol_type = other DNA
gggacgctgaggcaggagaa

SEQ ID NO: 31276 - DNA, 20 bp, synthetic construct
  misc_feature 1..20: note = Description of Artificial Sequence: Synthetic oligonucleotide
  misc_feature 1..20: note = Target: FXN; (+) strand; PAM type: YTN; PAM sequence: CTG
  source 1..20: mol_type = other DNA
aggcaggagaatggcgtgaa

SEQ ID NO: 31277 - DNA, 20 bp, synthetic construct
  misc_feature 1..20: note = Description of Artificial Sequence: Synthetic oligonucleotide
  misc_feature 1..20: note = Target: FXN; (+) strand; PAM type: YTN; PAM sequence: CTT
  source 1..20: mol_type = other DNA
gcagtgatccgagatcgtgc

SEQ ID NO: 31278 - DNA, 20 bp, synthetic construct
  misc_feature 1..20: note = Description of Artificial Sequence: Synthetic oligonucleotide
  misc_feature 1..20: note = Target: FXN; (+) strand; PAM type: YTN; PAM sequence: TTG
  source 1..20: mol_type = other DNA
cagtgatccgagatcgtgcc

SEQ ID NO: 31279 - DNA, 20 bp, synthetic construct
  misc_feature 1..20: note = Description of Artificial Sequence: Synthetic oligonucleotide
  misc_feature 1..20: note = Target: FXN; (+) strand; PAM type: YTN; PAM sequence: CTG
  source 1..20: mol_type = other DNA
cactccagcctgggtgacag

SEQ ID NO: 31280 - DNA, 20 bp, synthetic construct
  misc_feature 1..20: note = Description of Artificial Sequence: Synthetic oligonucleotide
  misc_feature 1..20: note = Target: FXN; (+) strand; PAM type: YTN; PAM sequence: CTC
  source 1..20: mol_type = other DNA
cagcctgggtgacagagcga

SEQ ID NO: 31281 - DNA, 20 bp, synthetic construct
  misc_feature 1..20: note = Description of Artificial Sequence: Synthetic oligonucleotide
  misc_feature 1..20: note = Target: FXN; (+) strand; PAM type: YTN; PAM sequence: CTG
  source 1..20: mol_type = other DNA
ggtgacagagcgagactgca

SEQ ID NO: 31282 - DNA, 20 bp, synthetic construct
  misc_feature 1..20: note = Description of Artificial Sequence: Synthetic oligonucleotide
  misc_feature 1..20: note = Target: FXN; (+) strand; PAM type: YTN; PAM sequence: CTG
  source 1..20: mol_type = other DNA
catctcaaagaaaaaaataa

SEQ ID NO: 31283 - DNA, 20 bp, synthetic construct
  misc_feature 1..20: note = Description of Artificial Sequence: Synthetic oligonucleotide
  misc_feature 1..20: note = Target: FXN; (+) strand; PAM type: YTN; PAM sequence: CTC
  source 1..20: mol_type = other DNA
aaagaaaaaaataaataaat

SEQ ID NO: 31284 - DNA, 20 bp, synthetic construct
  misc_feature 1..20: note = Description of Artificial Sequence: Synthetic oligonucleotide
  misc_feature 1..20: note = Target: FXN; (+) strand; PAM type: YTN; PAM sequence: TTT
  source 1..20: mol_type = other DNA
atactgcttataaactaata

SEQ ID NO: 31285 - DNA, 20 bp, synthetic construct
  misc_feature 1..20: note = Description of Artificial Sequence: Synthetic oligonucleotide
  misc_feature 1..20: note = Target: FXN; (+) strand; PAM type: YTN; PAM sequence: TTA
  source 1..20: mol_type = other DNA
tactgcttataaactaataa

SEQ ID NO: 31286 - DNA, 20 bp, synthetic construct
  misc_feature 1..20: note = Description of Artificial Sequence: Synthetic oligonucleotide
  misc_feature 1..20: note = Target: FXN; (+) strand; PAM type: YTN; PAM sequence: CTG
  source 1..20: mol_type = other DNA
cttataaactaataataaat

SEQ ID NO: 31287 - DNA, 20 bp, synthetic construct
  misc_feature 1..20: note = Description of Artificial Sequence: Synthetic oligonucleotide
  misc_feature 1..20: note = Target: FXN; (+) strand; PAM type: YTN; PAM sequence: CTT
  source 1..20: mol_type = other DNA
ataaactaataataaatgct

SEQ ID NO: 31288 - DNA, 20 bp, synthetic construct
  misc_feature 1..20: note = Description of Artificial Sequence: Synthetic oligonucleotide
  misc_feature 1..20: note = Target: FXN; (+) strand; PAM type: YTN; PAM sequence: TTA
  source 1..20: mol_type = other DNA
taaactaataataaatgcta

SEQ ID NO: 31289 - DNA, 20 bp, synthetic construct
  misc_feature 1..20: note = Description of Artificial Sequence: Synthetic oligonucleotide
  misc_feature 1..20: note = Target: FXN; (+) strand; PAM type: YTN; PAM sequence: CTA
  source 1..20: mol_type = other DNA
ataataaatgctatggtctg

SEQ ID NO: 31290 - DNA, 20 bp, synthetic construct
  misc_feature 1..20: note = Description of Artificial Sequence: Synthetic oligonucleotide
  misc_feature 1..20: note = Target: FXN; (+) strand; PAM type: YTN; PAM sequence: CTA
  source 1..20: mol_type = other DNA
tggtctgcatgtttgtgtca

SEQ ID NO: 31291 - DNA, 20 bp, synthetic construct
  misc_feature 1..20: note = Description of Artificial Sequence: Synthetic oligonucleotide
  misc_feature 1..20: note = Target: FXN; (+) strand; PAM type: YTN; PAM sequence: CTG
  source 1..20: mol_type = other DNA
catgtttgtgtcaccccacc

SEQ ID NO: 31292 - DNA, 20 bp, synthetic construct
  misc_feature 1..20: note = Description of Artificial Sequence: Synthetic oligonucleotide
  misc_feature 1..20: note = Target: FXN; (+) strand; PAM type: YTN; PAM sequence: TTT
  source 1..20: mol_type = other DNA
gtgtcaccccaccattcata

SEQ ID NO: 31293 - DNA, 20 bp, synthetic construct
  misc_feature 1..20: note = Description of Artificial Sequence: Synthetic oligonucleotide
  misc_feature 1..20: note = Target: FXN; (+) strand; PAM type: YTN; PAM sequence: TTG
  source 1..20: mol_type = other DNA
tgtcaccccaccattcatat

SEQ ID NO: 31294 - DNA, 20 bp, synthetic construct
  misc_feature 1..20: note = Description of Artificial Sequence: Synthetic oligonucleotide
  misc_feature 1..20: note = Target: FXN; (+) strand; PAM type: YTN; PAM sequence: TTC
  source 1..20: mol_type = other DNA
atatgttaaaacctaatcac

SEQ ID NO: 31295 - DNA, 20 bp, synthetic construct
  misc_feature 1..20: note = Description of Artificial Sequence: Synthetic oligonucleotide
  misc_feature 1..20: note = Target: FXN; (+) strand; PAM type: YTN; PAM sequence: TTA
  source 1..20: mol_type = other DNA
aaacctaatcaccaaagtga

SEQ ID NO: 31296 - DNA, 20 bp, synthetic construct
  misc_feature 1..20: note = Description of Artificial Sequence: Synthetic oligonucleotide
  misc_feature 1..20: note = Target: FXN; (+) strand; PAM type: YTN; PAM sequence: CTA
  source 1..20: mol_type = other DNA
atcaccaaagtgatattagg

SEQ ID NO: 31297 - DNA, 20 bp, synthetic construct
  misc_feature 1..20: note = Description of Artificial Sequence: Synthetic oligonucleotide
  misc_feature 1..20: note = Target: FXN; (+) strand; PAM type: YTN; PAM sequence: TTA
  source 1..20: mol_type = other DNA
ggaggtggggcccttgggag

SEQ ID NO: 31298 - DNA, 20 bp, synthetic construct
  misc_feature 1..20: note = Description of Artificial Sequence: Synthetic oligonucleotide
  misc_feature 1..20: note = Target: FXN; (+) strand; PAM type: YTN; PAM sequence: CTT
  source 1..20: mol_type = other DNA
gggaggtgatgaggtatgag

SEQ ID NO: 31299 - DNA, 20 bp, synthetic construct
  misc_feature 1..20: note = Description of Artificial Sequence: Synthetic oligonucleotide
  misc_feature 1..20: note = Target: FXN; (+) strand; PAM type: YTN; PAM sequence: TTG
  source 1..20: mol_type = other DNA
ggaggtgatgaggtatgagg

SEQ ID NO: 31300 - DNA, 20 bp, synthetic construct
  misc_feature 1..20: note = Description of Artificial Sequence: Synthetic oligonucleotide
  misc_feature 1..20: note = Target: FXN; (+) strand; PAM type: YTN; PAM sequence: TTG
  source 1..20: mol_type = other DNA
ggattagtgcccttctaaaa

SEQ ID NO: 31301 - DNA, 20 bp, synthetic construct
  misc_feature 1..20: note = Description of Artificial Sequence: Synthetic oligonucleotide
  misc_feature 1..20: note = Target: FXN; (+) strand; PAM type: YTN; PAM sequence: TTA
  source 1..20: mol_type = other DNA
gtgcccttctaaaatagccc

SEQ ID NO: 31302 - DNA, 20 bp, synthetic construct
  misc_feature 1..20: note = Description of Artificial Sequence: Synthetic oligonucleotide
  misc_feature 1..20: note = Target: FXN; (+) strand; PAM type: YTN; PAM sequence: CTT
  source 1..20: mol_type = other DNA
ctaaaatagcccaacggagc

SEQ ID NO: 31303 - DNA, 20 bp, synthetic construct
  misc_feature 1..20: note = Description of Artificial Sequence: Synthetic oligonucleotide
  misc_feature 1..20: note = Target: FXN; (+) strand; PAM type: YTN; PAM sequence: TTC
  source 1..20: mol_type = other DNA
taaaatagcccaacggagcc

SEQ ID NO: 31304 - DNA, 20 bp, synthetic construct
  misc_feature 1..20: note = Description of Artificial Sequence: Synthetic oligonucleotide
  misc_feature 1..20: note = Target: FXN; (+) strand; PAM type: YTN; PAM sequence: CTA
  source 1..20: mol_type = other DNA
aaatagcccaacggagccca

SEQ ID NO: 31305 - DNA, 20 bp, synthetic construct
  misc_feature 1..20: note = Description of Artificial Sequence: Synthetic oligonucleotide
  misc_feature 1..20: note = Target: FXN; (+) strand; PAM type: YTN; PAM sequence: CTA
  source 1..20: mol_type = other DNA
tgaaccaggaaactggccct

SEQ ID NO: 31306 - DNA, 20 bp, synthetic construct
  misc_feature 1..20: note = Description of Artificial Sequence: Synthetic oligonucleotide
  misc_feature 1..20: note = Target: FXN; (+) strand; PAM type: YTN; PAM sequence: CTG
  source 1..20: mol_type = other DNA
gccctcaccagacaccaaag

SEQ ID NO: 31307 - DNA, 20 bp, synthetic construct
  misc_feature 1..20: note = Description of Artificial Sequence: Synthetic oligonucleotide
  misc_feature 1..20: note = Target: FXN; (+) strand; PAM type: YTN; PAM sequence: CTC
  source 1..20: mol_type = other DNA
accagacaccaaagctgttg

SEQ ID NO: 31308 - DNA, 20 bp, synthetic construct
  misc_feature 1..20: note = Description of Artificial Sequence: Synthetic oligonucleotide
  misc_feature 1..20: note = Target: FXN; (+) strand; PAM type: YTN; PAM sequence: CTG
  source 1..20: mol_type = other DNA
ttggtgcattgatcttggat

SEQ ID NO: 31309 - DNA, 20 bp, synthetic construct
  misc_feature 1..20: note = Description of Artificial Sequence: Synthetic oligonucleotide
  misc_feature 1..20: note = Target: FXN; (+) strand; PAM type: YTN; PAM sequence: TTG
  source 1..20: mol_type = other DNA
gtgcattgatcttggatttc

SEQ ID NO: 31310 - DNA, 20 bp, synthetic construct
  misc_feature 1..20: note = Description of Artificial Sequence: Synthetic oligonucleotide
  misc_feature 1..20: note = Target: FXN; (+) strand; PAM type: YTN; PAM sequence: TTG
  source 1..20: mol_type = other DNA
atcttggatttcccaccctc

SEQ ID NO: 31311 - DNA, 20 bp, synthetic construct
  misc_feature 1..20: note = Description of Artificial Sequence: Synthetic oligonucleotide
  misc_feature 1..20: note = Target: FXN; (+) strand; PAM type: YTN; PAM sequence: CTT
  source 1..20: mol_type = other DNA
ggatttcccaccctccagga

SEQ ID NO: 31312 - DNA, 20 bp, synthetic construct
  misc_feature 1..20: note = Description of Artificial Sequence: Synthetic oligonucleotide
  misc_feature 1..20: note = Target: FXN; (+) strand; PAM type: YTN; PAM sequence: TTG
  source 1..20: mol_type = other DNA
gatttcccaccctccaggac

SEQ ID NO: 31313 - DNA, 20 bp, synthetic construct
  misc_feature 1..20: note = Description of Artificial Sequence: Synthetic oligonucleotide
  misc_feature 1..20: note = Target: FXN; (+) strand; PAM type: YTN; PAM sequence: TTT
  source 1..20: mol_type = other DNA
cccaccctccaggactctaa

SEQ ID NO: 31314 - DNA, 20 bp, synthetic construct
  misc_feature 1..20: note = Description of Artificial Sequence: Synthetic oligonucleotide
  misc_feature 1..20: note = Target: FXN; (+) strand; PAM type: YTN; PAM sequence: TTC
  source 1..20: mol_type = other DNA
ccaccctccaggactctaag

SEQ ID NO: 31315 - DNA, 20 bp, synthetic construct
  misc_feature 1..20: note = Description of Artificial Sequence: Synthetic oligonucleotide
  misc_feature 1..20: note = Target: FXN; (+) strand; PAM type: YTN; PAM sequence: CTC
  source 1..20: mol_type = other DNA
caggactctaagaaacacat

SEQ ID NO: 31316 - DNA, 20 bp, synthetic construct
  misc_feature 1..20: note = Description of Artificial Sequence: Synthetic oligonucleotide
  misc_feature 1..20: note = Target: FXN; (+) strand; PAM type: YTN; PAM sequence: CTC
  source 1..20: mol_type = other DNA
taagaaacacatttctattg

SEQ ID NO: 31317 - DNA, 20 bp, synthetic construct
  misc_feature 1..20: note = Description of Artificial Sequence: Synthetic oligonucleotide
  misc_feature 1..20: note = Target: FXN; (+) strand; PAM type: YTN; PAM sequence: CTA
  source 1..20: mol_type = other DNA
agaaacacatttctattgtt

SEQ ID NO: 31318 - DNA, 20 bp, synthetic construct
  misc_feature 1..20: note = Description of Artificial Sequence: Synthetic oligonucleotide
  misc_feature 1..20: note = Target: FXN; (+) strand; PAM type: YTN; PAM sequence: TTT
  source 1..20: mol_type = other DNA
ctattgtttataagccaccc

SEQ ID NO: 31319 - DNA, 20 bp, synthetic construct
  misc_feature 1..20: note = Description of Artificial Sequence: Synthetic oligonucleotide
  misc_feature 1..20: note = Target: FXN; (+) strand; PAM type: YTN; PAM sequence: TTC
  source 1..20: mol_type = other DNA
tattgtttataagccaccca

SEQ ID NO: 31320 - DNA, 20 bp, synthetic construct
  misc_feature 1..20: note = Description of Artificial Sequence: Synthetic oligonucleotide
  misc_feature 1..20: note = Target: FXN; (+) strand; PAM type: YTN; PAM sequence: CTA
  source 1..20: mol_type = other DNA
ttgtttataagccacccagt

SEQ ID NO: 31321 - DNA, 20 bp, synthetic construct
  misc_feature 1..20: note = Description of Artificial Sequence: Synthetic oligonucleotide
  misc_feature 1..20: note = Target: FXN; (+) strand; PAM type: YTN; PAM sequence: TTG
  source 1..20: mol_type = other DNA
tttataagccacccagtggc

SEQ ID NO: 31322 - DNA, 20 bp, synthetic construct
  misc_feature 1..20: note = Description of Artificial Sequence: Synthetic oligonucleotide
  misc_feature 1..20: note = Target: FXN; (+) strand; PAM type: YTN; PAM sequence: TTT
  source 1..20: mol_type = other DNA
ataagccacccagtggctgg

SEQ ID NO: 31323 - DNA, 20 bp, synthetic construct
  misc_feature 1..20: note = Description of Artificial Sequence: Synthetic oligonucleotide
  misc_feature 1..20: note = Target: FXN; (+) strand; PAM type: YTN; PAM sequence: TTA
  source 1..20: mol_type = other DNA
taagccacccagtggctggt

SEQ ID NO: 31324 - DNA, 20 bp, synthetic construct
  misc_feature 1..20: note = Description of Artificial Sequence: Synthetic oligonucleotide
  misc_feature 1..20: note = Target: FXN; (+) strand; PAM type: YTN; PAM sequence: CTG
  source 1..20: mol_type = other DNA
gtattttgttataacatccc

SEQ ID NO: 31325 - DNA, 20 bp, synthetic construct
  misc_feature 1..20: note = Description of Artificial Sequence: Synthetic oligonucleotide
  misc_feature 1..20: note = Target: FXN; (+) strand; PAM type: YTN; PAM sequence: TTT
  source 1..20: mol_type = other DNA
tgttataacatcccagacta

SEQ ID NO: 31326 - DNA, 20 bp, synthetic construct
  misc_feature 1..20: note = Description of Artificial Sequence: Synthetic oligonucleotide
  misc_feature 1..20: note = Target: FXN; (+) strand; PAM type: YTN; PAM sequence: TTT
  source 1..20: mol_type = other DNA
gttataacatcccagactaa

SEQ ID NO: 31327 - DNA, 20 bp, synthetic construct
  misc_feature 1..20: note = Description of Artificial Sequence: Synthetic oligonucleotide
  misc_feature 1..20: note = Target: FXN; (+) strand; PAM type: YTN; PAM sequence: TTG
  source 1..20: mol_type = other DNA
ttataacatcccagactaag

SEQ ID NO: 31328 - DNA, 20 bp, synthetic construct
  misc_feature 1..20: note = Description of Artificial Sequence: Synthetic oligonucleotide
  misc_feature 1..20: note = Target: FXN; (+) strand; PAM type: YTN; PAM sequence: TTA
  source 1..20: mol_type = other DNA
taacatcccagactaagaca

SEQ ID NO: 31329 - DNA, 20 bp, synthetic construct
  misc_feature 1..20: note = Description of Artificial Sequence: Synthetic oligonucleotide
  misc_feature 1..20: note = Target: FXN; (+) strand; PAM type: YTN; PAM sequence: CTA
  source 1..20: mol_type = other DNA
agacaaataacaaatacttg

SEQ ID NO: 31330 - DNA, 20 bp, synthetic construct
  misc_feature 1..20: note = Description of Artificial Sequence: Synthetic oligonucleotide
  misc_feature 1..20: note = Target: FXN; (+) strand; PAM type: YTN; PAM sequence: CTT
  source 1..20: mol_type = other DNA
gtatccctgacaccaggtta

SEQ ID NO: 31331 - DNA, 20 bp, synthetic construct
  misc_feature 1..20: note = Description of Artificial Sequence: Synthetic oligonucleotide
  misc_feature 1..20: note = Target: FXN; (+) strand; PAM type: YTN; PAM sequence: TTG
  source 1..20: mol_type = other DNA
tatccctgacaccaggttaa

SEQ ID NO: 31332 - DNA, 20 bp, synthetic construct
  misc_feature 1..20: note = Description of Artificial Sequence: Synthetic oligonucleotide
  misc_feature 1..20: note = Target: FXN; (+) strand; PAM type: YTN; PAM sequence: CTG
  source 1..20: mol_type = other DNA
acaccaggttaagagataga

SEQ ID NO: 31333 - DNA, 20 bp, synthetic construct
  misc_feature 1..20: note = Description of Artificial Sequence: Synthetic oligonucleotide
  misc_feature 1..20: note = Target: FXN; (+) strand; PAM type: YTN; PAM sequence: TTA
  source 1..20: mol_type = other DNA
agagatagaatttgtttgtt

SEQ ID NO: 31334 - DNA, 20 bp, synthetic construct
  misc_feature 1..20: note = Description of Artificial Sequence: Synthetic oligonucleotide
  misc_feature 1..20: note = Target: FXN; (+) strand; PAM type: YTN; PAM sequence: TTT
  source 1..20: mol_type = other DNA
gtttgttcctctggaggccc

SEQ ID NO: 31335 - DNA, 20 bp, synthetic construct
  misc_feature 1..20: note = Description of Artificial Sequence: Synthetic oligonucleotide
  misc_feature 1..20: note = Target: FXN; (+) strand; PAM type: YTN; PAM sequence: TTG
  source 1..20: mol_type = other DNA
tttgttcctctggaggccct

SEQ ID NO: 31336 - DNA, 20 bp, synthetic construct
  misc_feature 1..20: note = Description of Artificial Sequence: Synthetic oligonucleotide
  misc_feature 1..20: note = Target: FXN; (+) strand; PAM type: YTN; PAM sequence: TTT
  source 1..20: mol_type = other DNA
gttcctctggaggcccttgt

SEQ ID NO: 31337 - DNA, 20 bp, synthetic construct
  misc_feature 1..20: note = Description of Artificial Sequence: Synthetic oligonucleotide
  misc_feature 1..20: note = Target: FXN; (+) strand; PAM type: YTN; PAM sequence: TTG
  source 1..20: mol_type = other DNA
ttcctctggaggcccttgtc

SEQ ID NO: 31338 - DNA, 20 bp, synthetic construct
  misc_feature 1..20: note = Description of Artificial Sequence: Synthetic oligonucleotide
  misc_feature 1..20: note = Target: FXN; (+) strand; PAM type: YTN; PAM sequence: TTC
  source 1..20: mol_type = other DNA
ctctggaggcccttgtcttc

SEQ ID NO: 31339 - DNA, 20 bp, synthetic construct
  misc_feature 1..20: note = Description of Artificial Sequence: Synthetic oligonucleotide
  misc_feature 1..20: note = Target: FXN; (+) strand; PAM type: YTN; PAM sequence: CTC
  source 1..20: mol_type = other DNA
tggaggcccttgtcttcacc

SEQ ID NO: 31340 - DNA, 20 bp, synthetic construct
  misc_feature 1..20: note = Description of Artificial Sequence: Synthetic oligonucleotide
  misc_feature 1..20: note = Target: FXN; (+) strand; PAM type: YTN; PAM sequence: CTG
  source 1..20: mol_type = other DNA
gaggcccttgtcttcacccc

SEQ ID NO: 31341 - DNA, 20 bp, synthetic construct
  misc_feature 1..20: note = Description of Artificial Sequence: Synthetic oligonucleotide
  misc_feature 1..20: note = Target: FXN; (+) strand; PAM type: YTN; PAM sequence: CTT
  source 1..20: mol_type = other DNA
gtcttcaccccatcactgcc

SEQ ID NO: 31342 - DNA, 20 bp, synthetic construct
  misc_feature 1..20: note = Description of Artificial Sequence: Synthetic oligonucleotide
  misc_feature 1..20: note = Target: FXN; (+) strand; PAM type: YTN; PAM sequence: TTG
  source 1..20: mol_type = other DNA
tcttcaccccatcactgccc

SEQ ID NO: 31343 - DNA, 20 bp, synthetic construct
  misc_feature 1..20: note = Description of Artificial Sequence: Synthetic oligonucleotide
  misc_feature 1..20: note = Target: FXN; (+) strand; PAM type: YTN; PAM sequence: CTT
  source 1..20: mol_type = other DNA
caccccatcactgccctgtc

SEQ ID NO: 31344 - DNA, 20 bp, synthetic construct
  misc_feature 1..20: note = Description of Artificial Sequence: Synthetic oligonucleotide
  misc_feature 1..20: note = Target: FXN; (+) strand; PAM type: YTN; PAM sequence: TTC
  source 1..20: mol_type = other DNA
accccatcactgccctgtcc

SEQ ID NO: 31345 - DNA, 20 bp, synthetic construct
  misc_feature 1..20: note = Description of Artificial Sequence: Synthetic oligonucleotide
  misc_feature 1..20: note = Target: FXN; (+) strand; PAM type: YTN; PAM sequence: CTG
  source 1..20: mol_type = other DNA
ccctgtcctccctggaggaa

SEQ ID NO: 31346 - DNA, 20 bp, synthetic construct
  misc_feature 1..20: note = Description of Artificial Sequence: Synthetic oligonucleotide
  misc_feature 1..20: note = Target: FXN; (+) strand; PAM type: YTN; PAM sequence: CTG
  source 1..20: mol_type = other DNA
tcctccctggaggaatctgc

SEQ ID NO: 31347 - DNA, 20 bp, synthetic construct
  misc_feature 1..20: note = Description of Artificial Sequence: Synthetic oligonucleotide
  misc_feature 1..20: note = Target: FXN; (+) strand; PAM type: YTN; PAM sequence: CTC
  source 1..20: mol_type = other DNA
cctggaggaatctgccagcc

SEQ ID NO: 31348 - DNA, 20 bp, synthetic construct
  misc_feature 1..20: note = Description of Artificial Sequence: Synthetic oligonucleotide
  misc_feature 1..20: note = Target: FXN; (+) strand; PAM type: YTN; PAM sequence: CTG
  source 1..20: mol_type = other DNA
gaggaatctgccagcccgaa

SEQ ID NO: 31349 - DNA, 20 bp, synthetic construct
  misc_feature 1..20: note = Description of Artificial Sequence: Synthetic oligonucleotide
  misc_feature 1..20: note = Target: FXN; (+) strand; PAM type: YTN; PAM sequence: CTG
  source 1..20: mol_type = other DNA
ccagcccgaattctgttcat

SEQ ID NO: 31350 - DNA, 20 bp, synthetic construct
  misc_feature 1..20: note = Description of Artificial Sequence: Synthetic oligonucleotide
  misc_feature 1..20: note = Target: FXN; (+) strand; PAM type: YTN; PAM sequence: TTC
  source 1..20: mol_type = other DNA
tgttcatcgtaccctccttt

SEQ ID NO: 31351 - DNA, 20 bp, synthetic construct
  misc_feature 1..20: note = Description of Artificial Sequence: Synthetic oligonucleotide
  misc_feature 1..20: note = Target: FXN; (+) strand; PAM type: YTN; PAM sequence: CTG
  source 1..20: mol_type = other DNA
ttcatcgtaccctccttttc

SEQ ID NO: 31352 - DNA, 20 bp, synthetic construct
  misc_feature 1..20: note = Description of Artificial Sequence: Synthetic oligonucleotide
  misc_feature 1..20: note = Target: FXN; (+) strand; PAM type: YTN; PAM sequence: TTC
  source 1..20: mol_type = other DNA
atcgtaccctccttttctta

SEQ ID NO: 31353 - DNA, 20 bp, synthetic construct
  misc_feature 1..20: note = Description of Artificial Sequence: Synthetic oligonucleotide
  misc_feature 1..20: note = Target: FXN; (+) strand; PAM type: YTN; PAM sequence: CTC
  source 1..20: mol_type = other DNA
cttttcttagagtttgacct

SEQ ID NO: 31354 - DNA, 20 bp, synthetic construct
  misc_feature 1..20: note = Description of Artificial Sequence: Synthetic oligonucleotide
  misc_feature 1..20: note = Target: FXN; (+) strand; PAM type: YTN; PAM sequence: CTT
  source 1..20: mol_type = other DNA
ttcttagagtttgacctcct

SEQ ID NO: 31355 - DNA, 20 bp, synthetic construct
  misc_feature 1..20: note = Description of Artificial Sequence: Synthetic oligonucleotide
  misc_feature 1..20: note = Target: FXN; (+) strand; PAM type: YTN; PAM sequence: TTT
  source 1..20: mol_type = other DNA
tcttagagtttgacctcctc

SEQ ID NO: 31356 - DNA, 20 bp, synthetic construct
  misc_feature 1..20: note = Description of Artificial Sequence: Synthetic oligonucleotide
  misc_feature 1..20: note = Target: FXN; (+) strand; PAM type: YTN; PAM sequence: TTT
  source 1..20: mol_type = other DNA
cttagagtttgacctcctct

SEQ ID NO: 31357 - DNA, 20 bp, synthetic construct
  misc_feature 1..20: note = Description of Artificial Sequence: Synthetic oligonucleotide
  misc_feature 1..20: note = Target: FXN; (+) strand; PAM type: YTN; PAM sequence: TTC
  source 1..20: mol_type = other DNA
ttagagtttgacctcctctg

SEQ ID NO: 31358 - DNA, 20 bp, synthetic construct
  misc_feature 1..20: note = Description of Artificial Sequence: Synthetic oligonucleotide
  misc_feature 1..20: note = Target: FXN; (+) strand; PAM type: YTN; PAM sequence: CTT
  source 1..20: mol_type = other DNA
agagtttgacctcctctgta

SEQ ID NO: 31359 - DNA, 20 bp, synthetic construct
  misc_feature 1..20: note = Description of Artificial Sequence: Synthetic oligonucleotide
  misc_feature 1..20: note = Target: FXN; (+) strand; PAM type: YTN; PAM sequence: TTA
  source 1..20: mol_type = other DNA
gagtttgacctcctctgtat

SEQ ID NO: 31360 - DNA, 20 bp, synthetic construct
  misc_feature 1..20: note = Description of Artificial Sequence: Synthetic oligonucleotide
  misc_feature 1..20: note = Target: FXN; (+) strand; PAM type: YTN; PAM sequence: TTT
  source 1..20: mol_type = other DNA
gacctcctctgtatctcccc

SEQ ID NO: 31361 - DNA, 20 bp, synthetic construct
  misc_feature 1..20: note = Description of Artificial Sequence: Synthetic oligonucleotide
  misc_feature 1..20: note = Target: FXN; (+) strand; PAM type: YTN; PAM sequence: TTG
  source 1..20: mol_type = other DNA
acctcctctgtatctccccc

SEQ ID NO: 31362 - DNA, 20 bp, synthetic construct
  misc_feature 1..20: note = Description of Artificial Sequence: Synthetic oligonucleotide
  misc_feature 1..20: note = Target: FXN; (+) strand; PAM type: YTN; PAM sequence: CTC
  source 1..20: mol_type = other DNA
ctctgtatctcccccaatcc

SEQ ID NO: 31363 - DNA, 20 bp, synthetic construct
  misc_feature 1..20: note = Description of Artificial Sequence: Synthetic oligonucleotide
  misc_feature 1..20: note = Target: FXN; (+) strand; PAM type: YTN; PAM sequence: CTC
  source 1..20: mol_type = other DNA
tgtatctcccccaatccatg

SEQ ID NO: 31364 - DNA, 20 bp, synthetic construct
  misc_feature 1..20: note = Description of Artificial Sequence: Synthetic oligonucleotide
  misc_feature 1..20: note = Target: FXN; (+) strand; PAM type: YTN; PAM sequence: CTG
  source 1..20: mol_type = other DNA
tatctcccccaatccatgta

SEQ ID NO: 31365 - DNA, 20 bp, synthetic construct
  misc_feature 1..20: note = Description of Artificial Sequence: Synthetic oligonucleotide
  misc_feature 1..20: note = Target: FXN; (+) strand; PAM type: YTN; PAM sequence: CTC
  source 1..20: mol_type = other DNA
ccccaatccatgtattgctt

SEQ ID NO: 31366 - DNA, 20 bp, synthetic construct
  misc_feature 1..20: note = Description of Artificial Sequence: Synthetic oligonucleotide
  misc_feature 1..20: note = Target: FXN; (+) strand; PAM type: YTN; PAM sequence: TTG
  source 1..20: mol_type = other DNA
cttatatacaaggtattctg

SEQ ID NO: 31367 - DNA, 20 bp, synthetic construct
  misc_feature 1..20: note = Description of Artificial Sequence: Synthetic oligonucleotide
  misc_feature 1..20: note = Target: FXN; (+) strand; PAM type: YTN; PAM sequence: CTT
  source 1..20: mol_type = other DNA
atatacaaggtattctgctg

SEQ ID NO: 31368 - DNA, 20 bp, synthetic construct
  misc_feature 1..20: note = Description of Artificial Sequence: Synthetic oligonucleotide
  misc_feature 1..20: note = Target: FXN; (+) strand; PAM type: YTN; PAM sequence: TTA
  source 1..20: mol_type = other DNA
tatacaaggtattctgctgt

SEQ ID NO: 31369 - DNA, 20 bp, synthetic construct
  misc_feature 1..20: note = Description of Artificial Sequence: Synthetic oligonucleotide
  misc_feature 1..20: note = Target: FXN; (+) strand; PAM type: YTN; PAM sequence: TTC
  source 1..20: mol_type = other DNA
tgctgtatctgttctgctat

SEQ ID NO: 31370 - DNA, 20 bp, synthetic construct
  misc_feature 1..20: note = Description of Artificial Sequence: Synthetic oligonucleotide
  misc_feature 1..20: note = Target: FXN; (+) strand; PAM type: YTN; PAM sequence: CTG
  source 1..20: mol_type = other DNA
ctgtatctgttctgctatgg

SEQ ID NO: 31371 - DNA, 20 bp, synthetic construct
  misc_feature 1..20: note = Description of Artificial Sequence: Synthetic oligonucleotide
  misc_feature 1..20: note = Target: FXN; (+) strand; PAM type: YTN; PAM sequence: CTG
  source 1..20: mol_type = other DNA
tatctgttctgctatggctt

SEQ ID NO: 31372 - DNA, 20 bp, synthetic construct
  misc_feature 1..20: note = Description of Artificial Sequence: Synthetic oligonucleotide
  misc_feature 1..20: note = Target: FXN; (+) strand; PAM type: YTN; PAM sequence: CTG
  source 1..20: mol_type = other DNA
ttctgctatggcttgcccct

SEQ ID NO: 31373 - DNA, 20 bp, synthetic construct
  misc_feature 1..20: note = Description of Artificial Sequence: Synthetic oligonucleotide
  misc_feature 1..20: note = Target: FXN; (+) strand; PAM type: YTN; PAM sequence: TTC
  source 1..20: mol_type = other DNA
tgctatggcttgcccctttt

SEQ ID NO: 31374 - DNA, 20 bp, synthetic construct
  misc_feature 1..20: note = Description of Artificial Sequence: Synthetic oligonucleotide
  misc_feature 1..20: note = Target: FXN; (+) strand; PAM type: YTN; PAM sequence: CTG
  source 1..20: mol_type = other DNA
ctatggcttgccccttttgt

SEQ ID NO: 31375 - DNA, 20 bp, synthetic construct
  misc_feature 1..20: note = Description of Artificial Sequence: Synthetic oligonucleotide
  misc_feature 1..20: note = Target: FXN; (+) strand; PAM type: YTN; PAM sequence: CTA
  source 1..20: mol_type = other DNA
tggcttgccccttttgttca

SEQ ID NO: 31376 - DNA, 20 bp, synthetic construct
  misc_feature 1..20: note = Description of Artificial Sequence: Synthetic oligonucleotide
  misc_feature 1..20: note = Target: FXN; (+) strand; PAM type: YTN; PAM sequence: CTT
  source 1..20: mol_type = other DNA
gccccttttgttcaacactg

SEQ ID NO: 31377 - DNA, 20 bp, synthetic construct
  misc_feature 1..20: note = Description of Artificial Sequence: Synthetic oligonucleotide
  misc_feature 1..20: note = Target: FXN; (+) strand; PAM type: YTN; PAM sequence: TTG
  source 1..20: mol_type = other DNA
ccccttttgttcaacactgt

SEQ ID NO: 31378 - DNA, 20 bp, synthetic construct
  misc_feature 1..20: note = Description of Artificial Sequence: Synthetic oligonucleotide
  misc_feature 1..20: note = Target: FXN; (+) strand; PAM type: YTN; PAM sequence: CTT
  source 1..20: mol_type = other DNA
ttgttcaacactgtttttgt

SEQ ID NO: 31379 - DNA, 20 bp, synthetic construct
  misc_feature 1..20: note = Description of Artificial Sequence: Synthetic oligonucleotide
  misc_feature 1..20: note = Target: FXN; (+) strand; PAM type: YTN; PAM sequence: TTT
  source 1..20: mol_type = other DNA
tgttcaacactgtttttgtg

SEQ ID NO: 31380 - DNA, 20 bp, synthetic construct
  misc_feature 1..20: note = Description of Artificial Sequence: Synthetic oligonucleotide
  misc_feature 1..20: note = Target: FXN; (+) strand; PAM type: YTN; PAM sequence: TTT
  source 1..20: mol_type = other DNA
gttcaacactgtttttgtgc

SEQ ID NO: 31381 - DNA, 20 bp, synthetic construct
  misc_feature 1..20: note = Description of Artificial Sequence: Synthetic oligonucleotide
  misc_feature 1..20: note = Target: FXN; (+) strand; PAM type: YTN; PAM sequence: TTG
  source 1..20: mol_type = other DNA
ttcaacactgtttttgtgcg

SEQ ID NO: 31382 - DNA, 20 bp, synthetic construct
  misc_feature 1..20: note = Description of Artificial Sequence: Synthetic oligonucleotide
  misc_feature 1..20: note = Target: FXN; (+) strand; PAM type: YTN; PAM sequence: TTC
  source 1..20: mol_type = other DNA
aacactgtttttgtgcgtca

SEQ ID NO: 31383 - DNA, 20 bp, synthetic construct
  misc_feature 1..20: note = Description of Artificial Sequence: Synthetic oligonucleotide
  misc_feature 1..20: note = Target: FXN; (+) strand; PAM type: YTN; PAM sequence: CTG
  source 1..20: mol_type = other DNA
tttttgtgcgtcatctgcat

SEQ ID NO: 31384 - DNA, 20 bp, synthetic construct
  misc_feature 1..20: note = Description of Artificial Sequence: Synthetic oligonucleotide
  misc_feature 1..20: note = Target: FXN; (+) strand; PAM type: YTN; PAM sequence: TTT
  source 1..20: mol_type = other DNA
ttgtgcgtcatctgcattga

SEQ ID NO: 31385 - DNA, 20 bp, synthetic construct
  misc_feature 1..20: note = Description of Artificial Sequence: Synthetic oligonucleotide
  misc_feature 1..20: note = Target: FXN; (+) strand; PAM type: YTN; PAM sequence: TTT
  source 1..20: mol_type = other DNA
tgtgcgtcatctgcattgat

SEQ ID NO: 31386 - DNA, 20 bp, synthetic construct
  misc_feature 1..20: note = Description of Artificial Sequence: Synthetic oligonucleotide
  misc_feature 1..20: note = Target: FXN; (+) strand; PAM type: YTN; PAM sequence: TTT
  source 1..20: mol_type = other DNA
gtgcgtcatctgcattgatg

SEQ ID NO: 31387 - DNA, 20 bp, synthetic construct
  misc_feature 1..20: note = Description of Artificial Sequence: Synthetic oligonucleotide
  misc_feature 1..20: note = Target: FXN; (+) strand; PAM type: YTN; PAM sequence: TTG
  source 1..20: mol_type = other DNA
tgcgtcatctgcattgatgc

SEQ ID NO: 31388 - DNA, 20 bp, synthetic construct
  misc_feature 1..20: note = Description of Artificial Sequence: Synthetic oligonucleotide
  misc_feature 1..20: note = Target: FXN; (+) strand; PAM type: YTN; PAM sequence: CTG
  source 1..20: mol_type = other DNA
cattgatgcatgcagttgtc

SEQ ID NO: 31389 - DNA, 20 bp, synthetic construct
  misc_feature 1..20: note = Description of Artificial Sequence: Synthetic oligonucleotide
  misc_feature 1..20: note = Target: FXN; (+) strand; PAM type: YTN; PAM sequence: TTG
  source 1..20: mol_type = other DNA
atgcatgcagttgtccttta

SEQ ID NO: 31390 - DNA, 20 bp, synthetic construct
  misc_feature 1..20: note = Description of Artificial Sequence: Synthetic oligonucleotide
  misc_feature 1..20: note = Target: FXN; (+) strand; PAM type: YTN; PAM sequence: TTG
  source 1..20: mol_type = other DNA
tcctttatttgttctcactg

SEQ ID NO: 31391 - DNA, 20 bp, synthetic construct
  misc_feature 1..20: note = Description of Artificial Sequence: Synthetic oligonucleotide
  misc_feature 1..20: note = Target: FXN; (+) strand; PAM type: YTN; PAM sequence: CTT
  source 1..20: mol_type = other DNA
tatttgttctcactgctgga

SEQ ID NO: 31392 - DNA, 20 bp, synthetic construct
  misc_feature 1..20: note = Description of Artificial Sequence: Synthetic oligonucleotide
  misc_feature 1..20: note = Target: FXN; (+) strand; PAM type: YTN; PAM sequence: TTT
  source 1..20: mol_type = other DNA
atttgttctcactgctggat

SEQ ID NO: 31393 - DNA, 20 bp, synthetic construct
  misc_feature 1..20: note = Description of Artificial Sequence: Synthetic oligonucleotide
  misc_feature 1..20: note = Target: FXN; (+) strand; PAM type: YTN; PAM sequence: TTA
  source 1..20: mol_type = other DNA
tttgttctcactgctggata

SEQ ID NO: 31394 - DNA, 20 bp, synthetic construct
  misc_feature 1..20: note = Description of Artificial Sequence: Synthetic oligonucleotide
  misc_feature 1..20: note = Target: FXN; (+) strand; PAM type: YTN; PAM sequence: TTT
  source 1..20: mol_type = other DNA
gttctcactgctggatagta

SEQ ID NO: 31395 - DNA, 20 bp, synthetic construct
  misc_feature 1..20: note = Description of Artificial Sequence: Synthetic oligonucleotide
  misc_feature 1..20: note = Target: FXN; (+) strand; PAM type: YTN; PAM sequence: TTG
  source 1..20: mol_type = other DNA
ttctcactgctggatagtat

SEQ ID NO: 31396 - DNA, 20 bp, synthetic construct
  misc_feature 1..20: note = Description of Artificial Sequence: Synthetic oligonucleotide
  misc_feature 1..20: note = Target: FXN; (+) strand; PAM type: YTN; PAM sequence: TTC
  source 1..20: mol_type = other DNA
tcactgctggatagtatctg

SEQ ID NO: 31397 - DNA, 20 bp, synthetic construct
  misc_feature 1..20: note = Description of Artificial Sequence: Synthetic oligonucleotide
  misc_feature 1..20: note = Target: FXN; (+) strand; PAM type: YTN; PAM sequence: CTC
  source 1..20: mol_type = other DNA
actgctggatagtatctggt

SEQ ID NO: 31398 - DNA, 20 bp, synthetic construct
  misc_feature 1..20: note = Description of Artificial Sequence: Synthetic oligonucleotide
  misc_feature 1..20: note = Target: FXN; (+) strand; PAM type: YTN; PAM sequence: CTG
  source 1..20: mol_type = other DNA
ctggatagtatctggttggg

SEQ ID NO: 31399 - DNA, 20 bp, synthetic construct
  misc_feature 1..20: note = Description of Artificial Sequence: Synthetic oligonucleotide
  misc_feature 1..20: note = Target: FXN; (+) strand; PAM type: YTN; PAM sequence: CTG
  source 1..20: mol_type = other DNA
gatagtatctggttgggtaa

SEQ ID NO: 31400 - DNA, 20 bp, synthetic construct
  misc_feature 1..20: note = Description of Artificial Sequence: Synthetic oligonucleotide
  misc_feature 1..20: note = Target: FXN; (+) strand; PAM type: YTN; PAM sequence: CTG
  source 1..20: mol_type = other DNA
gttgggtaaatatatcacac

SEQ ID NO: 31401 - DNA, 20 bp, synthetic construct
  misc_feature 1..20: note = Description of Artificial Sequence: Synthetic oligonucleotide
  misc_feature 1..20: note = Target: FXN; (+) strand; PAM type: YTN; PAM sequence: TTG
  source 1..20: mol_type = other DNA
ggtaaatatatcacactgta

SEQ ID NO: 31402 - DNA, 20 bp, synthetic construct
  misc_feature 1..20: note = Description of Artificial Sequence: Synthetic oligonucleotide
  misc_feature 1..20: note = Target: FXN; (+) strand; PAM type: YTN; PAM sequence: CTG
  source 1..20: mol_type = other DNA
taaatcacactatccaggtt

SEQ ID NO: 31403 - DNA, 20 bp, synthetic construct
  misc_feature 1..20: note = Description of Artificial Sequence: Synthetic oligonucleotide
  misc_feature 1..20: note = Target: FXN; (+) strand; PAM type: YTN; PAM sequence: CTA
  source 1..20: mol_type = other DNA
tccaggttcctttaggtgac

SEQ ID NO: 31404 - DNA, 20 bp, synthetic construct
  misc_feature 1..20: note = Description of Artificial Sequence: Synthetic oligonucleotide
  misc_feature 1..20: note = Target: FXN; (+) strand; PAM type: YTN; PAM sequence: TTC
  source 1..20: mol_type = other DNA
ctttaggtgacatttggttg

SEQ ID NO: 31405 - DNA, 20 bp, synthetic construct
  misc_feature 1..20: note = Description of Artificial Sequence: Synthetic oligonucleotide
  misc_feature 1..20: note = Target: FXN; (+) strand; PAM type: YTN; PAM sequence: CTT
  source 1..20: mol_type = other DNA
taggtgacatttggttgatt

SEQ ID NO: 31406 - DNA, 20 bp, synthetic construct
  misc_feature 1..20: note = Description of Artificial Sequence: Synthetic oligonucleotide
  misc_feature 1..20: note = Target: FXN; (+) strand; PAM type: YTN; PAM sequence: TTT
  source 1..20: mol_type = other DNA
aggtgacatttggttgattg

SEQ ID NO: 31407 - DNA, 20 bp, synthetic construct
  misc_feature 1..20: note = Description of Artificial Sequence: Synthetic oligonucleotide
  misc_feature 1..20: note = Target: FXN; (+) strand; PAM type: YTN; PAM sequence: TTA
  source 1..20: mol_type = other DNA
ggtgacatttggttgattgc

SEQ ID NO: 31408 - DNA, 20 bp, synthetic construct
  misc_feature 1..20: note = Description of Artificial Sequence: Synthetic oligonucleotide
  misc_feature 1..20: note = Target: FXN; (+) strand; PAM type: YTN; PAM sequence: TTT
  source 1..20: mol_type = other DNA
ggttgattgcagtgttctgt

SEQ ID NO: 31409 - DNA, 20 bp, synthetic construct
  misc_feature 1..20: note = Description of Artificial Sequence: Synthetic oligonucleotide
  misc_feature 1..20: note = Target: FXN; (+) strand; PAM type: YTN; PAM sequence: TTG
  source 1..20: mol_type = other DNA
gttgattgcagtgttctgtt

SEQ ID NO: 31410 - DNA, 20 bp, synthetic construct
  misc_feature 1..20: note = Description of Artificial Sequence: Synthetic oligonucleotide
  misc_feature 1..20: note = Target: FXN; (+) strand; PAM type: YTN; PAM sequence: TTG
  source 1..20: mol_type = other DNA
attgcagtgttctgttgtta

SEQ ID NO: 31411 - DNA, 20 bp, synthetic construct
  misc_feature 1..20: note = Description of Artificial Sequence: Synthetic oligonucleotide
  misc_feature 1..20: note = Target: FXN; (+) strand; PAM type: YTN; PAM sequence: TTG
  source 1..20: mol_type = other DNA
cagtgttctgttgttacgat

SEQ ID NO: 31412 - DNA, 20 bp, synthetic construct
  misc_feature 1..20: note = Description of Artificial Sequence: Synthetic oligonucleotide
  misc_feature 1..20: note = Target: FXN; (+) strand; PAM type: YTN; PAM sequence: TTC
  source 1..20: mol_type = other DNA
tgttgttacgatggtgctgc

SEQ ID NO: 31413 - DNA, 20 bp, synthetic construct
  misc_feature 1..20: note = Description of Artificial Sequence: Synthetic oligonucleotide
  misc_feature 1..20: note = Target: FXN; (+) strand; PAM type: YTN; PAM sequence: CTG
  source 1..20: mol_type = other DNA
ttgttacgatggtgctgctg

SEQ ID NO: 31414 - DNA, 20 bp, synthetic construct
  misc_feature 1..20: note = Description of Artificial Sequence: Synthetic oligonucleotide
  misc_feature 1..20: note = Target: FXN; (+) strand; PAM type: YTN; PAM sequence: TTG
  source 1..20: mol_type = other DNA
ttacgatggtgctgctgtga

SEQ ID NO: 31415 - DNA, 20 bp, synthetic construct
  misc_feature 1..20: note = Description of Artificial Sequence: Synthetic oligonucleotide
  misc_feature 1..20: note = Target: FXN; (+) strand; PAM type: YTN; PAM sequence: TTA
  source 1..20: mol_type = other DNA
cgatggtgctgctgtgactg

SEQ ID NO: 31416 - DNA, 20 bp, synthetic construct
  misc_feature 1..20: note = Description of Artificial Sequence: Synthetic oligonucleotide
  misc_feature 1..20: note = Target: FXN; (+) strand; PAM type: YTN; PAM sequence: CTG
  source 1..20: mol_type = other DNA
ctgtgactgttcttgtgcat

SEQ ID NO: 31417 - DNA, 20 bp, synthetic construct
  misc_feature 1..20: note = Description of Artificial Sequence: Synthetic oligonucleotide
  misc_feature 1..20: note = Target: FXN; (+) strand; PAM type: YTN; PAM sequence: CTG
  source 1..20: mol_type = other DNA
tgactgttcttgtgcatgga

SEQ ID NO: 31418 - DNA, 20 bp, synthetic construct
  misc_feature 1..20: note = Description of Artificial Sequence: Synthetic oligonucleotide
  misc_feature 1..20: note = Target: FXN; (+) strand; PAM type: YTN; PAM sequence: CTG
  source 1..20: mol_type = other DNA
ttcttgtgcatggacagaag

SEQ ID NO: 31419 - DNA, 20 bp, synthetic construct
  misc_feature 1..20: note = Description of Artificial Sequence: Synthetic oligonucleotide
  misc_feature 1..20: note = Target: FXN; (+) strand; PAM type: YTN; PAM sequence: TTC
  source 1..20: mol_type = other DNA
ttgtgcatggacagaagttc

SEQ ID NO: 31420 - DNA, 20 bp, synthetic construct
  misc_feature 1..20: note = Description of Artificial Sequence: Synthetic oligonucleotide
  misc_feature 1..20: note = Target: FXN; (+) strand; PAM type: YTN; PAM sequence: CTT
  source 1..20: mol_type = other DNA
gtgcatggacagaagttcct

SEQ ID NO: 31421 - DNA, 20 bp, synthetic construct
  misc_feature 1..20: note = Description of Artificial Sequence: Synthetic oligonucleotide
  misc_feature 1..20: note = Target: FXN; (+) strand; PAM type: YTN; PAM sequence: TTG
  source 1..20: mol_type = other DNA
tgcatggacagaagttcctt

SEQ ID NO: 31422 - DNA, 20 bp, synthetic construct
  misc_feature 1..20: note = Description of Artificial Sequence: Synthetic oligonucleotide
  misc_feature 1..20: note = Target: FXN; (+) strand; PAM type: YTN; PAM sequence: TTC
  source 1..20: mol_type = other DNA
ctttcaggtgaatttctcag

SEQ ID NO: 31423 - DNA, 20 bp, synthetic construct
  misc_feature 1..20: note = Description of Artificial Sequence: Synthetic oligonucleotide
  misc_feature 1..20: note = Target: FXN; (+) strand; PAM type: YTN; PAM sequence: CTT
  source 1..20: mol_type = other DNA
tcaggtgaatttctcagaat

SEQ ID NO: 31424 - DNA, 20 bp, synthetic construct
  misc_feature 1..20: note = Description of Artificial Sequence: Synthetic oligonucleotide
  misc_feature 1..20: note = Target: FXN; (+) strand; PAM type: YTN; PAM sequence: TTT
  source 1..20: mol_type = other DNA
caggtgaatttctcagaatg

SEQ ID NO: 31425 - DNA, 20 bp, synthetic construct
  misc_feature 1..20: note = Description of Artificial Sequence: Synthetic oligonucleotide
  misc_feature 1..20: note = Target: FXN; (+) strand; PAM type: YTN; PAM sequence: TTC
  source 1..20: mol_type = other DNA
aggtgaatttctcagaatgg

SEQ ID NO: 31426 - DNA, 20 bp, synthetic construct
  misc_feature 1..20: note = Description of Artificial Sequence: Synthetic oligonucleotide
  misc_feature 1..20: note = Target: FXN; (+) strand; PAM type: YTN; PAM sequence: TTT
  source 1..20: mol_type = other DNA
ctcagaatggaattgctggg

SEQ ID NO: 31427 - DNA, 20 bp, synthetic construct
  misc_feature 1..20: note = Description of Artificial Sequence: Synthetic oligonucleotide
  misc_feature 1..20: note = Target: FXN; (+) strand; PAM type: YTN; PAM sequence: TTC
  source 1..20: mol_type = other DNA
tcagaatggaattgctgggc

SEQ ID NO: 31428 - DNA, 20 bp, synthetic construct
  misc_feature 1..20: note = Description of Artificial Sequence: Synthetic oligonucleotide
  misc_feature 1..20: note = Target: FXN; (+) strand; PAM type: YTN; PAM sequence: CTC
  source 1..20: mol_type = other DNA
agaatggaattgctgggcaa

SEQ ID NO: 31429 - DNA, 20 bp, synthetic construct
  misc_feature 1..20: note = Description of Artificial Sequence: Synthetic oligonucleotide
  misc_feature 1..20: note = Target: FXN; (+) strand; PAM type: YTN; PAM sequence: TTG
  source 1..20: mol_type = other DNA
ctgggcaaaggggcagccaa

SEQ ID NO: 31430 - DNA, 20 bp, synthetic construct
  misc_feature 1..20: note = Description of Artificial Sequence: Synthetic oligonucleotide
  misc_feature 1..20: note = Target: FXN; (+) strand; PAM type: YTN; PAM sequence: CTG
  source 1..20: mol_type = other DNA
ggcaaaggggcagccaataa

SEQ ID NO: 31431 - DNA, 20 bp, synthetic construct
  misc_feature 1..20: note = Description of Artificial Sequence: Synthetic oligonucleotide
  misc_feature 1..20: note = Target: FXN; (+) strand; PAM type: YTN; PAM sequence: CTC
  source 1..20: mol_type = other DNA
atttgatgccaaaagtggtg

SEQ ID NO: 31432 - DNA, 20 bp, synthetic construct
  misc_feature 1..20: note = Description of Artificial Sequence: Synthetic oligonucleotide
  misc_feature 1..20: note = Target: FXN; (+) strand; PAM type: YTN; PAM sequence: TTT
  source 1..20: mol_type = other DNA
gatgccaaaagtggtggtgc

SEQ ID NO: 31433 - DNA, 20 bp, synthetic construct
  misc_feature 1..20: note = Description of Artificial Sequence: Synthetic oligonucleotide
  misc_feature 1..20: note = Target: FXN; (+) strand; PAM type: YTN; PAM sequence: TTG
  source 1..20: mol_type = other DNA
atgccaaaagtggtggtgcc

SEQ ID NO: 31434 - DNA, 20 bp, synthetic construct
  misc_feature 1..20: note = Description of Artificial Sequence: Synthetic oligonucleotide
  misc_feature 1..20: note = Target: FXN; (+) strand; PAM type: YTN; PAM sequence: TTC
  source 1..20: mol_type = other DNA
atcctcccctgcgaggtatg

SEQ ID NO: 31435 - DNA, 20 bp, synthetic construct
  misc_feature 1..20: note = Description of Artificial Sequence: Synthetic oligonucleotide
  misc_feature 1..20: note = Target: FXN; (+) strand; PAM type: YTN; PAM sequence: CTC
  source 1..20: mol_type = other DNA
ccctgcgaggtatgggtcct

SEQ ID NO: 31436 - DNA, 20 bp, synthetic construct
  misc_feature 1..20: note = Description of Artificial Sequence: Synthetic oligonucleotide
  misc_feature 1..20: note = Target: FXN; (+) strand; PAM type: YTN; PAM sequence: CTG
  source 1..20: mol_type = other DNA
cgaggtatgggtcctgattc

SEQ ID NO: 31437 - DNA, 20 bp, synthetic construct
  misc_feature 1..20: note = Description of Artificial Sequence: Synthetic oligonucleotide
  misc_feature 1..20: note = Target: FXN; (+) strand; PAM type: YTN; PAM sequence: CTG
  source 1..20: mol_type = other DNA
attcactcttcaagtgctgt

SEQ ID NO: 31438 - DNA, 20 bp, synthetic construct
  misc_feature 1..20: note = Description of Artificial Sequence: Synthetic oligonucleotide
  misc_feature 1..20: note = Target: FXN; (+) strand; PAM type: YTN; PAM sequence: TTC
  source 1..20: mol_type = other DNA
actcttcaagtgctgtggtt

SEQ ID NO: 31439 - DNA, 20 bp, synthetic construct
  misc_feature 1..20: note = Description of Artificial Sequence: Synthetic oligonucleotide
  misc_feature 1..20: note = Target: FXN; (+) strand; PAM type: YTN; PAM sequence: CTC
  source 1..20: mol_type = other DNA
ttcaagtgctgtggtttgac

SEQ ID NO: 31440 - DNA, 20 bp, synthetic construct
  misc_feature 1..20: note = Description of Artificial Sequence: Synthetic oligonucleotide
  misc_feature 1..20: note = Target: FXN; (+) strand; PAM type: YTN; PAM sequence: CTT
  source 1..20: mol_type = other DNA
caagtgctgtggtttgacag

SEQ ID NO: 31441 - DNA, 20 bp, synthetic construct
  misc_feature 1..20: note = Description of Artificial Sequence: Synthetic oligonucleotide
  misc_feature 1..20: note = Target: FXN; (+) strand; PAM type: YTN; PAM sequence: TTC
  source 1..20: mol_type = other DNA
aagtgctgtggtttgacagg

SEQ ID NO: 31442 - DNA, 20 bp, synthetic construct
  misc_feature 1..20: note = Description of Artificial Sequence: Synthetic oligonucleotide
  misc_feature 1..20: note = Target: FXN; (+) strand; PAM type: YTN; PAM sequence: CTG
  source 1..20: mol_type = other DNA
tggtttgacagggccggggg

SEQ ID NO: 31443 - DNA, 20 bp, synthetic construct
  misc_feature 1..20: note = Description of Artificial Sequence: Synthetic oligonucleotide
  misc_feature 1..20: note = Target: FXN; (+) strand; PAM type: YTN; PAM sequence: TTT
  source 1..20: mol_type = other DNA
gacagggccgggggtgacaa

SEQ ID NO: 31444 - DNA, 20 bp, synthetic construct
  misc_feature 1..20: note = Description of Artificial Sequence: Synthetic oligonucleotide
  misc_feature 1..20: note = Target: FXN; (+) strand; PAM type: YTN; PAM sequence: TTG
  source 1..20: mol_type = other DNA
acagggccgggggtgacaag

SEQ ID NO: 31445 - DNA, 20 bp, synthetic construct
  misc_feature 1..20: note = Description of Artificial Sequence: Synthetic oligonucleotide
  misc_feature 1..20: note = Target: FXN; (+) strand; PAM type: YTN; PAM sequence: CTG
  source 1..20: mol_type = other DNA
ggaaggaaagctgggctccc

SEQ ID NO: 31446 - DNA, 20 bp, synthetic construct
  misc_feature 1..20: note = Description of Artificial Sequence: Synthetic oligonucleotide
  misc_feature 1..20: note = Target: FXN; (+) strand; PAM type: YTN; PAM sequence: CTG
  source 1..20: mol_type = other DNA
ggctccctgctggccatcca

SEQ ID NO: 31447 - DNA, 20 bp, synthetic construct
  misc_feature 1..20: note = Description of Artificial Sequence: Synthetic oligonucleotide
  misc_feature 1..20: note = Target: FXN; (+) strand; PAM type: YTN; PAM sequence: CTC
  source 1..20: mol_type = other DNA
cctgctggccatccaggcca

SEQ ID NO: 31448 - DNA, 20 bp, synthetic construct
  misc_feature 1..20: note = Description of Artificial Sequence: Synthetic oligonucleotide
  misc_feature 1..20: note = Target: FXN; (+) strand; PAM type: YTN; PAM sequence: CTG
  source 1..20: mol_type = other DNA
ctggccatccaggccagtcc

SEQ ID NO: 31449 - DNA, 20 bp, synthetic construct
  misc_feature 1..20: note = Description of Artificial Sequence: Synthetic oligonucleotide
  misc_feature 1..20: note = Target: FXN; (+) strand; PAM type: YTN; PAM sequence: CTG
  source 1..20: mol_type = other DNA
gccatccaggccagtcctta

SEQ ID NO: 31450 - DNA, 20 bp, synthetic construct
  misc_feature 1..20: note = Description of Artificial Sequence: Synthetic oligonucleotide
  misc_feature 1..20: note = Target: FXN; (+) strand; PAM type: YTN; PAM sequence: CTT
  source 1..20: mol_type = other DNA
accagggggtaggcaatgat

SEQ ID NO: 31451 - DNA, 20 bp, synthetic construct
  misc_feature 1..20: note = Description of Artificial Sequence: Synthetic oligonucleotide
  misc_feature 1..20: note = Target: FXN; (+) strand; PAM type: YTN; PAM sequence: TTA
  source 1..20: mol_type = other DNA
ccagggggtaggcaatgatt

SEQ ID NO: 31452 - DNA, 20 bp, synthetic construct
  misc_feature 1..20: note = Description of Artificial Sequence: Synthetic oligonucleotide
  misc_feature 1..20: note = Target: FXN; (+) strand; PAM type: YTN; PAM sequence: TTG
  source 1..20: mol_type = other DNA
ggtcaagtggttcctgacca

SEQ ID NO: 31453 - DNA, 20 bp, synthetic construct
  misc_feature 1..20: note = Description of Artificial Sequence: Synthetic oligonucleotide
  misc_feature 1..20: note = Target: FXN; (+) strand; PAM type: YTN; PAM sequence: TTC
  source 1..20: mol_type = other DNA
ctgaccactgggcctgagac

SEQ ID NO: 31454 - DNA, 20 bp, synthetic construct
  misc_feature 1..20: note = Description of Artificial Sequence: Synthetic oligonucleotide
  misc_feature 1..20: note = Target: FXN; (+) strand; PAM type: YTN; PAM sequence: CTG
  source 1..20: mol_type = other DNA
accactgggcctgagacttc

SEQ ID NO: 31455 - DNA, 20 bp, synthetic construct
  misc_feature 1..20: note = Description of Artificial Sequence: Synthetic oligonucleotide
  misc_feature 1..20: note = Target: FXN; (+) strand; PAM type: YTN; PAM sequence: CTG
  source 1..20: mol_type = other DNA
ggcctgagacttcaggccca

SEQ ID NO: 31456 - DNA, 20 bp, synthetic construct
  misc_feature 1..20: note = Description of Artificial Sequence: Synthetic oligonucleotide
  misc_feature 1..20: note = Target: FXN; (+) strand; PAM type: YTN; PAM sequence: CTG
  source 1..20: mol_type = other DNA
agacttcaggcccagaaact

SEQ ID NO: 31457 - DNA, 20 bp, synthetic construct
  misc_feature 1..20: note = Description of Artificial Sequence: Synthetic oligonucleotide
  misc_feature 1..20: note = Target: FXN; (+) strand; PAM type: YTN; PAM sequence: CTT
  source 1..20: mol_type = other DNA
caggcccagaaactatctaa

SEQ ID NO: 31458 - DNA, 20 bp, synthetic construct
  misc_feature 1..20: note = Description of Artificial Sequence: Synthetic oligonucleotide
  misc_feature 1..20: note = Target: FXN; (+) strand; PAM type: YTN; PAM sequence: TTC
  source 1..20: mol_type = other DNA
aggcccagaaactatctaat

SEQ ID NO: 31459 - DNA, 20 bp, synthetic construct
  misc_feature 1..20: note = Description of Artificial Sequence: Synthetic oligonucleotide
  misc_feature 1..20: note = Target: FXN; (+) strand; PAM type: YTN; PAM sequence: CTA
  source 1..20: mol_type = other DNA
tctaatatttcctcaaatgc

SEQ ID NO: 31460 - DNA, 20 bp, synthetic construct
  misc_feature 1..20: note = Description of Artificial Sequence: Synthetic oligonucleotide
  misc_feature 1..20: note = Target: FXN; (+) strand; PAM type: YTN; PAM sequence: CTA
  source 1..20: mol_type = other DNA
atatttcctcaaatgcatcc

SEQ ID NO: 31461 - DNA, 20 bp, synthetic construct
  misc_feature 1..20: note = Description of Artificial Sequence: Synthetic oligonucleotide
  misc_feature 1..20: note = Target: FXN; (+) strand; PAM type: YTN; PAM sequence: TTT
  source 1..20: mol_type = other DNA
cctcaaatgcatcccatgag

SEQ ID NO: 31462 - DNA, 20 bp, synthetic construct
  misc_feature 1..20: note = Description of Artificial Sequence: Synthetic oligonucleotide
  misc_feature 1..20: note = Target: FXN; (+) strand; PAM type: YTN; PAM sequence: TTC
  source 1..20: mol_type = other DNA
ctcaaatgcatcccatgagc

SEQ ID NO: 31463 - DNA, 20 bp, synthetic construct
  misc_feature 1..20: note = Description of Artificial Sequence: Synthetic oligonucleotide
  misc_feature 1..20: note = Target: FXN; (+) strand; PAM type: YTN; PAM sequence: CTC
  source 1..20: mol_type = other DNA
aaatgcatcccatgagcagg

SEQ ID NO: 31464 - DNA, 20 bp, synthetic construct
  misc_feature 1..20: note = Description of Artificial Sequence: Synthetic oligonucleotide
  misc_feature 1..20: note = Target: FXN; (+) strand; PAM type: YTN; PAM sequence: CTG
  source 1..20: mol_type = other DNA
tgtgagtgagcacacacatc

SEQ ID NO: 31465 - DNA, 20 bp, synthetic construct
  misc_feature 1..20: note = Description of Artificial Sequence: Synthetic oligonucleotide
  misc_feature 1..20: note = Target: FXN; (+) strand; PAM type: YTN; PAM sequence: CTG
  source 1..20: mol_type = other DNA
aagcctcaagctaggcaagc

SEQ ID NO: 31466 - DNA, 20 bp, synthetic construct
  misc_feature 1..20: note = Description of Artificial Sequence: Synthetic oligonucleotide
  misc_feature 1..20: note = Target: FXN; (+) strand; PAM type: YTN; PAM sequence: CTC
  source 1..20: mol_type = other DNA
aagctaggcaagcctaccat

SEQ ID NO: 31467 - DNA, 20 bp, synthetic construct
  misc_feature 1..20: note = Description of Artificial Sequence: Synthetic oligonucleotide
  misc_feature 1..20: note = Target: FXN; (+) strand; PAM type: YTN; PAM sequence: CTA
  source 1..20: mol_type = other DNA
ggcaagcctaccatgacttg

SEQ ID NO: 31468 - DNA, 20 bp, synthetic construct
  misc_feature 1..20: note = Description of Artificial Sequence: Synthetic oligonucleotide
  misc_feature 1..20: note = Target: FXN; (+) strand; PAM type: YTN; PAM sequence: CTA
  source 1..20: mol_type = other DNA
ccatgacttgtggtccaagg

SEQ ID NO: 31469 - DNA, 20 bp, synthetic construct
  misc_feature 1..20: note = Description of Artificial Sequence: Synthetic oligonucleotide
  misc_feature 1..20: note = Target: FXN; (+) strand; PAM type: YTN; PAM sequence: CTT
  source 1..20: mol_type = other DNA
gtggtccaagggctcacggg

SEQ ID NO: 31470 - DNA, 20 bp, synthetic construct
  misc_feature 1..20: note = Description of Artificial Sequence: Synthetic oligonucleotide
  misc_feature 1..20: note = Target: FXN; (+) strand; PAM type: YTN; PAM sequence: TTG
  source 1..20: mol_type = other DNA
tggtccaagggctcacgggt

SEQ ID NO: 31471 - DNA, 20 bp, synthetic construct
  misc_feature 1..20: note = Description of Artificial Sequence: Synthetic oligonucleotide
  misc_feature 1..20: note = Target: FXN; (+) strand; PAM type: YTN; PAM sequence: CTC
  source 1..20: mol_type = other DNA
acgggtgacctggagttaga

SEQ ID NO: 31472 - DNA, 20 bp, synthetic construct
  misc_feature 1..20: note = Description of Artificial Sequence: Synthetic oligonucleotide
  misc_feature 1..20: note = Target: FXN; (+) strand; PAM type: YTN; PAM sequence: CTG
  source 1..20: mol_type = other DNA
gagttagagggagacatggc

SEQ ID NO: 31473 - DNA, 20 bp, synthetic construct
  misc_feature 1..20: note = Description of Artificial Sequence: Synthetic oligonucleotide
  misc_feature 1..20: note = Target: FXN; (+) strand; PAM type: YTN; PAM sequence: TTA
  source 1..20: mol_type = other DNA
gagggagacatggctgccag

SEQ ID NO: 31474 - DNA, 20 bp, synthetic construct
  misc_feature 1..20: note = Description of Artificial Sequence: Synthetic oligonucleotide
  misc_feature 1..20: note = Target: FXN; (+) strand; PAM type: YTN; PAM sequence: CTG
  source 1..20: mol_type = other DNA
ccaggtggctttagaaagaa

SEQ ID NO: 31475 - DNA, 20 bp, synthetic construct
  misc_feature 1..20: note = Description of Artificial Sequence: Synthetic oligonucleotide
  misc_feature 1..20: note = Target: FXN; (+) strand; PAM type: YTN; PAM sequence: CTT
  source 1..20: mol_type = other DNA
tagaaagaacactcatcatg

SEQ ID NO: 31476 - DNA, 20 bp, synthetic construct
  misc_feature 1..20: note = Description of Artificial Sequence: Synthetic oligonucleotide
  misc_feature 1..20: note = Target: FXN; (+) strand; PAM type: YTN; PAM sequence: TTT
  source 1..20: mol_type = other DNA
agaaagaacactcatcatgg

SEQ ID NO: 31477 - DNA, 20 bp, synthetic construct
  misc_feature 1..20: note = Description of Artificial Sequence: Synthetic oligonucleotide
  misc_feature 1..20: note = Target: FXN; (+) strand; PAM type: YTN; PAM sequence: TTA
  source 1..20: mol_type = other DNA
gaaagaacactcatcatggc

SEQ ID NO: 31478 - DNA, 20 bp, synthetic construct
  misc_feature 1..20: note = Description of Artificial Sequence: Synthetic oligonucleotide
  misc_feature 1..20: note = Target: FXN; (+) strand; PAM type: YTN; PAM sequence: CTC
  source 1..20: mol_type = other DNA
atcatggccaggtgcggtgg

SEQ ID NO: 31479 - DNA, 20 bp, synthetic construct
  misc_feature 1..20: note = Description of Artificial Sequence: Synthetic oligonucleotide
  misc_feature 1..20: note = Target: FXN; (+) strand; PAM type: YTN; PAM sequence: CTT
  source 1..20: mol_type = other DNA
acgcctgtaatcccagcact

SEQ ID NO: 31480 - DNA, 20 bp, synthetic construct
  misc_feature 1..20: note = Description of Artificial Sequence: Synthetic oligonucleotide
  misc_feature 1..20: note = Target: FXN; (+) strand; PAM type: YTN; PAM sequence: TTA
  source 1..20: mol_type = other DNA
cgcctgtaatcccagcactt

SEQ ID NO: 31481 - DNA, 20 bp, synthetic construct
  misc_feature 1..20: note = Description of Artificial Sequence: Synthetic oligonucleotide
  misc_feature 1..20: note = Target: FXN; (+) strand; PAM type: YTN; PAM sequence: CTG
  source 1..20: mol_type = other DNA
taatcccagcactttgggag

SEQ ID NO: 31482 - DNA, 20 bp, synthetic construct
  misc_feature 1..20: note = Description of Artificial Sequence: Synthetic oligonucleotide
  misc_feature 1..20: note = Target: FXN; (+) strand; PAM type: YTN; PAM sequence: CTT
  source 1..20: mol_type = other DNA
tgggaggccaaggtgggtgg

SEQ ID NO: 31483 - DNA, 20 bp, synthetic construct
  misc_feature 1..20: note = Description of Artificial Sequence: Synthetic oligonucleotide
  misc_feature 1..20: note = Target: FXN; (+) strand; PAM type: YTN; PAM sequence: TTT
  source 1..20: mol_type = other DNA
gggaggccaaggtgggtgga

SEQ ID NO: 31484 - DNA, 20 bp, synthetic construct
  misc_feature 1..20: note = Description of Artificial Sequence: Synthetic oligonucleotide
  misc_feature 1..20: note = Target: FXN; (+) strand; PAM type: YTN; PAM sequence: TTG
  source 1..20: mol_type = other DNA
ggaggccaaggtgggtggat

SEQ ID NO: 31485 - DNA, 20 bp, synthetic construct
  misc_feature 1..20: note = Description of Artificial Sequence: Synthetic oligonucleotide
  misc_feature 1..20: note = Target: FXN; (+) strand; PAM type: YTN; PAM sequence: CTG
  source 1..20: mol_type = other DNA
accaacatgctgaaacctgt

SEQ ID NO: 31486 - DNA, 20 bp, synthetic construct
  misc_feature 1..20: note = Description of Artificial Sequence: Synthetic oligonucleotide
  misc_feature 1..20: note = Target: FXN; (+) strand; PAM type: YTN; PAM sequence: CTG
  source 1..20: mol_type = other DNA
aaacctgtctctcctaaaaa

SEQ ID NO: 31487 - DNA, 20 bp, synthetic construct
  misc_feature 1..20: note = Description of Artificial Sequence: Synthetic oligonucleotide
  misc_feature 1..20: note = Target: FXN; (+) strand; PAM type: YTN; PAM sequence: CTG
  source 1..20: mol_type = other DNA
tctctcctaaaaacacaaaa

SEQ ID NO: 31488 - DNA, 20 bp, synthetic construct
  misc_feature 1..20: note = Description of Artificial Sequence: Synthetic oligonucleotide
  misc_feature 1..20: note = Target: FXN; (+) strand; PAM type: YTN; PAM sequence: CTC
  source 1..20: mol_type = other DNA
tcctaaaaacacaaaaatta

SEQ ID NO: 31489 - DNA, 20 bp, synthetic construct
  misc_feature 1..20: note = Description of Artificial Sequence: Synthetic oligonucleotide
  misc_feature 1..20: note = Target: FXN; (+) strand; PAM type: YTN; PAM sequence: CTC
  source 1..20: mol_type = other DNA
ctaaaaacacaaaaattagc

SEQ ID NO: 31490 - DNA, 20 bp, synthetic construct
  misc_feature 1..20: note = Description of Artificial Sequence: Synthetic oligonucleotide
  misc_feature 1..20: note = Target: FXN; (+) strand; PAM type: YTN; PAM sequence: CTA
  source 1..20: mol_type = other DNA
aaaacacaaaaattagctgg

SEQ ID NO: 31491 - DNA, 20 bp, synthetic construct
  misc_feature 1..20: note = Description of Artificial Sequence: Synthetic oligonucleotide
  misc_feature 1..20: note = Target: FXN; (+) strand; PAM type: YTN; PAM sequence: TTA
  source 1..20: mol_type = other DNA
gctgggcatggaggtgcacg

SEQ ID NO: 31492 - DNA, 20 bp, synthetic construct
  misc_feature 1..20: note = Description of Artificial Sequence: Synthetic oligonucleotide
  misc_feature 1..20: note = Target: FXN; (+) strand; PAM type: YTN; PAM sequence: CTG
  source 1..20: mol_type = other DNA
ggcatggaggtgcacgcctg

SEQ ID NO: 31493 - DNA, 20 bp, synthetic construct
  misc_feature 1..20: note = Description of Artificial Sequence: Synthetic oligonucleotide
  misc_feature 1..20: note = Target: FXN; (+) strand; PAM type: YTN; PAM sequence: CTG
  source 1..20: mol_type = other DNA
taatcccagctactcaggag

SEQ ID NO: 31494 - DNA, 20 bp, synthetic construct
  misc_feature 1..20: note = Description of Artificial Sequence: Synthetic oligonucleotide
  misc_feature 1..20: note = Target: FXN; (+) strand; PAM type: YTN; PAM sequence: CTA
  source 1..20: mol_type = other DNA
ctcaggaggctgaggcagga

SEQ ID NO: 31495 - DNA, 20 bp, synthetic construct
  misc_feature 1..20: note = Description of Artificial Sequence: Synthetic oligonucleotide
  misc_feature 1..20: note = Target: FXN; (+) strand; PAM type: YTN; PAM sequence: CTC
  source 1..20: mol_type = other DNA
aggaggctgaggcaggagaa

SEQ ID NO: 31496 - DNA, 20 bp, synthetic construct
  misc_feature 1..20: note = Description of Artificial Sequence: Synthetic oligonucleotide
  misc_feature 1..20: note = Target: FXN; (+) strand; PAM type: YTN; PAM sequence: CTG
  source 1..20: mol_type = other DNA
aggcaggagaatcacttgaa

SEQ ID NO: 31497 - DNA, 20 bp, synthetic construct
  misc_feature 1..20: note = Description of Artificial Sequence: Synthetic oligonucleotide
  misc_feature 1..20: note = Target: FXN; (+) strand; PAM type: YTN; PAM sequence: CTT
  source 1..20: mol_type = other DNA
gaacccgggaggcggaggtt

SEQ ID NO: 31498 - DNA, 20 bp, synthetic construct
  misc_feature 1..20: note = Description of Artificial Sequence: Synthetic oligonucleotide
  misc_feature 1..20: note = Target: FXN; (+) strand; PAM type: YTN; PAM sequence: TTG
  source 1..20: mol_type = other DNA
aacccgggaggcggaggttg

SEQ ID NO: 31499 - DNA, 20 bp, synthetic construct
  misc_feature 1..20: note = Description of Artificial Sequence: Synthetic oligonucleotide
  misc_feature 1..20: note = Target: FXN; (+) strand; PAM type: YTN; PAM sequence: TTG
  source 1..20: mol_type = other DNA
caataagcctagattgtgcc

SEQ ID NO: 31500 - DNA, 20 bp, synthetic construct
  misc_feature 1..20: note = Description of Artificial Sequence: Synthetic oligonucleotide
  misc_feature 1..20: note = Target: FXN; (+) strand; PAM type: YTN; PAM sequence: CTA
  source 1..20: mol_type = other DNA
gattgtgccactgcattcca

SEQ ID NO: 31501 - DNA, 20 bp, synthetic construct
  misc_feature 1..20: note = Description of Artificial Sequence: Synthetic oligonucleotide
  misc_feature 1..20: note = Target: FXN; (+) strand; PAM type: YTN; PAM sequence: TTG
  source 1..20: mol_type = other DNA
tgccactgcattccagcctg

SEQ ID NO: 31502 - DNA, 20 bp, synthetic construct
  misc_feature 1..20: note = Description of Artificial Sequence: Synthetic oligonucleotide
  misc_feature 1..20: note = Target: FXN; (+) strand; PAM type: YTN; PAM sequence: CTG
  source 1..20: mol_type = other DNA
cattccagcctgggcaacag

SEQ ID NO: 31503 - DNA, 20 bp, synthetic construct
  misc_feature 1..20: note = Description of Artificial Sequence: Synthetic oligonucleotide
  misc_feature 1..20: note = Target: FXN; (+) strand; PAM type: YTN; PAM sequence: TTC
  source 1..20: mol_type = other DNA
cagcctgggcaacagagcaa

SEQ ID NO: 31504 - DNA, 20 bp, synthetic construct
  misc_feature 1..20: note = Description of Artificial Sequence: Synthetic oligonucleotide
  misc_feature 1..20: note = Target: FXN; (+) strand; PAM type: YTN; PAM sequence: CTG
  source 1..20: mol_type = other DNA
ggcaacagagcaagactccg

SEQ ID NO: 31505 - DNA, 20 bp, synthetic construct
  misc_feature 1..20: note = Description of Artificial Sequence: Synthetic oligonucleotide
  misc_feature 1..20: note = Target: FXN; (+) strand; PAM type: YTN; PAM sequence: CTC
  source 1..20: mol_type = other DNA
cgtctcagaaaaaaaaaaaa

SEQ ID NO: 31506 - DNA, 20 bp, synthetic construct
  misc_feature 1..20: note = Description of Artificial Sequence: Synthetic oligonucleotide
  misc_feature 1..20: note = Target: FXN; (+) strand; PAM type: YTN; PAM sequence: CTC
  source 1..20: mol_type = other DNA
agaaaaaaaaaaaaaaagga

SEQ ID NO: 31507 - DNA, 20 bp, synthetic construct
  misc_feature 1..20: note = Description of Artificial Sequence: Synthetic oligonucleotide
  misc_feature 1..20: note = Target: FXN; (+) strand; PAM type: YTN; PAM sequence: CTC
  source 1..20: mol_type = other DNA
atcctatgaccttgacctcc

SEQ ID NO: 31508 - DNA, 20 bp, synthetic construct
  misc_feature 1..20: note = Description of Artificial Sequence: Synthetic oligonucleotide
  misc_feature 1..20: note = Target: FXN; (+) strand; PAM type: YTN; PAM sequence: CTA
  source 1..20: mol_type = other DNA
tgaccttgacctccaagctt

SEQ ID NO: 31509 - DNA, 20 bp, synthetic construct
  misc_feature 1..20: note = Description of Artificial Sequence: Synthetic oligonucleotide
  misc_feature 1..20: note = Target: FXN; (+) strand; PAM type: YTN; PAM sequence: CTT
  source 1..20: mol_type = other DNA
gacctccaagctttgcctcc

SEQ ID NO: 31510 - DNA, 20 bp, synthetic construct
  misc_feature 1..20: note = Description of Artificial Sequence: Synthetic oligonucleotide
  misc_feature 1..20: note = Target: FXN; (+) strand; PAM type: YTN; PAM sequence: TTG
  source 1..20: mol_type = other DNA
acctccaagctttgcctccc

SEQ ID NO: 31511 - DNA, 20 bp, synthetic construct
  misc_feature 1..20: note = Description of Artificial Sequence: Synthetic oligonucleotide
  misc_feature 1..20: note = Target: FXN; (+) strand; PAM type: YTN; PAM sequence: CTC
  source 1..20: mol_type = other DNA
caagctttgcctccctcaag

SEQ ID NO: 31512 - DNA, 20 bp, synthetic construct
  misc_feature 1..20: note = Description of Artificial Sequence: Synthetic oligonucleotide
  misc_feature 1..20: note = Target: FXN; (+) strand; PAM type: YTN; PAM sequence: CTT
  source 1..20: mol_type = other DNA
tgcctccctcaagcagaaca

SEQ ID NO: 31513 - DNA, 20 bp, synthetic construct
  misc_feature 1..20: note = Description of Artificial Sequence: Synthetic oligonucleotide
  misc_feature 1..20: note = Target: FXN; (+) strand; PAM type: YTN; PAM sequence: TTT
  source 1..20: mol_type = other DNA
gcctccctcaagcagaacag

SEQ ID NO: 31514 - DNA, 20 bp, synthetic construct
  misc_feature 1..20: note = Description of Artificial Sequence: Synthetic oligonucleotide
  misc_feature 1..20: note = Target: FXN; (+) strand; PAM type: YTN; PAM sequence: TTG
  source 1..20: mol_type = other DNA
cctccctcaagcagaacaga

SEQ ID NO: 31515 - DNA, 20 bp, synthetic construct
  misc_feature 1..20: note = Description of Artificial Sequence: Synthetic oligonucleotide
  misc_feature 1..20: note = Target: FXN; (+) strand; PAM type: YTN; PAM sequence: CTC
  source 1..20: mol_type = other DNA
cctcaagcagaacagaatgg

SEQ ID NO: 31516 - DNA, 20 bp, synthetic construct
  misc_feature 1..20: note = Description of Artificial Sequence: Synthetic oligonucleotide
  misc_feature 1..20: note = Target: FXN; (+) strand; PAM type: YTN; PAM sequence: CTC
  source 1..20: mol_type = other DNA
aagcagaacagaatggagcc

SEQ ID NO: 31517 - DNA, 20 bp, synthetic construct
  misc_feature 1..20: note = Description of Artificial Sequence: Synthetic oligonucleotide
  misc_feature 1..20: note = Target: FXN; (+) strand; PAM type: YTN; PAM sequence: CTC
  source 1..20: mol_type = other DNA
ccttaggcagaggcggaagt

SEQ ID NO: 31518 - DNA, 20 bp, synthetic construct
  misc_feature 1..20: note = Description of Artificial Sequence: Synthetic oligonucleotide
  misc_feature 1..20: note = Target: FXN; (+) strand; PAM type: YTN; PAM sequence: CTT
  source 1..20: mol_type = other DNA
aggcagaggcggaagtttgc

SEQ ID NO: 31519 - DNA, 20 bp, synthetic construct
  misc_feature 1..20: note = Description of Artificial Sequence: Synthetic oligonucleotide
  misc_feature 1..20: note = Target: FXN; (+) strand; PAM type: YTN; PAM sequence: TTA
  source 1..20: mol_type = other DNA
ggcagaggcggaagtttgcc

SEQ ID NO: 31520 - DNA, 20 bp, synthetic construct
  misc_feature 1..20: note = Description of Artificial Sequence: Synthetic oligonucleotide
  misc_feature 1..20: note = Target: FXN; (+) strand; PAM type: YTN; PAM sequence: TTT
  source 1..20: mol_type = other DNA
gcctctcacctagttctcca

SEQ ID NO: 31521 - DNA, 20 bp, synthetic construct
  misc_feature 1..20: note = Description of Artificial Sequence: Synthetic oligonucleotide
  misc_feature 1..20: note = Target: FXN; (+) strand; PAM type: YTN; PAM sequence: TTG
  source 1..20: mol_type = other DNA
cctctcacctagttctccat

SEQ ID NO: 31522 - DNA, 20 bp, synthetic construct
  misc_feature 1..20: note = Description of Artificial Sequence: Synthetic oligonucleotide
  misc_feature 1..20: note = Target: FXN; (+) strand; PAM type: YTN; PAM sequence: CTC
  source 1..20: mol_type = other DNA
tcacctagttctccattctt

SEQ ID NO: 31523 - DNA, 20 bp, synthetic construct
  misc_feature 1..20: note = Description of Artificial Sequence: Synthetic oligonucleotide
  misc_feature 1..20: note = Target: FXN; (+) strand; PAM type: YTN; PAM sequence: CTC
  source 1..20: mol_type = other DNA
acctagttctccattctttt

SEQ ID NO: 31524 - DNA, 20 bp, synthetic construct
  misc_feature 1..20: note = Description of Artificial Sequence: Synthetic oligonucleotide
  misc_feature 1..20: note = Target: FXN; (+) strand; PAM type: YTN; PAM sequence: CTA
  source 1..20: mol_type = other DNA
gttctccattcttttgttca

SEQ ID NO: 31525 - DNA, 20 bp, synthetic construct
  misc_feature 1..20: note = Description of Artificial Sequence: Synthetic oligonucleotide
  misc_feature 1..20: note = Target: FXN; (+) strand; PAM type: YTN; PAM sequence: TTC
  source 1..20: mol_type = other DNA
tccattcttttgttcagagc

SEQ ID NO: 31526 - DNA, 20 bp, synthetic construct
  misc_feature 1..20: note = Description of Artificial Sequence: Synthetic oligonucleotide
  misc_feature 1..20: note = Target: FXN; (+) strand; PAM type: YTN; PAM sequence: CTC
  source 1..20: mol_type = other DNA
cattcttttgttcagagcct

SEQ ID NO: 31527 - DNA, 20 bp, synthetic construct
  misc_feature 1..20: note = Description of Artificial Sequence: Synthetic oligonucleotide
  misc_feature 1..20: note = Target: FXN; (+) strand; PAM type: YTN; PAM sequence: TTC
  source 1..20: mol_type = other DNA
ttttgttcagagcctgaata

SEQ ID NO: 31528 - DNA, 20 bp, synthetic construct
  misc_feature 1..20: note = Description of Artificial Sequence: Synthetic oligonucleotide
  misc_feature 1..20: note = Target: FXN; (+) strand; PAM type: YTN; PAM sequence: CTT
  source 1..20: mol_type = other DNA
ttgttcagagcctgaatacc

SEQ ID NO: 31529 - DNA, 20 bp, synthetic construct
  misc_feature 1..20: note = Description of Artificial Sequence: Synthetic oligonucleotide
  misc_feature 1..20: note = Target: FXN; (+) strand; PAM type: YTN; PAM sequence: TTT
  source 1..20: mol_type = other DNA
tgttcagagcctgaataccc

SEQ ID NO: 31530 - DNA, 20 bp, synthetic construct
  misc_feature 1..20: note = Description of Artificial Sequence: Synthetic oligonucleotide
  misc_feature 1..20: note = Target: FXN; (+) strand; PAM type: YTN; PAM sequence: TTT
  source 1..20: mol_type = other DNA
gttcagagcctgaataccct

SEQ ID NO: 31531 - DNA, 20 bp, synthetic construct
  misc_feature 1..20: note = Description of Artificial Sequence: Synthetic oligonucleotide
  misc_feature 1..20: note = Target: FXN; (+) strand; PAM type: YTN; PAM sequence: TTG
  source 1..20: mol_type = other DNA
ttcagagcctgaataccctc

SEQ ID NO: 31532 - DNA, 20 bp, synthetic construct
  misc_feature 1..20: note = Description of Artificial Sequence: Synthetic oligonucleotide
  misc_feature 1..20: note = Target: FXN; (+) strand; PAM type: YTN; PAM sequence: TTC
  source 1..20: mol_type = other DNA
agagcctgaataccctcagg

SEQ ID NO: 31533 - DNA, 20 bp, synthetic construct
  misc_feature 1..20: note = Description of Artificial Sequence: Synthetic oligonucleotide
  misc_feature 1..20: note = Target: FXN; (+) strand; PAM type: YTN; PAM sequence: CTG
  source 1..20: mol_type = other DNA
aataccctcaggctctgtac

SEQ ID NO: 31534 - DNA, 20 bp, synthetic construct
  misc_feature 1..20: note = Description of Artificial Sequence: Synthetic oligonucleotide
  misc_feature 1..20: note = Target: FXN; (+) strand; PAM type: YTN; PAM sequence: CTC
  source 1..20: mol_type = other DNA
aggctctgtacttggggtat

SEQ ID NO: 31535 - DNA, 20 bp, synthetic construct
  misc_feature 1..20: note = Description of Artificial Sequence: Synthetic oligonucleotide
  misc_feature 1..20: note = Target: FXN; (+) strand; PAM type: YTN; PAM sequence: CTC
  source 1..20: mol_type = other DNA
tgtacttggggtatttctgt

SEQ ID NO: 31536 - DNA, 20 bp, synthetic construct
  misc_feature 1..20: note = Description of Artificial Sequence: Synthetic oligonucleotide
  misc_feature 1..20: note = Target: FXN; (+) strand; PAM type: YTN; PAM sequence: CTG
  source 1..20: mol_type = other DNA
tacttggggtatttctgttc

SEQ ID NO: 31537 - DNA, 20 bp, synthetic construct
  misc_feature 1..20: note = Description of Artificial Sequence: Synthetic oligonucleotide
  misc_feature 1..20: note = Target: FXN; (+) strand; PAM type: YTN; PAM sequence: CTT
  source 1..20: mol_type = other DNA
ggggtatttctgttctcttg

SEQ ID NO: 31538 - DNA, 20 bp, synthetic construct
  misc_feature 1..20: note = Description of Artificial Sequence: Synthetic oligonucleotide
  misc_feature 1..20: note = Target: FXN; (+) strand; PAM type: YTN; PAM sequence: TTG
  source 1..20: mol_type = other DNA
gggtatttctgttctcttgt

SEQ ID NO: 31539 - DNA, 20 bp, synthetic construct
  misc_feature 1..20: note = Description of Artificial Sequence: Synthetic oligonucleotide
  misc_feature 1..20: note = Target: FXN; (+) strand; PAM type: YTN; PAM sequence: TTT
  source 1..20: mol_type = other DNA
ctgttctcttgttttatgct

SEQ ID NO: 31540 - DNA, 20 bp, synthetic construct
  misc_feature 1..20: note = Description of Artificial Sequence: Synthetic oligonucleotide
  misc_feature 1..20: note = Target: FXN; (+) strand; PAM type: YTN; PAM sequence: TTC
  source 1..20: mol_type = other DNA
tgttctcttgttttatgctc

SEQ ID NO: 31541 - DNA, 20 bp, synthetic construct
  misc_feature 1..20: note = Description of Artificial Sequence: Synthetic oligonucleotide
  misc_feature 1..20: note = Target: FXN; (+) strand; PAM type: YTN; PAM sequence: CTG
  source 1..20: mol_type = other DNA
ttctcttgttttatgctcac

SEQ ID NO: 31542 - DNA, 20 bp, synthetic construct
  misc_feature 1..20: note = Description of Artificial Sequence: Synthetic oligonucleotide
  misc_feature 1..20: note = Target: FXN; (+) strand; PAM type: YTN; PAM sequence: TTC
  source 1..20: mol_type = other DNA
tcttgttttatgctcacggt

SEQ ID NO: 31543 - DNA, 20 bp, synthetic construct
  misc_feature 1..20: note = Description of Artificial Sequence: Synthetic oligonucleotide
  misc_feature 1..20: note = Target: FXN; (+) strand; PAM type: YTN; PAM sequence: CTC
  source 1..20: mol_type = other DNA
ttgttttatgctcacggttg

SEQ ID NO: 31544 - DNA, 20 bp, synthetic construct
  misc_feature 1..20: note = Description of Artificial Sequence: Synthetic oligonucleotide
  misc_feature 1..20: note = Target: FXN; (+) strand; PAM type: YTN; PAM sequence: CTT
  source 1..20: mol_type = other DNA
gttttatgctcacggttgtg

SEQ ID NO: 31545 - DNA, 20 bp, synthetic construct
  misc_feature 1..20: note = Description of Artificial Sequence: Synthetic oligonucleotide
  misc_feature 1..20: note = Target: FXN; (+) strand; PAM type: YTN; PAM sequence: TTG
  source 1..20: mol_type = other DNA
ttttatgctcacggttgtga

SEQ ID NO: 31546 - DNA, 20 bp, synthetic construct
  misc_feature 1..20: note = Description of Artificial Sequence: Synthetic oligonucleotide
  misc_feature 1..20: note = Target: FXN; (+) strand; PAM type: YTN; PAM sequence: TTT
  source 1..20: mol_type = other DNA
tatgctcacggttgtgaggt

SEQ ID NO: 31547 - DNA, 20 bp, synthetic construct
  misc_feature 1..20: note = Description of Artificial Sequence: Synthetic oligonucleotide
  misc_feature 1..20: note = Target: FXN; (+) strand; PAM type: YTN; PAM sequence: TTT
  source 1..20: mol_type = other DNA
atgctcacggttgtgaggtt

SEQ ID NO: 31548 - DNA, 20 bp, synthetic construct
  misc_feature 1..20: note = Description of Artificial Sequence: Synthetic oligonucleotide
  misc_feature 1..20: note = Target: FXN; (+) strand; PAM type: YTN; PAM sequence: TTA
  source 1..20: mol_type = other DNA
tgctcacggttgtgaggttt

SEQ ID NO: 31549 - DNA, 20 bp, synthetic construct
  misc_feature 1..20: note = Description of Artificial Sequence: Synthetic oligonucleotide
  misc_feature 1..20: note = Target: FXN; (+) strand; PAM type: YTN; PAM sequence: CTC
  source 1..20: mol_type = other DNA
acggttgtgaggtttgttgt

SEQ ID NO: 31550 - DNA, 20 bp, synthetic construct
  misc_feature 1..20: note = Description of Artificial Sequence: Synthetic oligonucleotide
  misc_feature 1..20: note = Target: FXN; (+) strand; PAM type: YTN; PAM sequence: TTG
  source 1..20: mol_type = other DNA
tgaggtttgttgtgagtacc

SEQ ID NO: 31551 - DNA, 20 bp, synthetic construct
  misc_feature 1..20: note = Description of Artificial Sequence: Synthetic oligonucleotide
  misc_feature 1..20: note = Target: FXN; (+) strand; PAM type: YTN; PAM sequence: TTT
  source 1..20: mol_type = other DNA
gttgtgagtaccacgatccc

SEQ ID NO: 31552 - DNA, 20 bp, synthetic construct
  misc_feature 1..20: note = Description of Artificial Sequence: Synthetic oligonucleotide
  misc_feature 1..20: note = Target: FXN; (+) strand; PAM type: YTN; PAM sequence: TTG
  source 1..20: mol_type = other DNA
ttgtgagtaccacgatccct

SEQ ID NO: 31553 - DNA, 20 bp, synthetic construct
  misc_feature 1..20: note = Description of Artificial Sequence: Synthetic oligonucleotide
  misc_feature 1..20: note = Target: FXN; (+) strand; PAM type: YTN; PAM sequence: TTG
  source 1..20: mol_type = other DNA
tgagtaccacgatcccttcc

SEQ ID NO: 31554 - DNA, 20 bp, synthetic construct
  misc_feature 1..20: note = Description of Artificial Sequence: Synthetic oligonucleotide
  misc_feature 1..20: note = Target: FXN; (+) strand; PAM type: YTN; PAM sequence: CTT
  source 1..20: mol_type = other DNA
ccttcagaggagtaaactga

SEQ ID NO: 31555 - DNA, 20 bp, synthetic construct
  misc_feature 1..20: note = Description of Artificial Sequence: Synthetic oligonucleotide
  misc_feature 1..20: note = Target: FXN; (+) strand; PAM type: YTN; PAM sequence: TTC
  source 1..20: mol_type = other DNA
cttcagaggagtaaactgag

SEQ ID NO: 31556 - DNA, 20 bp, synthetic construct
  misc_feature 1..20: note = Description of Artificial Sequence: Synthetic oligonucleotide
  misc_feature 1..20: note = Target: FXN; (+) strand; PAM type: YTN; PAM sequence: CTT
  source 1..20: mol_type = other DNA
cagaggagtaaactgaggtt

SEQ ID NO: 31557 - DNA, 20 bp, synthetic construct
  misc_feature 1..20: note = Description of Artificial Sequence: Synthetic oligonucleotide
  misc_feature 1..20: note = Target: FXN; (+) strand; PAM type: YTN; PAM sequence: TTC
  source 1..20: mol_type = other DNA
agaggagtaaactgaggttc

SEQ ID NO: 31558 - DNA, 20 bp, synthetic construct
  misc_feature 1..20: note = Description of Artificial Sequence: Synthetic oligonucleotide
  misc_feature 1..20: note = Target: FXN; (+) strand; PAM type: YTN; PAM sequence: CTG
  source 1..20: mol_type = other DNA
aggttccaaaaggtttagca

SEQ ID NO: 31559 - DNA, 20 bp, synthetic construct
  misc_feature 1..20: note = Description of Artificial Sequence: Synthetic oligonucleotide
  misc_feature 1..20: note = Target: FXN; (+) strand; PAM type: YTN; PAM sequence: TTC
  source 1..20: mol_type = other DNA
caaaaggtttagcagttgcc

SEQ ID NO: 31560 - DNA, 20 bp, synthetic construct
  misc_feature 1..20: note = Description of Artificial Sequence: Synthetic oligonucleotide
  misc_feature 1..20: note = Target: FXN; (+) strand; PAM type: YTN; PAM sequence: TTT
  source 1..20: mol_type = other DNA
agcagttgcccgaggaatat

SEQ ID NO: 31561 - DNA, 20 bp, synthetic construct
  misc_feature 1..20: note = Description of Artificial Sequence: Synthetic oligonucleotide
  misc_feature 1..20: note = Target: FXN; (+) strand; PAM type: YTN; PAM sequence: TTA
  source 1..20: mol_type = other DNA
gcagttgcccgaggaatatt

SEQ ID NO: 31562 - DNA, 20 bp, synthetic construct
  misc_feature 1..20: note = Description of Artificial Sequence: Synthetic oligonucleotide
  misc_feature 1..20: note = Target: FXN; (+) strand; PAM type: YTN; PAM sequence: TTG
  source 1..20: mol_type = other DNA
cccgaggaatattaaattgg

SEQ ID NO: 31563 - DNA, 20 bp, synthetic construct
  misc_feature 1..20: note = Description of Artificial Sequence: Synthetic oligonucleotide
  misc_feature 1..20: note = Target: FXN; (+) strand; PAM type: YTN; PAM sequence: TTA
  source 1..20: mol_type = other DNA
aattggcaaaagcaggtaga

SEQ ID NO: 31564 - DNA, 20 bp, synthetic construct
  misc_feature 1..20: note = Description of Artificial Sequence: Synthetic oligonucleotide
  misc_feature 1..20: note = Target: FXN; (+) strand; PAM type: YTN; PAM sequence: TTG
  source 1..20: mol_type = other DNA
gcaaaagcaggtagaatata

SEQ ID NO: 31565 - DNA, 20 bp, synthetic construct
  misc_feature 1..20: note = Description of Artificial Sequence: Synthetic oligonucleotide
  misc_feature 1..20: note = Target: FXN; (+) strand; PAM type: YTN; PAM sequence: TTT
  source 1..20: mol_type = other DNA
ggcaacggttcttttttatg

SEQ ID NO: 31566 - DNA, 20 bp, synthetic construct
  misc_feature 1..20: note = Description of Artificial Sequence: Synthetic oligonucleotide
  misc_feature 1..20: note = Target: FXN; (+) strand; PAM type: YTN; PAM sequence: TTG
  source 1..20: mol_type = other DNA
gcaacggttcttttttatga

SEQ ID NO: 31567 - DNA, 20 bp, synthetic construct
  misc_feature 1..20: note = Description of Artificial Sequence: Synthetic oligonucleotide
  misc_feature 1..20: note = Target: FXN; (+) strand; PAM type: YTN; PAM sequence: TTC
  source 1..20: mol_type = other DNA
ttttttatgattaaaaacag

SEQ ID NO: 31568 - DNA, 20 bp, synthetic construct
  misc_feature 1..20: note = Description of Artificial Sequence: Synthetic oligonucleotide
  misc_feature 1..20: note = Target: FXN; (+) strand; PAM type: YTN; PAM sequence: CTT
  source 1..20: mol_type = other DNA
ttttatgattaaaaacagcc

SEQ ID NO: 31569 - DNA, 20 bp, synthetic construct
  misc_feature 1..20: note = Description of Artificial Sequence: Synthetic oligonucleotide
  misc_feature 1..20: note = Target: FXN; (+) strand; PAM type: YTN; PAM sequence: TTT
  source 1..20: mol_type = other DNA
tttatgattaaaaacagccg

SEQ ID NO: 31570 - DNA, 20 bp, synthetic construct
  misc_feature 1..20: note = Description of Artificial Sequence: Synthetic oligonucleotide
  misc_feature 1..20: note = Target: FXN; (+) strand; PAM type: YTN; PAM sequence: TTT
  source 1..20: mol_type = other DNA
ttatgattaaaaacagccga

SEQ ID NO: 31571 - DNA, 20 bp, synthetic construct
  misc_feature 1..20: note = Description of Artificial Sequence: Synthetic oligonucleotide
  misc_feature 1..20: note = Target: FXN; (+) strand; PAM type: YTN; PAM sequence: TTT
  source 1..20: mol_type = other DNA
tatgattaaaaacagccgaa

SEQ ID NO: 31572 - DNA, 20 bp, synthetic construct
  misc_feature 1..20: note = Description of Artificial Sequence: Synthetic oligonucleotide
  misc_feature 1..20: note = Target: FXN; (+) strand; PAM type: YTN; PAM sequence: TTT
  source 1..20: mol_type = other DNA
atgattaaaaacagccgaag

SEQ ID NO: 31573 - DNA, 20 bp, synthetic construct
  misc_feature 1..20: note = Description of Artificial Sequence: Synthetic oligonucleotide
  misc_feature 1..20: note = Target: FXN; (+) strand; PAM type: YTN; PAM sequence: TTA
  source 1..20: mol_type = other DNA
tgattaaaaacagccgaaga

SEQ ID NO: 31574 - DNA, 20 bp, synthetic construct
  misc_feature 1..20: note = Description of Artificial Sequence: Synthetic oligonucleotide
  misc_feature 1..20: note = Target: FXN; (+) strand; PAM type: YTN; PAM sequence: TTA
  source 1..20: mol_type = other DNA
aaaacagccgaagaaagact

SEQ ID NO: 31575 - DNA, 20 bp, synthetic construct
  misc_feature 1..20: note = Description of Artificial Sequence: Synthetic oligonucleotide
  misc_feature 1..20: note = Target: FXN; (+) strand; PAM type: YTN; PAM sequence: CTT
  source 1..20: mol_type = other DNA
ctacttgtgcctttgaagga

SEQ ID NO: 31576 - DNA, 20 bp, synthetic construct
  misc_feature 1..20: note = Description of Artificial Sequence: Synthetic oligonucleotide
  misc_feature 1..20: note = Target: FXN; (+) strand; PAM type: YTN; PAM sequence: TTC
  source 1..20: mol_type = other DNA
tacttgtgcctttgaaggag

SEQ ID NO: 31577 - DNA, 20 bp, synthetic construct
  misc_feature 1..20: note = Description of Artificial Sequence: Synthetic oligonucleotide
  misc_feature 1..20: note = Target: FXN; (+) strand; PAM type: YTN; PAM sequence: CTA
  source 1..20: mol_type = other DNA
cttgtgcctttgaaggagta

SEQ ID NO: 31578 - DNA, 20 bp, synthetic construct
  misc_feature 1..20: note = Description of Artificial Sequence: Synthetic oligonucleotide
  misc_feature 1..20: note = Target: FXN; (+) strand; PAM type: YTN; PAM sequence: CTT
  source 1..20: mol_type = other DNA
gtgcctttgaaggagtaact

SEQ ID NO: 31579 - DNA, 20 bp, synthetic construct
  misc_feature 1..20: note = Description of Artificial Sequence: Synthetic oligonucleotide
  misc_feature 1..20: note = Target: FXN; (+) strand; PAM type: YTN; PAM sequence: TTG
  source 1..20: mol_type = other DNA
tgcctttgaaggagtaactg

SEQ ID NO: 31580 - DNA, 20 bp, synthetic construct
  misc_feature 1..20: note = Description of Artificial Sequence: Synthetic oligonucleotide
  misc_feature 1..20: note = Target: FXN; (+) strand; PAM type: YTN; PAM sequence: CTT
  source 1..20: mol_type = other DNA
tgaaggagtaactgcatttg

SEQ ID NO: 31581 - DNA, 20 bp, synthetic construct
  misc_feature 1..20: note = Description of Artificial Sequence: Synthetic oligonucleotide
  misc_feature 1..20: note = Target: FXN; (+) strand; PAM type: YTN; PAM sequence: TTT
  source 1..20: mol_type = other DNA
gaaggagtaactgcatttga

SEQ ID NO: 31582 - DNA, 20 bp, synthetic construct
  misc_feature 1..20: note = Description of Artificial Sequence: Synthetic oligonucleotide
  misc_feature 1..20: note = Target: FXN; (+) strand; PAM type: YTN; PAM sequence: TTG
  source 1..20: mol_type = other DNA
aaggagtaactgcatttgac

SEQ ID NO: 31583 - DNA, 20 bp, synthetic construct
  misc_feature 1..20: note = Description of Artificial Sequence: Synthetic oligonucleotide
  misc_feature 1..20: note = Target: FXN; (+) strand; PAM type: YTN; PAM sequence: CTG
  source 1..20: mol_type = other DNA
catttgaccttcccaccagt

SEQ ID NO: 31584 - DNA, 20 bp, synthetic construct
  misc_feature 1..20: note = Description of Artificial Sequence: Synthetic oligonucleotide
  misc_feature 1..20: note = Target: FXN; (+) strand; PAM type: YTN; PAM sequence: TTT
  source 1..20: mol_type = other DNA
gaccttcccaccagtaacaa

SEQ ID NO: 31585 - DNA, 20 bp, synthetic construct
  misc_feature 1..20: note = Description of Artificial Sequence: Synthetic oligonucleotide
  misc_feature 1..20: note = Target: FXN; (+) strand; PAM type: YTN; PAM sequence: TTG
  source 1..20: mol_type = other DNA
accttcccaccagtaacaac

SEQ ID NO: 31586 - DNA, 20 bp, synthetic construct
  misc_feature 1..20: note = Description of Artificial Sequence: Synthetic oligonucleotide
  misc_feature 1..20: note = Target: FXN; (+) strand; PAM type: YTN; PAM sequence: CTT
  source 1..20: mol_type = other DNA
cccaccagtaacaaccatca

SEQ ID NO: 31587 - DNA, 20 bp, synthetic construct
  misc_feature 1..20: note = Description of Artificial Sequence: Synthetic oligonucleotide
  misc_feature 1..20: note = Target: FXN; (+) strand; PAM type: YTN; PAM sequence: TTC
  source 1..20: mol_type = other DNA
ccaccagtaacaaccatcaa

SEQ ID NO: 31588 - DNA, 20 bp, synthetic construct
  misc_feature 1..20: note = Description of Artificial Sequence: Synthetic oligonucleotide
  misc_feature 1..20: note = Target: FXN; (+) strand; PAM type: YTN; PAM sequence: CTC
  source 1..20: mol_type = other DNA
tattaaattaaacacacaca

SEQ ID NO: 31589 - DNA, 20 bp, synthetic construct
  misc_feature 1..20: note = Description of Artificial Sequence: Synthetic oligonucleotide
  misc_feature 1..20: note = Target: FXN; (+) strand; PAM type: YTN; PAM sequence: CTA
  source 1..20: mol_type = other DNA
ttaaattaaacacacacaca

SEQ ID NO: 31590 - DNA, 20 bp, synthetic construct
  misc_feature 1..20: note = Description of Artificial Sequence: Synthetic oligonucleotide
  misc_feature 1..20: note = Target: FXN; (+) strand; PAM type: YTN; PAM sequence: TTA
  source 1..20: mol_type = other DNA
aattaaacacacacacacac

SEQ ID NO: 31591 - DNA, 20 bp, synthetic construct
  misc_feature 1..20: note = Description of Artificial Sequence: Synthetic oligonucleotide
  misc_feature 1..20: note = Target: FXN; (+) strand; PAM type: YTN; PAM sequence: TTA
  source 1..20: mol_type = other DNA
aacacacacacacacaaaca

SEQ ID NO: 31592 - DNA, 20 bp, synthetic construct
  misc_feature 1..20: note = Description of Artificial Sequence: Synthetic oligonucleotide
  misc_feature 1..20: note = Target: FXN; (+) strand; PAM type: YTN; PAM sequence: CTA
  source 1..20: mol_type = other DNA
ttgtgaaggtatcagcgact

SEQ ID NO: 31593 - DNA, 20 bp, synthetic construct
  misc_feature 1..20: note = Description of Artificial Sequence: Synthetic oligonucleotide
  misc_feature 1..20: note = Target: FXN; (+) strand; PAM type: YTN; PAM sequence: TTG
  source 1..20: mol_type = other DNA
tgaaggtatcagcgactaag

SEQ ID NO: 31594 - DNA, 20 bp, synthetic construct
  misc_feature 1..20: note = Description of Artificial Sequence: Synthetic oligonucleotide
  misc_feature 1..20: note = Target: FXN; (+) strand; PAM type: YTN; PAM sequence: CTA
  source 1..20: mol_type = other DNA
agacaactaaggtttgaggg

SEQ ID NO: 31595 - DNA, 20 bp, synthetic construct
  misc_feature 1..20: note = Description of Artificial Sequence: Synthetic oligonucleotide
  misc_feature 1..20: note = Target: FXN; (+) strand; PAM type: YTN; PAM sequence: CTA
  source 1..20: mol_type = other DNA
aggtttgaggggccaggatc

SEQ ID NO: 31596 - DNA, 20 bp, synthetic construct
  misc_feature 1..20: note = Description of Artificial Sequence: Synthetic oligonucleotide
  misc_feature 1..20: note = Target: FXN; (+) strand; PAM type: YTN; PAM sequence: TTT
  source 1..20: mol_type = other DNA
gaggggccaggatcctggag

SEQ ID NO: 31597 - DNA, 20 bp, synthetic construct
  misc_feature 1..20: note = Description of Artificial Sequence: Synthetic oligonucleotide
  misc_feature 1..20: note = Target: FXN; (+) strand; PAM type: YTN; PAM sequence: TTG
  source 1..20: mol_type = other DNA
aggggccaggatcctggaga

SEQ ID NO: 31598 - DNA, 20 bp, synthetic construct
  misc_feature 1..20: note = Description of Artificial Sequence: Synthetic oligonucleotide
  misc_feature 1..20: note = Target: FXN; (+) strand; PAM type: YTN; PAM sequence: CTG
  source 1..20: mol_type = other DNA
gagagatggaaacttccctg

SEQ ID NO: 31599 - DNA, 20 bp, synthetic construct
  misc_feature 1..20: note = Description of Artificial Sequence: Synthetic oligonucleotide
  misc_feature 1..20: note = Target: FXN; (+) strand; PAM type: YTN; PAM sequence: CTT
  source 1..20: mol_type = other DNA
ccctgaggtgagccccacat

SEQ ID NO: 31600 - DNA, 20 bp, synthetic construct
  misc_feature 1..20: note = Description of Artificial Sequence: Synthetic oligonucleotide
  misc_feature 1..20: note = Target: FXN; (+) strand; PAM type: YTN; PAM sequence: TTC
  source 1..20: mol_type = other DNA
cctgaggtgagccccacatt

SEQ ID NO: 31601 - DNA, 20 bp, synthetic construct
  misc_feature 1..20: note = Description of Artificial Sequence: Synthetic oligonucleotide
  misc_feature 1..20: note = Target: FXN; (+) strand; PAM type: YTN; PAM sequence: CTG
  source 1..20: mol_type = other DNA
aggtgagccccacattctca

SEQ ID NO: 31602 - DNA, 20 bp, synthetic construct
  misc_feature 1..20: note = Description of Artificial Sequence: Synthetic oligonucleotide
  misc_feature 1..20: note = Target: FXN; (+) strand; PAM type: YTN; PAM sequence: TTC
  source 1..20: mol_type = other DNA
tcagacacttttccttggat

SEQ ID NO: 31603 - DNA, 20 bp, synthetic construct
  misc_feature 1..20: note = Description of Artificial Sequence: Synthetic oligonucleotide
  misc_feature 1..20: note = Target: FXN; (+) strand; PAM type: YTN; PAM sequence: CTC
  source 1..20: mol_type = other DNA
agacacttttccttggatgt

SEQ ID NO: 31604 - DNA, 20 bp, synthetic construct
  misc_feature 1..20: note = Description of Artificial Sequence: Synthetic oligonucleotide
  misc_feature 1..20: note = Target: FXN; (+) strand; PAM type: YTN; PAM sequence: CTT
  source 1..20: mol_type = other DNA
ttccttggatgttttgagca

SEQ ID NO: 31605 - DNA, 20 bp, synthetic construct
  misc_feature 1..20: note = Description of Artificial Sequence: Synthetic oligonucleotide
  misc_feature 1..20: note = Target: FXN; (+) strand; PAM type: YTN; PAM sequence: TTT
  source 1..20: mol_type = other DNA
tccttggatgttttgagcac

SEQ ID NO: 31606 - DNA, 20 bp, synthetic construct
  misc_feature 1..20: note = Description of Artificial Sequence: Synthetic oligonucleotide
  misc_feature 1..20: note = Target: FXN; (+) strand; PAM type: YTN; PAM sequence: TTT
  source 1..20: mol_type = other DNA
ccttggatgttttgagcact

SEQ ID NO: 31607 - DNA, 20 bp, synthetic construct
  misc_feature 1..20: note = Description of Artificial Sequence: Synthetic oligonucleotide
  misc_feature 1..20: note = Target: FXN; (+) strand; PAM type: YTN; PAM sequence: TTC
  source 1..20: mol_type = other DNA
cttggatgttttgagcactg

SEQ ID NO: 31608 - DNA, 20 bp, synthetic construct
  misc_feature 1..20: note = Description of Artificial Sequence: Synthetic oligonucleotide
  misc_feature 1..20: note = Target: FXN; (+) strand; PAM type: YTN; PAM sequence: CTT
  source 1..20: mol_type = other DNA
ggatgttttgagcactgctt

SEQ ID NO: 31609 - DNA, 20 bp, synthetic construct
  misc_feature 1..20: note = Description of Artificial Sequence: Synthetic oligonucleotide
  misc_feature 1..20: note = Target: FXN; (+) strand; PAM type: YTN; PAM sequence: TTG
  source 1..20: mol_type = other DNA
gatgttttgagcactgcttt

SEQ ID NO: 31610 - DNA, 20 bp, synthetic construct
  misc_feature 1..20: note = Description of Artificial Sequence: Synthetic oligonucleotide
  misc_feature 1..20: note = Target: FXN; (+) strand; PAM type: YTN; PAM sequence: TTT
  source 1..20: mol_type = other DNA
tgagcactgctttaattcct

SEQ ID NO: 31611 - DNA, 20 bp, synthetic construct
  misc_feature 1..20: note = Description of Artificial Sequence: Synthetic oligonucleotide
  misc_feature 1..20: note = Target: FXN; (+) strand; PAM type: YTN; PAM sequence: TTT
  source 1..20: mol_type = other DNA
gagcactgctttaattcctg

SEQ ID NO: 31612 - DNA, 20 bp, synthetic construct
  misc_feature 1..20: note = Description of Artificial Sequence: Synthetic oligonucleotide
  misc_feature 1..20: note = Target: FXN; (+) strand; PAM type: YTN; PAM sequence: TTG
  source 1..20: mol_type = other DNA
agcactgctttaattcctgg

SEQ ID NO: 31613 - DNA, 20 bp, synthetic construct
  misc_feature 1..20: note = Description of Artificial Sequence: Synthetic oligonucleotide
  misc_feature 1..20: note = Target: FXN; (+) strand; PAM type: YTN; PAM sequence: CTG
  source 1..20: mol_type = other DNA
ctttaattcctgggaaaaca

SEQ ID NO: 31614 - DNA, 20 bp, synthetic construct
  misc_feature 1..20: note = Description of Artificial Sequence: Synthetic oligonucleotide
  misc_feature 1..20: note = Target: FXN; (+) strand; PAM type: YTN; PAM sequence: CTT
  source 1..20: mol_type = other DNA
taattcctgggaaaacaatt

SEQ ID NO: 31615 - DNA, 20 bp, synthetic construct
  misc_feature 1..20: note = Description of Artificial Sequence: Synthetic oligonucleotide
  misc_feature 1..20: note = Target: FXN; (+) strand; PAM type: YTN; PAM sequence: TTT
  source 1..20: mol_type = other DNA
aattcctgggaaaacaattc

SEQ ID NO: 31616 - DNA, 20 bp, synthetic construct
  misc_feature 1..20: note = Description of Artificial Sequence: Synthetic oligonucleotide
  misc_feature 1..20: note = Target: FXN; (+) strand; PAM type: YTN; PAM sequence: TTA
  source 1..20: mol_type = other DNA
attcctgggaaaacaattcc

SEQ ID NO: 31617 - DNA, 20 bp, synthetic construct
  misc_feature 1..20: note = Description of Artificial Sequence: Synthetic oligonucleotide
  misc_feature 1..20: note = Target: FXN; (+) strand; PAM type: YTN; PAM sequence: TTC
  source 1..20: mol_type = other DNA
ctgggaaaacaattccttcc

SEQ ID NO: 31618 - DNA, 20 bp, synthetic construct
  misc_feature 1..20: note = Description of Artificial Sequence: Synthetic oligonucleotide
  misc_feature 1..20: note = Target: FXN; (+) strand; PAM type: YTN; PAM sequence: CTG
  source 1..20: mol_type = other DNA
ggaaaacaattccttccact

SEQ ID NO: 31619 - DNA, 20 bp, synthetic construct
  misc_feature 1..20: note = Description of Artificial Sequence: Synthetic oligonucleotide
  misc_feature 1..20: note = Target: FXN; (+) strand; PAM type: YTN; PAM sequence: TTC
  source 1..20: mol_type = other DNA
cttccactgtgcacagactc

SEQ ID NO: 31620 - DNA, 20 bp, synthetic construct
  misc_feature 1..20: note = Description of Artificial Sequence: Synthetic oligonucleotide
  misc_feature 1..20: note = Target: FXN; (+) strand; PAM type: YTN; PAM sequence: CTT
  source 1..20: mol_type = other DNA
ccactgtgcacagactctgg

SEQ ID NO: 31621 - DNA, 20 bp, synthetic construct
  misc_feature 1..20: note = Description of Artificial Sequence: Synthetic oligonucleotide
  misc_feature 1..20: note = Target: FXN; (+) strand; PAM type: YTN; PAM sequence: TTC
  source 1..20: mol_type = other DNA
cactgtgcacagactctggg

SEQ ID NO: 31622 - DNA, 20 bp, synthetic construct
  misc_feature 1..20: note = Description of Artificial Sequence: Synthetic oligonucleotide
  misc_feature 1..20: note = Target: FXN; (+) strand; PAM type: YTN; PAM sequence: CTG
  source 1..20: mol_type = other DNA
tgcacagactctggggccag

SEQ ID NO: 31623 - DNA, 20 bp, synthetic construct
  misc_feature 1..20: note = Description of Artificial Sequence: Synthetic oligonucleotide
  misc_feature 1..20: note = Target: FXN; (+) strand; PAM type: YTN; PAM sequence: CTC
  source 1..20: mol_type = other DNA
tggggccagacagcttgggt

SEQ ID NO: 31624 - DNA, 20 bp, synthetic construct
  misc_feature 1..20: note = Description of Artificial Sequence: Synthetic oligonucleotide
  misc_feature 1..20: note = Target: FXN; (+) strand; PAM type: YTN; PAM sequence: CTG
  source 1..20: mol_type = other DNA
gggccagacagcttgggttc

SEQ ID NO: 31625 - DNA, 20 bp, synthetic construct
  misc_feature 1..20: note = Description of Artificial Sequence: Synthetic oligonucleotide
  misc_feature 1..20: note = Target: FXN; (+) strand; PAM type: YTN; PAM sequence: CTT
  source 1..20: mol_type = other DNA
gggttcaatcccagctctgc

SEQ ID NO: 31626 - DNA, 20 bp, synthetic construct
  misc_feature 1..20: note = Description of Artificial Sequence: Synthetic oligonucleotide
  misc_feature 1..20: note = Target: FXN; (+) strand; PAM type: YTN; PAM sequence: TTG
  source 1..20: mol_type = other DNA
ggttcaatcccagctctgcc

SEQ ID NO: 31627 - DNA, 20 bp, synthetic construct
  misc_feature 1..20: note = Description of Artificial Sequence: Synthetic oligonucleotide
  misc_feature 1..20: note = Target: FXN; (+) strand; PAM type: YTN; PAM sequence: TTC
  source 1..20: mol_type = other DNA
aatcccagctctgccactta

SEQ ID NO: 31628 - DNA, 20 bp, synthetic construct
  misc_feature 1..20: note = Description of Artificial Sequence: Synthetic oligonucleotide
  misc_feature 1..20: note = Target: FXN; (+) strand; PAM type: YTN; PAM sequence: CTC
  source 1..20: mol_type = other DNA
tgccacttaatgtctgtgta

SEQ ID NO: 31629 - DNA, 20 bp, synthetic construct
  misc_feature 1..20: note = Description of Artificial Sequence: Synthetic oligonucleotide
  misc_feature 1..20: note = Target: FXN; (+) strand; PAM type: YTN; PAM sequence: CTG
  source 1..20: mol_type = other DNA
ccacttaatgtctgtgtatc

SEQ ID NO: 31630 - DNA, 20 bp, synthetic construct
  misc_feature 1..20: note = Description of Artificial Sequence: Synthetic oligonucleotide
  misc_feature 1..20: note = Target: FXN; (+) strand; PAM type: YTN; PAM sequence: CTT
  source 1..20: mol_type = other DNA
aatgtctgtgtatctgtgta

SEQ ID NO: 31631 - DNA, 20 bp, synthetic construct
  misc_feature 1..20: note = Description of Artificial Sequence: Synthetic oligonucleotide
  misc_feature 1..20: note = Target: FXN; (+) strand; PAM type: YTN; PAM sequence: TTA
  source 1..20: mol_type = other DNA
atgtctgtgtatctgtgtag

SEQ ID NO: 31632 - DNA, 20 bp, synthetic construct
  misc_feature 1..20: note = Description of Artificial Sequence: Synthetic oligonucleotide
  misc_feature 1..20: note = Target: FXN; (+) strand; PAM type: YTN; PAM sequence: CTG
  source 1..20: mol_type = other DNA
tgtatctgtgtaggcaagtt

SEQ ID NO: 31633 - DNA, 20 bp, synthetic construct
  misc_feature 1..20: note = Description of Artificial Sequence: Synthetic oligonucleotide
  misc_feature 1..20: note = Target: FXN; (+) strand; PAM type: YTN; PAM sequence: CTG
  source 1..20: mol_type = other DNA
tgtaggcaagttaccctttg

SEQ ID NO: 31634 - DNA, 20 bp, synthetic construct
  misc_feature 1..20: note = Description of Artificial Sequence: Synthetic oligonucleotide
  misc_feature 1..20: note = Target: FXN; (+) strand; PAM type: YTN; PAM sequence: TTA
  source 1..20: mol_type = other DNA
ccctttggtgcgtcagtttc

SEQ ID NO: 31635 - DNA, 20 bp, synthetic construct
  misc_feature 1..20: note = Description of Artificial Sequence: Synthetic oligonucleotide
  misc_feature 1..20: note = Target: FXN; (+) strand; PAM type: YTN; PAM sequence: CTT
  source 1..20: mol_type = other DNA
tggtgcgtcagtttcctcat

SEQ ID NO: 31636 - DNA, 20 bp, synthetic construct
  misc_feature 1..20: note = Description of Artificial Sequence: Synthetic oligonucleotide
  misc_feature 1..20: note = Target: FXN; (+) strand; PAM type: YTN; PAM sequence: TTT
  source 1..20: mol_type = other DNA
ggtgcgtcagtttcctcatc

SEQ ID NO: 31637 - DNA, 20 bp, synthetic construct
  misc_feature 1..20: note = Description of Artificial Sequence: Synthetic oligonucleotide
  misc_feature 1..20: note = Target: FXN; (+) strand; PAM type: YTN; PAM sequence: TTG
  source 1..20: mol_type = other DNA
gtgcgtcagtttcctcatct

SEQ ID NO: 31638 - DNA, 20 bp, synthetic construct
  misc_feature 1..20: note = Description of Artificial Sequence: Synthetic oligonucleotide
  misc_feature 1..20: note = Target: FXN; (+) strand; PAM type: YTN; PAM sequence: TTT
  source 1..20: mol_type = other DNA
cctcatctgtaaaacacaac

SEQ ID NO: 31639 - DNA, 20 bp, synthetic construct
  misc_feature 1..20: note = Description of Artificial Sequence: Synthetic oligonucleotide
  misc_feature 1..20: note = Target: FXN; (+) strand; PAM type: YTN; PAM sequence: TTC
  source 1..20: mol_type = other DNA
ctcatctgtaaaacacaact

SEQ ID NO: 31640 - DNA, 20 bp, synthetic construct
  misc_feature 1..20: note = Description of Artificial Sequence: Synthetic oligonucleotide
  misc_feature 1..20: note = Target: FXN; (+) strand; PAM type: YTN; PAM sequence: CTC
  source 1..20: mol_type = other DNA
atctgtaaaacacaactata

SEQ ID NO: 31641 - DNA, 20 bp, synthetic construct
  misc_feature 1..20: note = Description of Artificial Sequence: Synthetic oligonucleotide
  misc_feature 1..20: note = Target: FXN; (+) strand; PAM type: YTN; PAM sequence: CTG
  source 1..20: mol_type = other DNA
taaaacacaactatagttga

SEQ ID NO: 31642 - DNA, 20 bp, synthetic construct
  misc_feature 1..20: note = Description of Artificial Sequence: Synthetic oligonucleotide
  misc_feature 1..20: note = Target: FXN; (+) strand; PAM type: YTN; PAM sequence: CTA
  source 1..20: mol_type = other DNA
tagttgatcctcattcgtta

SEQ ID NO: 31643 - DNA, 20 bp, synthetic construct
  misc_feature 1..20: note = Description of Artificial Sequence: Synthetic oligonucleotide
  misc_feature 1..20: note = Target: FXN; (+) strand; PAM type: YTN; PAM sequence: TTG
  source 1..20: mol_type = other DNA
atcctcattcgttaagagtc

SEQ ID NO: 31644 - DNA, 20 bp, synthetic construct
  misc_feature 1..20: note = Description of Artificial Sequence: Synthetic oligonucleotide
  misc_feature 1..20: note = Target: FXN; (+) strand; PAM type: YTN; PAM sequence: CTC
  source 1..20: mol_type = other DNA
attcgttaagagtctgtact

SEQ ID NO: 31645 - DNA, 20 bp, synthetic construct
  misc_feature 1..20: note = Description of Artificial Sequence: Synthetic oligonucleotide
  misc_feature 1..20: note = Target: FXN; (+) strand; PAM type: YTN; PAM sequence: TTC
  source 1..20: mol_type = other DNA
gttaagagtctgtacttgtt

SEQ ID NO: 31646 - DNA, 20 bp, synthetic construct
  misc_feature 1..20: note = Description of Artificial Sequence: Synthetic oligonucleotide
  misc_feature 1..20: note = Target: FXN; (+) strand; PAM type: YTN; PAM sequence: TTA
  source 1..20: mol_type = other DNA
agagtctgtacttgttaatt

SEQ ID NO: 31647 - DNA, 20 bp, synthetic construct
  misc_feature 1..20: note = Description of Artificial Sequence: Synthetic oligonucleotide
  misc_feature 1..20: note = Target: FXN; (+) strand; PAM type: YTN; PAM sequence: CTG
  source 1..20: mol_type = other DNA
tacttgttaatttgctcact

SEQ ID NO: 31648 - DNA, 20 bp, synthetic construct
  misc_feature 1..20: note = Description of Artificial Sequence: Synthetic oligonucleotide
  misc_feature 1..20: note = Target: FXN; (+) strand; PAM type: YTN; PAM sequence: CTT
  source 1..20: mol_type = other DNA
gttaatttgctcacttgcta

SEQ ID NO: 31649 - DNA, 20 bp, synthetic construct
  misc_feature 1..20: note = Description of Artificial Sequence: Synthetic oligonucleotide
  misc_feature 1..20: note = Target: FXN; (+) strand; PAM type: YTN; PAM sequence: TTG
  source 1..20: mol_type = other DNA
ttaatttgctcacttgctaa

SEQ ID NO: 31650 - DNA, 20 bp, synthetic construct
  misc_feature 1..20: note = Description of Artificial Sequence: Synthetic oligonucleotide
  misc_feature 1..20: note = Target: FXN; (+) strand; PAM type: YTN; PAM sequence: TTA
  source 1..20: mol_type = other DNA
atttgctcacttgctaaaat

SEQ ID NO: 31651 - DNA, 20 bp, synthetic construct
  misc_feature 1..20: note = Description of Artificial Sequence: Synthetic oligonucleotide
  misc_feature 1..20: note = Target: FXN; (+) strand; PAM type: YTN; PAM sequence: TTT
  source 1..20: mol_type = other DNA
gctcacttgctaaaatttgt

SEQ ID NO: 31652 - DNA, 20 bp, synthetic construct
  misc_feature 1..20: note = Description of Artificial Sequence: Synthetic oligonucleotide
  misc_feature 1..20: note = Target: FXN; (+) strand; PAM type: YTN; PAM sequence: TTG
  source 1..20: mol_type = other DNA
ctcacttgctaaaatttgtt

SEQ ID NO: 31653 - DNA, 20 bp, synthetic construct
  misc_feature 1..20: note = Description of Artificial Sequence: Synthetic oligonucleotide
  misc_feature 1..20: note = Target: FXN; (+) strand; PAM type: YTN; PAM sequence: CTC
  source 1..20: mol_type = other DNA
acttgctaaaatttgttacc

SEQ ID NO: 31654 - DNA, 20 bp, synthetic construct
  misc_feature 1..20: note = Description of Artificial Sequence: Synthetic oligonucleotide
  misc_feature 1..20: note = Target: FXN; (+) strand; PAM type: YTN; PAM sequence: CTT
  source 1..20: mol_type = other DNA
gctaaaatttgttaccccaa

SEQ ID NO: 31655 - DNA, 20 bp, synthetic construct
  misc_feature 1..20: note = Description of Artificial Sequence: Synthetic oligonucleotide
  misc_feature 1..20: note = Target: FXN; (+) strand; PAM type: YTN; PAM sequence: TTG
  source 1..20: mol_type = other DNA
ctaaaatttgttaccccaaa

SEQ ID NO: 31656 - DNA, 20 bp, synthetic construct
  misc_feature 1..20: note = Description of Artificial Sequence: Synthetic oligonucleotide
  misc_feature 1..20: note = Target: FXN; (+) strand; PAM type: YTN; PAM sequence: CTA
  source 1..20: mol_type = other DNA
aaatttgttaccccaaaatc

SEQ ID NO: 31657 - DNA, 20 bp, synthetic construct
  misc_feature 1..20: note = Description of Artificial Sequence: Synthetic oligonucleotide
  misc_feature 1..20: note = Target: FXN; (+) strand; PAM type: YTN; PAM sequence: TTT
  source 1..20: mol_type = other DNA
gttaccccaaaatcagtacc

SEQ ID NO: 31658 - DNA, 20 bp, synthetic construct
  misc_feature 1..20: note = Description of Artificial Sequence: Synthetic oligonucleotide
  misc_feature 1..20: note = Target: FXN; (+) strand; PAM type: YTN; PAM sequence: TTG
  source 1..20: mol_type = other DNA
ttaccccaaaatcagtaccc

SEQ ID NO: 31659 - DNA, 20 bp, synthetic construct
  misc_feature 1..20: note = Description of Artificial Sequence: Synthetic oligonucleotide
  misc_feature 1..20: note = Target: FXN; (+) strand; PAM type: YTN; PAM sequence: TTA
  source 1..20: mol_type = other DNA
ccccaaaatcagtaccccta

SEQ ID NO: 31660 - DNA, 20 bp, synthetic construct
  misc_feature 1..20: note = Description of Artificial Sequence: Synthetic oligonucleotide
  misc_feature 1..20: note = Target: FXN; (+) strand; PAM type: YTN; PAM sequence: CTA
  source 1..20: mol_type = other DNA
gccttttggggtcgtttcaa

SEQ ID NO: 31661 - DNA, 20 bp, synthetic construct
  misc_feature 1..20: note = Description of Artificial Sequence: Synthetic oligonucleotide
  misc_feature 1..20: note = Target: FXN; (+) strand; PAM type: YTN; PAM sequence: CTT
  source 1..20: mol_type = other DNA
ttggggtcgtttcaaagatg

SEQ ID NO: 31662 - DNA, 20 bp, synthetic construct
  misc_feature 1..20: note = Description of Artificial Sequence: Synthetic oligonucleotide
  misc_feature 1..20: note = Target: FXN; (+) strand; PAM type: YTN; PAM sequence: TTT
  source 1..20: mol_type = other DNA
tggggtcgtttcaaagatgt

SEQ ID NO: 31663 - DNA, 20 bp, synthetic construct
  misc_feature 1..20: note = Description of Artificial Sequence: Synthetic oligonucleotide
  misc_feature 1..20: note = Target: FXN; (+) strand; PAM type: YTN; PAM sequence: TTT
  source 1..20: mol_type = other DNA
ggggtcgtttcaaagatgtg

SEQ ID NO: 31664 - DNA, 20 bp, synthetic construct
  misc_feature 1..20: note = Description of Artificial Sequence: Synthetic oligonucleotide
  misc_feature 1..20: note = Target: FXN; (+) strand; PAM type: YTN; PAM sequence: TTG
  source 1..20: mol_type = other DNA
gggtcgtttcaaagatgtgt

SEQ ID NO: 31665 - DNA, 20 bp, synthetic construct
  misc_feature 1..20: note = Description of Artificial Sequence: Synthetic oligonucleotide
  misc_feature 1..20: note = Target: FXN; (+) strand; PAM type: YTN; PAM sequence: TTT
  source 1..20: mol_type = other DNA
caaagatgtgtgcagagcgg

SEQ ID NO: 31666 - DNA, 20 bp, synthetic construct
  misc_feature 1..20: note = Description of Artificial Sequence: Synthetic oligonucleotide
  misc_feature 1..20: note = Target: FXN; (+) strand; PAM type: YTN; PAM sequence: TTC
  source 1..20: mol_type = other DNA
aaagatgtgtgcagagcggc

SEQ ID NO: 31667 - DNA, 20 bp, synthetic construct
  misc_feature 1..20: note = Description of Artificial Sequence: Synthetic oligonucleotide
  misc_feature 1..20: note = Target: FXN; (+) strand; PAM type: YTN; PAM sequence: CTC
  source 1..20: mol_type = other DNA
ctccaggctcatgttcccag

SEQ ID NO: 31668 - DNA, 20 bp, synthetic construct
  misc_feature 1..20: note = Description of Artificial Sequence: Synthetic oligonucleotide
  misc_feature 1..20: note = Target: FXN; (+) strand; PAM type: YTN; PAM sequence: CTC
  source 1..20: mol_type = other DNA
caggctcatgttcccagcca

SEQ ID NO: 31669 - DNA, 20 bp, synthetic construct
  misc_feature 1..20: note = Description of Artificial Sequence: Synthetic oligonucleotide
  misc_feature 1..20: note = Target: FXN; (+) strand; PAM type: YTN; PAM sequence: CTC
  source 1..20: mol_type = other DNA
atgttcccagccaaggtcca

SEQ ID NO: 31670 - DNA, 20 bp, synthetic construct
  misc_feature 1..20: note = Description of Artificial Sequence: Synthetic oligonucleotide
  misc_feature 1..20: note = Target: FXN; (+) strand; PAM type: YTN; PAM sequence: TTC
  source 1..20: mol_type = other DNA
ccagccaaggtccaacaaag

SEQ ID NO: 31671 - DNA, 20 bp, synthetic construct
  misc_feature 1..20: note = Description of Artificial Sequence: Synthetic oligonucleotide
  misc_feature 1..20: note = Target: FXN; (+) strand; PAM type: YTN; PAM sequence: CTG
  source 1..20: mol_type = other DNA
ccctgccttcttatttcagc

SEQ ID NO: 31672 - DNA, 20 bp, synthetic construct
  misc_feature 1..20: note = Description of Artificial Sequence: Synthetic oligonucleotide
  misc_feature 1..20: note = Target: FXN; (+) strand; PAM type: YTN; PAM sequence: CTG
  source 1..20: mol_type = other DNA
ccttcttatttcagctgtca

SEQ ID NO: 31673 - DNA, 20 bp, synthetic construct
  misc_feature 1..20: note = Description of Artificial Sequence: Synthetic oligonucleotide
  misc_feature 1..20: note = Target: FXN; (+) strand; PAM type: YTN; PAM sequence: CTT
  source 1..20: mol_type = other DNA
cttatttcagctgtcatagt

SEQ ID NO: 31674 - DNA, 20 bp, synthetic construct
  misc_feature 1..20: note = Description of Artificial Sequence: Synthetic oligonucleotide
  misc_feature 1..20: note = Target: FXN; (+) strand; PAM type: YTN; PAM sequence: TTC
  source 1..20: mol_type = other DNA
ttatttcagctgtcatagtg

SEQ ID NO: 31675 - DNA, 20 bp, synthetic construct
  misc_feature 1..20: note = Description of Artificial Sequence: Synthetic oligonucleotide
  misc_feature 1..20: note = Target: FXN; (+) strand; PAM type: YTN; PAM sequence: CTT
  source 1..20: mol_type = other DNA
atttcagctgtcatagtgta

SEQ ID NO: 31676 - DNA, 20 bp, synthetic construct
  misc_feature 1..20: note = Description of Artificial Sequence: Synthetic oligonucleotide
  misc_feature 1..20: note = Target: FXN; (+) strand; PAM type: YTN; PAM sequence: TTA
  source 1..20: mol_type = other DNA
tttcagctgtcatagtgtaa

SEQ ID NO: 31677 - DNA, 20 bp, synthetic construct
  misc_feature 1..20: note = Description of Artificial Sequence: Synthetic oligonucleotide
  misc_feature 1..20: note = Target: FXN; (+) strand; PAM type: YTN; PAM sequence: TTT
  source 1..20: mol_type = other DNA
cagctgtcatagtgtaaact

SEQ ID NO: 31678 - DNA, 20 bp, synthetic construct
  misc_feature 1..20: note = Description of Artificial Sequence: Synthetic oligonucleotide
  misc_feature 1..20: note = Target: FXN; (+) strand; PAM type: YTN; PAM sequence: TTC
  source 1..20: mol_type = other DNA
agctgtcatagtgtaaactg

SEQ ID NO: 31679 - DNA, 20 bp, synthetic construct
  misc_feature 1..20: note = Description of Artificial Sequence: Synthetic oligonucleotide
  misc_feature 1..20: note = Target: FXN; (+) strand; PAM type: YTN; PAM sequence: CTG
  source 1..20: mol_type = other DNA
tcatagtgtaaactgtgtcc

SEQ ID NO: 31680 - DNA, 20 bp, synthetic construct
  misc_feature 1..20: note = Description of Artificial Sequence: Synthetic oligonucleotide
  misc_feature 1..20: note = Target: FXN; (+) strand; PAM type: YTN; PAM sequence: CTG
  source 1..20: mol_type = other DNA
tgtccttttcacagtctgat

SEQ ID NO: 31681 - DNA, 20 bp, synthetic construct
  misc_feature 1..20: note = Description of Artificial Sequence: Synthetic oligonucleotide
  misc_feature 1..20: note = Target: FXN; (+) strand; PAM type: YTN; PAM sequence: CTT
  source 1..20: mol_type = other DNA
ttcacagtctgattagtgcc

SEQ ID NO: 31682 - DNA, 20 bp, synthetic construct
  misc_feature 1..20: note = Description of Artificial Sequence: Synthetic oligonucleotide
  misc_feature 1..20: note = Target: FXN; (+) strand; PAM type: YTN; PAM sequence: TTT
  source 1..20: mol_type = other DNA
tcacagtctgattagtgcca

SEQ ID NO: 31683 - DNA, 20 bp, synthetic construct
  misc_feature 1..20: note = Description of Artificial Sequence: Synthetic oligonucleotide
  misc_feature 1..20: note = Target: FXN; (+) strand; PAM type: YTN; PAM sequence: TTT
  source 1..20: mol_type = other DNA
cacagtctgattagtgccat

SEQ ID NO: 31684 - DNA, 20 bp, synthetic construct
  misc_feature 1..20: note = Description of Artificial Sequence: Synthetic oligonucleotide
  misc_feature 1..20: note = Target: FXN; (+) strand; PAM type: YTN; PAM sequence: TTC
  source 1..20: mol_type = other DNA
acagtctgattagtgccatg

SEQ ID NO: 31685 - DNA, 20 bp, synthetic construct
  misc_feature 1..20: note = Description of Artificial Sequence: Synthetic oligonucleotide
  misc_feature 1..20: note = Target: FXN; (+) strand; PAM type: YTN; PAM sequence: CTG
  source 1..20: mol_type = other DNA
attagtgccatgtttttcag

SEQ ID NO: 31686 - DNA, 20 bp, synthetic construct
  misc_feature 1..20: note = Description of Artificial Sequence: Synthetic oligonucleotide
  misc_feature 1..20: note = Target: FXN; (+) strand; PAM type: YTN; PAM sequence: TTA
  source 1..20: mol_type = other DNA
gtgccatgtttttcagattt

SEQ ID NO: 31687 - DNA, 20 bp, synthetic construct
  misc_feature 1..20: note = Description of Artificial Sequence: Synthetic oligonucleotide
  misc_feature 1..20: note = Target: FXN; (+) strand; PAM type: YTN; PAM sequence: TTT
  source 1..20: mol_type = other DNA
ttcagatttttatgcttttt

SEQ ID NO: 31688 - DNA, 20 bp, synthetic construct
  misc_feature 1..20: note = Description of Artificial Sequence: Synthetic oligonucleotide
  misc_feature 1..20: note = Target: FXN; (+) strand; PAM type: YTN; PAM sequence: TTT
  source 1..20: mol_type = other DNA
tcagatttttatgctttttt

SEQ ID NO: 31689 - DNA, 20 bp, synthetic construct
  misc_feature 1..20: note = Description of Artificial Sequence: Synthetic oligonucleotide
  misc_feature 1..20: note = Target: FXN; (+) strand; PAM type: YTN; PAM sequence: TTT
  source 1..20: mol_type = other DNA
cagatttttatgcttttttc

SEQ ID NO: 31690 - DNA, 20 bp, synthetic construct
  misc_feature 1..20: note = Description of Artificial Sequence: Synthetic oligonucleotide
  misc_feature 1..20: note = Target: FXN; (+) strand; PAM type: YTN; PAM sequence: TTC
  source 1..20: mol_type = other DNA
agatttttatgcttttttct

SEQ ID NO: 31691 - DNA, 20 bp, synthetic construct
  misc_feature 1..20: note = Description of Artificial Sequence: Synthetic oligonucleotide
  misc_feature 1..20: note = Target: FXN; (+) strand; PAM type: YTN; PAM sequence: TTT
  source 1..20: mol_type = other DNA
ttatgcttttttcttggtta

SEQ ID NO: 31692 - DNA, 20 bp, synthetic construct
  misc_feature 1..20: note = Description of Artificial Sequence: Synthetic oligonucleotide
  misc_feature 1..20: note = Target: FXN; (+) strand; PAM type: YTN; PAM sequence: TTT
  source 1..20: mol_type = other DNA
tatgcttttttcttggttat

SEQ ID NO: 31693 - DNA, 20 bp, synthetic construct
  misc_feature 1..20: note = Description of Artificial Sequence: Synthetic oligonucleotide
  misc_feature 1..20: note = Target: FXN; (+) strand; PAM type: YTN; PAM sequence: TTT
  source 1..20: mol_type = other DNA
atgcttttttcttggttatt

SEQ ID NO: 31694 - DNA, 20 bp, synthetic construct
  misc_feature 1..20: note = Description of Artificial Sequence: Synthetic oligonucleotide
  misc_feature 1..20: note = Target: FXN; (+) strand; PAM type: YTN; PAM sequence: TTA
  source 1..20: mol_type = other DNA
tgcttttttcttggttattt

SEQ ID NO: 31695 - DNA, 20 bp, synthetic construct
  misc_feature 1..20: note = Description of Artificial Sequence: Synthetic oligonucleotide
  misc_feature 1..20: note = Target: FXN; (+) strand; PAM type: YTN; PAM sequence: CTT
  source 1..20: mol_type = other DNA
ttttcttggttatttctctg

SEQ ID NO: 31696 - DNA, 20 bp, synthetic construct
  misc_feature 1..20: note = Description of Artificial Sequence: Synthetic oligonucleotide
  misc_feature 1..20: note = Target: FXN; (+) strand; PAM type: YTN; PAM sequence: TTT
  source 1..20: mol_type = other DNA
tttcttggttatttctctgt

SEQ ID NO: 31697 - DNA, 20 bp, synthetic construct
  misc_feature 1..20: note = Description of Artificial Sequence: Synthetic oligonucleotide
  misc_feature 1..20: note = Target: FXN; (+) strand; PAM type: YTN; PAM sequence: TTT
  source 1..20: mol_type = other DNA
ttcttggttatttctctgtt

SEQ ID NO: 31698 - DNA, 20 bp, synthetic construct
  misc_feature 1..20: note = Description of Artificial Sequence: Synthetic oligonucleotide
  misc_feature 1..20: note = Target: FXN; (+) strand; PAM type: YTN; PAM sequence: TTT
  source 1..20: mol_type = other DNA
tcttggttatttctctgtta

SEQ ID NO: 31699 - DNA, 20 bp, synthetic construct
  misc_feature 1..20: note = Description of Artificial Sequence: Synthetic oligonucleotide
  misc_feature 1..20: note = Target: FXN; (+) strand; PAM type: YTN; PAM sequence: TTT
  source 1..20: mol_type = other DNA
cttggttatttctctgttaa

SEQ ID NO: 31700 - DNA, 20 bp, synthetic construct
  misc_feature 1..20: note = Description of Artificial Sequence: Synthetic oligonucleotide
  misc_feature 1..20: note = Target: FXN; (+) strand; PAM type: YTN; PAM sequence: TTC
  source 1..20: mol_type = other DNA
ttggttatttctctgttaaa

SEQ ID NO: 31701 - DNA, 20 bp, synthetic construct
  misc_feature 1..20: note = Description of Artificial Sequence: Synthetic oligonucleotide
  misc_feature 1..20: note = Target: FXN; (+) strand; PAM type: YTN; PAM sequence: CTT
  source 1..20: mol_type = other DNA
ggttatttctctgttaaaat

SEQ ID NO: 31702 - DNA, 20 bp, synthetic construct
  misc_feature 1..20: note = Description of Artificial Sequence: Synthetic oligonucleotide
  misc_feature 1..20: note = Target: FXN; (+) strand; PAM type: YTN; PAM sequence: TTG
  source 1..20: mol_type = other DNA
gttatttctctgttaaaatt

SEQ ID NO: 31703 - DNA, 20 bp, synthetic construct
  misc_feature 1..20: note = Description of Artificial Sequence: Synthetic oligonucleotide
  misc_feature 1..20: note = Target: FXN; (+) strand; PAM type: YTN; PAM sequence: TTA
  source 1..20: mol_type = other DNA
tttctctgttaaaattgtct

SEQ ID NO: 31704 - DNA, 20 bp, synthetic construct
  misc_feature 1..20: note = Description of Artificial Sequence: Synthetic oligonucleotide
  misc_feature 1..20: note = Target: FXN; (+) strand; PAM type: YTN; PAM sequence: TTT
  source 1..20: mol_type = other DNA
ctctgttaaaattgtctcca

SEQ ID NO: 31705 - DNA, 20 bp, synthetic construct
  misc_feature 1..20: note = Description of Artificial Sequence: Synthetic oligonucleotide
  misc_feature 1..20: note = Target: FXN; (+) strand; PAM type: YTN; PAM sequence: TTC
  source 1..20: mol_type = other DNA
tctgttaaaattgtctccaa

SEQ ID NO: 31706 - DNA, 20 bp, synthetic construct
  misc_feature 1..20: note = Description of Artificial Sequence: Synthetic oligonucleotide
  misc_feature 1..20: note = Target: FXN; (+) strand; PAM type: YTN; PAM sequence: CTC
  source 1..20: mol_type = other DNA
tgttaaaattgtctccaagt

SEQ ID NO: 31707 - DNA, 20 bp, synthetic construct
  misc_feature 1..20: note = Description of Artificial Sequence: Synthetic oligonucleotide
  misc_feature 1..20: note = Target: FXN; (+) strand; PAM type: YTN; PAM sequence: CTG
  source 1..20: mol_type = other DNA
ttaaaattgtctccaagtgt

SEQ ID NO: 31708 - DNA, 20 bp, synthetic construct
  misc_feature 1..20: note = Description of Artificial Sequence: Synthetic oligonucleotide
  misc_feature 1..20: note = Target: FXN; (+) strand; PAM type: YTN; PAM sequence: TTA
  source 1..20: mol_type = other DNA
aaattgtctccaagtgtagt

SEQ ID NO: 31709 - DNA, 20 bp, synthetic construct
  misc_feature 1..20: note = Description of Artificial Sequence: Synthetic oligonucleotide
  misc_feature 1..20: note = Target: FXN; (+) strand; PAM type: YTN; PAM sequence: TTG
  source 1..20: mol_type = other DNA
tctccaagtgtagtgcaaag

SEQ ID NO: 31710 - DNA, 20 bp, synthetic construct
  misc_feature 1..20: note = Description of Artificial Sequence: Synthetic oligonucleotide
  misc_feature 1..20: note = Target: FXN; (+) strand; PAM type: YTN; PAM sequence: CTC
  source 1..20: mol_type = other DNA
caagtgtagtgcaaagttta

SEQ ID NO: 31711 - DNA, 20 bp, synthetic construct
  misc_feature 1..20: note = Description of Artificial Sequence: Synthetic oligonucleotide
  misc_feature 1..20: note = Target: FXN; (+) strand; PAM type: YTN; PAM sequence: TTT
  source 1..20: mol_type = other DNA
agcacgaggaggctgtgatg

SEQ ID NO: 31712 - DNA, 20 bp, synthetic construct
  misc_feature 1..20: note = Description of Artificial Sequence: Synthetic oligonucleotide
  misc_feature 1..20: note = Target: FXN; (+) strand; PAM type: YTN; PAM sequence: TTA
  source 1..20: mol_type = other DNA
gcacgaggaggctgtgatgt

SEQ ID NO: 31713 - DNA, 20 bp, synthetic construct
  misc_feature 1..20: note = Description of Artificial Sequence: Synthetic oligonucleotide
  misc_feature 1..20: note = Target: FXN; (+) strand; PAM type: YTN; PAM sequence: CTG
  source 1..20: mol_type = other DNA
tgatgttccttacagagaaa

SEQ ID NO: 31714 - DNA, 20 bp, synthetic construct
  misc_feature 1..20: note = Description of Artificial Sequence: Synthetic oligonucleotide
  misc_feature 1..20: note = Target: FXN; (+) strand; PAM type: YTN; PAM sequence: TTC
  source 1..20: mol_type = other DNA
cttacagagaaaatgcatgt

SEQ ID NO: 31715 - DNA, 20 bp, synthetic construct
  misc_feature 1..20: note = Description of Artificial Sequence: Synthetic oligonucleotide
  misc_feature 1..20: note = Target: FXN; (+) strand; PAM type: YTN; PAM sequence: CTT
  source 1..20: mol_type = other DNA
acagagaaaatgcatgtgtt

SEQ ID NO: 31716 - DNA, 20 bp, synthetic construct
  misc_feature 1..20: note = Description of Artificial Sequence: Synthetic oligonucleotide
  misc_feature 1..20: note = Target: FXN; (+) strand; PAM type: YTN; PAM sequence: TTA
  source 1..20: mol_type = other DNA
cagagaaaatgcatgtgtta

SEQ ID NO: 31717 - DNA, 20 bp, synthetic construct
  misc_feature 1..20: note = Description of Artificial Sequence: Synthetic oligonucleotide
  misc_feature 1..20: note = Target: FXN; (+) strand; PAM type: YTN; PAM sequence: TTA
  source 1..20: mol_type = other DNA
gagaagctttgtcaggcatg

SEQ ID NO: 31718 - DNA, 20 bp, synthetic construct
  misc_feature 1..20: note = Description of Artificial Sequence: Synthetic oligonucleotide
  misc_feature 1..20: note = Target: FXN; (+) strand; PAM type: YTN; PAM sequence: CTT
  source 1..20: mol_type = other DNA
tgtcaggcatgagttaaggt

SEQ ID NO: 31719 - DNA, 20 bp, synthetic construct
  misc_feature 1..20: note = Description of Artificial Sequence: Synthetic oligonucleotide
  misc_feature 1..20: note = Target: FXN; (+) strand; PAM type: YTN; PAM sequence: TTT
  source 1..20: mol_type = other DNA
gtcaggcatgagttaaggtg

SEQ ID NO: 31720 - DNA, 20 bp, synthetic construct
  misc_feature 1..20: note = Description of Artificial Sequence: Synthetic oligonucleotide
  misc_feature 1..20: note = Target: FXN; (+) strand; PAM type: YTN; PAM sequence: TTG
  source 1..20: mol_type = other DNA
tcaggcatgagttaaggtgc

SEQ ID NO: 31721 - DNA, 20 bp, synthetic construct
  misc_feature 1..20: note = Description of Artificial Sequence: Synthetic oligonucleotide
  misc_feature 1..20: note = Target: FXN; (+) strand; PAM type: YTN; PAM sequence: TTA
  source 1..20: mol_type = other DNA
aggtgctgttgtcctgagat

SEQ ID NO: 31722 - DNA, 20 bp, synthetic construct
  misc_feature 1..20: note = Description of Artificial Sequence: Synthetic oligonucleotide
  misc_feature 1..20: note = Target: FXN; (+) strand; PAM type: YTN; PAM sequence: CTG
  source 1..20: mol_type = other DNA
ttgtcctgagatcaattaat

SEQ ID NO: 31723 - DNA, 20 bp, synthetic construct
  misc_feature 1..20: note = Description of Artificial Sequence: Synthetic oligonucleotide
  misc_feature 1..20: note = Target: FXN; (+) strand; PAM type: YTN; PAM sequence: TTG
  source 1..20: mol_type = other DNA
tcctgagatcaattaatttg

SEQ ID NO: 31724 - DNA, 20 bp, synthetic construct
  misc_feature 1..20: note = Description of Artificial Sequence: Synthetic oligonucleotide
  misc_feature 1..20: note = Target: FXN; (+) strand; PAM type: YTN; PAM sequence: CTG
  source 1..20: mol_type = other DNA
agatcaattaatttgttgtt

SEQ ID NO: 31725 - DNA, 20 bp, synthetic construct
  misc_feature 1..20: note = Description of Artificial Sequence: Synthetic oligonucleotide
  misc_feature 1..20: note = Target: FXN; (+) strand; PAM type: YTN; PAM sequence: TTA
  source 1..20: mol_type = other DNA
atttgttgttgttgttgttt

SEQ ID NO: 31726 - DNA, 20 bp, synthetic construct
  misc_feature 1..20: note = Description of Artificial Sequence: Synthetic oligonucleotide
  misc_feature 1..20: note = Target: FXN; (+) strand; PAM type: YTN; PAM sequence: TTT
  source 1..20: mol_type = other DNA
gttgttgttgttgtttgaga

SEQ ID NO: 31727 - DNA, 20 bp, synthetic construct
  misc_feature 1..20: note = Description of Artificial Sequence: Synthetic oligonucleotide
  misc_feature 1..20: note = Target: FXN; (+) strand; PAM type: YTN; PAM sequence: TTG
  source 1..20: mol_type = other DNA
ttgttgttgttgtttgagac

SEQ ID NO: 31728 - DNA, 20 bp, synthetic construct
  misc_feature 1..20: note = Description of Artificial Sequence: Synthetic oligonucleotide
  misc_feature 1..20: note = Target: FXN; (+) strand; PAM type: YTN; PAM sequence: TTG
  source 1..20: mol_type = other DNA
ttgttgttgtttgagacagg

SEQ ID NO: 31729 - DNA, 20 bp, synthetic construct
  misc_feature 1..20: note = Description of Artificial Sequence: Synthetic oligonucleotide
  misc_feature 1..20: note = Target: FXN; (+) strand; PAM type: YTN; PAM sequence: TTG
  source 1..20: mol_type = other DNA
ttgttgtttgagacagggtc

SEQ ID NO: 31730 - DNA, 20 bp, synthetic construct
  misc_feature 1..20: note = Description of Artificial Sequence: Synthetic oligonucleotide
  misc_feature 1..20: note = Target: FXN; (+) strand; PAM type: YTN; PAM sequence: TTG
  source 1..20: mol_type = other DNA
ttgtttgagacagggtctcc

SEQ ID NO: 31731 - DNA, 20 bp, synthetic construct
  misc_feature 1..20: note = Description of Artificial Sequence: Synthetic oligonucleotide
  misc_feature 1..20: note = Target: FXN; (+) strand; PAM type: YTN; PAM sequence: TTG
  source 1..20: mol_type = other DNA
tttgagacagggtctccctc

SEQ ID NO: 31732 - DNA, 20 bp, synthetic construct
  misc_feature 1..20: note = Description of Artificial Sequence: Synthetic oligonucleotide
  misc_feature 1..20: note = Target: FXN; (+) strand; PAM type: YTN; PAM sequence: TTT
  source 1..20: mol_type = other DNA
gagacagggtctccctctgt

SEQ ID NO: 31733 - DNA, 20 bp, synthetic construct
  misc_feature 1..20: note = Description of Artificial Sequence: Synthetic oligonucleotide
  misc_feature 1..20: note = Target: FXN; (+) strand; PAM type: YTN; PAM sequence: TTG
  source 1..20: mol_type = other DNA
agacagggtctccctctgtt

SEQ ID NO: 31734 - DNA, 20 bp, synthetic construct
  misc_feature 1..20: note = Description of Artificial Sequence: Synthetic oligonucleotide
  misc_feature 1..20: note = Target: FXN; (+) strand; PAM type: YTN; PAM sequence: CTC
  source 1..20: mol_type = other DNA
cctctgttgcccaggctgct

SEQ ID NO: 31735 - DNA, 20 bp, synthetic construct
  misc_feature 1..20: note = Description of Artificial Sequence: Synthetic oligonucleotide
  misc_feature 1..20: note = Target: FXN; (+) strand; PAM type: YTN; PAM sequence: CTC
  source 1..20: mol_type = other DNA
tgttgcccaggctgctggag

SEQ ID NO: 31736 - DNA, 20 bp, synthetic construct
  misc_feature 1..20: note = Description of Artificial Sequence: Synthetic oligonucleotide
  misc_feature 1..20: note = Target: FXN; (+) strand; PAM type: YTN; PAM sequence: CTG
  source 1..20: mol_type = other DNA
ttgcccaggctgctggagtg

SEQ ID NO: 31737 - DNA, 20 bp, synthetic construct
  misc_feature 1..20: note = Description of Artificial Sequence: Synthetic oligonucleotide
  misc_feature 1..20: note = Target: FXN; (+) strand; PAM type: YTN; PAM sequence: TTG
  source 1..20: mol_type = other DNA
cccaggctgctggagtgcaa

SEQ ID NO: 31738 - DNA, 20 bp, synthetic construct
  misc_feature 1..20: note = Description of Artificial Sequence: Synthetic oligonucleotide
  misc_feature 1..20: note = Target: FXN; (+) strand; PAM type: YTN; PAM sequence: CTG
  source 1..20: mol_type = other DNA
ctggagtgcaatggtgtaat

SEQ ID NO: 31739 - DNA, 20 bp, synthetic construct
  misc_feature 1..20: note = Description of Artificial Sequence: Synthetic oligonucleotide
  misc_feature 1..20: note = Target: FXN; (+) strand; PAM type: YTN; PAM sequence: CTG
  source 1..20: mol_type = other DNA
gagtgcaatggtgtaatcat

SEQ ID NO: 31740 - DNA, 20 bp, synthetic construct
  misc_feature 1..20: note = Description of Artificial Sequence: Synthetic oligonucleotide
  misc_feature 1..20: note = Target: FXN; (+) strand; PAM type: YTN; PAM sequence: CTC
  source 1..20: mol_type = other DNA
actgcagcctctacctctct

SEQ ID NO: 31741 - DNA, 20 bp, synthetic construct
  misc_feature 1..20: note = Description of Artificial Sequence: Synthetic oligonucleotide
  misc_feature 1..20: note = Target: FXN; (+) strand; PAM type: YTN; PAM sequence: CTG
  source 1..20: mol_type = other DNA
cagcctctacctctctggct

SEQ ID NO: 31742 - DNA, 20 bp, synthetic construct
  misc_feature 1..20: note = Description of Artificial Sequence: Synthetic oligonucleotide
  misc_feature 1..20: note = Target: FXN; (+) strand; PAM type: YTN; PAM sequence: CTC
  source 1..20: mol_type = other DNA
tacctctctggctcaagcaa

SEQ ID NO: 31743 - DNA, 20 bp, synthetic construct
  misc_feature 1..20: note = Description of Artificial Sequence: Synthetic oligonucleotide
  misc_feature 1..20: note = Target: FXN; (+) strand; PAM type: YTN; PAM sequence: CTA
  source 1..20: mol_type = other DNA
cctctctggctcaagcaatc

SEQ ID NO: 31744 - DNA, 20 bp, synthetic construct
  misc_feature 1..20: note = Description of Artificial Sequence: Synthetic oligonucleotide
  misc_feature 1..20: note = Target: FXN; (+) strand; PAM type: YTN; PAM sequence: CTC
  source 1..20: mol_type = other DNA
tctggctcaagcaatcctcc

SEQ ID NO: 31745 - DNA, 20 bp, synthetic construct
  misc_feature 1..20: note = Description of Artificial Sequence: Synthetic oligonucleotide
  misc_feature 1..20: note = Target: FXN; (+) strand; PAM type: YTN; PAM sequence: CTC
  source 1..20: mol_type = other DNA
tggctcaagcaatcctccca

SEQ ID NO: 31746 - DNA, 20 bp, synthetic construct
  misc_feature 1..20: note = Description of Artificial Sequence: Synthetic oligonucleotide
  misc_feature 1..20: note = Target: FXN; (+) strand; PAM type: YTN; PAM sequence: CTG
  source 1..20: mol_type = other DNA
gctcaagcaatcctcccacc

SEQ ID NO: 31747 - DNA, 20 bp, synthetic construct
  misc_feature 1..20: note = Description of Artificial Sequence: Synthetic oligonucleotide
  misc_feature 1..20: note = Target: FXN; (+) strand; PAM type: YTN; PAM sequence: CTC
  source 1..20: mol_type = other DNA
aagcaatcctcccacctcgg

SEQ ID NO: 31748 - DNA, 20 bp, synthetic construct
  misc_feature 1..20: note = Description of Artificial Sequence: Synthetic oligonucleotide
  misc_feature 1..20: note = Target: FXN; (+) strand; PAM type: YTN; PAM sequence: CTC
  source 1..20: mol_type = other DNA
ccacctcggcctcctgagta

SEQ ID NO: 31749 - DNA, 20 bp, synthetic construct
  misc_feature 1..20: note = Description of Artificial Sequence: Synthetic oligonucleotide
  misc_feature 1..20: note = Target: FXN; (+) strand; PAM type: YTN; PAM sequence: CTC
  source 1..20: mol_type = other DNA
ggcctcctgagtagctggga

SEQ ID NO: 31750 - DNA, 20 bp, synthetic construct
  misc_feature 1..20: note = Description of Artificial Sequence: Synthetic oligonucleotide
  misc_feature 1..20: note = Target: FXN; (+) strand; PAM type: YTN; PAM sequence: CTC
  source 1..20: mol_type = other DNA
ctgagtagctgggactacag

SEQ ID NO: 31751 - DNA, 20 bp, synthetic construct
  misc_feature 1..20: note = Description of Artificial Sequence: Synthetic oligonucleotide
  misc_feature 1..20: note = Target: FXN; (+) strand; PAM type: YTN; PAM sequence: CTG
  source 1..20: mol_type = other DNA
agtagctgggactacaggta

SEQ ID NO: 31752 - DNA, 20 bp, synthetic construct
  misc_feature 1..20: note = Description of Artificial Sequence: Synthetic oligonucleotide
  misc_feature 1..20: note = Target: FXN; (+) strand; PAM type: YTN; PAM sequence: CTG
  source 1..20: mol_type = other DNA
ggactacaggtacaccccac

SEQ ID NO: 31753 - DNA, 20 bp, synthetic construct
  misc_feature 1..20: note = Description of Artificial Sequence: Synthetic oligonucleotide
  misc_feature 1..20: note = Target: FXN; (+) strand; PAM type: YTN; PAM sequence: CTA
  source 1..20: mol_type = other DNA
caggtacaccccaccacacc

SEQ ID NO: 31754 - DNA, 20 bp, synthetic construct
  misc_feature 1..20: note = Description of Artificial Sequence: Synthetic oligonucleotide
  misc_feature 1..20: note = Target: FXN; (+) strand; PAM type: YTN; PAM sequence: TTT
  source 1..20: mol_type = other DNA
ttgatatttttttaggtgga

SEQ ID NO: 31755 - DNA, 20 bp, synthetic construct
  misc_feature 1..20: note = Description of Artificial Sequence: Synthetic oligonucleotide
  misc_feature 1..20: note = Target: FXN; (+) strand; PAM type: YTN; PAM sequence: TTT
  source 1..20: mol_type = other DNA
tgatatttttttaggtggaa

SEQ ID NO: 31756 - DNA, 20 bp, synthetic construct
  misc_feature 1..20: note = Description of Artificial Sequence: Synthetic oligonucleotide
  misc_feature 1..20: note = Target: FXN; (+) strand; PAM type: YTN; PAM sequence: TTT
  source 1..20: mol_type = other DNA
gatatttttttaggtggaat

SEQ ID NO: 31757 - DNA, 20 bp, synthetic construct
  misc_feature 1..20: note = Description of Artificial Sequence: Synthetic oligonucleotide
  misc_feature 1..20: note = Target: FXN; (+) strand; PAM type: YTN; PAM sequence: TTG
  source 1..20: mol_type = other DNA
atatttttttaggtggaatt

SEQ ID NO: 31758 - DNA, 20 bp, synthetic construct
  misc_feature 1..20: note = Description of Artificial Sequence: Synthetic oligonucleotide
  misc_feature 1..20: note = Target: FXN; (+) strand; PAM type: YTN; PAM sequence: TTT
  source 1..20: mol_type = other DNA
ttttaggtggaattttgctc

SEQ ID NO: 31759 - DNA, 20 bp, synthetic construct
  misc_feature 1..20: note = Description of Artificial Sequence: Synthetic oligonucleotide
  misc_feature 1..20: note = Target: FXN; (+) strand; PAM type: YTN; PAM sequence: TTT
  source 1..20: mol_type = other DNA
tttaggtggaattttgctca

SEQ ID NO: 31760 - DNA, 20 bp, synthetic construct
  misc_feature 1..20: note = Description of Artificial Sequence: Synthetic oligonucleotide
  misc_feature 1..20: note = Target: FXN; (+) strand; PAM type: YTN; PAM sequence: TTT
  source 1..20: mol_type = other DNA
ttaggtggaattttgctcat

SEQ ID NO: 31761 - DNA, 20 bp, synthetic construct
  misc_feature 1..20: note = Description of Artificial Sequence: Synthetic oligonucleotide
  misc_feature 1..20: note = Target: FXN; (+) strand; PAM type: YTN; PAM sequence: TTT
  source 1..20: mol_type = other DNA
taggtggaattttgctcatc

SEQ ID NO: 31762 - DNA, 20 bp, synthetic construct
  misc_feature 1..20: note = Description of Artificial Sequence: Synthetic oligonucleotide
  misc_feature 1..20: note = Target: FXN; (+) strand; PAM type: YTN; PAM sequence: TTT
  source 1..20: mol_type = other DNA
aggtggaattttgctcatca

SEQ ID NO: 31763 - DNA, 20 bp, synthetic construct
  misc_feature 1..20: note = Description of Artificial Sequence: Synthetic oligonucleotide
  misc_feature 1..20: note = Target: FXN; (+) strand; PAM type: YTN; PAM sequence: TTA
  source 1..20: mol_type = other DNA
ggtggaattttgctcatcac

SEQ ID NO: 31764 - DNA, 20 bp, synthetic construct
  misc_feature 1..20: note = Description of Artificial Sequence: Synthetic oligonucleotide
  misc_feature 1..20: note = Target: FXN; (+) strand; PAM type: YTN; PAM sequence: TTT
  source 1..20: mol_type = other DNA
tgctcatcacccaggctgga

SEQ ID NO: 31765 - DNA, 20 bp, synthetic construct
  misc_feature 1..20: note = Description of Artificial Sequence: Synthetic oligonucleotide
  misc_feature 1..20: note = Target: FXN; (+) strand; PAM type: YTN; PAM sequence: TTT
  source 1..20: mol_type = other DNA
gctcatcacccaggctggag

SEQ ID NO: 31766 - DNA, 20 bp, synthetic construct
  misc_feature 1..20: note = Description of Artificial Sequence: Synthetic oligonucleotide
  misc_feature 1..20: note = Target: FXN; (+) strand; PAM type: YTN; PAM sequence: TTG
  source 1..20: mol_type = other DNA
ctcatcacccaggctggagt

SEQ ID NO: 31767 - DNA, 20 bp, synthetic construct
  misc_feature 1..20: note = Description of Artificial Sequence: Synthetic oligonucleotide
  misc_feature 1..20: note = Target: FXN; (+) strand; PAM type: YTN; PAM sequence: CTC
  source 1..20: mol_type = other DNA
atcacccaggctggagtgca

SEQ ID NO: 31768 - DNA, 20 bp, synthetic construct
  misc_feature 1..20: note = Description of Artificial Sequence: Synthetic oligonucleotide
  misc_feature 1..20: note = Target: FXN; (+) strand; PAM type: YTN; PAM sequence: CTG
  source 1..20: mol_type = other DNA
gagtgcaatggtgcgatcct

SEQ ID NO: 31769 - DNA, 20 bp, synthetic construct
  misc_feature 1..20: note = Description of Artificial Sequence: Synthetic oligonucleotide
  misc_feature 1..20: note = Target: FXN; (+) strand; PAM type: YTN; PAM sequence: CTG
  source 1..20: mol_type = other DNA
gctcactgcaacctccacct

SEQ ID NO: 31770 - DNA, 20 bp, synthetic construct
  misc_feature 1..20: note = Description of Artificial Sequence: Synthetic oligonucleotide
  misc_feature 1..20: note = Target: FXN; (+) strand; PAM type: YTN; PAM sequence: CTC
  source 1..20: mol_type = other DNA
actgcaacctccacctcccg

SEQ ID NO: 31771 - DNA, 20 bp, synthetic construct
  misc_feature 1..20: note = Description of Artificial Sequence: Synthetic oligonucleotide
  misc_feature 1..20: note = Target: FXN; (+) strand; PAM type: YTN; PAM sequence: CTG
  source 1..20: mol_type = other DNA
caacctccacctcccggatt

SEQ ID NO: 31772 - DNA, 20 bp, synthetic construct
  misc_feature 1..20: note = Description of Artificial Sequence: Synthetic oligonucleotide
  misc_feature 1..20: note = Target: FXN; (+) strand; PAM type: YTN; PAM sequence: CTC
  source 1..20: mol_type = other DNA
cacctcccggattcaagcaa

SEQ ID NO: 31773 - DNA, 20 bp, synthetic construct
  misc_feature 1..20: note = Description of Artificial Sequence: Synthetic oligonucleotide
  misc_feature 1..20: note = Target: FXN; (+) strand; PAM type: YTN; PAM sequence: CTC
  source 1..20: mol_type = other DNA
ccggattcaagcaattcttc

SEQ ID NO: 31774 - DNA, 20 bp, synthetic construct
  misc_feature 1..20: note = Description of Artificial Sequence: Synthetic oligonucleotide
  misc_feature 1..20: note = Target: FXN; (+) strand; PAM type: YTN; PAM sequence: TTC
  source 1..20: mol_type = other DNA
aagcaattcttctgcctcag

SEQ ID NO: 31775 - DNA, 20 bp, synthetic construct
  misc_feature 1..20: note = Description of Artificial Sequence: Synthetic oligonucleotide
  misc_feature 1..20: note = Target: FXN; (+) strand; PAM type: YTN; PAM sequence: TTC
  source 1..20: mol_type = other DNA
ttctgcctcagcctcctgag

SEQ ID NO: 31776 - DNA, 20 bp, synthetic construct
  misc_feature 1..20: note = Description of Artificial Sequence: Synthetic oligonucleotide
  misc_feature 1..20: note = Target: FXN; (+) strand; PAM type: YTN; PAM sequence: CTT
  source 1..20: mol_type = other DNA
ctgcctcagcctcctgagta

SEQ ID NO: 31777 - DNA, 20 bp, synthetic construct
  misc_feature 1..20: note = Description of Artificial Sequence: Synthetic oligonucleotide
  misc_feature 1..20: note = Target: FXN; (+) strand; PAM type: YTN; PAM sequence: TTC
  source 1..20: mol_type = other DNA
tgcctcagcctcctgagtag

SEQ ID NO: 31778 - DNA, 20 bp, synthetic construct
  misc_feature 1..20: note = Description of Artificial Sequence: Synthetic oligonucleotide
  misc_feature 1..20: note = Target: FXN; (+) strand; PAM type: YTN; PAM sequence: CTG
  source 1..20: mol_type = other DNA
cctcagcctcctgagtagca

SEQ ID NO: 31779 - DNA, 20 bp, synthetic construct
  misc_feature 1..20: note = Description of Artificial Sequence: Synthetic oligonucleotide
  misc_feature 1..20: note = Target: FXN; (+) strand; PAM type: YTN; PAM sequence: CTC
  source 1..20: mol_type = other DNA
agcctcctgagtagcacaga

SEQ ID NO: 31780 - DNA, 20 bp, synthetic construct
  misc_feature 1..20: note = Description of Artificial Sequence: Synthetic oligonucleotide
  misc_feature 1..20: note = Target: FXN; (+) strand; PAM type: YTN; PAM sequence: CTC
  source 1..20: mol_type = other DNA
ctgagtagcacagattacag

SEQ ID NO: 31781 - DNA, 20 bp, synthetic construct
  misc_feature 1..20: note = Description of Artificial Sequence: Synthetic oligonucleotide
  misc_feature 1..20: note = Target: FXN; (+) strand; PAM type: YTN; PAM sequence: CTG
  source 1..20: mol_type = other DNA
agtagcacagattacaggca

SEQ ID NO: 31782 - DNA, 20 bp, synthetic construct
  misc_feature 1..20: note = Description of Artificial Sequence: Synthetic oligonucleotide
  misc_feature 1..20: note = Target: FXN; (+) strand; PAM type: YTN; PAM sequence: TTA
  source 1..20: mol_type = other DNA
caggcacatgtcatcacgcc

SEQ ID NO: 31783 - DNA, 20 bp, synthetic construct
  misc_feature 1..20: note = Description of Artificial Sequence: Synthetic oligonucleotide
  misc_feature 1..20: note = Target: FXN; (+) strand; PAM type: YTN; PAM sequence: CTT
  source 1..20: mol_type = other DNA
gctaatttttgtgtttttag

SEQ ID NO: 31784 - DNA, 20 bp, synthetic construct
  misc_feature 1..20: note = Description of Artificial Sequence: Synthetic oligonucleotide
  misc_feature 1..20: note = Target: FXN; (+) strand; PAM type: YTN; PAM sequence: TTG
  source 1..20: mol_type = other DNA
ctaatttttgtgtttttagt

SEQ ID NO: 31785 - DNA, 20 bp, synthetic construct
  misc_feature 1..20: note = Description of Artificial Sequence: Synthetic oligonucleotide
  misc_feature 1..20: note = Target: FXN; (+) strand; PAM type: YTN; PAM sequence: CTA
  source 1..20: mol_type = other DNA
atttttgtgtttttagtaga

SEQ ID NO: 31786 - DNA, 20 bp, synthetic construct
  misc_feature 1..20: note = Description of Artificial Sequence: Synthetic oligonucleotide
  misc_feature 1..20: note = Target: FXN; (+) strand; PAM type: YTN; PAM sequence: TTT
  source 1..20: mol_type = other DNA
ttgtgtttttagtagaggcg

SEQ ID NO: 31787 - DNA, 20 bp, synthetic construct
  misc_feature 1..20: note = Description of Artificial Sequence: Synthetic oligonucleotide
  misc_feature 1..20: note = Target: FXN; (+) strand; PAM type: YTN; PAM sequence: TTT
  source 1..20: mol_type = other DNA
tgtgtttttagtagaggcgg

SEQ ID NO: 31788 - DNA, 20 bp, synthetic construct
  misc_feature 1..20: note = Description of Artificial Sequence: Synthetic oligonucleotide
  misc_feature 1..20: note = Target: FXN; (+) strand; PAM type: YTN; PAM sequence: TTT
  source 1..20: mol_type = other DNA
gtgtttttagtagaggcggg

SEQ ID NO: 31789 - DNA, 20 bp, synthetic construct
  misc_feature 1..20: note = Description of Artificial Sequence: Synthetic oligonucleotide
  misc_feature 1..20: note = Target: FXN; (+) strand; PAM type: YTN; PAM sequence: TTG
  source 1..20: mol_type = other DNA
tgtttttagtagaggcgggg

SEQ ID NO: 31790 - DNA, 20 bp, synthetic construct
  misc_feature 1..20: note = Description of Artificial Sequence: Synthetic oligonucleotide
  misc_feature 1..20: note = Target: FXN; (+) strand; PAM type: YTN; PAM sequence: TTT
  source 1..20: mol_type = other DNA
ttagtagaggcggggtttca

SEQ ID NO: 31791 - DNA, 20 bp, synthetic construct
  misc_feature 1..20: note = Description of Artificial Sequence: Synthetic oligonucleotide
  misc_feature 1..20: note = Target: FXN; (+) strand; PAM type: YTN; PAM sequence: TTT
  source 1..20: mol_type = other DNA
tagtagaggcggggtttcac

SEQ ID NO: 31792 - DNA, 20 bp, synthetic construct
  misc_feature 1..20: note = Description of Artificial Sequence: Synthetic oligonucleotide
  misc_feature 1..20: note = Target: FXN; (+) strand; PAM type: YTN; PAM sequence: TTT
  source 1..20: mol_type = other DNA
agtagaggcggggtttcacc

SEQ ID NO: 31793 - DNA, 20 bp, synthetic construct
  misc_feature 1..20: note = Description of Artificial Sequence: Synthetic oligonucleotide
  misc_feature 1..20: note = Target: FXN; (+) strand; PAM type: YTN; PAM sequence: TTA
  source 1..20: mol_type = other DNA
gtagaggcggggtttcacca

SEQ ID NO: 31794 - DNA, 20 bp, synthetic construct
  misc_feature 1..20: note = Description of Artificial Sequence: Synthetic oligonucleotide
  misc_feature 1..20: note = Target: FXN; (+) strand; PAM type: YTN; PAM sequence: TTT
  source 1..20: mol_type = other DNA
caccatgttggccaggctag

SEQ ID NO: 31795 - DNA, 20 bp, synthetic construct
  misc_feature 1..20: note = Description of Artificial Sequence: Synthetic oligonucleotide
  misc_feature 1..20: note = Target: FXN; (+) strand; PAM type: YTN; PAM sequence: TTC
  source 1..20: mol_type = other DNA
accatgttggccaggctagt

SEQ ID NO: 31796 - DNA, 20 bp, synthetic construct
  misc_feature 1..20: note = Description of Artificial Sequence: Synthetic oligonucleotide
  misc_feature 1..20: note = Target: FXN; (+) strand; PAM type: YTN; PAM sequence: TTG
  source 1..20: mol_type = other DNA
gccaggctagtcttgaactc

SEQ ID NO: 31797 - DNA, 20 bp, synthetic construct
  misc_feature 1..20: note = Description of Artificial Sequence: Synthetic oligonucleotide
  misc_feature 1..20: note = Target: FXN; (+) strand; PAM type: YTN; PAM sequence: CTA
  source 1..20: mol_type = other DNA
gtcttgaactcctgacctca

SEQ ID NO: 31798 - DNA, 20 bp, synthetic construct
  misc_feature 1..20: note = Description of Artificial Sequence: Synthetic oligonucleotide
  misc_feature 1..20: note = Target: FXN; (+) strand; PAM type: YTN; PAM sequence: CTT
  source 1..20: mol_type = other DNA
gaactcctgacctcaggtga

SEQ ID NO: 31799 - DNA, 20 bp, synthetic construct
  misc_feature 1..20: note = Description of Artificial Sequence: Synthetic oligonucleotide
  misc_feature 1..20: note = Target: FXN; (+) strand; PAM type: YTN; PAM sequence: TTG
  source 1..20: mol_type = other DNA
aactcctgacctcaggtgat

SEQ ID NO: 31800 - DNA, 20 bp, synthetic construct
  misc_feature 1..20: note = Description of Artificial Sequence: Synthetic oligonucleotide
  misc_feature 1..20: note = Target: FXN; (+) strand; PAM type: YTN; PAM sequence: CTC
  source 1..20: mol_type = other DNA
ctgacctcaggtgatccacc

SEQ ID NO: 31801 - DNA, 20 bp, synthetic construct
  misc_feature 1..20: note = Description of Artificial Sequence: Synthetic oligonucleotide
  misc_feature 1..20: note = Target: FXN; (+) strand; PAM type: YTN; PAM sequence: CTG
  source 1..20: mol_type = other DNA
acctcaggtgatccacccgc

SEQ ID NO: 31802 - DNA, 20 bp, synthetic construct
  misc_feature 1..20: note = Description of Artificial Sequence: Synthetic oligonucleotide
  misc_feature 1..20: note = Target: FXN; (+) strand; PAM type: YTN; PAM sequence: CTC
  source 1..20: mol_type = other DNA
aggtgatccacccgcctccg

SEQ ID NO: 31803 - DNA, 20 bp, synthetic construct
  misc_feature 1..20: note = Description of Artificial Sequence: Synthetic oligonucleotide
  misc_feature 1..20: note = Target: FXN; (+) strand; PAM type: YTN; PAM sequence: CTC
  source 1..20: mol_type = other DNA
cgcctcccaaactgcagaga

SEQ ID NO: 31804 - DNA, 20 bp, synthetic construct
  misc_feature 1..20: note = Description of Artificial Sequence: Synthetic oligonucleotide
  misc_feature 1..20: note = Target: FXN; (+) strand; PAM type: YTN; PAM sequence: CTC
  source 1..20: mol_type = other DNA
ccaaactgcagagattatag

SEQ ID NO: 31805 - DNA, 20 bp, synthetic construct
  misc_feature 1..20: note = Description of Artificial Sequence: Synthetic oligonucleotide
  misc_feature 1..20: note = Target: FXN; (+) strand; PAM type: YTN; PAM sequence: CTG
  source 1..20: mol_type = other DNA
cagagattataggcacgaac

SEQ ID NO: 31806 - DNA, 20 bp, synthetic construct
  misc_feature 1..20: note = Description of Artificial Sequence: Synthetic oligonucleotide
  misc_feature 1..20: note = Target: FXN; (+) strand; PAM type: YTN; PAM sequence: TTA
  source 1..20: mol_type = other DNA
taggcacgaaccacaatgcc

SEQ ID NO: 31807 - DNA, 20 bp, synthetic construct
  misc_feature 1..20: note = Description of Artificial Sequence: Synthetic oligonucleotide
  misc_feature 1..20: note = Target: FXN; (+) strand; PAM type: YTN; PAM sequence: CTC
  source 1..20: mol_type = other DNA
atgttttttatttttcaagt

SEQ ID NO: 31808 - DNA, 20 bp, synthetic construct
  misc_feature 1..20: note = Description of Artificial Sequence: Synthetic oligonucleotide
  misc_feature 1..20: note = Target: FXN; (+) strand; PAM type: YTN; PAM sequence: TTT
  source 1..20: mol_type = other DNA
tttatttttcaagttgaaat

SEQ ID NO: 31809 - DNA, 20 bp, synthetic construct
  misc_feature 1..20: note = Description of Artificial Sequence: Synthetic oligonucleotide
  misc_feature 1..20: note = Target: FXN; (+) strand; PAM type: YTN; PAM sequence: TTT
  source 1..20: mol_type = other DNA
ttatttttcaagttgaaatg

SEQ ID NO: 31810 - DNA, 20 bp, synthetic construct
  misc_feature 1..20: note = Description of Artificial Sequence: Synthetic oligonucleotide
  misc_feature 1..20: note = Target: FXN; (+) strand; PAM type: YTN; PAM sequence: TTT
  source 1..20: mol_type = other DNA
tatttttcaagttgaaatga

SEQ ID NO: 31811 - DNA, 20 bp, synthetic construct
  misc_feature 1..20: note = Description of Artificial Sequence: Synthetic oligonucleotide
  misc_feature 1..20: note = Target: FXN; (+) strand; PAM type: YTN; PAM sequence: TTT
  source 1..20: mol_type = other DNA
atttttcaagttgaaatgag

SEQ ID NO: 31812 - DNA, 20 bp, synthetic construct
  misc_feature 1..20: note = Description of Artificial Sequence: Synthetic oligonucleotide
  misc_feature 1..20: note = Target: FXN; (+) strand; PAM type: YTN; PAM sequence: TTA
  source 1..20: mol_type = other DNA
tttttcaagttgaaatgagg

SEQ ID NO: 31813 - DNA, 20 bp, synthetic construct
  misc_feature 1..20: note = Description of Artificial Sequence: Synthetic oligonucleotide
  misc_feature 1..20: note = Target: FXN; (+) strand; PAM type: YTN; PAM sequence: TTT
  source 1..20: mol_type = other DNA
ttcaagttgaaatgaggtct

SEQ ID NO: 31814 - DNA, 20 bp, synthetic construct
  misc_feature 1..20: note = Description of Artificial Sequence: Synthetic oligonucleotide
  misc_feature 1..20: note = Target: FXN; (+) strand; PAM type: YTN; PAM sequence: TTT
  source 1..20: mol_type = other DNA
tcaagttgaaatgaggtctc

SEQ ID NO: 31815 - DNA, 20 bp, synthetic construct
  misc_feature 1..20: note = Description of Artificial Sequence: Synthetic oligonucleotide
  misc_feature 1..20: note = Target: FXN; (+) strand; PAM type: YTN; PAM sequence: TTT
  source 1..20: mol_type = other DNA
caagttgaaatgaggtctct

SEQ ID NO: 31816 - DNA, 20 bp, synthetic construct
  misc_feature 1..20: note = Description of Artificial Sequence: Synthetic oligonucleotide
  misc_feature 1..20: note = Target: FXN; (+) strand; PAM type: YTN; PAM sequence: TTC
  source 1..20: mol_type = other DNA
aagttgaaatgaggtctctc

SEQ ID NO: 31817 - DNA, 20 bp, synthetic construct
  misc_feature 1..20: note = Description of Artificial Sequence: Synthetic oligonucleotide
  misc_feature 1..20: note = Target: FXN; (+) strand; PAM type: YTN; PAM sequence: TTG
  source 1..20: mol_type = other DNA
aaatgaggtctctctatgtt

SEQ ID NO: 31818 - DNA, 20 bp, synthetic construct
  misc_feature 1..20: note = Description of Artificial Sequence: Synthetic oligonucleotide
  misc_feature 1..20: note = Target: FXN; (+) strand; PAM type: YTN; PAM sequence: CTC
  source 1..20: mol_type = other DNA
tctatgttgcccaggttggt

SEQ ID NO: 31819 - DNA, 20 bp, synthetic construct
  misc_feature 1..20: note = Description of Artificial Sequence: Synthetic oligonucleotide
  misc_feature 1..20: note = Target: FXN; (+) strand; PAM type: YTN; PAM sequence: CTC
  source 1..20: mol_type = other DNA
tatgttgcccaggttggtct

SEQ ID NO: 31820 - DNA, 20 bp, synthetic construct
  misc_feature 1..20: note = Description of Artificial Sequence: Synthetic oligonucleotide
  misc_feature 1..20: note = Target: FXN; (+) strand; PAM type: YTN; PAM sequence: CTA
  source 1..20: mol_type = other DNA
tgttgcccaggttggtctca

SEQ ID NO: 31821 - DNA, 20 bp, synthetic construct
  misc_feature 1..20: note = Description of Artificial Sequence: Synthetic oligonucleotide
  misc_feature 1..20: note = Target: FXN; (+) strand; PAM type: YTN; PAM sequence: TTG
  source 1..20: mol_type = other DNA
cccaggttggtctcaaactc

SEQ ID NO: 31822 - DNA, 20 bp, synthetic construct
  misc_feature 1..20: note = Description of Artificial Sequence: Synthetic oligonucleotide
  misc_feature 1..20: note = Target: FXN; (+) strand; PAM type: YTN; PAM sequence: TTG
  source 1..20: mol_type = other DNA
gtctcaaactcttgagctca

SEQ ID NO: 31823 - DNA, 20 bp, synthetic construct
  misc_feature 1..20: note = Description of Artificial Sequence: Synthetic oligonucleotide
  misc_feature 1..20: note = Target: FXN; (+) strand; PAM type: YTN; PAM sequence: CTC
  source 1..20: mol_type = other DNA
aaactcttgagctcaagtaa

SEQ ID NO: 31824 - DNA, 20 bp, synthetic construct
  misc_feature 1..20: note = Description of Artificial Sequence: Synthetic oligonucleotide
  misc_feature 1..20: note = Target: FXN; (+) strand; PAM type: YTN; PAM sequence: CTC
  source 1..20: mol_type = other DNA
ttgagctcaagtaatcctcc

SEQ ID NO: 31825 - DNA, 20 bp, synthetic construct
  misc_feature 1..20: note = Description of Artificial Sequence: Synthetic oligonucleotide
  misc_feature 1..20: note = Target: FXN; (+) strand; PAM type: YTN; PAM sequence: CTT
  source 1..20: mol_type = other DNA
gagctcaagtaatcctccca

SEQ ID NO: 31826 - DNA, 20 bp, synthetic construct
  misc_feature 1..20: note = Description of Artificial Sequence: Synthetic oligonucleotide
  misc_feature 1..20: note = Target: FXN; (+) strand; PAM type: YTN; PAM sequence: TTG
  source 1..20: mol_type = other DNA
agctcaagtaatcctcccac

SEQ ID NO: 31827 - DNA, 20 bp, synthetic construct
  misc_feature 1..20: note = Description of Artificial Sequence: Synthetic oligonucleotide
  misc_feature 1..20: note = Target: FXN; (+) strand; PAM type: YTN; PAM sequence: CTC
  source 1..20: mol_type = other DNA
aagtaatcctcccaccttgg

SEQ ID NO: 31828 - DNA, 20 bp, synthetic construct
  misc_feature 1..20: note = Description of Artificial Sequence: Synthetic oligonucleotide
  misc_feature 1..20: note = Target: FXN; (+) strand; PAM type: YTN; PAM sequence: CTC
  source 1..20: mol_type = other DNA
ccaccttggcctcccaaagt

SEQ ID NO: 31829 - DNA, 20 bp, synthetic construct
  misc_feature 1..20: note = Description of Artificial Sequence: Synthetic oligonucleotide
  misc_feature 1..20: note = Target: FXN; (+) strand; PAM type: YTN; PAM sequence: CTT
  source 1..20: mol_type = other DNA
ggcctcccaaagtgcgggga

SEQ ID NO: 31830 - DNA, 20 bp, synthetic construct
  misc_feature 1..20: note = Description of Artificial Sequence: Synthetic oligonucleotide
  misc_feature 1..20: note = Target: FXN; (+) strand; PAM type: YTN; PAM sequence: TTG
  source 1..20: mol_type = other DNA
gcctcccaaagtgcggggat

SEQ ID NO: 31831 - DNA, 20 bp, synthetic construct
  misc_feature 1..20: note = Description of Artificial Sequence: Synthetic oligonucleotide
  misc_feature 1..20: note = Target: FXN; (+) strand; PAM type: YTN; PAM sequence: CTC
  source 1..20: mol_type = other DNA
ccaaagtgcggggattacag

SEQ ID NO: 31832 - DNA, 20 bp, synthetic construct
  misc_feature 1..20: note = Description of Artificial Sequence: Synthetic oligonucleotide
  misc_feature 1..20: note = Target: FXN; (+) strand; PAM type: YTN; PAM sequence: TTA
  source 1..20: mol_type = other DNA
caggtgtgagctaccatgcc

SEQ ID NO: 31833 - DNA, 20 bp, synthetic construct
  misc_feature 1..20: note = Description of Artificial Sequence: Synthetic oligonucleotide
  misc_feature 1..20: note = Target: FXN; (+) strand; PAM type: YTN; PAM sequence: CTA
  source 1..20: mol_type = other DNA
ccatgcccagccaagatcag

SEQ ID NO: 31834 - DNA, 20 bp, synthetic construct
  misc_feature 1..20: note = Description of Artificial Sequence: Synthetic oligonucleotide
  misc_feature 1..20: note = Target: FXN; (+) strand; PAM type: YTN; PAM sequence: TTA
  source 1..20: mol_type = other DNA
atgaatcaactatatatatt

SEQ ID NO: 31835 - DNA, 20 bp, synthetic construct
  misc_feature 1..20: note = Description of Artificial Sequence: Synthetic oligonucleotide
  misc_feature 1..20: note = Target: FXN; (+) strand; PAM type: YTN; PAM sequence: CTA
  source 1..20: mol_type = other DNA
tatatattacataaggtgtc

SEQ ID NO: 31836 - DNA, 20 bp, synthetic construct
  misc_feature 1..20: note = Description of Artificial Sequence: Synthetic oligonucleotide
  misc_feature 1..20: note = Target: FXN; (+) strand; PAM type: YTN; PAM sequence: TTA
  source 1..20: mol_type = other DNA
cataaggtgtctttaaacag

SEQ ID NO: 31837 - DNA, 20 bp, synthetic construct
  misc_feature 1..20: note = Description of Artificial Sequence: Synthetic oligonucleotide
  misc_feature 1..20: note = Target: FXN; (+) strand; PAM type: YTN; PAM sequence: CTT
  source 1..20: mol_type = other DNA
taaacagaaataaggttata

SEQ ID NO: 31838 - DNA, 20 bp, synthetic construct
  misc_feature 1..20: note = Description of Artificial Sequence: Synthetic oligonucleotide
  misc_feature 1..20: note = Target: FXN; (+) strand; PAM type: YTN; PAM sequence: TTT
  source 1..20: mol_type = other DNA
aaacagaaataaggttatat

SEQ ID NO: 31839 - DNA, 20 bp, synthetic construct
  misc_feature 1..20: note = Description of Artificial Sequence: Synthetic oligonucleotide
  misc_feature 1..20: note = Target: FXN; (+) strand; PAM type: YTN; PAM sequence: TTA
  source 1..20: mol_type = other DNA
aacagaaataaggttatata

SEQ ID NO: 31840 - DNA, 20 bp, synthetic construct
  misc_feature 1..20: note = Description of Artificial Sequence: Synthetic oligonucleotide
  misc_feature 1..20: note = Target: FXN; (+) strand; PAM type: YTN; PAM sequence: TTA
  source 1..20: mol_type = other DNA
tatattgatcgattggtaac

SEQ ID NO: 31841 - DNA, 20 bp, synthetic construct
  misc_feature 1..20: note = Description of Artificial Sequence: Synthetic oligonucleotide
  misc_feature 1..20: note = Target: FXN; (+) strand; PAM type: YTN; PAM sequence: TTG
  source 1..20: mol_type = other DNA
atcgattggtaacaatgttg

SEQ ID NO: 31842 - DNA, 20 bp, synthetic construct
  misc_feature 1..20: note = Description of Artificial Sequence: Synthetic oligonucleotide
  misc_feature 1..20: note = Target: FXN; (+) strand; PAM type: YTN; PAM sequence: TTG
  source 1..20: mol_type = other DNA
gtaacaatgttgtgaccagc

SEQ ID NO: 31843 - DNA, 20 bp, synthetic construct
  misc_feature 1..20: note = Description of Artificial Sequence: Synthetic oligonucleotide
  misc_feature 1..20: note = Target: FXN; (+) strand; PAM type: YTN; PAM sequence: TTG
  source 1..20: mol_type = other DNA
tgaccagcagcttacagggt

SEQ ID NO: 31844 - DNA, 20 bp, synthetic construct
  misc_feature 1..20: note = Description of Artificial Sequence: Synthetic oligonucleotide
  misc_feature 1..20: note = Target: FXN; (+) strand; PAM type: YTN; PAM sequence: CTT
  source 1..20: mol_type = other DNA
acagggtacctagccttgta

SEQ ID NO: 31845 - DNA, 20 bp, synthetic construct
  misc_feature 1..20: note = Description of Artificial Sequence: Synthetic oligonucleotide
  misc_feature 1..20: note = Target: FXN; (+) strand; PAM type: YTN; PAM sequence: TTA
  source 1..20: mol_type = other DNA
cagggtacctagccttgtat

SEQ ID NO: 31846 - DNA, 20 bp, synthetic construct
  misc_feature 1..20: note = Description of Artificial Sequence: Synthetic oligonucleotide
  misc_feature 1..20: note = Target: FXN; (+) strand; PAM type: YTN; PAM sequence: CTA
  source 1..20: mol_type = other DNA
gccttgtatttctcctataa

SEQ ID NO: 31847 - DNA, 20 bp, synthetic construct
  misc_feature 1..20: note = Description of Artificial Sequence: Synthetic oligonucleotide
  misc_feature 1..20: note = Target: FXN; (+) strand; PAM type: YTN; PAM sequence: CTT
  source 1..20: mol_type = other DNA
gtatttctcctataaataat

SEQ ID NO: 31848 - DNA, 20 bp, synthetic construct
  misc_feature 1..20: note = Description of Artificial Sequence: Synthetic oligonucleotide
  misc_feature 1..20: note = Target: FXN; (+) strand; PAM type: YTN; PAM sequence: TTG
  source 1..20: mol_type = other DNA
tatttctcctataaataatt

SEQ ID NO: 31849 - DNA, 20 bp, synthetic construct
  misc_feature 1..20: note = Description of Artificial Sequence: Synthetic oligonucleotide
  misc_feature 1..20: note = Target: FXN; (+) strand; PAM type: YTN; PAM sequence: TTT
  source 1..20: mol_type = other DNA
ctcctataaataatttgctc

SEQ ID NO: 31850 - DNA, 20 bp, synthetic construct
  misc_feature 1..20: note = Description of Artificial Sequence: Synthetic oligonucleotide
  misc_feature 1..20: note = Target: FXN; (+) strand; PAM type: YTN; PAM sequence: TTC
  source 1..20: mol_type = other DNA
tcctataaataatttgctcg

SEQ ID NO: 31851 - DNA, 20 bp, synthetic construct
  misc_feature 1..20: note = Description of Artificial Sequence: Synthetic oligonucleotide
  misc_feature 1..20: note = Target: FXN; (+) strand; PAM type: YTN; PAM sequence: CTC
  source 1..20: mol_type = other DNA
ctataaataatttgctcgtt

SEQ ID NO: 31852 - DNA, 20 bp, synthetic construct
  misc_feature 1..20: note = Description of Artificial Sequence: Synthetic oligonucleotide
  misc_feature 1..20: note = Target: FXN; (+) strand; PAM type: YTN; PAM sequence: CTA
  source 1..20: mol_type = other DNA
taaataatttgctcgttgag

SEQ ID NO: 31853 - DNA, 20 bp, synthetic construct
  misc_feature 1..20: note = Description of Artificial Sequence: Synthetic oligonucleotide
  misc_feature 1..20: note = Target: FXN; (+) strand; PAM type: YTN; PAM sequence: TTT
  source 1..20: mol_type = other DNA
gctcgttgagtgtttgtggc

SEQ ID NO: 31854 - DNA, 20 bp, synthetic construct
  misc_feature 1..20: note = Description of Artificial Sequence: Synthetic oligonucleotide
  misc_feature 1..20: note = Target: FXN; (+) strand; PAM type: YTN; PAM sequence: TTG
  source 1..20: mol_type = other DNA
ctcgttgagtgtttgtggca

SEQ ID NO: 31855 - DNA, 20 bp, synthetic construct
  misc_feature 1..20: note = Description of Artificial Sequence: Synthetic oligonucleotide
  misc_feature 1..20: note = Target: FXN; (+) strand; PAM type: YTN; PAM sequence: CTC
  source 1..20: mol_type = other DNA
gttgagtgtttgtggcaact

SEQ ID NO: 31856 - DNA, 20 bp, synthetic construct
  misc_feature 1..20: note = Description of Artificial Sequence: Synthetic oligonucleotide
  misc_feature 1..20: note = Target: FXN; (+) strand; PAM type: YTN; PAM sequence: TTG
  source 1..20: mol_type = other DNA
agtgtttgtggcaactttgt

SEQ ID NO: 31857 - DNA, 20 bp, synthetic construct
  misc_feature 1..20: note = Description of Artificial Sequence: Synthetic oligonucleotide
  misc_feature 1..20: note = Target: FXN; (+) strand; PAM type: YTN; PAM sequence: TTT
  source 1..20: mol_type = other DNA
gtggcaactttgtagcacat

SEQ ID NO: 31858 - DNA, 20 bp, synthetic construct
  misc_feature 1..20: note = Description of Artificial Sequence: Synthetic oligonucleotide
  misc_feature 1..20: note = Target: FXN; (+) strand; PAM type: YTN; PAM sequence: TTG
  source 1..20: mol_type = other DNA
tggcaactttgtagcacata

SEQ ID NO: 31859 - DNA, 20 bp, synthetic construct
  misc_feature 1..20: note = Description of Artificial Sequence: Synthetic oligonucleotide
  misc_feature 1..20: note = Target: FXN; (+) strand; PAM type: YTN; PAM sequence: CTT
  source 1..20: mol_type = other DNA
tgtagcacataactaccaag

SEQ ID NO: 31860 - DNA, 20 bp, synthetic construct
  misc_feature 1..20: note = Description of Artificial Sequence: Synthetic oligonucleotide
  misc_feature 1..20: note = Target: FXN; (+) strand; PAM type: YTN; PAM sequence: TTT
  source 1..20: mol_type = other DNA
gtagcacataactaccaaga

SEQ ID NO: 31861 - DNA, 20 bp, synthetic construct
  misc_feature 1..20: note = Description of Artificial Sequence: Synthetic oligonucleotide
  misc_feature 1..20: note = Target: FXN; (+) strand; PAM type: YTN; PAM sequence: TTG
  source 1..20: mol_type = other DNA
tagcacataactaccaagaa

SEQ ID NO: 31862 - DNA, 20 bp, synthetic construct
  misc_feature 1..20: note = Description of Artificial Sequence: Synthetic oligonucleotide
  misc_feature 1..20: note = Target: FXN; (+) strand; PAM type: YTN; PAM sequence: CTA
  source 1..20: mol_type = other DNA
ccaagaataaggactgtaat

SEQ ID NO: 31863 - DNA, 20 bp, synthetic construct
  misc_feature 1..20: note = Description of Artificial Sequence: Synthetic oligonucleotide
  misc_feature 1..20: note = Target: FXN; (+) strand; PAM type: YTN; PAM sequence: CTG
  source 1..20: mol_type = other DNA
taataagagtacgtccctca

SEQ ID NO: 31864 - DNA, 20 bp, synthetic construct
  misc_feature 1..20: note = Description of Artificial Sequence: Synthetic oligonucleotide
  misc_feature 1..20: note = Target: FXN; (+) strand; PAM type: YTN; PAM sequence: CTC
  source 1..20: mol_type = other DNA
acaggattgtaatgaagact

SEQ ID NO: 31865 - DNA, 20 bp, synthetic construct
  misc_feature 1..20: note = Description of Artificial Sequence: Synthetic oligonucleotide
  misc_feature 1..20: note = Target: FXN; (+) strand; PAM type: YTN; PAM sequence: TTG
  source 1..20: mol_type = other DNA
taatgaagactgagtccatt

SEQ ID NO: 31866 - DNA, 20 bp, synthetic construct
  misc_feature 1..20: note = Description of Artificial Sequence: Synthetic oligonucleotide
  misc_feature 1..20: note = Target: FXN; (+) strand; PAM type: YTN; PAM sequence: CTG
  source 1..20: mol_type = other DNA
agtccatttacataaaggct

SEQ ID NO: 31867 - DNA, 20 bp, synthetic construct
  misc_feature 1..20: note = Description of Artificial Sequence: Synthetic oligonucleotide
  misc_feature 1..20: note = Target: FXN; (+) strand; PAM type: YTN; PAM sequence: TTT
  source 1..20: mol_type = other DNA
acataaaggctgagagcagt

SEQ ID NO: 31868 - DNA, 20 bp, synthetic construct
  misc_feature 1..20: note = Description of Artificial Sequence: Synthetic oligonucleotide
  misc_feature 1..20: note = Target: FXN; (+) strand; PAM type: YTN; PAM sequence: TTA
  source 1..20: mol_type = other DNA
cataaaggctgagagcagtg

SEQ ID NO: 31869 - DNA, 20 bp, synthetic construct
  misc_feature 1..20: note = Description of Artificial Sequence: Synthetic oligonucleotide
  misc_feature 1..20: note = Target: FXN; (+) strand; PAM type: YTN; PAM sequence: CTG
  source 1..20: mol_type = other DNA
agagcagtgtcaagcagatg

SEQ ID NO: 31870 - DNA, 20 bp, synthetic construct
  misc_feature 1..20: note = Description of Artificial Sequence: Synthetic oligonucleotide
  misc_feature 1..20: note = Target: FXN; (+) strand; PAM type: YTN; PAM sequence: CTG
  source 1..20: mol_type = other DNA
tagaatgtgcgatagctcta

SEQ ID NO: 31871 - DNA, 20 bp, synthetic construct
  misc_feature 1..20: note = Description of Artificial Sequence: Synthetic oligonucleotide
  misc_feature 1..20: note = Target: FXN; (+) strand; PAM type: YTN; PAM sequence: CTC
  source 1..20: mol_type = other DNA
taacagtggttatcatggct

SEQ ID NO: 31872 - DNA, 20 bp, synthetic construct
  misc_feature 1..20: note = Description of Artificial Sequence: Synthetic oligonucleotide
  misc_feature 1..20: note = Target: FXN; (+) strand; PAM type: YTN; PAM sequence: CTA
  source 1..20: mol_type = other DNA
acagtggttatcatggctgc

SEQ ID NO: 31873 - DNA, 20 bp, synthetic construct
  misc_feature 1..20: note = Description of Artificial Sequence: Synthetic oligonucleotide
  misc_feature 1..20: note = Target: FXN; (+) strand; PAM type: YTN; PAM sequence: TTA
  source 1..20: mol_type = other DNA
tcatggctgccctctcactt

SEQ ID NO: 31874 - DNA, 20 bp, synthetic construct
  misc_feature 1..20: note = Description of Artificial Sequence: Synthetic oligonucleotide
  misc_feature 1..20: note = Target: FXN; (+) strand; PAM type: YTN; PAM sequence: CTG
  source 1..20: mol_type = other DNA
ccctctcacttcttcagaga

SEQ ID NO: 31875 - DNA, 20 bp, synthetic construct
  misc_feature 1..20: note = Description of Artificial Sequence: Synthetic oligonucleotide
  misc_feature 1..20: note = Target: FXN; (+) strand; PAM type: YTN; PAM sequence: CTC
  source 1..20: mol_type = other DNA
tcacttcttcagagacatgt

SEQ ID NO: 31876 - DNA, 20 bp, synthetic construct
  misc_feature 1..20: note = Description of Artificial Sequence: Synthetic oligonucleotide
  misc_feature 1..20: note = Target: FXN; (+) strand; PAM type: YTN; PAM sequence: CTC
  source 1..20: mol_type = other DNA
acttcttcagagacatgtgt

SEQ ID NO: 31877 - DNA, 20 bp, synthetic construct
  misc_feature 1..20: note = Description of Artificial Sequence: Synthetic oligonucleotide
  misc_feature 1..20: note = Target: FXN; (+) strand; PAM type: YTN; PAM sequence: CTT
  source 1..20: mol_type = other DNA
cttcagagacatgtgtttct

SEQ ID NO: 31878 - DNA, 20 bp, synthetic construct
  misc_feature 1..20: note = Description of Artificial Sequence: Synthetic oligonucleotide
  misc_feature 1..20: note = Target: FXN; (+) strand; PAM type: YTN; PAM sequence: TTC
  source 1..20: mol_type = other DNA
ttcagagacatgtgtttcta

SEQ ID NO: 31879 - DNA, 20 bp, synthetic construct
  misc_feature 1..20: note = Description of Artificial Sequence: Synthetic oligonucleotide
  misc_feature 1..20: note = Target: FXN; (+) strand; PAM type: YTN; PAM sequence: CTT
  source 1..20: mol_type = other DNA
cagagacatgtgtttctaag

SEQ ID NO: 31880 - DNA, 20 bp, synthetic construct
  misc_feature 1..20: note = Description of Artificial Sequence: Synthetic oligonucleotide
  misc_feature 1..20: note = Target: FXN; (+) strand; PAM type: YTN; PAM sequence: TTC
  source 1..20: mol_type = other DNA
agagacatgtgtttctaagg

SEQ ID NO: 31881 - DNA, 20 bp, synthetic construct
  misc_feature 1..20: note = Description of Artificial Sequence: Synthetic oligonucleotide
  misc_feature 1..20: note = Target: FXN; (+) strand; PAM type: YTN; PAM sequence: TTT
  source 1..20: mol_type = other DNA
ctaaggtctgcactctgccc

SEQ ID NO: 31882 - DNA, 20 bp, synthetic construct
  misc_feature 1..20: note = Description of Artificial Sequence: Synthetic oligonucleotide
  misc_feature 1..20: note = Target: FXN; (+) strand; PAM type: YTN; PAM sequence: TTC
  source 1..20: mol_type = other DNA
taaggtctgcactctgcccc

SEQ ID NO: 31883 - DNA, 20 bp, synthetic construct
  misc_feature 1..20: note = Description of Artificial Sequence: Synthetic oligonucleotide
  misc_feature 1..20: note = Target: FXN; (+) strand; PAM type: YTN; PAM sequence: CTA
  source 1..20: mol_type = other DNA
aggtctgcactctgccccac

SEQ ID NO: 31884 - DNA, 20 bp, synthetic construct
  misc_feature 1..20: note = Description of Artificial Sequence: Synthetic oligonucleotide
  misc_feature 1..20: note = Target: FXN; (+) strand; PAM type: YTN; PAM sequence: CTG
  source 1..20: mol_type = other DNA
cactctgccccaccctcccc

SEQ ID NO: 31885 - DNA, 20 bp, synthetic construct
  misc_feature 1..20: note = Description of Artificial Sequence: Synthetic oligonucleotide
  misc_feature 1..20: note = Target: FXN; (+) strand; PAM type: YTN; PAM sequence: CTC
  source 1..20: mol_type = other DNA
tgccccaccctccccatcca

SEQ ID NO: 31886 - DNA, 20 bp, synthetic construct
  misc_feature 1..20: note = Description of Artificial Sequence: Synthetic oligonucleotide
  misc_feature 1..20: note = Target: FXN; (+) strand; PAM type: YTN; PAM sequence: CTG
  source 1..20: mol_type = other DNA
ccccaccctccccatccact

SEQ ID NO: 31887 - DNA, 20 bp, synthetic construct
  misc_feature 1..20: note = Description of Artificial Sequence: Synthetic oligonucleotide
  misc_feature 1..20: note = Target: FXN; (+) strand; PAM type: YTN; PAM sequence: CTC
  source 1..20: mol_type = other DNA
cccatccactgtcccccagc

SEQ ID NO: 31888 - DNA, 20 bp, synthetic construct
  misc_feature 1..20: note = Description of Artificial Sequence: Synthetic oligonucleotide
  misc_feature 1..20: note = Target: FXN; (+) strand; PAM type: YTN; PAM sequence: CTG
  source 1..20: mol_type = other DNA
tcccccagcccgtttcctcc

SEQ ID NO: 31889 - DNA, 20 bp, synthetic construct
  misc_feature 1..20: note = Description of Artificial Sequence: Synthetic oligonucleotide
  misc_feature 1..20: note = Target: FXN; (+) strand; PAM type: YTN; PAM sequence: TTT
  source 1..20: mol_type = other DNA
cctcctccacttacttccca

SEQ ID NO: 31890 - DNA, 20 bp, synthetic construct
  misc_feature 1..20: note = Description of Artificial Sequence: Synthetic oligonucleotide
  misc_feature 1..20: note = Target: FXN; (+) strand; PAM type: YTN; PAM sequence: TTC
  source 1..20: mol_type = other DNA
ctcctccacttacttcccag

SEQ ID NO: 31891 - DNA, 20 bp, synthetic construct
  misc_feature 1..20: note = Description of Artificial Sequence: Synthetic oligonucleotide
  misc_feature 1..20: note = Target: FXN; (+) strand; PAM type: YTN; PAM sequence: CTC
  source 1..20: mol_type = other DNA
ctccacttacttcccagccc

SEQ ID NO: 31892 - DNA, 20 bp, synthetic construct
  misc_feature 1..20: note = Description of Artificial Sequence: Synthetic oligonucleotide
  misc_feature 1..20: note = Target: FXN; (+) strand; PAM type: YTN; PAM sequence: CTC
  source 1..20: mol_type = other DNA
cacttacttcccagccctgt

SEQ ID NO: 31893 - DNA, 20 bp, synthetic construct
  misc_feature 1..20: note = Description of Artificial Sequence: Synthetic oligonucleotide
  misc_feature 1..20: note = Target: FXN; (+) strand; PAM type: YTN; PAM sequence: CTT
  source 1..20: mol_type = other DNA
acttcccagccctgtgcctt

SEQ ID NO: 31894 - DNA, 20 bp, synthetic construct
  misc_feature 1..20: note = Description of Artificial Sequence: Synthetic oligonucleotide
  misc_feature 1..20: note = Target: FXN; (+) strand; PAM type: YTN; PAM sequence: TTA
  source 1..20: mol_type = other DNA
cttcccagccctgtgccttc

SEQ ID NO: 31895 - DNA, 20 bp, synthetic construct
  misc_feature 1..20: note = Description of Artificial Sequence: Synthetic oligonucleotide
  misc_feature 1..20: note = Target: FXN; (+) strand; PAM type: YTN; PAM sequence: CTT
  source 1..20: mol_type = other DNA
cccagccctgtgccttctgc

SEQ ID NO: 31896 - DNA, 20 bp, synthetic construct
  misc_feature 1..20: note = Description of Artificial Sequence: Synthetic oligonucleotide
  misc_feature 1..20: note = Target: FXN; (+) strand; PAM type: YTN; PAM sequence: TTC
  source 1..20: mol_type = other DNA
ccagccctgtgccttctgcc

SEQ ID NO: 31897 - DNA, 20 bp, synthetic construct
  misc_feature 1..20: note = Description of Artificial Sequence: Synthetic oligonucleotide
  misc_feature 1..20: note = Target: FXN; (+) strand; PAM type: YTN; PAM sequence: CTG
  source 1..20: mol_type = other DNA
tgccttctgccttctctttt

SEQ ID NO: 31898 - DNA, 20 bp, synthetic construct
  misc_feature 1..20: note = Description of Artificial Sequence: Synthetic oligonucleotide
  misc_feature 1..20: note = Target: FXN; (+) strand; PAM type: YTN; PAM sequence: CTT
  source 1..20: mol_type = other DNA
ctgccttctcttttctgagt

SEQ ID NO: 31899 - DNA, 20 bp, synthetic construct
  misc_feature 1..20: note = Description of Artificial Sequence: Synthetic oligonucleotide
  misc_feature 1..20: note = Target: FXN; (+) strand; PAM type: YTN; PAM sequence: TTC
  source 1..20: mol_type = other DNA
tgccttctcttttctgagtt

SEQ ID NO: 31900 - DNA, 20 bp, synthetic construct
  misc_feature 1..20: note = Description of Artificial Sequence: Synthetic oligonucleotide
  misc_feature 1..20: note = Target: FXN; (+) strand; PAM type: YTN; PAM sequence: CTG
  source 1..20: mol_type = other DNA
ccttctcttttctgagtttg

SEQ ID NO: 31901 - DNA, 20 bp, synthetic construct
  misc_feature 1..20: note = Description of Artificial Sequence: Synthetic oligonucleotide
  misc_feature 1..20: note = Target: FXN; (+) strand; PAM type: YTN; PAM sequence: CTT
  source 1..20: mol_type = other DNA
ctcttttctgagtttgctaa

SEQ ID NO: 31902 - DNA, 20 bp, synthetic construct
  misc_feature 1..20: note = Description of Artificial Sequence: Synthetic oligonucleotide
  misc_feature 1..20: note = Target: FXN; (+) strand; PAM type: YTN; PAM sequence: TTC
  source 1..20: mol_type = other DNA
tcttttctgagtttgctaag

SEQ ID NO: 31903 - DNA, 20 bp, synthetic construct
  misc_feature 1..20: note = Description of Artificial Sequence: Synthetic oligonucleotide
  misc_feature 1..20: note = Target: FXN; (+) strand; PAM type: YTN; PAM sequence: CTC
  source 1..20: mol_type = other DNA
ttttctgagtttgctaaggg

SEQ ID NO: 31904 - DNA, 20 bp, synthetic construct
  misc_feature 1..20: note = Description of Artificial Sequence: Synthetic oligonucleotide
  misc_feature 1..20: note = Target: FXN; (+) strand; PAM type: YTN; PAM sequence: CTT
  source 1..20: mol_type = other DNA
ttctgagtttgctaagggca

SEQ ID NO: 31905 - DNA, 20 bp, synthetic construct
  misc_feature 1..20: note = Description of Artificial Sequence: Synthetic oligonucleotide
  misc_feature 1..20: note = Target: FXN; (+) strand; PAM type: YTN; PAM sequence: TTT
  source 1..20: mol_type = other DNA
tctgagtttgctaagggcac

SEQ ID NO: 31906 - DNA, 20 bp, synthetic construct
  misc_feature 1..20: note = Description of Artificial Sequence: Synthetic oligonucleotide
  misc_feature 1..20: note = Target: FXN; (+) strand; PAM type: YTN; PAM sequence: TTT
  source 1..20: mol_type = other DNA
ctgagtttgctaagggcact

SEQ ID NO: 31907 - DNA, 20 bp, synthetic construct
  misc_feature 1..20: note = Description of Artificial Sequence: Synthetic oligonucleotide
  misc_feature 1..20: note = Target: FXN; (+) strand; PAM type: YTN; PAM sequence: TTC
  source 1..20: mol_type = other DNA
tgagtttgctaagggcactg

SEQ ID NO: 31908 - DNA, 20 bp, synthetic construct
  misc_feature 1..20: note = Description of Artificial Sequence: Synthetic oligonucleotide
  misc_feature 1..20: note = Target: FXN; (+) strand; PAM type: YTN; PAM sequence: CTG
  source 1..20: mol_type = other DNA
agtttgctaagggcactgct

SEQ ID NO: 31909 - DNA, 20 bp, synthetic construct
  misc_feature 1..20: note = Description of Artificial Sequence: Synthetic oligonucleotide
  misc_feature 1..20: note = Target: FXN; (+) strand; PAM type: YTN; PAM sequence: TTT
  source 1..20: mol_type = other DNA
gctaagggcactgctggctc

SEQ ID NO: 31910 - DNA, 20 bp, synthetic construct
  misc_feature 1..20: note = Description of Artificial Sequence: Synthetic oligonucleotide
  misc_feature 1..20: note = Target: FXN; (+) strand; PAM type: YTN; PAM sequence: TTG
  source 1..20: mol_type = other DNA
ctaagggcactgctggctca

SEQ ID NO: 31911 - DNA, 20 bp, synthetic construct
  misc_feature 1..20: note = Description of Artificial Sequence: Synthetic oligonucleotide
  misc_feature 1..20: note = Target: FXN; (+) strand; PAM type: YTN; PAM sequence: CTA
  source 1..20: mol_type = other DNA
agggcactgctggctcaaga

SEQ ID NO: 31912 - DNA, 20 bp, synthetic construct
  misc_feature 1..20: note = Description of Artificial Sequence: Synthetic oligonucleotide
  misc_feature 1..20: note = Target: FXN; (+) strand; PAM type: YTN; PAM sequence: CTG
  source 1..20: mol_type = other DNA
ctggctcaagagcagtaact

SEQ ID NO: 31913 - DNA, 20 bp, synthetic construct
  misc_feature 1..20: note = Description of Artificial Sequence: Synthetic oligonucleotide
  misc_feature 1..20: note = Target: FXN; (+) strand; PAM type: YTN; PAM sequence: CTG
  source 1..20: mol_type = other DNA
gctcaagagcagtaactaac

SEQ ID NO: 31914 - DNA, 20 bp, synthetic construct
  misc_feature 1..20: note = Description of Artificial Sequence: Synthetic oligonucleotide
  misc_feature 1..20: note = Target: FXN; (+) strand; PAM type: YTN; PAM sequence: CTC
  source 1..20: mol_type = other DNA
aagagcagtaactaacagtc

SEQ ID NO: 31915 - DNA, 20 bp, synthetic construct
  misc_feature 1..20: note = Description of Artificial Sequence: Synthetic oligonucleotide
  misc_feature 1..20: note = Target: FXN; (+) strand; PAM type: YTN; PAM sequence: CTA
  source 1..20: mol_type = other DNA
acagtctctcgcctcttctc

SEQ ID NO: 31916 - DNA, 20 bp, synthetic construct
  misc_feature 1..20: note = Description of Artificial Sequence: Synthetic oligonucleotide
  misc_feature 1..20: note = Target: FXN; (+) strand; PAM type: YTN; PAM sequence: CTC
  source 1..20: mol_type = other DNA
tcgcctcttctctccatggc

SEQ ID NO: 31917 - DNA, 20 bp, synthetic construct
  misc_feature 1..20: note = Description of Artificial Sequence: Synthetic oligonucleotide
  misc_feature 1..20: note = Target: FXN; (+) strand; PAM type: YTN; PAM sequence: CTC
  source 1..20: mol_type = other DNA
gcctcttctctccatggcaa

SEQ ID NO: 31918 - DNA, 20 bp, synthetic construct
  misc_feature 1..20: note = Description of Artificial Sequence: Synthetic oligonucleotide
  misc_feature 1..20: note = Target: FXN; (+) strand; PAM type: YTN; PAM sequence: CTC
  source 1..20: mol_type = other DNA
ttctctccatggcaaccagt

SEQ ID NO: 31919 - DNA, 20 bp, synthetic construct
  misc_feature 1..20: note = Description of Artificial Sequence: Synthetic oligonucleotide
  misc_feature 1..20: note = Target: FXN; (+) strand; PAM type: YTN; PAM sequence: CTT
  source 1..20: mol_type = other DNA
ctctccatggcaaccagtga

SEQ ID NO: 31920 - DNA, 20 bp, synthetic construct
  misc_feature 1..20: note = Description of Artificial Sequence: Synthetic oligonucleotide
  misc_feature 1..20: note = Target: FXN; (+) strand; PAM type: YTN; PAM sequence: TTC
  source 1..20: mol_type = other DNA
tctccatggcaaccagtgac

SEQ ID NO: 31921 - DNA, 20 bp, synthetic construct
  misc_feature 1..20: note = Description of Artificial Sequence: Synthetic oligonucleotide
  misc_feature 1..20: note = Target: FXN; (+) strand; PAM type: YTN; PAM sequence: CTC
  source 1..20: mol_type = other DNA
tccatggcaaccagtgacct

SEQ ID NO: 31922 - DNA, 20 bp, synthetic construct
  misc_feature 1..20: note = Description of Artificial Sequence: Synthetic oligonucleotide
  misc_feature 1..20: note = Target: FXN; (+) strand; PAM type: YTN; PAM sequence: CTC
  source 1..20: mol_type = other DNA
catggcaaccagtgaccttt

SEQ ID NO: 31923 - DNA, 20 bp, synthetic construct
  misc_feature 1..20: note = Description of Artificial Sequence: Synthetic oligonucleotide
  misc_feature 1..20: note = Target: FXN; (+) strand; PAM type: YTN; PAM sequence: CTT
  source 1..20: mol_type = other DNA
tggagaatgtaaaccttatc

SEQ ID NO: 31924 - DNA, 20 bp, synthetic construct
  misc_feature 1..20: note = Description of Artificial Sequence: Synthetic oligonucleotide
  misc_feature 1..20: note = Target: FXN; (+) strand; PAM type: YTN; PAM sequence: TTT
  source 1..20: mol_type = other DNA
ggagaatgtaaaccttatca

SEQ ID NO: 31925 - DNA, 20 bp, synthetic construct
  misc_feature 1..20: note = Description of Artificial Sequence: Synthetic oligonucleotide
  misc_feature 1..20: note = Target: FXN; (+) strand; PAM type: YTN; PAM sequence: TTG
  source 1..20: mol_type = other DNA
gagaatgtaaaccttatcac

SEQ ID NO: 31926 - DNA, 20 bp, synthetic construct
  misc_feature 1..20: note = Description of Artificial Sequence: Synthetic oligonucleotide
  misc_feature 1..20: note = Target: FXN; (+) strand; PAM type: YTN; PAM sequence: CTT
  source 1..20: mol_type = other DNA
atcaccaatctcttaaagcc

SEQ ID NO: 31927 - DNA, 20 bp, synthetic construct
  misc_feature 1..20: note = Description of Artificial Sequence: Synthetic oligonucleotide
  misc_feature 1..20: note = Target: FXN; (+) strand; PAM type: YTN; PAM sequence: TTA
  source 1..20: mol_type = other DNA
tcaccaatctcttaaagccc

SEQ ID NO: 31928 - DNA, 20 bp, synthetic construct
  misc_feature 1..20: note = Description of Artificial Sequence: Synthetic oligonucleotide
  misc_feature 1..20: note = Target: FXN; (+) strand; PAM type: YTN; PAM sequence: CTC
  source 1..20: mol_type = other DNA
ttaaagcccttcggtgcctt

SEQ ID NO: 31929 - DNA, 20 bp, synthetic construct
  misc_feature 1..20: note = Description of Artificial Sequence: Synthetic oligonucleotide
  misc_feature 1..20: note = Target: FXN; (+) strand; PAM type: YTN; PAM sequence: CTT
  source 1..20: mol_type = other DNA
aaagcccttcggtgccttcc

SEQ ID NO: 31930 - DNA, 20 bp, synthetic construct
  misc_feature 1..20: note = Description of Artificial Sequence: Synthetic oligonucleotide
  misc_feature 1..20: note = Target: FXN; (+) strand; PAM type: YTN; PAM sequence: TTA
  source 1..20: mol_type = other DNA
aagcccttcggtgccttccc

SEQ ID NO: 31931 - DNA, 20 bp, synthetic construct
  misc_feature 1..20: note = Description of Artificial Sequence: Synthetic oligonucleotide
  misc_feature 1..20: note = Target: FXN; (+) strand; PAM type: YTN; PAM sequence: CTT
  source 1..20: mol_type = other DNA
cggtgccttcccaggatgac

SEQ ID NO: 31932 - DNA, 20 bp, synthetic construct
  misc_feature 1..20: note = Description of Artificial Sequence: Synthetic oligonucleotide
  misc_feature 1..20: note = Target: FXN; (+) strand; PAM type: YTN; PAM sequence: TTC
  source 1..20: mol_type = other DNA
ggtgccttcccaggatgacg

SEQ ID NO: 31933 - DNA, 20 bp, synthetic construct
  misc_feature 1..20: note = Description of Artificial Sequence: Synthetic oligonucleotide
  misc_feature 1..20: note = Target: FXN; (+) strand; PAM type: YTN; PAM sequence: CTT
  source 1..20: mol_type = other DNA
cccaggatgacgtccagctg

SEQ ID NO: 31934 - DNA, 20 bp, synthetic construct
  misc_feature 1..20: note = Description of Artificial Sequence: Synthetic oligonucleotide
  misc_feature 1..20: note = Target: FXN; (+) strand; PAM type: YTN; PAM sequence: TTC
  source 1..20: mol_type = other DNA
ccaggatgacgtccagctga

SEQ ID NO: 31935 - DNA, 20 bp, synthetic construct
  misc_feature 1..20: note = Description of Artificial Sequence: Synthetic oligonucleotide
  misc_feature 1..20: note = Target: FXN; (+) strand; PAM type: YTN; PAM sequence: CTG
  source 1..20: mol_type = other DNA
aggtccttggcaagacccag

SEQ ID NO: 31936 - DNA, 20 bp, synthetic construct
  misc_feature 1..20: note = Description of Artificial Sequence: Synthetic oligonucleotide
  misc_feature 1..20: note = Target: FXN; (+) strand; PAM type: YTN; PAM sequence: CTT
  source 1..20: mol_type = other DNA
ggcaagacccagggcgcccc

SEQ ID NO: 31937 - DNA, 20 bp, synthetic construct
  misc_feature 1..20: note = Description of Artificial Sequence: Synthetic oligonucleotide
  misc_feature 1..20: note = Target: FXN; (+) strand; PAM type: YTN; PAM sequence: TTG
  source 1..20: mol_type = other DNA
gcaagacccagggcgccccc

SEQ ID NO: 31938 - DNA, 20 bp, synthetic construct
  misc_feature 1..20: note = Description of Artificial Sequence: Synthetic oligonucleotide
  misc_feature 1..20: note = Target: FXN; (+) strand; PAM type: YTN; PAM sequence: CTC
  source 1..20: mol_type = other DNA
ctcgctccatcacctcccct

SEQ ID NO: 31939 - DNA, 20 bp, synthetic construct
  misc_feature 1..20: note = Description of Artificial Sequence: Synthetic oligonucleotide
  misc_feature 1..20: note = Target: FXN; (+) strand; PAM type: YTN; PAM sequence: CTC
  source 1..20: mol_type = other DNA
gctccatcacctcccctgtc

SEQ ID NO: 31940 - DNA, 20 bp, synthetic construct
  misc_feature 1..20: note = Description of Artificial Sequence: Synthetic oligonucleotide
  misc_feature 1..20: note = Target: FXN; (+) strand; PAM type: YTN; PAM sequence: CTC
  source 1..20: mol_type = other DNA
catcacctcccctgtcacct

SEQ ID NO: 31941 - DNA, 20 bp, synthetic construct
  misc_feature 1..20: note = Description of Artificial Sequence: Synthetic oligonucleotide
  misc_feature 1..20: note = Target: FXN; (+) strand; PAM type: YTN; PAM sequence: CTC
  source 1..20: mol_type = other DNA
ccctgtcacctcccctgcat

SEQ ID NO: 31942 - DNA, 20 bp, synthetic construct
  misc_feature 1..20: note = Description of Artificial Sequence: Synthetic oligonucleotide
  misc_feature 1..20: note = Target: FXN; (+) strand; PAM type: YTN; PAM sequence: CTG
  source 1..20: mol_type = other DNA
tcacctcccctgcatctccc

SEQ ID NO: 31943 - DNA, 20 bp, synthetic construct
  misc_feature 1..20: note = Description of Artificial Sequence: Synthetic oligonucleotide
  misc_feature 1..20: note = Target: FXN; (+) strand; PAM type: YTN; PAM sequence: CTC
  source 1..20: mol_type = other DNA
ccctgcatctccctactcca

SEQ ID NO: 31944 - DNA, 20 bp, synthetic construct
  misc_feature 1..20: note = Description of Artificial Sequence: Synthetic oligonucleotide
  misc_feature 1..20: note = Target: FXN; (+) strand; PAM type: YTN; PAM sequence: CTG
  source 1..20: mol_type = other DNA
catctccctactccagctgc

SEQ ID NO: 31945 - DNA, 20 bp, synthetic construct
  misc_feature 1..20: note = Description of Artificial Sequence: Synthetic oligonucleotide
  misc_feature 1..20: note = Target: FXN; (+) strand; PAM type: YTN; PAM sequence: CTC
  source 1..20: mol_type = other DNA
cctactccagctgcaccact

SEQ ID NO: 31946 - DNA, 20 bp, synthetic construct
  misc_feature 1..20: note = Description of Artificial Sequence: Synthetic oligonucleotide
  misc_feature 1..20: note = Target: FXN; (+) strand; PAM type: YTN; PAM sequence: CTA
  source 1..20: mol_type = other DNA
ctccagctgcaccactcttg

SEQ ID NO: 31947 - DNA, 20 bp, synthetic construct
  misc_feature 1..20: note = Description of Artificial Sequence: Synthetic oligonucleotide
  misc_feature 1..20: note = Target: FXN; (+) strand; PAM type: YTN; PAM sequence: CTC
  source 1..20: mol_type = other DNA
cagctgcaccactcttgtgc

SEQ ID NO: 31948 - DNA, 20 bp, synthetic construct
  misc_feature 1..20: note = Description of Artificial Sequence: Synthetic oligonucleotide
  misc_feature 1..20: note = Target: FXN; (+) strand; PAM type: YTN; PAM sequence: CTG
  source 1..20: mol_type = other DNA
caccactcttgtgccccagt

SEQ ID NO: 31949 - DNA, 20 bp, synthetic construct
  misc_feature 1..20: note = Description of Artificial Sequence: Synthetic oligonucleotide
  misc_feature 1..20: note = Target: FXN; (+) strand; PAM type: YTN; PAM sequence: CTC
  source 1..20: mol_type = other DNA
ttgtgccccagtggctcttg

SEQ ID NO: 31950 - DNA, 20 bp, synthetic construct
  misc_feature 1..20: note = Description of Artificial Sequence: Synthetic oligonucleotide
  misc_feature 1..20: note = Target: FXN; (+) strand; PAM type: YTN; PAM sequence: CTT
  source 1..20: mol_type = other DNA
gtgccccagtggctcttgtc

SEQ ID NO: 31951 - DNA, 20 bp, synthetic construct
  misc_feature 1..20: note = Description of Artificial Sequence: Synthetic oligonucleotide
  misc_feature 1..20: note = Target: FXN; (+) strand; PAM type: YTN; PAM sequence: TTG
  source 1..20: mol_type = other DNA
tgccccagtggctcttgtct

SEQ ID NO: 31952 - DNA, 20 bp, synthetic construct
  misc_feature 1..20: note = Description of Artificial Sequence: Synthetic oligonucleotide
  misc_feature 1..20: note = Target: FXN; (+) strand; PAM type: YTN; PAM sequence: CTC
  source 1..20: mol_type = other DNA
ttgtctgattatttccttca

SEQ ID NO: 31953 - DNA, 20 bp, synthetic construct
  misc_feature 1..20: note = Description of Artificial Sequence: Synthetic oligonucleotide
  misc_feature 1..20: note = Target: FXN; (+) strand; PAM type: YTN; PAM sequence: CTT
  source 1..20: mol_type = other DNA
gtctgattatttccttcatc

SEQ ID NO: 31954 - DNA, 20 bp, synthetic construct
  misc_feature 1..20: note = Description of Artificial Sequence: Synthetic oligonucleotide
  misc_feature 1..20: note = Target: FXN; (+) strand; PAM type: YTN; PAM sequence: TTG
  source 1..20: mol_type = other DNA
tctgattatttccttcatct

SEQ ID NO: 31955 - DNA, 20 bp, synthetic construct
  misc_feature 1..20: note = Description of Artificial Sequence: Synthetic oligonucleotide
  misc_feature 1..20: note = Target: FXN; (+) strand; PAM type: YTN; PAM sequence: CTG
  source 1..20: mol_type = other DNA
attatttccttcatctcccc

SEQ ID NO: 31956 - DNA, 20 bp, synthetic construct
  misc_feature 1..20: note = Description of Artificial Sequence: Synthetic oligonucleotide
  misc_feature 1..20: note = Target: FXN; (+) strand; PAM type: YTN; PAM sequence: TTA
  source 1..20: mol_type = other DNA
tttccttcatctccccagct

SEQ ID NO: 31957 - DNA, 20 bp, synthetic construct
  misc_feature 1..20: note = Description of Artificial Sequence: Synthetic oligonucleotide
  misc_feature 1..20: note = Target: FXN; (+) strand; PAM type: YTN; PAM sequence: TTT
  source 1..20: mol_type = other DNA
ccttcatctccccagctggt

SEQ ID NO: 31958 - DNA, 20 bp, synthetic construct
  misc_feature 1..20: note = Description of Artificial Sequence: Synthetic oligonucleotide
  misc_feature 1..20: note = Target: FXN; (+) strand; PAM type: YTN; PAM sequence: TTC
  source 1..20: mol_type = other DNA
cttcatctccccagctggtc

SEQ ID NO: 31959 - DNA, 20 bp, synthetic construct
  misc_feature 1..20: note = Description of Artificial Sequence: Synthetic oligonucleotide
  misc_feature 1..20: note = Target: FXN; (+) strand; PAM type: YTN; PAM sequence: CTT
  source 1..20: mol_type = other DNA
catctccccagctggtcagc

SEQ ID NO: 31960 - DNA, 20 bp, synthetic construct
  misc_feature 1..20: note = Description of Artificial Sequence: Synthetic oligonucleotide
  misc_feature 1..20: note = Target: FXN; (+) strand; PAM type: YTN; PAM sequence: TTC
  source 1..20: mol_type = other DNA
atctccccagctggtcagca

SEQ ID NO: 31961 - DNA, 20 bp, synthetic construct
  misc_feature 1..20: note = Description of Artificial Sequence: Synthetic oligonucleotide
  misc_feature 1..20: note = Target: FXN; (+) strand; PAM type: YTN; PAM sequence: CTC
  source 1..20: mol_type = other DNA
cccagctggtcagcagagct

SEQ ID NO: 31962 - DNA, 20 bp, synthetic construct
  misc_feature 1..20: note = Description of Artificial Sequence: Synthetic oligonucleotide
  misc_feature 1..20: note = Target: FXN; (+) strand; PAM type: YTN; PAM sequence: CTG
  source 1..20: mol_type = other DNA
gtcagcagagctggtggtaa

SEQ ID NO: 31963 - DNA, 20 bp, synthetic construct
  misc_feature 1..20: note = Description of Artificial Sequence: Synthetic oligonucleotide
  misc_feature 1..20: note = Target: FXN; (+) strand; PAM type: YTN; PAM sequence: CTG
  source 1..20: mol_type = other DNA
gtggtaatcaactcagaccc

SEQ ID NO: 31964 - DNA, 20 bp, synthetic construct
  misc_feature 1..20: note = Description of Artificial Sequence: Synthetic oligonucleotide
  misc_feature 1..20: note = Target: FXN; (+) strand; PAM type: YTN; PAM sequence: CTC
  source 1..20: mol_type = other DNA
agaccctgtcacctggatgt

SEQ ID NO: 31965 - DNA, 20 bp, synthetic construct
  misc_feature 1..20: note = Description of Artificial Sequence: Synthetic oligonucleotide
  misc_feature 1..20: note = Target: FXN; (+) strand; PAM type: YTN; PAM sequence: CTG
  source 1..20: mol_type = other DNA
tcacctggatgtccagcagt

SEQ ID NO: 31966 - DNA, 20 bp, synthetic construct
  misc_feature 1..20: note = Description of Artificial Sequence: Synthetic oligonucleotide
  misc_feature 1..20: note = Target: FXN; (+) strand; PAM type: YTN; PAM sequence: CTG
  source 1..20: mol_type = other DNA
gatgtccagcagttagggac

SEQ ID NO: 31967 - DNA, 20 bp, synthetic construct
  misc_feature 1..20: note = Description of Artificial Sequence: Synthetic oligonucleotide
  misc_feature 1..20: note = Target: FXN; (+) strand; PAM type: YTN; PAM sequence: TTA
  source 1..20: mol_type = other DNA
gggactaaaaaaaatcaaca

SEQ ID NO: 31968 - DNA, 20 bp, synthetic construct
  misc_feature 1..20: note = Description of Artificial Sequence: Synthetic oligonucleotide
  misc_feature 1..20: note = Target: FXN; (+) strand; PAM type: YTN; PAM sequence: CTA
  source 1..20: mol_type = other DNA
aaaaaaatcaacaggtcaca

SEQ ID NO: 31969 - DNA, 20 bp, synthetic construct
  misc_feature 1..20: note = Description of Artificial Sequence: Synthetic oligonucleotide
  misc_feature 1..20: note = Target: FXN; (+) strand; PAM type: YTN; PAM sequence: TTC
  source 1..20: mol_type = other DNA
tgtcctgcagatcatgataa

SEQ ID NO: 31970 - DNA, 20 bp, synthetic construct
  misc_feature 1..20: note = Description of Artificial Sequence: Synthetic oligonucleotide
  misc_feature 1..20: note = Target: FXN; (+) strand; PAM type: YTN; PAM sequence: CTG
  source 1..20: mol_type = other DNA
tcctgcagatcatgataata

SEQ ID NO: 31971 - DNA, 20 bp, synthetic construct
  misc_feature 1..20: note = Description of Artificial Sequence: Synthetic oligonucleotide
  misc_feature 1..20: note = Target: FXN; (+) strand; PAM type: YTN; PAM sequence: CTG
  source 1..20: mol_type = other DNA
cagatcatgataataagatc

SEQ ID NO: 31972 - DNA, 20 bp, synthetic construct
  misc_feature 1..20: note = Description of Artificial Sequence: Synthetic oligonucleotide
  misc_feature 1..20: note = Target: FXN; (+) strand; PAM type: YTN; PAM sequence: CTG
  source 1..20: mol_type = other DNA
tcagacagcagtcagcagtc

SEQ ID NO: 31973 - DNA, 20 bp, synthetic construct
  misc_feature 1..20: note = Description of Artificial Sequence: Synthetic oligonucleotide
  misc_feature 1..20: note = Target: FXN; (+) strand; PAM type: YTN; PAM sequence: CTT
  source 1..20: mol_type = other DNA
ctggacttcagcaggattct

SEQ ID NO: 31974 - DNA, 20 bp, synthetic construct
  misc_feature 1..20: note = Description of Artificial Sequence: Synthetic oligonucleotide
  misc_feature 1..20: note = Target: FXN; (+) strand; PAM type: YTN; PAM sequence: TTC
  source 1..20: mol_type = other DNA
tggacttcagcaggattctg

SEQ ID NO: 31975 - DNA, 20 bp, synthetic construct
  misc_feature 1..20: note = Description of Artificial Sequence: Synthetic oligonucleotide
  misc_feature 1..20: note = Target: FXN; (+) strand; PAM type: YTN; PAM sequence: CTG
  source 1..20: mol_type = other DNA
gacttcagcaggattctgcc

SEQ ID NO: 31976 - DNA, 20 bp, synthetic construct
  misc_feature 1..20: note = Description of Artificial Sequence: Synthetic oligonucleotide
  misc_feature 1..20: note = Target: FXN; (+) strand; PAM type: YTN; PAM sequence: CTT
  source 1..20: mol_type = other DNA
cagcaggattctgcctcttg

SEQ ID NO: 31977 - DNA, 20 bp, synthetic construct
  misc_feature 1..20: note = Description of Artificial Sequence: Synthetic oligonucleotide
  misc_feature 1..20: note = Target: FXN; (+) strand; PAM type: YTN; PAM sequence: TTC
  source 1..20: mol_type = other DNA
agcaggattctgcctcttgc

SEQ ID NO: 31978 - DNA, 20 bp, synthetic construct
  misc_feature 1..20: note = Description of Artificial Sequence: Synthetic oligonucleotide
  misc_feature 1..20: note = Target: FXN; (+) strand; PAM type: YTN; PAM sequence: TTC
  source 1..20: mol_type = other DNA
tgcctcttgctatttcctgt

SEQ ID NO: 31979 - DNA, 20 bp, synthetic construct
  misc_feature 1..20: note = Description of Artificial Sequence: Synthetic oligonucleotide
  misc_feature 1..20: note = Target: FXN; (+) strand; PAM type: YTN; PAM sequence: CTG
  source 1..20: mol_type = other DNA
cctcttgctatttcctgttg

SEQ ID NO: 31980 - DNA, 20 bp, synthetic construct
  misc_feature 1..20: note = Description of Artificial Sequence: Synthetic oligonucleotide
  misc_feature 1..20: note = Target: FXN; (+) strand; PAM type: YTN; PAM sequence: CTC
  source 1..20: mol_type = other DNA
ttgctatttcctgttgcctc

SEQ ID NO: 31981 - DNA, 20 bp, synthetic construct
  misc_feature 1..20: note = Description of Artificial Sequence: Synthetic oligonucleotide
  misc_feature 1..20: note = Target: FXN; (+) strand; PAM type: YTN; PAM sequence: CTT
  source 1..20: mol_type = other DNA
gctatttcctgttgcctctc

SEQ ID NO: 31982 - DNA, 20 bp, synthetic construct
  misc_feature 1..20: note = Description of Artificial Sequence: Synthetic oligonucleotide
  misc_feature 1..20: note = Target: FXN; (+) strand; PAM type: YTN; PAM sequence: TTG
  source 1..20: mol_type = other DNA
ctatttcctgttgcctctct

SEQ ID NO: 31983 - DNA, 20 bp, synthetic construct
  misc_feature 1..20: note = Description of Artificial Sequence: Synthetic oligonucleotide
  misc_feature 1..20: note = Target: FXN; (+) strand; PAM type: YTN; PAM sequence: CTA
  source 1..20: mol_type = other DNA
tttcctgttgcctctcttag

SEQ ID NO: 31984 - DNA, 20 bp, synthetic construct
  misc_feature 1..20: note = Description of Artificial Sequence: Synthetic oligonucleotide
  misc_feature 1..20: note = Target: FXN; (+) strand; PAM type: YTN; PAM sequence: TTT
  source 1..20: mol_type = other DNA
cctgttgcctctcttagtga

SEQ ID NO: 31985 - DNA, 20 bp, synthetic construct
  misc_feature 1..20: note = Description of Artificial Sequence: Synthetic oligonucleotide
  misc_feature 1..20: note = Target: FXN; (+) strand; PAM type: YTN; PAM sequence: TTC
  source 1..20: mol_type = other DNA
ctgttgcctctcttagtgac

SEQ ID NO: 31986 - DNA, 20 bp, synthetic construct
  misc_feature 1..20: note = Description of Artificial Sequence: Synthetic oligonucleotide
  misc_feature 1..20: note = Target: FXN; (+) strand; PAM type: YTN; PAM sequence: CTG
  source 1..20: mol_type = other DNA
ttgcctctcttagtgacctt

SEQ ID NO: 31987 - DNA, 20 bp, synthetic construct
  misc_feature 1..20: note = Description of Artificial Sequence: Synthetic oligonucleotide
  misc_feature 1..20: note = Target: FXN; (+) strand; PAM type: YTN; PAM sequence: TTG
  source 1..20: mol_type = other DNA
cctctcttagtgacctttta

SEQ ID NO: 31988 - DNA, 20 bp, synthetic construct
  misc_feature 1..20: note = Description of Artificial Sequence: Synthetic oligonucleotide
  misc_feature 1..20: note = Target: FXN; (+) strand; PAM type: YTN; PAM sequence: CTC
  source 1..20: mol_type = other DNA
tcttagtgaccttttaagag

SEQ ID NO: 31989 - DNA, 20 bp, synthetic construct
  misc_feature 1..20: note = Description of Artificial Sequence: Synthetic oligonucleotide
  misc_feature 1..20: note = Target: FXN; (+) strand; PAM type: YTN; PAM sequence: CTC
  source 1..20: mol_type = other DNA
ttagtgaccttttaagagca

SEQ ID NO: 31990 - DNA, 20 bp, synthetic construct
  misc_feature 1..20: note = Description of Artificial Sequence: Synthetic oligonucleotide
  misc_feature 1..20: note = Target: FXN; (+) strand; PAM type: YTN; PAM sequence: CTT
  source 1..20: mol_type = other DNA
agtgaccttttaagagcatt

SEQ ID NO: 31991 - DNA, 20 bp, synthetic construct
  misc_feature 1..20: note = Description of Artificial Sequence: Synthetic oligonucleotide
  misc_feature 1..20: note = Target: FXN; (+) strand; PAM type: YTN; PAM sequence: TTA
  source 1..20: mol_type = other DNA
gtgaccttttaagagcattg

SEQ ID NO: 31992 - DNA, 20 bp, synthetic construct
  misc_feature 1..20: note = Description of Artificial Sequence: Synthetic oligonucleotide
  misc_feature 1..20: note = Target: FXN; (+) strand; PAM type: YTN; PAM sequence: CTT
  source 1..20: mol_type = other DNA
ttaagagcattgtggatgcc

SEQ ID NO: 31993 - DNA, 20 bp, synthetic construct
  misc_feature 1..20: note = Description of Artificial Sequence: Synthetic oligonucleotide
  misc_feature 1..20: note = Target: FXN; (+) strand; PAM type: YTN; PAM sequence: TTT
  source 1..20: mol_type = other DNA
taagagcattgtggatgcct

SEQ ID NO: 31994 - DNA, 20 bp, synthetic construct
  misc_feature 1..20: note = Description of Artificial Sequence: Synthetic oligonucleotide
  misc_feature 1..20: note = Target: FXN; (+) strand; PAM type: YTN; PAM sequence: TTT
  source 1..20: mol_type = other DNA
aagagcattgtggatgcctc

SEQ ID NO: 31995 - DNA, 20 bp, synthetic construct
  misc_feature 1..20: note = Description of Artificial Sequence: Synthetic oligonucleotide
  misc_feature 1..20: note = Target: FXN; (+) strand; PAM type: YTN; PAM sequence: TTA
  source 1..20: mol_type = other DNA
agagcattgtggatgcctcc

SEQ ID NO: 31996 - DNA, 20 bp, synthetic construct
  misc_feature 1..20: note = Description of Artificial Sequence: Synthetic oligonucleotide
  misc_feature 1..20: note = Target: FXN; (+) strand; PAM type: YTN; PAM sequence: TTG
  source 1..20: mol_type = other DNA
tggatgcctcccagcctcct

SEQ ID NO: 31997 - DNA, 20 bp, synthetic construct
  misc_feature 1..20: note = Description of Artificial Sequence: Synthetic oligonucleotide
  misc_feature 1..20: note = Target: FXN; (+) strand; PAM type: YTN; PAM sequence: CTC
  source 1..20: mol_type = other DNA
ccagcctcctgctaaccacc

SEQ ID NO: 31998 - DNA, 20 bp, synthetic construct
  misc_feature 1..20: note = Description of Artificial Sequence: Synthetic oligonucleotide
  misc_feature 1..20: note = Target: FXN; (+) strand; PAM type: YTN; PAM sequence: CTC
  source 1..20: mol_type = other DNA
ctgctaaccaccctgtaacc

SEQ ID NO: 31999 - DNA, 20 bp, synthetic construct
  misc_feature 1..20: note = Description of Artificial Sequence: Synthetic oligonucleotide
  misc_feature 1..20: note = Target: FXN; (+) strand; PAM type: YTN; PAM sequence: CTG
  source 1..20: mol_type = other DNA
ctaaccaccctgtaacctga

SEQ ID NO: 32000 - DNA, 20 bp, synthetic construct
  misc_feature 1..20: note = Description of Artificial Sequence: Synthetic oligonucleotide
  misc_feature 1..20: note = Target: FXN; (+) strand; PAM type: YTN; PAM sequence: CTA
  source 1..20: mol_type = other DNA
accaccctgtaacctgaaca

SEQ ID NO: 32001 - DNA, 20 bp, synthetic construct
  misc_feature 1..20: note = Description of Artificial Sequence: Synthetic oligonucleotide
  misc_feature 1..20: note = Target: FXN; (+) strand; PAM type: YTN; PAM sequence: CTG
  source 1..20: mol_type = other DNA
taacctgaacagcctgcagc

SEQ ID NO: 32002 - DNA, 20 bp, synthetic construct
  misc_feature 1..20: note = Description of Artificial Sequence: Synthetic oligonucleotide
  misc_feature 1..20: note = Target: FXN; (+) strand; PAM type: YTN; PAM sequence: CTG
  source 1..20: mol_type = other DNA
aacagcctgcagcagccctg

SEQ ID NO: 32003 - DNA, 20 bp, synthetic construct
  misc_feature 1..20: note = Description of Artificial Sequence: Synthetic oligonucleotide
  misc_feature 1..20: note = Target: FXN; (+) strand; PAM type: YTN; PAM sequence: CTG
  source 1..20: mol_type = other DNA
cagcagccctgcccagtaga

SEQ ID NO: 32004 - DNA, 20 bp, synthetic construct
  misc_feature 1..20: note = Description of Artificial Sequence: Synthetic oligonucleotide
  misc_feature 1..20: note = Target: FXN; (+) strand; PAM type: YTN; PAM sequence: CTG
  source 1..20: mol_type = other DNA
cccagtagaacttcctgatg

SEQ ID NO: 32005 - DNA, 20 bp, synthetic construct
  misc_feature 1..20: note = Description of Artificial Sequence: Synthetic oligonucleotide
  misc_feature 1..20: note = Target: FXN; (+) strand; PAM type: YTN; PAM sequence: CTT
  source 1..20: mol_type = other DNA
cctgatgtgatggaaatgct

SEQ ID NO: 32006 - DNA, 20 bp, synthetic construct
  misc_feature 1..20: note = Description of Artificial Sequence: Synthetic oligonucleotide
  misc_feature 1..20: note = Target: FXN; (+) strand; PAM type: YTN; PAM sequence: TTC
  source 1..20: mol_type = other DNA
ctgatgtgatggaaatgctg

SEQ ID NO: 32007 - DNA, 20 bp, synthetic construct
  misc_feature 1..20: note = Description of Artificial Sequence: Synthetic oligonucleotide
  misc_feature 1..20: note = Target: FXN; (+) strand; PAM type: YTN; PAM sequence: CTG
  source 1..20: mol_type = other DNA
atgtgatggaaatgctgtgt

SEQ ID NO: 32008 - DNA, 20 bp, synthetic construct
  misc_feature 1..20: note = Description of Artificial Sequence: Synthetic oligonucleotide
  misc_feature 1..20: note = Target: FXN; (+) strand; PAM type: YTN; PAM sequence: CTG
  source 1..20: mol_type = other DNA
tgtctgcaccactagccaca

SEQ ID NO: 32009 - DNA, 20 bp, synthetic construct
  misc_feature 1..20: note = Description of Artificial Sequence: Synthetic oligonucleotide
  misc_feature 1..20: note = Target: FXN; (+) strand; PAM type: YTN; PAM sequence: CTG
  source 1..20: mol_type = other DNA
caccactagccacatgtggc

SEQ ID NO: 32010 - DNA, 20 bp, synthetic construct
  misc_feature 1..20: note = Description of Artificial Sequence: Synthetic oligonucleotide
  misc_feature 1..20: note = Target: FXN; (+) strand; PAM type: YTN; PAM sequence: CTA
  source 1..20: mol_type = other DNA
gccacatgtggccacaggat

SEQ ID NO: 32011 - DNA, 20 bp, synthetic construct
  misc_feature 1..20: note = Description of Artificial Sequence: Synthetic oligonucleotide
  misc_feature 1..20: note = Target: FXN; (+) strand; PAM type: YTN; PAM sequence: TTC
  source 1..20: mol_type = other DNA
tcgaaactggtggtgcagtt

SEQ ID NO: 32012 - DNA, 20 bp, synthetic construct
  misc_feature 1..20: note = Description of Artificial Sequence: Synthetic oligonucleotide
  misc_feature 1..20: note = Target: FXN; (+) strand; PAM type: YTN; PAM sequence: CTC
  source 1..20: mol_type = other DNA
gaaactggtggtgcagttga

SEQ ID NO: 32013 - DNA, 20 bp, synthetic construct
  misc_feature 1..20: note = Description of Artificial Sequence: Synthetic oligonucleotide
  misc_feature 1..20: note = Target: FXN; (+) strand; PAM type: YTN; PAM sequence: CTG
  source 1..20: mol_type = other DNA
gtggtgcagttgaggagctg

SEQ ID NO: 32014 - DNA, 20 bp, synthetic construct
  misc_feature 1..20: note = Description of Artificial Sequence: Synthetic oligonucleotide
  misc_feature 1..20: note = Target: FXN; (+) strand; PAM type: YTN; PAM sequence: TTG
  source 1..20: mol_type = other DNA
aggagctgactttatatttt

SEQ ID NO: 32015 - DNA, 20 bp, synthetic construct
  misc_feature 1..20: note = Description of Artificial Sequence: Synthetic oligonucleotide
  misc_feature 1..20: note = Target: FXN; (+) strand; PAM type: YTN; PAM sequence: CTG
  source 1..20: mol_type = other DNA
actttatattttatctcatt

SEQ ID NO: 32016 - DNA, 20 bp, synthetic construct
  misc_feature 1..20: note = Description of Artificial Sequence: Synthetic oligonucleotide
  misc_feature 1..20: note = Target: FXN; (+) strand; PAM type: YTN; PAM sequence: CTT
  source 1..20: mol_type = other DNA
tatattttatctcattaaat

SEQ ID NO: 32017 - DNA, 20 bp, synthetic construct
  misc_feature 1..20: note = Description of Artificial Sequence: Synthetic oligonucleotide
  misc_feature 1..20: note = Target: FXN; (+) strand; PAM type: YTN; PAM sequence: TTT
  source 1..20: mol_type = other DNA
atattttatctcattaaatt

SEQ ID NO: 32018 - DNA, 20 bp, synthetic construct
  misc_feature 1..20: note = Description of Artificial Sequence: Synthetic oligonucleotide
  misc_feature 1..20: note = Target: FXN; (+) strand; PAM type: YTN; PAM sequence: TTA
  source 1..20: mol_type = other DNA
tattttatctcattaaattt

SEQ ID NO: 32019 - DNA, 20 bp, synthetic construct
  misc_feature 1..20: note = Description of Artificial Sequence: Synthetic oligonucleotide
  misc_feature 1..20: note = Target: FXN; (+) strand; PAM type: YTN; PAM sequence: TTT
  source 1..20: mol_type = other DNA
tatctcattaaatttaaatg

SEQ ID NO: 32020 - DNA, 20 bp, synthetic construct
  misc_feature 1..20: note = Description of Artificial Sequence: Synthetic oligonucleotide
  misc_feature 1..20: note = Target: FXN; (+) strand; PAM type: YTN; PAM sequence: TTT
  source 1..20: mol_type = other DNA
atctcattaaatttaaatgt

SEQ ID NO: 32021 - DNA, 20 bp, synthetic construct
  misc_feature 1..20: note = Description of Artificial Sequence: Synthetic oligonucleotide
  misc_feature 1..20: note = Target: FXN; (+) strand; PAM type: YTN; PAM sequence: TTA
  source 1..20: mol_type = other DNA
tctcattaaatttaaatgta

SEQ ID NO: 32022 - DNA, 20 bp, synthetic construct
  misc_feature 1..20: note = Description of Artificial Sequence: Synthetic oligonucleotide
  misc_feature 1..20: note = Target: FXN; (+) strand; PAM type: YTN; PAM sequence: CTC
  source 1..20: mol_type = other DNA
attaaatttaaatgtaaata

SEQ ID NO: 32023 - DNA, 20 bp, synthetic construct
  misc_feature 1..20: note = Description of Artificial Sequence: Synthetic oligonucleotide
  misc_feature 1..20: note = Target: FXN; (+) strand; PAM type: YTN; PAM sequence: TTA
  source 1..20: mol_type = other DNA
aatttaaatgtaaatagcta

SEQ ID NO: 32024 - DNA, 20 bp, synthetic construct
  misc_feature 1..20: note = Description of Artificial Sequence: Synthetic oligonucleotide
  misc_feature 1..20: note = Target: FXN; (+) strand; PAM type: YTN; PAM sequence: TTT
  source 1..20: mol_type = other DNA
aaatgtaaatagctacgtgt

SEQ ID NO: 32025 - DNA, 20 bp, synthetic construct
  misc_feature 1..20: note = Description of Artificial Sequence: Synthetic oligonucleotide
  misc_feature 1..20: note = Target: FXN; (+) strand; PAM type: YTN; PAM sequence: TTA
  source 1..20: mol_type = other DNA
aatgtaaatagctacgtgtg

SEQ ID NO: 32026 - DNA, 20 bp, synthetic construct
  misc_feature 1..20: note = Description of Artificial Sequence: Synthetic oligonucleotide
  misc_feature 1..20: note = Target: FXN; (+) strand; PAM type: YTN; PAM sequence: CTA
  source 1..20: mol_type = other DNA
cgtgtggcttgttggctagc

SEQ ID NO: 32027 - DNA, 20 bp, synthetic construct
  misc_feature 1..20: note = Description of Artificial Sequence: Synthetic oligonucleotide
  misc_feature 1..20: note = Target: FXN; (+) strand; PAM type: YTN; PAM sequence: CTT
  source 1..20: mol_type = other DNA
gttggctagcctattggaaa

SEQ ID NO: 32028 - DNA, 20 bp, synthetic construct
  misc_feature 1..20: note = Description of Artificial Sequence: Synthetic oligonucleotide
  misc_feature 1..20: note = Target: FXN; (+) strand; PAM type: YTN; PAM sequence: TTG
  source 1..20: mol_type = other DNA
ttggctagcctattggaaaa

SEQ ID NO: 32029 - DNA, 20 bp, synthetic construct
  misc_feature 1..20: note = Description of Artificial Sequence: Synthetic oligonucleotide
  misc_feature 1..20: note = Target: FXN; (+) strand; PAM type: YTN; PAM sequence: TTG
  source 1..20: mol_type = other DNA
gctagcctattggaaaacac

SEQ ID NO: 32030 - DNA, 20 bp, synthetic construct
  misc_feature 1..20: note = Description of Artificial Sequence: Synthetic oligonucleotide
  misc_feature 1..20: note = Target: FXN; (+) strand; PAM type: YTN; PAM sequence: CTA
  source 1..20: mol_type = other DNA
gcctattggaaaacacgggc

SEQ ID NO: 32031 - DNA, 20 bp, synthetic construct
  misc_feature 1..20: note = Description of Artificial Sequence: Synthetic oligonucleotide
  misc_feature 1..20: note = Target: FXN; (+) strand; PAM type: YTN; PAM sequence: CTA
  source 1..20: mol_type = other DNA
ttggaaaacacgggcttaga

SEQ ID NO: 32032 - DNA, 20 bp, synthetic construct
  misc_feature 1..20: note = Description of Artificial Sequence: Synthetic oligonucleotide
  misc_feature 1..20: note = Target: FXN; (+) strand; PAM type: YTN; PAM sequence: TTG
  source 1..20: mol_type = other DNA
gaaaacacgggcttagagag

SEQ ID NO: 32033 - DNA, 20 bp, synthetic construct
  misc_feature 1..20: note = Description of Artificial Sequence: Synthetic oligonucleotide
  misc_feature 1..20: note = Target: FXN; (+) strand; PAM type: YTN; PAM sequence: CTT
  source 1..20: mol_type = other DNA
agagagacacagggagaatc

SEQ ID NO: 32034 - DNA, 20 bp, synthetic construct
  misc_feature 1..20: note = Description of Artificial Sequence: Synthetic oligonucleotide
  misc_feature 1..20: note = Target: FXN; (+) strand; PAM type: YTN; PAM sequence: TTA
  source 1..20: mol_type = other DNA
gagagacacagggagaatca

SEQ ID NO: 32035 - DNA, 20 bp, synthetic construct
  misc_feature 1..20: note = Description of Artificial Sequence: Synthetic oligonucleotide
  misc_feature 1..20: note = Target: FXN; (+) strand; PAM type: YTN; PAM sequence: CTG
  source 1..20: mol_type = other DNA
taatgcactaaaagaaggta

SEQ ID NO: 32036 - DNA, 20 bp, synthetic construct
  misc_feature 1..20: note = Description of Artificial Sequence: Synthetic oligonucleotide
  misc_feature 1..20: note = Target: FXN; (+) strand; PAM type: YTN; PAM sequence: CTA
  source 1..20: mol_type = other DNA
aaagaaggtaaaaaaaaaaa

SEQ ID NO: 32037 - DNA, 20 bp, synthetic construct
  misc_feature 1..20: note = Description of Artificial Sequence: Synthetic oligonucleotide
  misc_feature 1..20: note = Target: FXN; (+) strand; PAM type: YTN; PAM sequence: CTA
  source 1..20: mol_type = other DNA
agaaatattcctaaaatact

SEQ ID NO: 32038 - DNA, 20 bp, synthetic construct
  misc_feature 1..20: note = Description of Artificial Sequence: Synthetic oligonucleotide
  misc_feature 1..20: note = Target: FXN; (+) strand; PAM type: YTN; PAM sequence: TTC
  source 1..20: mol_type = other DNA
ctaaaatactttaatatagg

SEQ ID NO: 32039 - DNA, 20 bp, synthetic construct
  misc_feature 1..20: note = Description of Artificial Sequence: Synthetic oligonucleotide
  misc_feature 1..20: note = Target: FXN; (+) strand; PAM type: YTN; PAM sequence: CTA
  source 1..20: mol_type = other DNA
aaatactttaatatagggct

SEQ ID NO: 32040 - DNA, 20 bp, synthetic construct
  misc_feature 1..20: note = Description of Artificial Sequence: Synthetic oligonucleotide
  misc_feature 1..20: note = Target: FXN; (+) strand; PAM type: YTN; PAM sequence: CTT
  source 1..20: mol_type = other DNA
taatatagggctgggtgcgg

SEQ ID NO: 32041 - DNA, 20 bp, synthetic construct
  misc_feature 1..20: note = Description of Artificial Sequence: Synthetic oligonucleotide
  misc_feature 1..20: note = Target: FXN; (+) strand; PAM type: YTN; PAM sequence: TTT
  source 1..20: mol_type = other DNA
aatatagggctgggtgcggt

SEQ ID NO: 32042 - DNA, 20 bp, synthetic construct
  misc_feature 1..20: note = Description of Artificial Sequence: Synthetic oligonucleotide
  misc_feature 1..20: note = Target: FXN; (+) strand; PAM type: YTN; PAM sequence: TTA
  source 1..20: mol_type = other DNA
atatagggctgggtgcggtg

SEQ ID NO: 32043 - DNA, 20 bp, synthetic construct
  misc_feature 1..20: note = Description of Artificial Sequence: Synthetic oligonucleotide
  misc_feature 1..20: note = Target: FXN; (+) strand; PAM type: YTN; PAM sequence: CTG
  source 1..20: mol_type = other DNA
ggtgcggtggctcacatcca

SEQ ID NO: 32044 - DNA, 20 bp, synthetic construct
  misc_feature 1..20: note = Description of Artificial Sequence: Synthetic oligonucleotide
  misc_feature 1..20: note = Target: FXN; (+) strand; PAM type: YTN; PAM sequence: CTC
  source 1..20: mol_type = other DNA
acatccagcattttgggaag

SEQ ID NO: 32045 - DNA, 20 bp, synthetic construct
  misc_feature 1..20: note = Description of Artificial Sequence: Synthetic oligonucleotide
  misc_feature 1..20: note = Target: FXN; (+) strand; PAM type: YTN; PAM sequence: TTT
  source 1..20: mol_type = other DNA
tgggaagctgaggagggcag

SEQ ID NO: 32046 - DNA, 20 bp, synthetic construct
  misc_feature 1..20: note = Description of Artificial Sequence: Synthetic oligonucleotide
  misc_feature 1..20: note = Target: FXN; (+) strand; PAM type: YTN; PAM sequence: TTT
  source 1..20: mol_type = other DNA
gggaagctgaggagggcaga

SEQ ID NO: 32047 - DNA, 20 bp, synthetic construct
  misc_feature 1..20: note = Description of Artificial Sequence: Synthetic oligonucleotide
  misc_feature 1..20: note = Target: FXN; (+) strand; PAM type: YTN; PAM sequence: TTG
  source 1..20: mol_type = other DNA
ggaagctgaggagggcagat

SEQ ID NO: 32048 - DNA, 20 bp, synthetic construct
  misc_feature 1..20: note = Description of Artificial Sequence: Synthetic oligonucleotide
  misc_feature 1..20: note = Target: FXN; (+) strand; PAM type: YTN; PAM sequence: CTG
  source 1..20: mol_type = other DNA
aggagggcagatcacttgag

SEQ ID NO: 32049 - DNA, 20 bp, synthetic construct
  misc_feature 1..20: note = Description of Artificial Sequence: Synthetic oligonucleotide
  misc_feature 1..20: note = Target: FXN; (+) strand; PAM type: YTN; PAM sequence: CTT
  source 1..20: mol_type = other DNA
gaggccaggagttcaagacc

SEQ ID NO: 32050 - DNA, 20 bp, synthetic construct
  misc_feature 1..20: note = Description of Artificial Sequence: Synthetic oligonucleotide
  misc_feature 1..20: note = Target: FXN; (+) strand; PAM type: YTN; PAM sequence: TTG
  source 1..20: mol_type = other DNA
aggccaggagttcaagacca

SEQ ID NO: 32051 - DNA, 20 bp, synthetic construct
  misc_feature 1..20: note = Description of Artificial Sequence: Synthetic oligonucleotide
  misc_feature 1..20: note = Target: FXN; (+) strand; PAM type: YTN; PAM sequence: TTC
  source 1..20: mol_type = other DNA
aagaccagcctggccaacat

SEQ ID NO: 32052 - DNA, 20 bp, synthetic construct
  misc_feature 1..20: note = Description of Artificial Sequence: Synthetic oligonucleotide
  misc_feature 1..20: note = Target: FXN; (+) strand; PAM type: YTN; PAM sequence: CTG
  source 1..20: mol_type = other DNA
gccaacatggtgaaaccccg

SEQ ID NO: 32053 - DNA, 20 bp, synthetic construct
  misc_feature 1..20: note = Description of Artificial Sequence: Synthetic oligonucleotide
  misc_feature 1..20: note = Target: FXN; (+) strand; PAM type: YTN; PAM sequence: CTC
  source 1..20: mol_type = other DNA
tactaaaaatacaaaaaatc

SEQ ID NO: 32054 - DNA, 20 bp, synthetic construct
  misc_feature 1..20: note = Description of Artificial Sequence: Synthetic oligonucleotide
  misc_feature 1..20: note = Target: FXN; (+) strand; PAM type: YTN; PAM sequence: CTA
  source 1..20: mol_type = other DNA
ctaaaaatacaaaaaatcgg

SEQ ID NO: 32055 - DNA, 20 bp, synthetic construct
  misc_feature 1..20: note = Description of Artificial Sequence: Synthetic oligonucleotide
  misc_feature 1..20: note = Target: FXN; (+) strand; PAM type: YTN; PAM sequence: CTA
  source 1..20: mol_type = other DNA
aaaatacaaaaaatcgggtg

SEQ ID NO: 32056 - DNA, 20 bp, synthetic construct
  misc_feature 1..20: note = Description of Artificial Sequence: Synthetic oligonucleotide
  misc_feature 1..20: note = Target: FXN; (+) strand; PAM type: YTN; PAM sequence: CTG
  source 1..20: mol_type = other DNA
taatcccagctacgcgggag

SEQ ID NO: 32057 - DNA, 20 bp, synthetic construct
  misc_feature 1..20: note = Description of Artificial Sequence: Synthetic oligonucleotide
  misc_feature 1..20: note = Target: FXN; (+) strand; PAM type: YTN; PAM sequence: CTA
  source 1..20: mol_type = other DNA
cgcgggaggctgaggcacga

SEQ ID NO: 32058 - DNA, 20 bp, synthetic construct
  misc_feature 1..20: note = Description of Artificial Sequence: Synthetic oligonucleotide
  misc_feature 1..20: note = Target: FXN; (+) strand; PAM type: YTN; PAM sequence: CTG
  source 1..20: mol_type = other DNA
aggcacgagaatcactcgaa

SEQ ID NO: 32059 - DNA, 20 bp, synthetic construct
  misc_feature 1..20: note = Description of Artificial Sequence: Synthetic oligonucleotide
  misc_feature 1..20: note = Target: FXN; (+) strand; PAM type: YTN; PAM sequence: CTC
  source 1..20: mol_type = other DNA
gaacccgggaggcgggggtt

SEQ ID NO: 32060 - DNA, 20 bp, synthetic construct
  misc_feature 1..20: note = Description of Artificial Sequence: Synthetic oligonucleotide
  misc_feature 1..20: note = Target: FXN; (+) strand; PAM type: YTN; PAM sequence: TTG
  source 1..20: mol_type = other DNA
cagtgagccgagatcgtgcc

SEQ ID NO: 32061 - DNA, 20 bp, synthetic construct
  misc_feature 1..20: note = Description of Artificial Sequence: Synthetic oligonucleotide
  misc_feature 1..20: note = Target: FXN; (+) strand; PAM type: YTN; PAM sequence: CTG
  source 1..20: mol_type = other DNA
cactccagcctgggcgacag

SEQ ID NO: 32062 - DNA, 20 bp, synthetic construct
  misc_feature 1..20: note = Description of Artificial Sequence: Synthetic oligonucleotide
  misc_feature 1..20: note = Target: FXN; (+) strand; PAM type: YTN; PAM sequence: CTC
  source 1..20: mol_type = other DNA
cagcctgggcgacagagcga

SEQ ID NO: 32063 - DNA, 20 bp, synthetic construct
  misc_feature 1..20: note = Description of Artificial Sequence: Synthetic oligonucleotide
  misc_feature 1..20: note = Target: FXN; (+) strand; PAM type: YTN; PAM sequence: CTG
  source 1..20: mol_type = other DNA
ggcgacagagcgagacttca

SEQ ID NO: 32064 - DNA, 20 bp, synthetic construct
  misc_feature 1..20: note = Description of Artificial Sequence: Synthetic oligonucleotide
  misc_feature 1..20: note = Target: FXN; (+) strand; PAM type: YTN; PAM sequence: CTT
  source 1..20: mol_type = other DNA
catctcaaaaacaaaaaaca

SEQ ID NO: 32065 - DNA, 20 bp, synthetic construct
  misc_feature 1..20: note = Description of Artificial Sequence: Synthetic oligonucleotide
  misc_feature 1..20: note = Target: FXN; (+) strand; PAM type: YTN; PAM sequence: TTC
  source 1..20: mol_type = other DNA
atctcaaaaacaaaaaacaa

SEQ ID NO: 32066 - DNA, 20 bp, synthetic construct
  misc_feature 1..20: note = Description of Artificial Sequence: Synthetic oligonucleotide
  misc_feature 1..20: note = Target: FXN; (+) strand; PAM type: YTN; PAM sequence: CTC
  source 1..20: mol_type = other DNA
aaaaacaaaaaacaaaaacc

SEQ ID NO: 32067 - DNA, 20 bp, synthetic construct
  misc_feature 1..20: note = Description of Artificial Sequence: Synthetic oligonucleotide
  misc_feature 1..20: note = Target: FXN; (+) strand; PAM type: YTN; PAM sequence: CTT
  source 1..20: mol_type = other DNA
cagcatgattatttaaccaa

SEQ ID NO: 32068 - DNA, 20 bp, synthetic construct
  misc_feature 1..20: note = Description of Artificial Sequence: Synthetic oligonucleotide
  misc_feature 1..20: note = Target: FXN; (+) strand; PAM type: YTN; PAM sequence: TTC
  source 1..20: mol_type = other DNA
agcatgattatttaaccaaa

SEQ ID NO: 32069 - DNA, 20 bp, synthetic construct
  misc_feature 1..20: note = Description of Artificial Sequence: Synthetic oligonucleotide
  misc_feature 1..20: note = Target: FXN; (+) strand; PAM type: YTN; PAM sequence: TTA
  source 1..20: mol_type = other DNA
tttaaccaaaatgcaggtta

SEQ ID NO: 32070 - DNA, 20 bp, synthetic construct
  misc_feature 1..20: note = Description of Artificial Sequence: Synthetic oligonucleotide
  misc_feature 1..20: note = Target: FXN; (+) strand; PAM type: YTN; PAM sequence: TTT
  source 1..20: mol_type = other DNA
aaccaaaatgcaggttagtt

SEQ ID NO: 32071 - DNA, 20 bp, synthetic construct
  misc_feature 1..20: note = Description of Artificial Sequence: Synthetic oligonucleotide
  misc_feature 1..20: note = Target: FXN; (+) strand; PAM type: YTN; PAM sequence: TTA
  source 1..20: mol_type = other DNA
accaaaatgcaggttagttg

SEQ ID NO: 32072 - DNA, 20 bp, synthetic construct
  misc_feature 1..20: note = Description of Artificial Sequence: Synthetic oligonucleotide
  misc_feature 1..20: note = Target: FXN; (+) strand; PAM type: YTN; PAM sequence: TTA
  source 1..20: mol_type = other DNA
gttgttcaccggatgcagag

SEQ ID NO: 32073 - DNA, 20 bp, synthetic construct
  misc_feature 1..20: note = Description of Artificial Sequence: Synthetic oligonucleotide
  misc_feature 1..20: note = Target: FXN; (+) strand; PAM type: YTN; PAM sequence: TTG
  source 1..20: mol_type = other DNA
ttcaccggatgcagagtcca

SEQ ID NO: 32074 - DNA, 20 bp, synthetic construct
  misc_feature 1..20: note = Description of Artificial Sequence: Synthetic oligonucleotide
  misc_feature 1..20: note = Target: FXN; (+) strand; PAM type: YTN; PAM sequence: TTC
  source 1..20: mol_type = other DNA
accggatgcagagtccaatt

SEQ ID NO: 32075 - DNA, 20 bp, synthetic construct
  misc_feature 1..20: note = Description of Artificial Sequence: Synthetic oligonucleotide
  misc_feature 1..20: note = Target: FXN; (+) strand; PAM type: YTN; PAM sequence: TTA
  source 1..20: mol_type = other DNA
acaagagcaaggcctggtac

SEQ ID NO: 32076 - DNA, 20 bp, synthetic construct
  misc_feature 1..20: note = Description of Artificial Sequence: Synthetic oligonucleotide
  misc_feature 1..20: note = Target: FXN; (+) strand; PAM type: YTN; PAM sequence: CTG
  source 1..20: mol_type = other DNA
gtaccaaaaaaagtgaattt

SEQ ID NO: 32077 - DNA, 20 bp, synthetic construct
  misc_feature 1..20: note = Description of Artificial Sequence: Synthetic oligonucleotide
  misc_feature 1..20: note = Target: FXN; (+) strand; PAM type: YTN; PAM sequence: TTT
  source 1..20: mol_type = other DNA
actccgaaactagcttgggt

SEQ ID NO: 32078 - DNA, 20 bp, synthetic construct
  misc_feature 1..20: note = Description of Artificial Sequence: Synthetic oligonucleotide
  misc_feature 1..20: note = Target: FXN; (+) strand; PAM type: YTN; PAM sequence: TTA
  source 1..20: mol_type = other DNA
ctccgaaactagcttgggtg

SEQ ID NO: 32079 - DNA, 20 bp, synthetic construct
  misc_feature 1..20: note = Description of Artificial Sequence: Synthetic oligonucleotide
  misc_feature 1..20: note = Target: FXN; (+) strand; PAM type: YTN; PAM sequence: CTC
  source 1..20: mol_type = other DNA
cgaaactagcttgggtgagg

SEQ ID NO: 32080 - DNA, 20 bp, synthetic construct
  misc_feature 1..20: note = Description of Artificial Sequence: Synthetic oligonucleotide
  misc_feature 1..20: note = Target: FXN; (+) strand; PAM type: YTN; PAM sequence: CTA
  source 1..20: mol_type = other DNA
gcttgggtgaggggtacaaa

SEQ ID NO: 32081 - DNA, 20 bp, synthetic construct
  misc_feature 1..20: note = Description of Artificial Sequence: Synthetic oligonucleotide
  misc_feature 1..20: note = Target: FXN; (+) strand; PAM type: YTN; PAM sequence: CTT
  source 1..20: mol_type = other DNA
gggtgaggggtacaaagcat

SEQ ID NO: 32082 - DNA, 20 bp, synthetic construct
  misc_feature 1..20: note = Description of Artificial Sequence: Synthetic oligonucleotide
  misc_feature 1..20: note = Target: FXN; (+) strand; PAM type: YTN; PAM sequence: TTG
  source 1..20: mol_type = other DNA
ggtgaggggtacaaagcatc

SEQ ID NO: 32083 - DNA, 20 bp, synthetic construct
  misc_feature 1..20: note = Description of Artificial Sequence: Synthetic oligonucleotide
  misc_feature 1..20: note = Target: FXN; (+) strand; PAM type: YTN; PAM sequence: CTG
  source 1..20: mol_type = other DNA
cctttctttaaaagtgctgc

SEQ ID NO: 32084 - DNA, 20 bp, synthetic construct
  misc_feature 1..20: note = Description of Artificial Sequence: Synthetic oligonucleotide
  misc_feature 1..20: note = Target: FXN; (+) strand; PAM type: YTN; PAM sequence: CTT
  source 1..20: mol_type = other DNA
tctttaaaagtgctgcttcc

SEQ ID NO: 32085 - DNA, 20 bp, synthetic construct
  misc_feature 1..20: note = Description of Artificial Sequence: Synthetic oligonucleotide
  misc_feature 1..20: note = Target: FXN; (+) strand; PAM type: YTN; PAM sequence: TTT
  source 1..20: mol_type = other DNA
ctttaaaagtgctgcttccc

SEQ ID NO: 32086 - DNA, 20 bp, synthetic construct
  misc_feature 1..20: note = Description of Artificial Sequence: Synthetic oligonucleotide
  misc_feature 1..20: note = Target: FXN; (+) strand; PAM type: YTN; PAM sequence: TTC
  source 1..20: mol_type = other DNA
tttaaaagtgctgcttcccc

SEQ ID NO: 32087 - DNA, 20 bp, synthetic construct
  misc_feature 1..20: note = Description of Artificial Sequence: Synthetic oligonucleotide
  misc_feature 1..20: note = Target: FXN; (+) strand; PAM type: YTN; PAM sequence: CTT
  source 1..20: mol_type = other DNA
taaaagtgctgcttcccctt

SEQ ID NO: 32088 - DNA, 20 bp, synthetic construct
  misc_feature 1..20: note = Description of Artificial Sequence: Synthetic oligonucleotide
  misc_feature 1..20: note = Target: FXN; (+) strand; PAM type: YTN; PAM sequence: TTT
  source 1..20: mol_type = other DNA
aaaagtgctgcttccccttg

SEQ ID NO: 32089 - DNA, 20 bp, synthetic construct
  misc_feature 1..20: note = Description of Artificial Sequence: Synthetic oligonucleotide
  misc_feature 1..20: note = Target: FXN; (+) strand; PAM type: YTN; PAM sequence: TTA
  source 1..20: mol_type = other DNA
aaagtgctgcttccccttgg

SEQ ID NO: 32090 - DNA, 20 bp, synthetic construct
  misc_feature 1..20: note = Description of Artificial Sequence: Synthetic oligonucleotide
  misc_feature 1..20: note = Target: FXN; (+) strand; PAM type: YTN; PAM sequence: CTG
  source 1..20: mol_type = other DNA
cttccccttggaagtagaaa

SEQ ID NO: 32091 - DNA, 20 bp, synthetic construct
  misc_feature 1..20: note = Description of Artificial Sequence: Synthetic oligonucleotide
  misc_feature 1..20: note = Target: FXN; (+) strand; PAM type: YTN; PAM sequence: CTT
  source 1..20: mol_type = other DNA
ccccttggaagtagaaagtg

SEQ ID NO: 32092 - DNA, 20 bp, synthetic construct
  misc_feature 1..20: note = Description of Artificial Sequence: Synthetic oligonucleotide
  misc_feature 1..20: note = Target: FXN; (+) strand; PAM type: YTN; PAM sequence: TTC
  source 1..20: mol_type = other DNA
cccttggaagtagaaagtgg

SEQ ID NO: 32093 - DNA, 20 bp, synthetic construct
  misc_feature 1..20: note = Description of Artificial Sequence: Synthetic oligonucleotide
  misc_feature 1..20: note = Target: FXN; (+) strand; PAM type: YTN; PAM sequence: CTT
  source 1..20: mol_type = other DNA
ggaagtagaaagtggacact

SEQ ID NO: 32094 - DNA, 20 bp, synthetic construct
  misc_feature 1..20: note = Description of Artificial Sequence: Synthetic oligonucleotide
  misc_feature 1..20: note = Target: FXN; (+) strand; PAM type: YTN; PAM sequence: TTG
  source 1..20: mol_type = other DNA
gaagtagaaagtggacactt

SEQ ID NO: 32095 - DNA, 20 bp, synthetic construct
  misc_feature 1..20: note = Description of Artificial Sequence: Synthetic oligonucleotide
  misc_feature 1..20: note = Target: FXN; (+) strand; PAM type: YTN; PAM sequence: CTT
  source 1..20: mol_type = other DNA
ttataaggtaaggggggaag

SEQ ID NO: 32096 - DNA, 20 bp, synthetic construct
  misc_feature 1..20: note = Description of Artificial Sequence: Synthetic oligonucleotide
  misc_feature 1..20: note = Target: FXN; (+) strand; PAM type: YTN; PAM sequence: TTT
  source 1..20: mol_type = other DNA
tataaggtaaggggggaagt

SEQ ID NO: 32097 - DNA, 20 bp, synthetic construct
  misc_feature 1..20: note = Description of Artificial Sequence: Synthetic oligonucleotide
  misc_feature 1..20: note = Target: FXN; (+) strand; PAM type: YTN; PAM sequence: TTT
  source 1..20: mol_type = other DNA
ataaggtaaggggggaagtg

SEQ ID NO: 32098 - DNA, 20 bp, synthetic construct
  misc_feature 1..20: note = Description of Artificial Sequence: Synthetic oligonucleotide
  misc_feature 1..20: note = Target: FXN; (+) strand; PAM type: YTN; PAM sequence: TTA
  source 1..20: mol_type = other DNA
taaggtaaggggggaagtgt

SEQ ID NO: 32099 - DNA, 20 bp, synthetic construct
  misc_feature 1..20: note = Description of Artificial Sequence: Synthetic oligonucleotide
  misc_feature 1..20: note = Target: FXN; (+) strand; PAM type: YTN; PAM sequence: CTC
  source 1..20: mol_type = other DNA
tgctagttccgtgcatactc

SEQ ID NO: 32100 - DNA, 20 bp, synthetic construct
  misc_feature 1..20: note = Description of Artificial Sequence: Synthetic oligonucleotide
  misc_feature 1..20: note = Target: FXN; (+) strand; PAM type: YTN; PAM sequence: CTG
  source 1..20: mol_type = other DNA
ctagttccgtgcatactcta

SEQ ID NO: 32101 - DNA, 20 bp, synthetic construct
  misc_feature 1..20: note = Description of Artificial Sequence: Synthetic oligonucleotide
  misc_feature 1..20: note = Target: FXN; (+) strand; PAM type: YTN; PAM sequence: CTA
  source 1..20: mol_type = other DNA
gttccgtgcatactctacag

SEQ ID NO: 32102 - DNA, 20 bp, synthetic construct
  misc_feature 1..20: note = Description of Artificial Sequence: Synthetic oligonucleotide
  misc_feature 1..20: note = Target: FXN; (+) strand; PAM type: YTN; PAM sequence: TTC
  source 1..20: mol_type = other DNA
cgtgcatactctacaggaca

SEQ ID NO: 32103 - DNA, 20 bp, synthetic construct
  misc_feature 1..20: note = Description of Artificial Sequence: Synthetic oligonucleotide
  misc_feature 1..20: note = Target: FXN; (+) strand; PAM type: YTN; PAM sequence: CTC
  source 1..20: mol_type = other DNA
tacaggacagttgacttggc

SEQ ID NO: 32104 - DNA, 20 bp, synthetic construct
  misc_feature 1..20: note = Description of Artificial Sequence: Synthetic oligonucleotide
  misc_feature 1..20: note = Target: FXN; (+) strand; PAM type: YTN; PAM sequence: CTA
  source 1..20: mol_type = other DNA
caggacagttgacttggcac

SEQ ID NO: 32105 - DNA, 20 bp, synthetic construct
  misc_feature 1..20: note = Description of Artificial Sequence: Synthetic oligonucleotide
  misc_feature 1..20: note = Target: FXN; (+) strand; PAM type: YTN; PAM sequence: TTG
  source 1..20: mol_type = other DNA
acttggcaccttcctggtta

SEQ ID NO: 32106 - DNA, 20 bp, synthetic construct
  misc_feature 1..20: note = Description of Artificial Sequence: Synthetic oligonucleotide
  misc_feature 1..20: note = Target: FXN; (+) strand; PAM type: YTN; PAM sequence: CTT
  source 1..20: mol_type = other DNA
ggcaccttcctggttagtaa

SEQ ID NO: 32107 - DNA, 20 bp, synthetic construct
  misc_feature 1..20: note = Description of Artificial Sequence: Synthetic oligonucleotide
  misc_feature 1..20: note = Target: FXN; (+) strand; PAM type: YTN; PAM sequence: TTG
  source 1..20: mol_type = other DNA
gcaccttcctggttagtaat

SEQ ID NO: 32108 - DNA, 20 bp, synthetic construct
  misc_feature 1..20: note = Description of Artificial Sequence: Synthetic oligonucleotide
  misc_feature 1..20: note = Target: FXN; (+) strand; PAM type: YTN; PAM sequence: CTT
  source 1..20: mol_type = other DNA
cctggttagtaataagctgt

SEQ ID NO: 32109 - DNA, 20 bp, synthetic construct
  misc_feature 1..20: note = Description of Artificial Sequence: Synthetic oligonucleotide
  misc_feature 1..20: note = Target: FXN; (+) strand; PAM type: YTN; PAM sequence: TTC
  source 1..20: mol_type = other DNA
ctggttagtaataagctgta

SEQ ID NO: 32110 - DNA, 20 bp, synthetic construct
  misc_feature 1..20: note = Description of Artificial Sequence: Synthetic oligonucleotide
  misc_feature 1..20: note = Target: FXN; (+) strand; PAM type: YTN; PAM sequence: CTG
  source 1..20: mol_type = other DNA
gttagtaataagctgtagca

SEQ ID NO: 32111 - DNA, 20 bp, synthetic construct
  misc_feature 1..20: note = Description of Artificial Sequence: Synthetic oligonucleotide
  misc_feature 1..20: note = Target: FXN; (+) strand; PAM type: YTN; PAM sequence: TTA
  source 1..20: mol_type = other DNA
gtaataagctgtagcagtgg

SEQ ID NO: 32112 - DNA, 20 bp, synthetic construct
  misc_feature 1..20: note = Description of Artificial Sequence: Synthetic oligonucleotide
  misc_feature 1..20: note = Target: FXN; (+) strand; PAM type: YTN; PAM sequence: CTG
  source 1..20: mol_type = other DNA
tagcagtggccaagtgggca

SEQ ID NO: 32113 - DNA, 20 bp, synthetic construct
  misc_feature 1..20: note = Description of Artificial Sequence: Synthetic oligonucleotide
  misc_feature 1..20: note = Target: FXN; (+) strand; PAM type: YTN; PAM sequence: CTT
  source 1..20: mol_type = other DNA
tcagtatgccctcccagtga

SEQ ID NO: 32114 - DNA, 20 bp, synthetic construct
  misc_feature 1..20: note = Description of Artificial Sequence: Synthetic oligonucleotide
  misc_feature 1..20: note = Target: FXN; (+) strand; PAM type: YTN; PAM sequence: TTT
  source 1..20: mol_type = other DNA
cagtatgccctcccagtgaa

SEQ ID NO: 32115 - DNA, 20 bp, synthetic construct
  misc_feature 1..20: note = Description of Artificial Sequence: Synthetic oligonucleotide
  misc_feature 1..20: note = Target: FXN; (+) strand; PAM type: YTN; PAM sequence: TTC
  source 1..20: mol_type = other DNA
agtatgccctcccagtgaat

SEQ ID NO: 32116 - DNA, 20 bp, synthetic construct
  misc_feature 1..20: note = Description of Artificial Sequence: Synthetic oligonucleotide
  misc_feature 1..20: note = Target: FXN; (+) strand; PAM type: YTN; PAM sequence: CTC
  source 1..20: mol_type = other DNA
ccagtgaatgaaagtcctga

SEQ ID NO: 32117 - DNA, 20 bp, synthetic construct
  misc_feature 1..20: note = Description of Artificial Sequence: Synthetic oligonucleotide
  misc_feature 1..20: note = Target: FXN; (+) strand; PAM type: YTN; PAM sequence: CTG
  source 1..20: mol_type = other DNA
aggcaacccccaagggtgga

SEQ ID NO: 32118 - DNA, 20 bp, synthetic construct
  misc_feature 1..20: note = Description of Artificial Sequence: Synthetic oligonucleotide
  misc_feature 1..20: note = Target: FXN; (+) strand; PAM type: YTN; PAM sequence: CTG
  source 1..20: mol_type = other DNA
gaggtgaaagttccgtgatg

SEQ ID NO: 32119 - DNA, 20 bp, synthetic construct
  misc_feature 1..20: note = Description of Artificial Sequence: Synthetic oligonucleotide
  misc_feature 1..20: note = Target: FXN; (+) strand; PAM type: YTN; PAM sequence: TTC
  source 1..20: mol_type = other DNA
cgtgatgggtttgctttggt

SEQ ID NO: 32120 - DNA, 20 bp, synthetic construct
  misc_feature 1..20: note = Description of Artificial Sequence: Synthetic oligonucleotide
  misc_feature 1..20: note = Target: FXN; (+) strand; PAM type: YTN; PAM sequence: TTT
  source 1..20: mol_type = other DNA
gctttggtctgcgaatctac

SEQ ID NO: 32121 - DNA, 20 bp, synthetic construct
  misc_feature 1..20: note = Description of Artificial Sequence: Synthetic oligonucleotide
  misc_feature 1..20: note = Target: FXN; (+) strand; PAM type: YTN; PAM sequence: TTG
  source 1..20: mol_type = other DNA
ctttggtctgcgaatctact

SEQ ID NO: 32122 - DNA, 20 bp, synthetic construct
  misc_feature 1..20: note = Description of Artificial Sequence: Synthetic oligonucleotide
  misc_feature 1..20: note = Target: FXN; (+) strand; PAM type: YTN; PAM sequence: CTT
  source 1..20: mol_type = other DNA
tggtctgcgaatctactgtc

SEQ ID NO: 32123 - DNA, 20 bp, synthetic construct
  misc_feature 1..20: note = Description of Artificial Sequence: Synthetic oligonucleotide
  misc_feature 1..20: note = Target: FXN; (+) strand; PAM type: YTN; PAM sequence: TTT
  source 1..20: mol_type = other DNA
ggtctgcgaatctactgtca

SEQ ID NO: 32124 - DNA, 20 bp, synthetic construct
  misc_feature 1..20: note = Description of Artificial Sequence: Synthetic oligonucleotide
  misc_feature 1..20: note = Target: FXN; (+) strand; PAM type: YTN; PAM sequence: TTG
  source 1..20: mol_type = other DNA
gtctgcgaatctactgtcat

SEQ ID NO: 32125 - DNA, 20 bp, synthetic construct
  misc_feature 1..20: note = Description of Artificial Sequence: Synthetic oligonucleotide
  misc_feature 1..20: note = Target: FXN; (+) strand; PAM type: YTN; PAM sequence: CTG
  source 1..20: mol_type = other DNA
cgaatctactgtcatgtgga

SEQ ID NO: 32126 - DNA, 20 bp, synthetic construct
  misc_feature 1..20: note = Description of Artificial Sequence: Synthetic oligonucleotide
  misc_feature 1..20: note = Target: FXN; (+) strand; PAM type: YTN; PAM sequence: CTA
  source 1..20: mol_type = other DNA
ctgtcatgtggagagatctg

SEQ ID NO: 32127 - DNA, 20 bp, synthetic construct
  misc_feature 1..20: note = Description of Artificial Sequence: Synthetic oligonucleotide
  misc_feature 1..20: note = Target: FXN; (+) strand; PAM type: YTN; PAM sequence: CTG
  source 1..20: mol_type = other DNA
tcatgtggagagatctgtgc

SEQ ID NO: 32128 - DNA, 20 bp, synthetic construct
  misc_feature 1..20: note = Description of Artificial Sequence: Synthetic oligonucleotide
  misc_feature 1..20: note = Target: FXN; (+) strand; PAM type: YTN; PAM sequence: CTG
  source 1..20: mol_type = other DNA
tgctctggaagagcatacag

SEQ ID NO: 32129 - DNA, 20 bp, synthetic construct
  misc_feature 1..20: note = Description of Artificial Sequence: Synthetic oligonucleotide
  misc_feature 1..20: note = Target: FXN; (+) strand; PAM type: YTN; PAM sequence: CTC
  source 1..20: mol_type = other DNA
tggaagagcatacagttaga

SEQ ID NO: 32130 - DNA, 20 bp, synthetic construct
  misc_feature 1..20: note = Description of Artificial Sequence: Synthetic oligonucleotide
  misc_feature 1..20: note = Target: FXN; (+) strand; PAM type: YTN; PAM sequence: CTG
  source 1..20: mol_type = other DNA
gaagagcatacagttagaaa

SEQ ID NO: 32131 - DNA, 20 bp, synthetic construct
  misc_feature 1..20: note = Description of Artificial Sequence: Synthetic oligonucleotide
  misc_feature 1..20: note = Target: FXN; (+) strand; PAM type: YTN; PAM sequence: TTA
  source 1..20: mol_type = other DNA
gaaaagcttgccctgaaggg

SEQ ID NO: 32132 - DNA, 20 bp, synthetic construct
  misc_feature 1..20: note = Description of Artificial Sequence: Synthetic oligonucleotide
  misc_feature 1..20: note = Target: FXN; (+) strand; PAM type: YTN; PAM sequence: CTT
  source 1..20: mol_type = other DNA
gccctgaagggaatgtatgg

SEQ ID NO: 32133 - DNA, 20 bp, synthetic construct
  misc_feature 1..20: note = Description of Artificial Sequence: Synthetic oligonucleotide
  misc_feature 1..20: note = Target: FXN; (+) strand; PAM type: YTN; PAM sequence: TTG
  source 1..20: mol_type = other DNA
ccctgaagggaatgtatggt

SEQ ID NO: 32134 - DNA, 20 bp, synthetic construct
  misc_feature 1..20: note = Description of Artificial Sequence: Synthetic oligonucleotide
  misc_feature 1..20: note = Target: FXN; (+) strand; PAM type: YTN; PAM sequence: CTG
  source 1..20: mol_type = other DNA
aagggaatgtatggtgaagg

SEQ ID NO: 32135 - DNA, 20 bp, synthetic construct
  misc_feature 1..20: note = Description of Artificial Sequence: Synthetic oligonucleotide
  misc_feature 1..20: note = Target: FXN; (+) strand; PAM type: YTN; PAM sequence: TTA
  source 1..20: mol_type = other DNA
tatttgcatttctgaagggc

SEQ ID NO: 32136 - DNA, 20 bp, synthetic construct
  misc_feature 1..20: note = Description of Artificial Sequence: Synthetic oligonucleotide
  misc_feature 1..20: note = Target: FXN; (+) strand; PAM type: YTN; PAM sequence: TTT
  source 1..20: mol_type = other DNA
gcatttctgaagggctaagt

SEQ ID NO: 32137 - DNA, 20 bp, synthetic construct
  misc_feature 1..20: note = Description of Artificial Sequence: Synthetic oligonucleotide
  misc_feature 1..20: note = Target: FXN; (+) strand; PAM type: YTN; PAM sequence: TTG
  source 1..20: mol_type = other DNA
catttctgaagggctaagta

SEQ ID NO: 32138 - DNA, 20 bp, synthetic construct
  misc_feature 1..20: note = Description of Artificial Sequence: Synthetic oligonucleotide
  misc_feature 1..20: note = Target: FXN; (+) strand; PAM type: YTN; PAM sequence: TTT
  source 1..20: mol_type = other DNA
ctgaagggctaagtaggaaa

SEQ ID NO: 32139 - DNA, 20 bp, synthetic construct
  misc_feature 1..20: note = Description of Artificial Sequence: Synthetic oligonucleotide
  misc_feature 1..20: note = Target: FXN; (+) strand; PAM type: YTN; PAM sequence: TTC
  source 1..20: mol_type = other DNA
tgaagggctaagtaggaaac

SEQ ID NO: 32140 - DNA, 20 bp, synthetic construct
  misc_feature 1..20: note = Description of Artificial Sequence: Synthetic oligonucleotide
  misc_feature 1..20: note = Target: FXN; (+) strand; PAM type: YTN; PAM sequence: CTG
  source 1..20: mol_type = other DNA
aagggctaagtaggaaaccg

SEQ ID NO: 32141 - DNA, 20 bp, synthetic construct
  misc_feature 1..20: note = Description of Artificial Sequence: Synthetic oligonucleotide
  misc_feature 1..20: note = Target: FXN; (+) strand; PAM type: YTN; PAM sequence: CTA
  source 1..20: mol_type = other DNA
agtaggaaaccgggaaccag

SEQ ID NO: 32142 - DNA, 20 bp, synthetic construct
  misc_feature 1..20: note = Description of Artificial Sequence: Synthetic oligonucleotide
  misc_feature 1..20: note = Target: FXN; (+) strand; PAM type: YTN; PAM sequence: TTT
  source 1..20: mol_type = other DNA
tttttaagaaaagcaacata

SEQ ID NO: 32143 - DNA, 20 bp, synthetic construct
  misc_feature 1..20: note = Description of Artificial Sequence: Synthetic oligonucleotide
  misc_feature 1..20: note = Target: FXN; (+) strand; PAM type: YTN; PAM sequence: TTT
  source 1..20: mol_type = other DNA
ttttaagaaaagcaacatat

SEQ ID NO: 32144 - DNA, 20 bp, synthetic construct
  misc_feature 1..20: note = Description of Artificial Sequence: Synthetic oligonucleotide
  misc_feature 1..20: note = Target: FXN; (+) strand; PAM type: YTN; PAM sequence: TTT
  source 1..20: mol_type = other DNA
tttaagaaaagcaacatatt

SEQ ID NO: 32145 - DNA, 20 bp, synthetic construct
  misc_feature 1..20: note = Description of Artificial Sequence: Synthetic oligonucleotide
  misc_feature 1..20: note = Target: FXN; (+) strand; PAM type: YTN; PAM sequence: TTT
  source 1..20: mol_type = other DNA
ttaagaaaagcaacatattc

SEQ ID NO: 32146 - DNA, 20 bp, synthetic construct
  misc_feature 1..20: note = Description of Artificial Sequence: Synthetic oligonucleotide
  misc_feature 1..20: note = Target: FXN; (+) strand; PAM type: YTN; PAM sequence: TTT
  source 1..20: mol_type = other DNA
taagaaaagcaacatattcc

SEQ ID NO: 32147 - DNA, 20 bp, synthetic construct
  misc_feature 1..20: note = Description of Artificial Sequence: Synthetic oligonucleotide
  misc_feature 1..20: note = Target: FXN; (+) strand; PAM type: YTN; PAM sequence: TTT
  source 1..20: mol_type = other DNA
aagaaaagcaacatattccc

SEQ ID NO: 32148 - DNA, 20 bp, synthetic construct
  misc_feature 1..20: note = Description of Artificial Sequence: Synthetic oligonucleotide
  misc_feature 1..20: note = Target: FXN; (+) strand; PAM type: YTN; PAM sequence: TTA
  source 1..20: mol_type = other DNA
agaaaagcaacatattccct

SEQ ID NO: 32149 - DNA, 20 bp, synthetic construct
  misc_feature 1..20: note = Description of Artificial Sequence: Synthetic oligonucleotide
  misc_feature 1..20: note = Target: FXN; (+) strand; PAM type: YTN; PAM sequence: TTC
  source 1..20: mol_type = other DNA
cctttttcttagaaaaaatg

SEQ ID NO: 32150 - DNA, 20 bp, synthetic construct
  misc_feature 1..20: note = Description of Artificial Sequence: Synthetic oligonucleotide
  misc_feature 1..20: note = Target: FXN; (+) strand; PAM type: YTN; PAM sequence: CTT
  source 1..20: mol_type = other DNA
tttcttagaaaaaatggagc

SEQ ID NO: 32151 - DNA, 20 bp, synthetic construct
  misc_feature 1..20: note = Description of Artificial Sequence: Synthetic oligonucleotide
  misc_feature 1..20: note = Target: FXN; (+) strand; PAM type: YTN; PAM sequence: TTT
  source 1..20: mol_type = other DNA
ttcttagaaaaaatggagca

SEQ ID NO: 32152 - DNA, 20 bp, synthetic construct
  misc_feature 1..20: note = Description of Artificial Sequence: Synthetic oligonucleotide
  misc_feature 1..20: note = Target: FXN; (+) strand; PAM type: YTN; PAM sequence: TTT
  source 1..20: mol_type = other DNA
tcttagaaaaaatggagcac

SEQ ID NO: 32153 - DNA, 20 bp, synthetic construct
  misc_feature 1..20: note = Description of Artificial Sequence: Synthetic oligonucleotide
  misc_feature 1..20: note = Target: FXN; (+) strand; PAM type: YTN; PAM sequence: TTT
  source 1..20: mol_type = other DNA
cttagaaaaaatggagcact

SEQ ID NO: 32154 - DNA, 20 bp, synthetic construct
  misc_feature 1..20: note = Description of Artificial Sequence: Synthetic oligonucleotide
  misc_feature 1..20: note = Target: FXN; (+) strand; PAM type: YTN; PAM sequence: TTC
  source 1..20: mol_type = other DNA
ttagaaaaaatggagcactc

SEQ ID NO: 32155 - DNA, 20 bp, synthetic construct
  misc_feature 1..20: note = Description of Artificial Sequence: Synthetic oligonucleotide
  misc_feature 1..20: note = Target: FXN; (+) strand; PAM type: YTN; PAM sequence: CTT
  source 1..20: mol_type = other DNA
agaaaaaatggagcactcgg

SEQ ID NO: 32156 - DNA, 20 bp, synthetic construct
  misc_feature 1..20: note = Description of Artificial Sequence: Synthetic oligonucleotide
  misc_feature 1..20: note = Target: FXN; (+) strand; PAM type: YTN; PAM sequence: TTA
  source 1..20: mol_type = other DNA
gaaaaaatggagcactcggt

SEQ ID NO: 32157 - DNA, 20 bp, synthetic construct
  misc_feature 1..20: note = Description of Artificial Sequence: Synthetic oligonucleotide
  misc_feature 1..20: note = Target: FXN; (+) strand; PAM type: YTN; PAM sequence: CTC
  source 1..20: mol_type = other DNA
ggttacaggcactcgaatgt

SEQ ID NO: 32158 - DNA, 20 bp, synthetic construct
  misc_feature 1..20: note = Description of Artificial Sequence: Synthetic oligonucleotide
  misc_feature 1..20: note = Target: FXN; (+) strand; PAM type: YTN; PAM sequence: TTA
  source 1..20: mol_type = other DNA
caggcactcgaatgtagaag

SEQ ID NO: 32159 - DNA, 20 bp, synthetic construct
  misc_feature 1..20: note = Description of Artificial Sequence: Synthetic oligonucleotide
  misc_feature 1..20: note = Target: FXN; (+) strand; PAM type: YTN; PAM sequence: CTC
  source 1..20: mol_type = other DNA
gaatgtagaagtagcaatat

SEQ ID NO: 32160 - DNA, 20 bp, synthetic construct
  misc_feature 1..20: note = Description of Artificial Sequence: Synthetic oligonucleotide
  misc_feature 1..20: note = Target: FXN; (+) strand; PAM type: YTN; PAM sequence: TTA
  source 1..20: mol_type = other DNA
tgcattaatgggttataatt

SEQ ID NO: 32161 - DNA, 20 bp, synthetic construct
  misc_feature 1..20: note = Description of Artificial Sequence: Synthetic oligonucleotide
  misc_feature 1..20: note = Target: FXN; (+) strand; PAM type: YTN; PAM sequence: TTA
  source 1..20: mol_type = other DNA
atgggttataattcactgaa

SEQ ID NO: 32162 - DNA, 20 bp, synthetic construct
  misc_feature 1..20: note = Description of Artificial Sequence: Synthetic oligonucleotide
  misc_feature 1..20: note = Target: FXN; (+) strand; PAM type: YTN; PAM sequence: TTA
  source 1..20: mol_type = other DNA
taattcactgaaaaatagta

SEQ ID NO: 32163 - DNA, 20 bp, synthetic construct
  misc_feature 1..20: note = Description of Artificial Sequence: Synthetic oligonucleotide
  misc_feature 1..20: note = Target: FXN; (+) strand; PAM type: YTN; PAM sequence: TTC
  source 1..20: mol_type = other DNA
actgaaaaatagtaacgtac

SEQ ID NO: 32164 - DNA, 20 bp, synthetic construct
  misc_feature 1..20: note = Description of Artificial Sequence: Synthetic oligonucleotide
  misc_feature 1..20: note = Target: FXN; (+) strand; PAM type: YTN; PAM sequence: CTG
  source 1..20: mol_type = other DNA
aaaaatagtaacgtacttct

SEQ ID NO: 32165 - DNA, 20 bp, synthetic construct
  misc_feature 1..20: note = Description of Artificial Sequence: Synthetic oligonucleotide
  misc_feature 1..20: note = Target: FXN; (+) strand; PAM type: YTN; PAM sequence: CTT
  source 1..20: mol_type = other DNA
cttaactttggctttcagag

SEQ ID NO: 32166 - DNA, 20 bp, synthetic construct
  misc_feature 1..20: note = Description of Artificial Sequence: Synthetic oligonucleotide
  misc_feature 1..20: note = Target: FXN; (+) strand; PAM type: YTN; PAM sequence: TTC
  source 1..20: mol_type = other DNA
ttaactttggctttcagagt

SEQ ID NO: 32167 - DNA, 20 bp, synthetic construct
  misc_feature 1..20: note = Description of Artificial Sequence: Synthetic oligonucleotide
  misc_feature 1..20: note = Target: FXN; (+) strand; PAM type: YTN; PAM sequence: CTT
  source 1..20: mol_type = other DNA
aactttggctttcagagttc

SEQ ID NO: 32168 - DNA, 20 bp, synthetic construct
  misc_feature 1..20: note = Description of Artificial Sequence: Synthetic oligonucleotide
  misc_feature 1..20: note = Target: FXN; (+) strand; PAM type: YTN; PAM sequence: TTA
  source 1..20: mol_type = other DNA
actttggctttcagagttcg

SEQ ID NO: 32169 - DNA, 20 bp, synthetic construct
  misc_feature 1..20: note = Description of Artificial Sequence: Synthetic oligonucleotide
  misc_feature 1..20: note = Target: FXN; (+) strand; PAM type: YTN; PAM sequence: CTT
  source 1..20: mol_type = other DNA
tggctttcagagttcgaacc

SEQ ID NO: 32170 - DNA, 20 bp, synthetic construct
  misc_feature 1..20: note = Description of Artificial Sequence: Synthetic oligonucleotide
  misc_feature 1..20: note = Target: FXN; (+) strand; PAM type: YTN; PAM sequence: TTT
  source 1..20: mol_type = other DNA
ggctttcagagttcgaacca

SEQ ID NO: 32171 - DNA, 20 bp, synthetic construct
  misc_feature 1..20: note = Description of Artificial Sequence: Synthetic oligonucleotide
  misc_feature 1..20: note = Target: FXN; (+) strand; PAM type: YTN; PAM sequence: TTG
  source 1..20: mol_type = other DNA
gctttcagagttcgaaccaa

SEQ ID NO: 32172 - DNA, 20 bp, synthetic construct
  misc_feature 1..20: note = Description of Artificial Sequence: Synthetic oligonucleotide
  misc_feature 1..20: note = Target: FXN; (+) strand; PAM type: YTN; PAM sequence: CTT
  source 1..20: mol_type = other DNA
tcagagttcgaaccaacgtg

SEQ ID NO: 32173 - DNA, 20 bp, synthetic construct
  misc_feature 1..20: note = Description of Artificial Sequence: Synthetic oligonucleotide
  misc_feature 1..20: note = Target: FXN; (+) strand; PAM type: YTN; PAM sequence: TTT
  source 1..20: mol_type = other DNA
cagagttcgaaccaacgtgg

SEQ ID NO: 32174 - DNA, 20 bp, synthetic construct
  misc_feature 1..20: note = Description of Artificial Sequence: Synthetic oligonucleotide
  misc_feature 1..20: note = Target: FXN; (+) strand; PAM type: YTN; PAM sequence: TTC
  source 1..20: mol_type = other DNA
agagttcgaaccaacgtggc

SEQ ID NO: 32175 - DNA, 20 bp, synthetic construct
  misc_feature 1..20: note = Description of Artificial Sequence: Synthetic oligonucleotide
  misc_feature 1..20: note = Target: FXN; (+) strand; PAM type: YTN; PAM sequence: TTC
  source 1..20: mol_type = other DNA
gaaccaacgtggcctcaacc

SEQ ID NO: 32176 - DNA, 20 bp, synthetic construct
  misc_feature 1..20: note = Description of Artificial Sequence: Synthetic oligonucleotide
  misc_feature 1..20: note = Target: FXN; (+) strand; PAM type: YTN; PAM sequence: CTC
  source 1..20: mol_type = other DNA
aaccagatttggaatgtcaa

SEQ ID NO: 32177 - DNA, 20 bp, synthetic construct
  misc_feature 1..20: note = Description of Artificial Sequence: Synthetic oligonucleotide
  misc_feature 1..20: note = Target: FXN; (+) strand; PAM type: YTN; PAM sequence: TTT
  source 1..20: mol_type = other DNA
ggaatgtcaaaaagcagagt

SEQ ID NO: 32178 - DNA, 20 bp, synthetic construct
  misc_feature 1..20: note = Description of Artificial Sequence: Synthetic oligonucleotide
  misc_feature 1..20: note = Target: FXN; (+) strand; PAM type: YTN; PAM sequence: TTG
  source 1..20: mol_type = other DNA
gaatgtcaaaaagcagagtg

SEQ ID NO: 32179 - DNA, 20 bp, synthetic construct
  misc_feature 1..20: note = Description of Artificial Sequence: Synthetic oligonucleotide
  misc_feature 1..20: note = Target: FXN; (+) strand; PAM type: YTN; PAM sequence: CTA
  source 1..20: mol_type = other DNA
tttgatgaatttgaggaaat

SEQ ID NO: 32180 - DNA, 20 bp, synthetic construct
  misc_feature 1..20: note = Description of Artificial Sequence: Synthetic oligonucleotide
  misc_feature 1..20: note = Target: FXN; (+) strand; PAM type: YTN; PAM sequence: TTT
  source 1..20: mol_type = other DNA
gatgaatttgaggaaatctg

SEQ ID NO: 32181 - DNA, 20 bp, synthetic construct
  misc_feature 1..20: note = Description of Artificial Sequence: Synthetic oligonucleotide
  misc_feature 1..20: note = Target: FXN; (+) strand; PAM type: YTN; PAM sequence: TTG
  source 1..20: mol_type = other DNA
atgaatttgaggaaatctgg

SEQ ID NO: 32182 - DNA, 20 bp, synthetic construct
  misc_feature 1..20: note = Description of Artificial Sequence: Synthetic oligonucleotide
  misc_feature 1..20: note = Target: FXN; (+) strand; PAM type: YTN; PAM sequence: TTT
  source 1..20: mol_type = other DNA
gaggaaatctggaactttgg

SEQ ID NO: 32183 - DNA, 20 bp, synthetic construct
  misc_feature 1..20: note = Description of Artificial Sequence: Synthetic oligonucleotide
  misc_feature 1..20: note = Target: FXN; (+) strand; PAM type: YTN; PAM sequence: TTG
  source 1..20: mol_type = other DNA
aggaaatctggaactttggg

SEQ ID NO: 32184 - DNA, 20 bp, synthetic construct
  misc_feature 1..20: note = Description of Artificial Sequence: Synthetic oligonucleotide
  misc_feature 1..20: note = Target: FXN; (+) strand; PAM type: YTN; PAM sequence: CTG
  source 1..20: mol_type = other DNA
gaactttgggccacccaggg

SEQ ID NO: 32185 - DNA, 20 bp, synthetic construct
  misc_feature 1..20: note = Description of Artificial Sequence: Synthetic oligonucleotide
  misc_feature 1..20: note = Target: FXN; (+) strand; PAM type: YTN; PAM sequence: CTT
  source 1..20: mol_type = other DNA
tgggccacccagggtaagat

SEQ ID NO: 32186 - DNA, 20 bp, synthetic construct
  misc_feature 1..20: note = Description of Artificial Sequence: Synthetic oligonucleotide
  misc_feature 1..20: note = Target: FXN; (+) strand; PAM type: YTN; PAM sequence: TTT
  source 1..20: mol_type = other DNA
gggccacccagggtaagata

SEQ ID NO: 32187 - DNA, 20 bp, synthetic construct
  misc_feature 1..20: note = Description of Artificial Sequence: Synthetic oligonucleotide
  misc_feature 1..20: note = Target: FXN; (+) strand; PAM type: YTN; PAM sequence: TTG
  source 1..20: mol_type = other DNA
ggccacccagggtaagataa

SEQ ID NO: 32188 - DNA, 20 bp, synthetic construct
  misc_feature 1..20: note = Description of Artificial Sequence: Synthetic oligonucleotide
  misc_feature 1..20: note = Target: FXN; (+) strand; PAM type: YTN; PAM sequence: CTT
  source 1..20: mol_type = other DNA
ccacgtcataggtatcttcc

SEQ ID NO: 32189 - DNA, 20 bp, synthetic construct
  misc_feature 1..20: note = Description of Artificial Sequence: Synthetic oligonucleotide
  misc_feature 1..20: note = Target: FXN; (+) strand; PAM type: YTN; PAM sequence: TTC
  source 1..20: mol_type = other DNA
cacgtcataggtatcttcct

SEQ ID NO: 32190 - DNA, 20 bp, synthetic construct
  misc_feature 1..20: note = Description of Artificial Sequence: Synthetic oligonucleotide
  misc_feature 1..20: note = Target: FXN; (+) strand; PAM type: YTN; PAM sequence: CTT
  source 1..20: mol_type = other DNA
cctctctccttccctgcctc

SEQ ID NO: 32191 - DNA, 20 bp, synthetic construct
  misc_feature 1..20: note = Description of Artificial Sequence: Synthetic oligonucleotide
  misc_feature 1..20: note = Target: FXN; (+) strand; PAM type: YTN; PAM sequence: TTC
  source 1..20: mol_type = other DNA
ctctctccttccctgcctct

SEQ ID NO: 32192 - DNA, 20 bp, synthetic construct
  misc_feature 1..20: note = Description of Artificial Sequence: Synthetic oligonucleotide
  misc_feature 1..20: note = Target: FXN; (+) strand; PAM type: YTN; PAM sequence: CTC
  source 1..20: mol_type = other DNA
tctccttccctgcctctccc

SEQ ID NO: 32193 - DNA, 20 bp, synthetic construct
  misc_feature 1..20: note = Description of Artificial Sequence: Synthetic oligonucleotide
  misc_feature 1..20: note = Target: FXN; (+) strand; PAM type: YTN; PAM sequence: CTC
  source 1..20: mol_type = other DNA
tccttccctgcctctcccat

SEQ ID NO: 32194 - DNA, 20 bp, synthetic construct
  misc_feature 1..20: note = Description of Artificial Sequence: Synthetic oligonucleotide
  misc_feature 1..20: note = Target: FXN; (+) strand; PAM type: YTN; PAM sequence: CTC
  source 1..20: mol_type = other DNA
cttccctgcctctcccatta

SEQ ID NO: 32195 - DNA, 20 bp, synthetic construct
  misc_feature 1..20: note = Description of Artificial Sequence: Synthetic oligonucleotide
  misc_feature 1..20: note = Target: FXN; (+) strand; PAM type: YTN; PAM sequence: CTT
  source 1..20: mol_type = other DNA
ccctgcctctcccattagaa

SEQ ID NO: 32196 - DNA, 20 bp, synthetic construct
  misc_feature 1..20: note = Description of Artificial Sequence: Synthetic oligonucleotide
  misc_feature 1..20: note = Target: FXN; (+) strand; PAM type: YTN; PAM sequence: TTC
  source 1..20: mol_type = other DNA
cctgcctctcccattagaac

SEQ ID NO: 32197 - DNA, 20 bp, synthetic construct
  misc_feature 1..20: note = Description of Artificial Sequence: Synthetic oligonucleotide
  misc_feature 1..20: note = Target: FXN; (+) strand; PAM type: YTN; PAM sequence: CTG
  source 1..20: mol_type = other DNA
cctctcccattagaacctgg

SEQ ID NO: 32198 - DNA, 20 bp, synthetic construct
  misc_feature 1..20: note = Description of Artificial Sequence: Synthetic oligonucleotide
  misc_feature 1..20: note = Target: FXN; (+) strand; PAM type: YTN; PAM sequence: CTC
  source 1..20: mol_type = other DNA
tcccattagaacctggtttt

SEQ ID NO: 32199 - DNA, 20 bp, synthetic construct
  misc_feature 1..20: note = Description of Artificial Sequence: Synthetic oligonucleotide
  misc_feature 1..20: note = Target: FXN; (+) strand; PAM type: YTN; PAM sequence: CTC
  source 1..20: mol_type = other DNA
ccattagaacctggttttct

SEQ ID NO: 32200 - DNA, 20 bp, synthetic construct
  misc_feature 1..20: note = Description of Artificial Sequence: Synthetic oligonucleotide
  misc_feature 1..20: note = Target: FXN; (+) strand; PAM type: YTN; PAM sequence: TTA
  source 1..20: mol_type = other DNA
gaacctggttttcttcctga

SEQ ID NO: 32201 - DNA, 20 bp, synthetic construct
  misc_feature 1..20: note = Description of Artificial Sequence: Synthetic oligonucleotide
  misc_feature 1..20: note = Target: FXN; (+) strand; PAM type: YTN; PAM sequence: CTG
  source 1..20: mol_type = other DNA
gttttcttcctgagcagcaa

SEQ ID NO: 32202 - DNA, 20 bp, synthetic construct
  misc_feature 1..20: note = Description of Artificial Sequence: Synthetic oligonucleotide
  misc_feature 1..20: note = Target: FXN; (+) strand; PAM type: YTN; PAM sequence: TTT
  source 1..20: mol_type = other DNA
tcttcctgagcagcaacaat

SEQ ID NO: 32203 - DNA, 20 bp, synthetic construct
  misc_feature 1..20: note = Description of Artificial Sequence: Synthetic oligonucleotide
  misc_feature 1..20: note = Target: FXN; (+) strand; PAM type: YTN; PAM sequence: TTT
  source 1..20: mol_type = other DNA
cttcctgagcagcaacaatc

SEQ ID NO: 32204 - DNA, 20 bp, synthetic construct
  misc_feature 1..20: note = Description of Artificial Sequence: Synthetic oligonucleotide
  misc_feature 1..20: note = Target: FXN; (+) strand; PAM type: YTN; PAM sequence: TTC
  source 1..20: mol_type = other DNA
ttcctgagcagcaacaatct

SEQ ID NO: 32205 - DNA, 20 bp, synthetic construct
  misc_feature 1..20: note = Description of Artificial Sequence: Synthetic oligonucleotide
  misc_feature 1..20: note = Target: FXN; (+) strand; PAM type: YTN; PAM sequence: CTT
  source 1..20: mol_type = other DNA
cctgagcagcaacaatctta

SEQ ID NO: 32206 - DNA, 20 bp, synthetic construct
  misc_feature 1..20: note = Description of Artificial Sequence: Synthetic oligonucleotide
  misc_feature 1..20: note = Target: FXN; (+) strand; PAM type: YTN; PAM sequence: TTC
  source 1..20: mol_type = other DNA
ctgagcagcaacaatcttag

SEQ ID NO: 32207 - DNA, 20 bp, synthetic construct
  misc_feature 1..20: note = Description of Artificial Sequence: Synthetic oligonucleotide
  misc_feature 1..20: note = Target: FXN; (+) strand; PAM type: YTN; PAM sequence: CTG
  source 1..20: mol_type = other DNA
agcagcaacaatcttaggca

SEQ ID NO: 32208 - DNA, 20 bp, synthetic construct
  misc_feature 1..20: note = Description of Artificial Sequence: Synthetic oligonucleotide
  misc_feature 1..20: note = Target: FXN; (+) strand; PAM type: YTN; PAM sequence: CTT
  source 1..20: mol_type = other DNA
aggcatctttccatgtgact

SEQ ID NO: 32209 - DNA, 20 bp, synthetic construct
  misc_feature 1..20: note = Description of Artificial Sequence: Synthetic oligonucleotide
  misc_feature 1..20: note = Target: FXN; (+) strand; PAM type: YTN; PAM sequence: TTA
  source 1..20: mol_type = other DNA
ggcatctttccatgtgactg

SEQ ID NO: 32210 - DNA, 20 bp, synthetic construct
  misc_feature 1..20: note = Description of Artificial Sequence: Synthetic oligonucleotide
  misc_feature 1..20: note = Target: FXN; (+) strand; PAM type: YTN; PAM sequence: CTT
  source 1..20: mol_type = other DNA
tccatgtgactgagtatcca

SEQ ID NO: 32211 - DNA, 20 bp, synthetic construct
  misc_feature 1..20: note = Description of Artificial Sequence: Synthetic oligonucleotide
  misc_feature 1..20: note = Target: FXN; (+) strand; PAM type: YTN; PAM sequence: TTT
  source 1..20: mol_type = other DNA
ccatgtgactgagtatccac

SEQ ID NO: 32212 - DNA, 20 bp, synthetic construct
  misc_feature 1..20: note = Description of Artificial Sequence: Synthetic oligonucleotide
  misc_feature 1..20: note = Target: FXN; (+) strand; PAM type: YTN; PAM sequence: TTC
  source 1..20: mol_type = other DNA
catgtgactgagtatccacc

SEQ ID NO: 32213 - DNA, 20 bp, synthetic construct
  misc_feature 1..20: note = Description of Artificial Sequence: Synthetic oligonucleotide
  misc_feature 1..20: note = Target: FXN; (+) strand; PAM type: YTN; PAM sequence: CTG
  source 1..20: mol_type = other DNA
agtatccaccacattatttt

SEQ ID NO: 32214 - DNA, 20 bp, synthetic construct
  misc_feature 1..20: note = Description of Artificial Sequence: Synthetic oligonucleotide
  misc_feature 1..20: note = Target: FXN; (+) strand; PAM type: YTN; PAM sequence: TTA
  source 1..20: mol_type = other DNA
tttttaatgaaatagtatta

SEQ ID NO: 32215 - DNA, 20 bp, synthetic construct
  misc_feature 1..20: note = Description of Artificial Sequence: Synthetic oligonucleotide
  misc_feature 1..20: note = Target: FXN; (+) strand; PAM type: YTN; PAM sequence: TTT
  source 1..20: mol_type = other DNA
ttaatgaaatagtattagat

SEQ ID NO: 32216 - DNA, 20 bp, synthetic construct
  misc_feature 1..20: note = Description of Artificial Sequence: Synthetic oligonucleotide
  misc_feature 1..20: note = Target: FXN; (+) strand; PAM type: YTN; PAM sequence: TTT
  source 1..20: mol_type = other DNA
taatgaaatagtattagatt

SEQ ID NO: 32217 - DNA, 20 bp, synthetic construct
  misc_feature 1..20: note = Description of Artificial Sequence: Synthetic oligonucleotide
  misc_feature 1..20: note = Target: FXN; (+) strand; PAM type: YTN; PAM sequence: TTT
  source 1..20: mol_type = other DNA
aatgaaatagtattagattg

SEQ ID NO: 32218 - DNA, 20 bp, synthetic construct
  misc_feature 1..20: note = Description of Artificial Sequence: Synthetic oligonucleotide
  misc_feature 1..20: note = Target: FXN; (+) strand; PAM type: YTN; PAM sequence: TTA
  source 1..20: mol_type = other DNA
atgaaatagtattagattgc

SEQ ID NO: 32219 - DNA, 20 bp, synthetic construct
  misc_feature 1..20: note = Description of Artificial Sequence: Synthetic oligonucleotide
  misc_feature 1..20: note = Target: FXN; (+) strand; PAM type: YTN; PAM sequence: TTA
  source 1..20: mol_type = other DNA
gattgcatggatgtgacata

SEQ ID NO: 32220 - DNA, 20 bp, synthetic construct
  misc_feature 1..20: note = Description of Artificial Sequence: Synthetic oligonucleotide
  misc_feature 1..20: note = Target: FXN; (+) strand; PAM type: YTN; PAM sequence: TTG
  source 1..20: mol_type = other DNA
catggatgtgacataatcca

SEQ ID NO: 32221 - DNA, 20 bp, synthetic construct
  misc_feature 1..20: note = Description of Artificial Sequence: Synthetic oligonucleotide
  misc_feature 1..20: note = Target: FXN; (+) strand; PAM type: YTN; PAM sequence: TTT
  source 1..20: mol_type = other DNA
aacccatcccctactgttgg

SEQ ID NO: 32222 - DNA, 20 bp, synthetic construct
  misc_feature 1..20: note = Description of Artificial Sequence: Synthetic oligonucleotide
  misc_feature 1..20: note = Target: FXN; (+) strand; PAM type: YTN; PAM sequence: TTA
  source 1..20: mol_type = other DNA
acccatcccctactgttgga

SEQ ID NO: 32223 - DNA, 20 bp, synthetic construct
  misc_feature 1..20: note = Description of Artificial Sequence: Synthetic oligonucleotide
  misc_feature 1..20: note = Target: FXN; (+) strand; PAM type: YTN; PAM sequence: CTA
  source 1..20: mol_type = other DNA
ctgttggacattcaggttgt

SEQ ID NO: 32224 - DNA, 20 bp, synthetic construct
  misc_feature 1..20: note = Description of Artificial Sequence: Synthetic oligonucleotide
  misc_feature 1..20: note = Target: FXN; (+) strand; PAM type: YTN; PAM sequence: CTG
  source 1..20: mol_type = other DNA
ttggacattcaggttgtttc

SEQ ID NO: 32225 - DNA, 20 bp, synthetic construct
  misc_feature 1..20: note = Description of Artificial Sequence: Synthetic oligonucleotide
  misc_feature 1..20: note = Target: FXN; (+) strand; PAM type: YTN; PAM sequence: TTG
  source 1..20: mol_type = other DNA
gacattcaggttgtttccag

SEQ ID NO: 32226 - DNA, 20 bp, synthetic construct
  misc_feature 1..20: note = Description of Artificial Sequence: Synthetic oligonucleotide
  misc_feature 1..20: note = Target: FXN; (+) strand; PAM type: YTN; PAM sequence: TTC
  source 1..20: mol_type = other DNA
aggttgtttccagagtttca

SEQ ID NO: 32227 - DNA, 20 bp, synthetic construct
  misc_feature 1..20: note = Description of Artificial Sequence: Synthetic oligonucleotide
  misc_feature 1..20: note = Target: FXN; (+) strand; PAM type: YTN; PAM sequence: TTG
  source 1..20: mol_type = other DNA
tttccagagtttcaatatta

SEQ ID NO: 32228 - DNA, 20 bp, synthetic construct
  misc_feature 1..20: note = Description of Artificial Sequence: Synthetic oligonucleotide
  misc_feature 1..20: note = Target: FXN; (+) strand; PAM type: YTN; PAM sequence: TTT
  source 1..20: mol_type = other DNA
ccagagtttcaatattattt

SEQ ID NO: 32229 - DNA, 20 bp, synthetic construct
  misc_feature 1..20: note = Description of Artificial Sequence: Synthetic oligonucleotide
  misc_feature 1..20: note = Target: FXN; (+) strand; PAM type: YTN; PAM sequence: TTC
  source 1..20: mol_type = other DNA
cagagtttcaatattatttt

SEQ ID NO: 32230 - DNA, 20 bp, synthetic construct
  misc_feature 1..20: note = Description of Artificial Sequence: Synthetic oligonucleotide
  misc_feature 1..20: note = Target: FXN; (+) strand; PAM type: YTN; PAM sequence: TTT
  source 1..20: mol_type = other DNA
caatattattttatttaata

SEQ ID NO: 32231 - DNA, 20 bp, synthetic construct
  misc_feature 1..20: note = Description of Artificial Sequence: Synthetic oligonucleotide
  misc_feature 1..20: note = Target: FXN; (+) strand; PAM type: YTN; PAM sequence: TTC
  source 1..20: mol_type = other DNA
aatattattttatttaatac

SEQ ID NO: 32232 - DNA, 20 bp, synthetic construct
  misc_feature 1..20: note = Description of Artificial Sequence: Synthetic oligonucleotide
  misc_feature 1..20: note = Target: FXN; (+) strand; PAM type: YTN; PAM sequence: TTA
  source 1..20: mol_type = other DNA
ttttatttaataccctaata

SEQ ID NO: 32233 - DNA, 20 bp, synthetic construct
  misc_feature 1..20: note = Description of Artificial Sequence: Synthetic oligonucleotide
  misc_feature 1..20: note = Target: FXN; (+) strand; PAM type: YTN; PAM sequence: TTT
  source 1..20: mol_type = other DNA
tatttaataccctaatagtt

SEQ ID NO: 32234 - DNA, 20 bp, synthetic construct
  misc_feature 1..20: note = Description of Artificial Sequence: Synthetic oligonucleotide
  misc_feature 1..20: note = Target: FXN; (+) strand; PAM type: YTN; PAM sequence: TTT
  source 1..20: mol_type = other DNA
atttaataccctaatagtta

SEQ ID NO: 32235 - DNA, 20 bp, synthetic construct
  misc_feature 1..20: note = Description of Artificial Sequence: Synthetic oligonucleotide
  misc_feature 1..20: note = Target: FXN; (+) strand; PAM type: YTN; PAM sequence: TTA
  source 1..20: mol_type = other DNA
tttaataccctaatagttag

SEQ ID NO: 32236 - DNA, 20 bp, synthetic construct
  misc_feature 1..20: note = Description of Artificial Sequence: Synthetic oligonucleotide
  misc_feature 1..20: note = Target: FXN; (+) strand; PAM type: YTN; PAM sequence: TTT
  source 1..20: mol_type = other DNA
aataccctaatagttagagc

SEQ ID NO: 32237 - DNA, 20 bp, synthetic construct
  misc_feature 1..20: note = Description of Artificial Sequence: Synthetic oligonucleotide
  misc_feature 1..20: note = Target: FXN; (+) strand; PAM type: YTN; PAM sequence: TTA
  source 1..20: mol_type = other DNA
ataccctaatagttagagca

SEQ ID NO: 32238 - DNA, 20 bp, synthetic construct
  misc_feature 1..20: note = Description of Artificial Sequence: Synthetic oligonucleotide
  misc_feature 1..20: note = Target: FXN; (+) strand; PAM type: YTN; PAM sequence: CTA
  source 1..20: mol_type = other DNA
atagttagagcaggccatgc

SEQ ID NO: 32239 - DNA, 20 bp, synthetic construct
  misc_feature 1..20: note = Description of Artificial Sequence: Synthetic oligonucleotide
  misc_feature 1..20: note = Target: FXN; (+) strand; PAM type: YTN; PAM sequence: TTA
  source 1..20: mol_type = other DNA
gagcaggccatgctgctatc

SEQ ID NO: 32240 - DNA, 20 bp, synthetic construct
  misc_feature 1..20: note = Description of Artificial Sequence: Synthetic oligonucleotide
  misc_feature 1..20: note = Target: FXN; (+) strand; PAM type: YTN; PAM sequence: CTG
  source 1..20: mol_type = other DNA
ctatcacaaatagacccaaa

SEQ ID NO: 32241 - DNA, 20 bp, synthetic construct
  misc_feature 1..20: note = Description of Artificial Sequence: Synthetic oligonucleotide
  misc_feature 1..20: note = Target: FXN; (+) strand; PAM type: YTN; PAM sequence: CTA
  source 1..20: mol_type = other DNA
tcacaaatagacccaaatat

SEQ ID NO: 32242 - DNA, 20 bp, synthetic construct
  misc_feature 1..20: note = Description of Artificial Sequence: Synthetic oligonucleotide
  misc_feature 1..20: note = Target: FXN; (+) strand; PAM type: YTN; PAM sequence: TTT
  source 1..20: mol_type = other DNA
aatagctcaaaccaataacg

SEQ ID NO: 32243 - DNA, 20 bp, synthetic construct
  misc_feature 1..20: note = Description of Artificial Sequence: Synthetic oligonucleotide
  misc_feature 1..20: note = Target: FXN; (+) strand; PAM type: YTN; PAM sequence: TTA
  source 1..20: mol_type = other DNA
atagctcaaaccaataacgt

SEQ ID NO: 32244 - DNA, 20 bp, synthetic construct
  misc_feature 1..20: note = Description of Artificial Sequence: Synthetic oligonucleotide
  misc_feature 1..20: note = Target: FXN; (+) strand; PAM type: YTN; PAM sequence: CTC
  source 1..20: mol_type = other DNA
aaaccaataacgtttgtgtc

SEQ ID NO: 32245 - DNA, 20 bp, synthetic construct
  misc_feature 1..20: note = Description of Artificial Sequence: Synthetic oligonucleotide
  misc_feature 1..20: note = Target: FXN; (+) strand; PAM type: YTN; PAM sequence: TTT
  source 1..20: mol_type = other DNA
gtgtcctcctctctgggcag

SEQ ID NO: 32246 - DNA, 20 bp, synthetic construct
  misc_feature 1..20: note = Description of Artificial Sequence: Synthetic oligonucleotide
  misc_feature 1..20: note = Target: FXN; (+) strand; PAM type: YTN; PAM sequence: TTG
  source 1..20: mol_type = other DNA
tgtcctcctctctgggcagt

SEQ ID NO: 32247 - DNA, 20 bp, synthetic construct
  misc_feature 1..20: note = Description of Artificial Sequence: Synthetic oligonucleotide
  misc_feature 1..20: note = Target: FXN; (+) strand; PAM type: YTN; PAM sequence: CTC
  source 1..20: mol_type = other DNA
ctctctgggcagtacagggt

SEQ ID NO: 32248 - DNA, 20 bp, synthetic construct
  misc_feature 1..20: note = Description of Artificial Sequence: Synthetic oligonucleotide
  misc_feature 1..20: note = Target: FXN; (+) strand; PAM type: YTN; PAM sequence: CTC
  source 1..20: mol_type = other DNA
tctgggcagtacagggttgg

SEQ ID NO: 32249 - DNA, 20 bp, synthetic construct
  misc_feature 1..20: note = Description of Artificial Sequence: Synthetic oligonucleotide
  misc_feature 1..20: note = Target: FXN; (+) strand; PAM type: YTN; PAM sequence: CTC
  source 1..20: mol_type = other DNA
tgggcagtacagggttggca

SEQ ID NO: 32250 - DNA, 20 bp, synthetic construct
  misc_feature 1..20: note = Description of Artificial Sequence: Synthetic oligonucleotide
  misc_feature 1..20: note = Target: FXN; (+) strand; PAM type: YTN; PAM sequence: CTG
  source 1..20: mol_type = other DNA
ggcagtacagggttggcata

SEQ ID NO: 32251 - DNA, 20 bp, synthetic construct
  misc_feature 1..20: note = Description of Artificial Sequence: Synthetic oligonucleotide
  misc_feature 1..20: note = Target: FXN; (+) strand; PAM type: YTN; PAM sequence: TTG
  source 1..20: mol_type = other DNA
gcatacctcctgaagtgaat

SEQ ID NO: 32252 - DNA, 20 bp, synthetic construct
  misc_feature 1..20: note = Description of Artificial Sequence: Synthetic oligonucleotide
  misc_feature 1..20: note = Target: FXN; (+) strand; PAM type: YTN; PAM sequence: CTC
  source 1..20: mol_type = other DNA
ctgaagtgaattaggaacta

SEQ ID NO: 32253 - DNA, 20 bp, synthetic construct
  misc_feature 1..20: note = Description of Artificial Sequence: Synthetic oligonucleotide
  misc_feature 1..20: note = Target: FXN; (+) strand; PAM type: YTN; PAM sequence: CTG
  source 1..20: mol_type = other DNA
aagtgaattaggaactacac

SEQ ID NO: 32254 - DNA, 20 bp, synthetic construct
  misc_feature 1..20: note = Description of Artificial Sequence: Synthetic oligonucleotide
  misc_feature 1..20: note = Target: FXN; (+) strand; PAM type: YTN; PAM sequence: TTA
  source 1..20: mol_type = other DNA
ggaactacactcattccagc

SEQ ID NO: 32255 - DNA, 20 bp, synthetic construct
  misc_feature 1..20: note = Description of Artificial Sequence: Synthetic oligonucleotide
  misc_feature 1..20: note = Target: FXN; (+) strand; PAM type: YTN; PAM sequence: CTA
  source 1..20: mol_type = other DNA
cactcattccagcttccagt

SEQ ID NO: 32256 - DNA, 20 bp, synthetic construct
  misc_feature 1..20: note = Description of Artificial Sequence: Synthetic oligonucleotide
  misc_feature 1..20: note = Target: FXN; (+) strand; PAM type: YTN; PAM sequence: CTC
  source 1..20: mol_type = other DNA
attccagcttccagtttggt

SEQ ID NO: 32257 - DNA, 20 bp, synthetic construct
  misc_feature 1..20: note = Description of Artificial Sequence: Synthetic oligonucleotide
  misc_feature 1..20: note = Target: FXN; (+) strand; PAM type: YTN; PAM sequence: TTC
  source 1..20: mol_type = other DNA
cagcttccagtttggtcttt

SEQ ID NO: 32258 - DNA, 20 bp, synthetic construct
  misc_feature 1..20: note = Description of Artificial Sequence: Synthetic oligonucleotide
  misc_feature 1..20: note = Target: FXN; (+) strand; PAM type: YTN; PAM sequence: CTT
  source 1..20: mol_type = other DNA
ccagtttggtctttatctgt

SEQ ID NO: 32259 - DNA, 20 bp, synthetic construct
  misc_feature 1..20: note = Description of Artificial Sequence: Synthetic oligonucleotide
  misc_feature 1..20: note = Target: FXN; (+) strand; PAM type: YTN; PAM sequence: TTC
  source 1..20: mol_type = other DNA
cagtttggtctttatctgtc

SEQ ID NO: 32260 - DNA, 20 bp, synthetic construct
  misc_feature 1..20: note = Description of Artificial Sequence: Synthetic oligonucleotide
  misc_feature 1..20: note = Target: FXN; (+) strand; PAM type: YTN; PAM sequence: TTT
  source 1..20: mol_type = other DNA
ggtctttatctgtcagtgcc

SEQ ID NO: 32261 - DNA, 20 bp, synthetic construct
  misc_feature 1..20: note = Description of Artificial Sequence: Synthetic oligonucleotide
  misc_feature 1..20: note = Target: FXN; (+) strand; PAM type: YTN; PAM sequence: TTG
  source 1..20: mol_type = other DNA
gtctttatctgtcagtgcct

SEQ ID NO: 32262 - DNA, 20 bp, synthetic construct
  misc_feature 1..20: note = Description of Artificial Sequence: Synthetic oligonucleotide
  misc_feature 1..20: note = Target: FXN; (+) strand; PAM type: YTN; PAM sequence: CTT
  source 1..20: mol_type = other DNA
tatctgtcagtgccttactg

SEQ ID NO: 32263 - DNA, 20 bp, synthetic construct
  misc_feature 1..20: note = Description of Artificial Sequence: Synthetic oligonucleotide
  misc_feature 1..20: note = Target: FXN; (+) strand; PAM type: YTN; PAM sequence: TTT
  source 1..20: mol_type = other DNA
atctgtcagtgccttactgt

SEQ ID NO: 32264 - DNA, 20 bp, synthetic construct
  misc_feature 1..20: note = Description of Artificial Sequence: Synthetic oligonucleotide
  misc_feature 1..20: note = Target: FXN; (+) strand; PAM type: YTN; PAM sequence: TTA
  source 1..20: mol_type = other DNA
tctgtcagtgccttactgtc

SEQ ID NO: 32265 - DNA, 20 bp, synthetic construct
  misc_feature 1..20: note = Description of Artificial Sequence: Synthetic oligonucleotide
  misc_feature 1..20: note = Target: FXN; (+) strand; PAM type: YTN; PAM sequence: CTG
  source 1..20: mol_type = other DNA
tcagtgccttactgtcctct

SEQ ID NO: 32266 - DNA, 20 bp, synthetic construct
  misc_feature 1..20: note = Description of Artificial Sequence: Synthetic oligonucleotide
  misc_feature 1..20: note = Target: FXN; (+) strand; PAM type: YTN; PAM sequence: CTT
  source 1..20: mol_type = other DNA
actgtcctctgcattgttga

SEQ ID NO: 32267 - DNA, 20 bp, synthetic construct
  misc_feature 1..20: note = Description of Artificial Sequence: Synthetic oligonucleotide
  misc_feature 1..20: note = Target: FXN; (+) strand; PAM type: YTN; PAM sequence: TTA
  source 1..20: mol_type = other DNA
ctgtcctctgcattgttgag

SEQ ID NO: 32268 - DNA, 20 bp, synthetic construct
  misc_feature 1..20: note = Description of Artificial Sequence: Synthetic oligonucleotide
  misc_feature 1..20: note = Target: FXN; (+) strand; PAM type: YTN; PAM sequence: CTG
  source 1..20: mol_type = other DNA
tcctctgcattgttgagtct

SEQ ID NO: 32269 - DNA, 20 bp, synthetic construct
  misc_feature 1..20: note = Description of Artificial Sequence: Synthetic oligonucleotide
  misc_feature 1..20: note = Target: FXN; (+) strand; PAM type: YTN; PAM sequence: CTC
  source 1..20: mol_type = other DNA
tgcattgttgagtctcagtc

SEQ ID NO: 32270 - DNA, 20 bp, synthetic construct
  misc_feature 1..20: note = Description of Artificial Sequence: Synthetic oligonucleotide
  misc_feature 1..20: note = Target: FXN; (+) strand; PAM type: YTN; PAM sequence: CTG
  source 1..20: mol_type = other DNA
cattgttgagtctcagtcac

SEQ ID NO: 32271 - DNA, 20 bp, synthetic construct
  misc_feature 1..20: note = Description of Artificial Sequence: Synthetic oligonucleotide
  misc_feature 1..20: note = Target: FXN; (+) strand; PAM type: YTN; PAM sequence: TTG
  source 1..20: mol_type = other DNA
ttgagtctcagtcaccttgt

SEQ ID NO: 32272 - DNA, 20 bp, synthetic construct
  misc_feature 1..20: note = Description of Artificial Sequence: Synthetic oligonucleotide
  misc_feature 1..20: note = Target: FXN; (+) strand; PAM type: YTN; PAM sequence: TTG
  source 1..20: mol_type = other DNA
agtctcagtcaccttgtcca

SEQ ID NO: 32273 - DNA, 20 bp, synthetic construct
  misc_feature 1..20: note = Description of Artificial Sequence: Synthetic oligonucleotide
  misc_feature 1..20: note = Target: FXN; (+) strand; PAM type: YTN; PAM sequence: CTC
  source 1..20: mol_type = other DNA
agtcaccttgtccaagttcc

SEQ ID NO: 32274 - DNA, 20 bp, synthetic construct
  misc_feature 1..20: note = Description of Artificial Sequence: Synthetic oligonucleotide
  misc_feature 1..20: note = Target: FXN; (+) strand; PAM type: YTN; PAM sequence: CTT
  source 1..20: mol_type = other DNA
gtccaagttccattggccag

SEQ ID NO: 32275 - DNA, 20 bp, synthetic construct
  misc_feature 1..20: note = Description of Artificial Sequence: Synthetic oligonucleotide
  misc_feature 1..20: note = Target: FXN; (+) strand; PAM type: YTN; PAM sequence: TTG
  source 1..20: mol_type = other DNA
tccaagttccattggccaga

SEQ ID NO: 32276 - DNA, 20 bp, synthetic construct
  misc_feature 1..20: note = Description of Artificial Sequence: Synthetic oligonucleotide
  misc_feature 1..20: note = Target: FXN; (+) strand; PAM type: YTN; PAM sequence: TTC
  source 1..20: mol_type = other DNA
cattggccagaaagggctag

SEQ ID NO: 32277 - DNA, 20 bp, synthetic construct
  misc_feature 1..20: note = Description of Artificial Sequence: Synthetic oligonucleotide
  misc_feature 1..20: note = Target: FXN; (+) strand; PAM type: YTN; PAM sequence: TTG
  source 1..20: mol_type = other DNA
gccagaaagggctagaagca

SEQ ID NO: 32278 - DNA, 20 bp, synthetic construct
  misc_feature 1..20: note = Description of Artificial Sequence: Synthetic oligonucleotide
  misc_feature 1..20: note = Target: FXN; (+) strand; PAM type: YTN; PAM sequence: CTA
  source 1..20: mol_type = other DNA
gaagcacagaagggctggaa

SEQ ID NO: 32279 - DNA, 20 bp, synthetic construct
  misc_feature 1..20: note = Description of Artificial Sequence: Synthetic oligonucleotide
  misc_feature 1..20: note = Target: FXN; (+) strand; PAM type: YTN; PAM sequence: CTG
  source 1..20: mol_type = other DNA
gaagtggcatttgttcctca

SEQ ID NO: 32280 - DNA, 20 bp, synthetic construct
  misc_feature 1..20: note = Description of Artificial Sequence: Synthetic oligonucleotide
  misc_feature 1..20: note = Target: FXN; (+) strand; PAM type: YTN; PAM sequence: TTT
  source 1..20: mol_type = other DNA
gttcctcactcacattctgg

SEQ ID NO: 32281 - DNA, 20 bp, synthetic construct
  misc_feature 1..20: note = Description of Artificial Sequence: Synthetic oligonucleotide
  misc_feature 1..20: note = Target: FXN; (+) strand; PAM type: YTN; PAM sequence: TTG
  source 1..20: mol_type = other DNA
ttcctcactcacattctggt

SEQ ID NO: 32282 - DNA, 20 bp, synthetic construct
  misc_feature 1..20: note = Description of Artificial Sequence: Synthetic oligonucleotide
  misc_feature 1..20: note = Target: FXN; (+) strand; PAM type: YTN; PAM sequence: TTC
  source 1..20: mol_type = other DNA
ctcactcacattctggtggg

SEQ ID NO: 32283 - DNA, 20 bp, synthetic construct
  misc_feature 1..20: note = Description of Artificial Sequence: Synthetic oligonucleotide
  misc_feature 1..20: note = Target: FXN; (+) strand; PAM type: YTN; PAM sequence: CTC
  source 1..20: mol_type = other DNA
actcacattctggtgggaag

SEQ ID NO: 32284 - DNA, 20 bp, synthetic construct
  misc_feature 1..20: note = Description of Artificial Sequence: Synthetic oligonucleotide
  misc_feature 1..20: note = Target: FXN; (+) strand; PAM type: YTN; PAM sequence: CTC
  source 1..20: mol_type = other DNA
acattctggtgggaagaact

SEQ ID NO: 32285 - DNA, 20 bp, synthetic construct
  misc_feature 1..20: note = Description of Artificial Sequence: Synthetic oligonucleotide
  misc_feature 1..20: note = Target: FXN; (+) strand; PAM type: YTN; PAM sequence: TTC
  source 1..20: mol_type = other DNA
tggtgggaagaacttagtgg

SEQ ID NO: 32286 - DNA, 20 bp, synthetic construct
  misc_feature 1..20: note = Description of Artificial Sequence: Synthetic oligonucleotide
  misc_feature 1..20: note = Target: FXN; (+) strand; PAM type: YTN; PAM sequence: CTG
  source 1..20: mol_type = other DNA
gtgggaagaacttagtggtg

SEQ ID NO: 32287 - DNA, 20 bp, synthetic construct
  misc_feature 1..20: note = Description of Artificial Sequence: Synthetic oligonucleotide
  misc_feature 1..20: note = Target: FXN; (+) strand; PAM type: YTN; PAM sequence: CTT
  source 1..20: mol_type = other DNA
agtggtgtggccttagctga

SEQ ID NO: 32288 - DNA, 20 bp, synthetic construct
  misc_feature 1..20: note = Description of Artificial Sequence: Synthetic oligonucleotide
  misc_feature 1..20: note = Target: FXN; (+) strand; PAM type: YTN; PAM sequence: TTA
  source 1..20: mol_type = other DNA
gtggtgtggccttagctgac

SEQ ID NO: 32289 - DNA, 20 bp, synthetic construct
  misc_feature 1..20: note = Description of Artificial Sequence: Synthetic oligonucleotide
  misc_feature 1..20: note = Target: FXN; (+) strand; PAM type: YTN; PAM sequence: CTT
  source 1..20: mol_type = other DNA
agctgactgtaagggaggct

SEQ ID NO: 32290 - DNA, 20 bp, synthetic construct
  misc_feature 1..20: note = Description of Artificial Sequence: Synthetic oligonucleotide
  misc_feature 1..20: note = Target: FXN; (+) strand; PAM type: YTN; PAM sequence: TTA
  source 1..20: mol_type = other DNA
gctgactgtaagggaggctg
